United States Patent Application Publication US 2006/0150283 A1 - sequence listing, part 18

SEQ ID NO: 70199 - protein, 1290 aa, Arabidopsis thaliana
  peptide (1)..(1290): Ceres Seq. ID no. 2174610
MKQGKTDKDIHSLRQEIEILRKLKHENIIEMLDSFENAREFCVVTEFAQGELFEILEDDKCLPEEQVQAIAKQLVKALDYLHSNRIIHRDMKPQNILIGAGSVVKLCDFGFARAMSTNTVVLRSIKGTPLYMAPELVKEQPYDRTVDLWSLGVILYELYVGQPPFYTNSVYALIRHIVKDPVKYPDEMSTYFESFLKGLLNKEPHSRLTWPALREHPFVKETQEEVEAREIHTAVVDNKAAWMLKGNGGQQRNVLNVTEKCDSVTLVEDMSATKGLADVQSDMKSAVKVNSPPTEDFVGFPTQEEIKSSGNPTLDKLENTSRTVKGAQVIGENDKALDLVLLSLERFSKSPDSKRDKDVACSVQSLRIISNLVATRAIVSVGLIEKITCALLDFTDALVGMKSPEFNNIIPKSLSVTKNLVGHVEGNNIHSSYIRHWTKVVEIFIQVVRWEEEGTGRIIYEACSCITTMLSRVAQDLKSSTPDSVSKQILEHANMSRIVDHLCLCLASSGSSLTSGSSQMLAAACEACRAIWILIDTSETFFKNDDVNILPLDALQNRLSQHDIGNSEWGPLSEKLVDTVTRAYLRSKHVQVAVGHCLHQRVEAPLVSAIQLLSRCCLHNGILPSMLCGLPSSLPITTVVSGGEDGTVISEIFSILSYATLSSKDQQTGEKDNFEGRLNNLVFHSCLMLATVAQCLKLTGRNSVLLMLTTSPKKHQHRLSAIANHIASDDKIEASLQNHSASAMLALASILALEKGSSAGSSVSELVVSLIPRATKLCYHLRPMPSNEGEVISHSANYAKWHGLLDGCIGLLESRLKWGGPLAVQQLIASGTPLLLINLLAGKLSNASPEDIKKTSNRIGLSPIGVVWTISSICHCLSGGTTFRQVLVKIETMKLITCLLSDAHIKLVKSWGGPGGGKDGVRETINVIIDLLAFPFVALQSQPGSLSATASVNSGFILNIGSPGVRVCMEDRDLLKAIEEDMDKYIIVLLEVGVPSLILRCLDHLELKDLVRPVAFLAKMVGRPRLAVDLVSKGLLDPNRMKKLLNQSSPREVILDILMIISDLSRMDKAFYKYIGEASVLQPLKEYLTHVDPNIRAKACSALGNMCRHNGYFYSALAEHQIIGLLIDRCADPDKRTQKFACFAIGNAAYHNDTLYEELRRSITQLANVLTTAEEDKTKANAAGALSNLVRNSNKLCEDIVSKGALQTLLRLVADCSTLALNPSKKETASESPLKIALFSLAKMCSNHQICRQFVKSSELFPVIARLKQSPEANIAHYASVIVAKVSGES

SEQ ID NO: 70200 - DNA, 402 bp, Arabidopsis thaliana
  misc_feature (1)..(402): Ceres Seq. ID no. 2176633
  misc_feature (1)..(402): Ortholog of  Ceres SEQ ID NO 12610457 as cited in SEQ ID NO 56115
atgggtatttctcattacccgacagcgtctgaaggagtgatgccaatgctagtaatgaacacagttgtttcagtgtctctagtaaagaacatggtaagatctgttgtcaacatggtgagctctgagaccaatgaggcaaggaacaaagaggacgaccaagatcatgaggattcaaaaagaagaagaagaatctcaatcacacactttgaatctctgtgtgagaacagaggaagcaggaacgagagagaagctatggactgttgtgtgtgtctttgtgggtttaaagaggaggaagaggtgagtgagttagtgtcctgcaagcattactttcactcagcttgtttggataaatggtttggtaataaccacacaacttgtcctctctgcagatccatcctttag

SEQ ID NO: 70201 - protein, 133 aa, Arabidopsis thaliana
  peptide (1)..(133): Ceres Seq. ID no. 2176634
MGISHYPTASEGVMPMLVMNTVVSVSLVKNMVRSVVNMVSSETNEARNKEDDQDHEDSKRRRRISITHFESLCENRGSRNEREAMDCCVCLCGFKEEEEVSELVSCKHYFHSACLDKWFGNNHTTCPLCRSIL

SEQ ID NO: 70202 - protein, 120 aa, Arabidopsis thaliana
  peptide (1)..(120): Ceres Seq. ID no. 2176635
MPMLVMNTVVSVSLVKNMVRSVVNMVSSETNEARNKEDDQDHEDSKRRRRISITHFESLCENRGSRNEREAMDCCVCLCGFKEEEEVSELVSCKHYFHSACLDKWFGNNHTTCPLCRSIL

SEQ ID NO: 70203 - protein, 118 aa, Arabidopsis thaliana
  peptide (1)..(118): Ceres Seq. ID no. 2176636
MLVMNTVVSVSLVKNMVRSVVNMVSSETNEARNKEDDQDHEDSKRRRRISITHFESLCENRGSRNEREAMDCCVCLCGFKEEEEVSELVSCKHYFHSACLDKWFGNNHTTCPLCRSIL

SEQ ID NO: 70204 - DNA, 2514 bp, Arabidopsis thaliana
  misc_feature (1)..(2514): Ceres Seq. ID no. 2178541
  misc_feature (1)..(2514): Ortholog of  Ceres SEQ ID NO 15224874 as cited in SEQ ID NO 55015
atggaaggttcttcaaattctaactctaggggattcaatacctctggtgtttcagataggaacactgagttcttacctgttgagagactcactactcgttccaagccttcctctcatgttgatgagtatgtcagaagcttgtttggtagtactagcacacacaagtctggtgaagatgattctttagggattgatccttttgttagatccttggaatggggtgatgttagtttgagacagtggctggataaacctgaacgatctgttgatgttttcgagtgcttgcacgttttcagacaaattgttgagattgtgaatgcggctcactctcaaggcattgttgttcataatgtcaggccatcatgttttgtcatgtcttcgtttaaccatgtttcgttcattgaatctgcttcttgttcggactctggctctgattccttggaggatggtccaattagccagaaggaaatcggtagctcgagaagagaggaagctgtatcgaaagctattgcaatagaagagaaaggagtctacaataagttgttggagagaaaaatcgagaaactagaggaagaaaaaacccaaccttttccgatgaaacatatattagcaatggagacaagttggtacacaagccctgaagaggattttggttcttcaagtacttgtgcttcagatgtttaccgccttggcgttcttcttttcgagctattttgccctgtaccttcaagagaagagaagtctagaactatgtctagtcttagacatcgcgttcttccgcctcagatattgctcaaatgtccaaaagaagcttctttctgcttgtggttactgcatcctgagccaacttgtcgaccatcaatgagtgacttgctgcaaagcgagtttataactgaacctagagataatttggaagaacgtgaagcagcaatcgagcttcgggacagaatcgaggaacaggagtcgttactcgagttcttgttactgattcaacagaggaagcaagaatctgcgtatagattgcaggatactgtttcacttctttcttctgacattgagcaagttgtaaagagacagttaattttgaagaaaaggggaagctcactctctgatttcagtaaagatgatcatcaatatacctctggtcagccattgatgagtttccaggcaaacgaggagccatcagcattcttggcctcaagaaaacgggttagacaagggattctggcattggaaaacggtgttgaagttgatgaagagagtcaaggaagcacacttcttgaaagctcccggttgatgagaaacttcaagaaactagaatcggtctactttctgacaaggcgcaggcaaatgaaggctgctgcttcagggaaatcattaactagacattcgccgttaagtagtgaaaatggaagaggttctatgattgtctcagagaaaagttcagtaagcaacccggtggcacccaaagctttcttcaataatgactcgagacaaggggggtggatagatcctttccttgagggtttgtgcagatatttatcattcagtcagctaagagtgaaagctgatttgaaacaaggagatttgttgaactcttctaacctcgtttgcgctcttgcgtttgaccgagaaggagaattattcgccactgcgggagtcaacaagaaaatcaagatattcgaatgtaactccatagtaaacgataaccgggatattcactatccggtggtggaattggctggtcggtcaaagctaagtagtttatgttggaacagctacataaagagccaaattgcatcaagtaactttgatggtgttgttcagatatgggatgttgcaagaagccagttggttacagagatgaaggagcacaagaagcgagtatggtccatcgatatttcatcagcagacccgactttgctggctagcggaagcgatgatggaaccggagttagcattgggaccatcaagacaaaggccaatgtatgctgtgtccagtttccatcagactccggacggtctctagcatttggttctgcagatcataaagtgtattactacgatcttcgaaaccccaagattcctctgtgcacaatgattggtcatagcaagacagtgagttatgtcaagtttgtagattcatccactcttgtgtcctcttctactgataacacactgaagctttgggacttgtcgatgtctgcttctgggattaatgaatcccctcttcactcattcactggacacactaatttaaagaactttgttggcttatcggtctctgatgggtatatagcaacaggctcagagactaacgaggttttcgtgtaccacaaggcattcccaatgccagtgatgtcgtacatgttcaacaacactgactctatgtctggtctcgaagtggacgatgcatcacagttcatatcttcaatctgctggcgaggacagtcgtctacgttagtcgctgctaactccaatggcaacataaaaattctggagatgatgacttga

SEQ ID NO: 70205 - protein, 837 aa, Arabidopsis thaliana
  peptide (1)..(837): Ceres Seq. ID no. 2178542
MEGSSNSNSRGFNTSGVSDRNTEFLPVERLTTRSKPSSHVDEYVRSLFGSTSTHKSGEDDSLGIDPFVRSLEWGDVSLRQWLDKPERSVDVFECLHVFRQIVEIVNAAHSQGIVVHNVRPSCFVMSSFNHVSFIESASCSDSGSDSLEDGPISQKEIGSSRREEAVSKAIAIEEKGVYNKLLERKIEKLEEEKTQPFPMKHILAMETSWYTSPEEDFGSSSTCASDVYRLGVLLFELFCPVPSREEKSRTMSSLRHRVLPPQILLKCPKEASFCLWLLHPEPTCRPSMSDLLQSEFITEPRDNLEEREAAIELRDRIEEQESLLEFLLLIQQRKQESAYRLQDTVSLLSSDIEQVVKRQLILKKRGSSLSDFSKDDHQYTSGQPLMSFQANEEPSAFLASRKRVRQGILALENGVEVDEESQGSTLLESSRLMRNFKKLESVYFLTRRRQMKAAASGKSLTRHSPLSSENGRGSMIVSEKSSVSNPVAPKAFFNNDSRQGGWIDPFLEGLCRYLSFSQLRVKADLKQGDLLNSSNLVCALAFDREGELFATAGVNKKIKIFECNSIVNDNRDIHYPVVELAGRSKLSSLCWNSYIKSQIASSNFDGVVQIWDVARSQLVTEMKEHKKRVWSIDISSADPTLLASGSDDGTGVSIGTIKTKANVCCVQFPSDSGRSLAFGSADHKVYYYDLRNPKIPLCTMIGHSKTVSYVKFVDSSTLVSSSTDNTLKLWDLSMSASGINESPLHSFTGHTNLKNFVGLSVSDGYIATGSETNEVFVYHKAFPMPVMSYMFNNTDSMSGLEVDDASQFISSICWRGQSSTLVAANSNGNIKILEMMT

SEQ ID NO: 70206 - protein, 713 aa, Arabidopsis thaliana
  peptide (1)..(713): Ceres Seq. ID no. 2178543
MSSFNHVSFIESASCSDSGSDSLEDGPISQKEIGSSRREEAVSKAIAIEEKGVYNKLLERKIEKLEEEKTQPFPMKHILAMETSWYTSPEEDFGSSSTCASDVYRLGVLLFELFCPVPSREEKSRTMSSLRHRVLPPQILLKCPKEASFCLWLLHPEPTCRPSMSDLLQSEFITEPRDNLEEREAAIELRDRIEEQESLLEFLLLIQQRKQESAYRLQDTVSLLSSDIEQVVKRQLILKKRGSSLSDFSKDDHQYTSGQPLMSFQANEEPSAFLASRKRVRQGILALENGVEVDEESQGSTLLESSRLMRNFKKLESVYFLTRRRQMKAAASGKSLTRHSPLSSENGRGSMIVSEKSSVSNPVAPKAFFNNDSRQGGWIDPFLEGLCRYLSFSQLRVKADLKQGDLLNSSNLVCALAFDREGELFATAGVNKKIKIFECNSIVNDNRDIHYPVVELAGRSKLSSLCWNSYIKSQIASSNFDGVVQIWDVARSQLVTEMKEHKKRVWSIDISSADPTLLASGSDDGTGVSIGTIKTKANVCCVQFPSDSGRSLAFGSADHKVYYYDLRNPKIPLCTMIGHSKTVSYVKFVDSSTLVSSSTDNTLKLWDLSMSASGINESPLHSFTGHTNLKNFVGLSVSDGYIATGSETNEVFVYHKAFPMPVMSYMFNNTDSMSGLEVDDASQFISSICWRGQSSTLVAANSNGNIKILEMMT

SEQ ID NO: 70207 - protein, 639 aa, Arabidopsis thaliana
  peptide (1)..(639): Ceres Seq. ID no. 2178544
MKHILAMETSWYTSPEEDFGSSSTCASDVYRLGVLLFELFCPVPSREEKSRTMSSLRHRVLPPQILLKCPKEASFCLWLLHPEPTCRPSMSDLLQSEFITEPRDNLEEREAAIELRDRIEEQESLLEFLLLIQQRKQESAYRLQDTVSLLSSDIEQVVKRQLILKKRGSSLSDFSKDDHQYTSGQPLMSFQANEEPSAFLASRKRVRQGILALENGVEVDEESQGSTLLESSRLMRNFKKLESVYFLTRRRQMKAAASGKSLTRHSPLSSENGRGSMIVSEKSSVSNPVAPKAFFNNDSRQGGWIDPFLEGLCRYLSFSQLRVKADLKQGDLLNSSNLVCALAFDREGELFATAGVNKKIKIFECNSIVNDNRDIHYPVVELAGRSKLSSLCWNSYIKSQIASSNFDGVVQIWDVARSQLVTEMKEHKKRVWSIDISSADPTLLASGSDDGTGVSIGTIKTKANVCCVQFPSDSGRSLAFGSADHKVYYYDLRNPKIPLCTMIGHSKTVSYVKFVDSSTLVSSSTDNTLKLWDLSMSASGINESPLHSFTGHTNLKNFVGLSVSDGYIATGSETNEVFVYHKAFPMPVMSYMFNNTDSMSGLEVDDASQFISSICWRGQSSTLVAANSNGNIKILEMMT

SEQ ID NO: 70208 - DNA, 3057 bp, Arabidopsis thaliana
  misc_feature (1)..(3057): Ceres Seq. ID no. 2178739
  misc_feature (1)..(3057): Ortholog of  Ceres SEQ ID NO 13638292 as cited in SEQ ID NO 57738
atggggccttctgcccatctcgtctacgctataggagttatcatcatggcaacaatggttgcggcatatgagccatacacagatagctcacctccaccatactctgtgccacttcccaaagtggaatacaaatctcctccattaccagatgtttacagttctccaccaccaccactagaatactctccagcgcctaaagttgattataaatctccaccaccaccatactattcaccatctcctaaagttgagtacaagtctcctccaccaccatatgtctacaactctccaccaccaccatattactctccatccccaaaggtagactacaagtctcctccaccaccatatgtttacagttcgccaccaccaccaatctattcaccatctcctaaggtagactacaaatctcctccaccaccatatgtttacagttccccaccaccaccatactattcgccatcccctaaggtggagtacaaatctccaccatcaccgtatgtttacaactctccaccaccatcatattattcaccatcccctaaggtagattacaaatctcctccaccaccatatgtttatagttctccaccaccaccatattactctccatcccctaaggttgtatacaagtctcctcctccaccatatgtttacagttctccaccaccaccatactactcaccatcacctaaggtagactacaagtctccaccaccaccatacgtctacagctcaccaccaccaccatactactcaccttctcctaagatagtctacaaatctcccccaccaccgtacgtctacagctccccaccacccccatactactcaccttcccctaaggtagactacaaatctcccccaccaccgtatgtctacagttctccaccaccaccatactactctccatcccctaaggttgtatacaagtctcctcctccaccatatgtttacagttccccaccaccaccatactactcaccaaccccgaaggtagactacaaatctcctcctccaccatatgtttacagttctccaccaccaccatactactcaccatcacctaaggtagactacaagtctccaccaccaccatacgtctacagctcaccaccaccaccatactactcaccttctcctaagatagtctacaaatctcccccaccaccgtacgtctacagctccccaccacccccatactacacaccttcaccaaaggttgtatacaagtctcctcctccaccatatgtttacagttccccaccaccaccatactactcaccatcccctaaggtagactacaaatctcctcctccaccatatgtttacagttctcctccaccaccatactactcgccatctccaaaggttgtatacaaatctcctcctccaccatatgtttacagttctcctccaccaccatactattcaccatcccctaaggtagactacaagtctcctccaccaccatatgtttacagttctccaccaccaccgtactactctccttcaccaaaggttttatacaagtctcccccaccaccgtatgtctacagttctccaccaccaccatactactctccttctcctaaggtagtctacaagtctcccccaccaccgtatgtttacagttctccaccacctccatactactctccttctcctaaggtagtctacaagtctcccccaccaccgtatgtctacagttctccaccaccaccatactactctccttctcctaaggtagtctacaagtctcccccaccaccatacgtttacagttctccaccaccaccatactactccccttctcctaaagtatactacaagtctcctccatcaccataccacgcaccatcccctaaggttctatacaaatctccaccacaccctcatgtatgtgtctgtccaccacctcctccatgttattctccatctccaaaggttgtgtacaagtcctccccaccaccgtacgtttacagttctccaccaccaccatatcactctccttctcctaaggtacactacaagtctcccccaccaccgtatgtctacagttctccaccaccaccatattactctccttcccctaaggtacactacaagtctcccccaccaccgtatgtctatagttctccaccaccaccatactactctccttctcctaaggtagtctacaagtctcccccaccaccgtatgtttacagttctccaccacctccatactattctccttctcctaaggtagtctacaagtctcccccaccaccgtatgtctacagttctccaccaccaccatactactctccttctcctaaggtagtctacaagtctcccccaccaccatacgtttacagttctccaccaccaccatattattctccttctcctaaggtagtctacaagtctcctccaccaccgtatgtctacagttctccaccaccaccatactactctccttctcctaaggtagtctacaagtctcccccaccaccgtacgtctacagctcaccaccaccaccatactactctccttctcctaaagtagtttacaagtctcccccaccaccgtacgtctacagctcaccaccaccaccatactactcaccttcccctaaggtagactacaaatctcccccaccaccgtacgtctacagctcaccaccaccaccatactactcaccttcccctaaagtagactacaaatctcctccaccaccgtacgtctatagctcaccaccaccaccatactactcaccttccccgaaggtagactacaaatctcccccaccaccgtatgtctacagctcacccccaccaccatactactcacctgcccctaaggtagattacaaatctccaccaccaccatacgtctatagttcaccaccaccaccatactactcaccttcccctaaggttgactacaaatctcctccaccaccatactactcaccttcccctaaggttgactacaaatctcctccaccaccatatgtctacagttctccaccaccaccatcatactcaccttctccaaaaactgagtactaa

SEQ ID NO: 70209 - protein, 1018 aa, Arabidopsis thaliana
  peptide (1)..(1018): Ceres Seq. ID no. 2178740
MGPSAHLVYAIGVIIMATMVAAYEPYTDSSPPPYSVPLPKVEYKSPPLPDVYSSPPPPLEYSPAPKVDYKSPPPPYYSPSPKVEYKSPPPPYVYNSPPPPYYSPSPKVDYKSPPPPYVYSSPPPPIYSPSPKVDYKSPPPPYVYSSPPPPYYSPSPKVEYKSPPSPYVYNSPPPSYYSPSPKVDYKSPPPPYVYSSPPPPYYSPSPKVVYKSPPPPYVYSSPPPPYYSPSPKVDYKSPPPPYVYSSPPPPYYSPSPKIVYKSPPPPYVYSSPPPPYYSPSPKVDYKSPPPPYVYSSPPPPYYSPSPKVVYKSPPPPYVYSSPPPPYYSPTPKVDYKSPPPPYVYSSPPPPYYSPSPKVDYKSPPPPYVYSSPPPPYYSPSPKIVYKSPPPPYVYSSPPPPYYTPSPKVVYKSPPPPYVYSSPPPPYYSPSPKVDYKSPPPPYVYSSPPPPYYSPSPKVVYKSPPPPYVYSSPPPPYYSPSPKVDYKSPPPPYVYSSPPPPYYSPSPKVLYKSPPPPYVYSSPPPPYYSPSPKVVYKSPPPPYVYSSPPPPYYSPSPKVVYKSPPPPYVYSSPPPPYYSPSPKVVYKSPPPPYVYSSPPPPYYSPSPKVYYKSPPSPYHAPSPKVLYKSPPHPHVCVCPPPPPCYSPSPKVVYKSSPPPYVYSSPPPPYHSPSPKVHYKSPPPPYVYSSPPPPYYSPSPKVHYKSPPPPYVYSSPPPPYYSPSPKVVYKSPPPPYVYSSPPPPYYSPSPKVVYKSPPPPYVYSSPPPPYYSPSPKVVYKSPPPPYVYSSPPPPYYSPSPKVVYKSPPPPYVYSSPPPPYYSPSPKVVYKSPPPPYVYSSPPPPYYSPSPKVVYKSPPPPYVYSSPPPPYYSPSPKVDYKSPPPPYVYSSPPPPYYSPSPKVDYKSPPPPYVYSSPPPPYYSPSPKVDYKSPPPPYVYSSPPPPYYSPAPKVDYKSPPPPYVYSSPPPPYYSPSPKVDYKSPPPPYYSPSPKVDYKSPPPPYVYSSPPPPSYSPSPKTEY

SEQ ID NO: 70210 - protein, 1003 aa, Arabidopsis thaliana
  peptide (1)..(1003): Ceres Seq. ID no. 2178741
MATMVAAYEPYTDSSPPPYSVPLPKVEYKSPPLPDVYSSPPPPLEYSPAPKVDYKSPPPPYYSPSPKVEYKSPPPPYVYNSPPPPYYSPSPKVDYKSPPPPYVYSSPPPPIYSPSPKVDYKSPPPPYVYSSPPPPYYSPSPKVEYKSPPSPYVYNSPPPSYYSPSPKVDYKSPPPPYVYSSPPPPYYSPSPKVVYKSPPPPYVYSSPPPPYYSPSPKVDYKSPPPPYVYSSPPPPYYSPSPKIVYKSPPPPYVYSSPPPPYYSPSPKVDYKSPPPPYVYSSPPPPYYSPSPKVVYKSPPPPYVYSSPPPPYYSPTPKVDYKSPPPPYVYSSPPPPYYSPSPKVDYKSPPPPYVYSSPPPPYYSPSPKIVYKSPPPPYVYSSPPPPYYTPSPKVVYKSPPPPYVYSSPPPPYYSPSPKVDYKSPPPPYVYSSPPPPYYSPSPKVVYKSPPPPYVYSSPPPPYYSPSPKVDYKSPPPPYVYSSPPPPYYSPSPKVLYKSPPPPYVYSSPPPPYYSPSPKVVYKSPPPPYVYSSPPPPYYSPSPKVVYKSPPPPYVYSSPPPPYYSPSPKVVYKSPPPPYVYSSPPPPYYSPSPKVYYKSPPSPYHAPSPKVLYKSPPHPHVCVCPPPPPCYSPSPKVVYKSSPPPYVYSSPPPPYHSPSPKVHYKSPPPPYVYSSPPPPYYSPSPKVHYKSPPPPYVYSSPPPPYYSPSPKVVYKSPPPPYVYSSPPPPYYSPSPKVVYKSPPPPYVYSSPPPPYYSPSPKVVYKSPPPPYVYSSPPPPYYSPSPKVVYKSPPPPYVYSSPPPPYYSPSPKVVYKSPPPPYVYSSPPPPYYSPSPKVVYKSPPPPYVYSSPPPPYYSPSPKVDYKSPPPPYVYSSPPPPYYSPSPKVDYKSPPPPYVYSSPPPPYYSPSPKVDYKSPPPPYVYSSPPPPYYSPAPKVDYKSPPPPYVYSSPPPPYYSPSPKVDYKSPPPPYYSPSPKVDYKSPPPPYVYSSPPPPSYSPSPKTEY

SEQ ID NO: 70211 - protein, 1000 aa, Arabidopsis thaliana
  peptide (1)..(1000): Ceres Seq. ID no. 2178742
MVAAYEPYTDSSPPPYSVPLPKVEYKSPPLPDVYSSPPPPLEYSPAPKVDYKSPPPPYYSPSPKVEYKSPPPPYVYNSPPPPYYSPSPKVDYKSPPPPYVYSSPPPPIYSPSPKVDYKSPPPPYVYSSPPPPYYSPSPKVEYKSPPSPYVYNSPPPSYYSPSPKVDYKSPPPPYVYSSPPPPYYSPSPKVVYKSPPPPYVYSSPPPPYYSPSPKVDYKSPPPPYVYSSPPPPYYSPSPKIVYKSPPPPYVYSSPPPPYYSPSPKVDYKSPPPPYVYSSPPPPYYSPSPKVVYKSPPPPYVYSSPPPPYYSPTPKVDYKSPPPPYVYSSPPPPYYSPSPKVDYKSPPPPYVYSSPPPPYYSPSPKIVYKSPPPPYVYSSPPPPYYTPSPKVVYKSPPPPYVYSSPPPPYYSPSPKVDYKSPPPPYVYSSPPPPYYSPSPKVVYKSPPPPYVYSSPPPPYYSPSPKVDYKSPPPPYVYSSPPPPYYSPSPKVLYKSPPPPYVYSSPPPPYYSPSPKVVYKSPPPPYVYSSPPPPYYSPSPKVVYKSPPPPYVYSSPPPPYYSPSPKVVYKSPPPPYVYSSPPPPYYSPSPKVYYKSPPSPYHAPSPKVLYKSPPHPHVCVCPPPPPCYSPSPKVVYKSSPPPYVYSSPPPPYHSPSPKVHYKSPPPPYVYSSPPPPYYSPSPKVHYKSPPPPYVYSSPPPPYYSPSPKVVYKSPPPPYVYSSPPPPYYSPSPKVVYKSPPPPYVYSSPPPPYYSPSPKVVYKSPPPPYVYSSPPPPYYSPSPKVVYKSPPPPYVYSSPPPPYYSPSPKVVYKSPPPPYVYSSPPPPYYSPSPKVVYKSPPPPYVYSSPPPPYYSPSPKVDYKSPPPPYVYSSPPPPYYSPSPKVDYKSPPPPYVYSSPPPPYYSPSPKVDYKSPPPPYVYSSPPPPYYSPAPKVDYKSPPPPYVYSSPPPPYYSPSPKVDYKSPPPPYYSPSPKVDYKSPPPPYVYSSPPPPSYSPSPKTEY

SEQ ID NO: 70212 - DNA, 846 bp, Arabidopsis thaliana
  misc_feature (1)..(846): Ceres Seq. ID no. 2178940
  misc_feature (1)..(846): Ortholog of  Ceres SEQ ID NO 12610031 as cited in SEQ ID NO 55811
  misc_feature (1)..(846): Ortholog of  Ceres SEQ ID NO 12610896 as cited in SEQ ID NO 55861
  misc_feature (1)..(846): Ortholog of  Ceres SEQ ID NO 12619664 as cited in SEQ ID NO 66048
  misc_feature (1)..(846): Ortholog of  Ceres SEQ ID NO 12635952 as cited in SEQ ID NO 0
atgggttcctccatattattggttttgtttactctcatggttatgctgtccatttcttatgaaccactcaaatggatgggcataaacgcgagccatgtaccggaaacttgctaccatcattgtaaccagacgttcgagagtagtcgccaatgctttaaatggtgtcaagaattagctcgtaaagatgagtacaagatttatgggtacccttactcaaccaacacaaggcgtgtcctcgccgttcttcatgagaaaggtctctcttacgatcccatcaccgtcaacttgatagccggtgaccagaagaagccgagttttctcgctatcaatccatttggtcaagtcccagttttcctagacgggggtcttaagttgactgaatctcgagctatatctgaatacatagcgactgtccataaatcaagaggcacacaacttctgaattacaaaagctacaaaacaatgggaacacaaagaatgtggatggctatcgaatcttttgagtttgatccactcacatcaacactgacctgggaacaatccatcaagcctatgtacggtctaaagacggactataaggttgtgaatgaaaccgaggcgaagctagagaaggttctagatatatacgaagaacgactcaaaaattctagcttcttggctagtaacagcttcacaatggctgatctttatcaccttcctaatatacaataccttatggacacacatacaaagagaatgtttgtaaaccggccaagcgtgcgccggtgggtggctgagatcacagctagaccggcttggaagagggcatgtgatgtgaaggcttggtaccataagaagaagaattaa

SEQ ID NO: 70213 - protein, 281 aa, Arabidopsis thaliana
  peptide (1)..(281): Ceres Seq. ID no. 2178941
MGSSILLVLFTLMVMLSISYEPLKWMGINASHVPETCYHHCNQTFESSRQCFKWCQELARKDEYKIYGYPYSTNTRRVLAVLHEKGLSYDPITVNLIAGDQKKPSFLAINPFGQVPVFLDGGLKLTESRAISEYIATVHKSRGTQLLNYKSYKTMGTQRMWMAIESFEFDPLTSTLTWEQSIKPMYGLKTDYKVVNETEAKLEKVLDIYEERLKNSSFLASNSFTMADLYHLPNIQYLMDTHTKRMFVNRPSVRRWVAEITARPAWKRACDVKAWYHKKKN

SEQ ID NO: 70214 - protein, 269 aa, Arabidopsis thaliana
  peptide (1)..(269): Ceres Seq. ID no. 2178942
MVMLSISYEPLKWMGINASHVPETCYHHCNQTFESSRQCFKWCQELARKDEYKIYGYPYSTNTRRVLAVLHEKGLSYDPITVNLIAGDQKKPSFLAINPFGQVPVFLDGGLKLTESRAISEYIATVHKSRGTQLLNYKSYKTMGTQRMWMAIESFEFDPLTSTLTWEQSIKPMYGLKTDYKVVNETEAKLEKVLDIYEERLKNSSFLASNSFTMADLYHLPNIQYLMDTHTKRMFVNRPSVRRWVAEITARPAWKRACDVKAWYHKKKN

SEQ ID NO: 70215 - protein, 267 aa, Arabidopsis thaliana
  peptide (1)..(267): Ceres Seq. ID no. 2178943
MLSISYEPLKWMGINASHVPETCYHHCNQTFESSRQCFKWCQELARKDEYKIYGYPYSTNTRRVLAVLHEKGLSYDPITVNLIAGDQKKPSFLAINPFGQVPVFLDGGLKLTESRAISEYIATVHKSRGTQLLNYKSYKTMGTQRMWMAIESFEFDPLTSTLTWEQSIKPMYGLKTDYKVVNETEAKLEKVLDIYEERLKNSSFLASNSFTMADLYHLPNIQYLMDTHTKRMFVNRPSVRRWVAEITARPAWKRACDVKAWYHKKKN

SEQ ID NO: 70216 - DNA, 1674 bp, Arabidopsis thaliana
  misc_feature (1)..(1674): Ceres Seq. ID no. 2181359
  misc_feature (1)..(1674): Ortholog of  Ceres SEQ ID NO 12613725 as cited in SEQ ID NO 68196
atgtcgatctccggcgctgttgatgaagctgggactccacttctcgctgtcaccgtcgactacaggaacaaacccgccgtcaaatcttcctccggtggctggagatccgccggattcatcatcggtgtggaggttgctgagcgatttgcttactatgggatatcgtcgaatctgataacgtatttgaccggaccactgggacaatcgacggcggctgcggcggctaacgtgaacgcttggtctggaacggcgtcgttgcttcctctccttggtgcttttgtcgctgactcgtttctaggtcgtttccggacaatcctcgccgcctctgctctctatatagtggggctgggtgtattgactttatctgcaatgattccttcagactgcaaagtttcgaatctactctcgtcatgctctcctcgatttcaagtaattacattctttagtgcattgtatctagtggctttagctcaaggtggtcacaagccgtgtgttcaggcttttggagcggatcagtttgatgaaaaggaacctgaagagtgcaaagcaaagagttctttctttaattggtggtattttggtatgtgctttgggacgttaacaactctatgggtgttgaattatatccaagataatctaagttgggcgttaggctttggtattccatgcattgctatggtagttgctttggttgttctcttgcttggaacctgcacttatcggttcagtattcgaagagaagatcaaagtccttttgtgaggattggaaatgtttatgtagcggctgtaaagaactggagtgtttcagctttagatgtagctgctgcagaggagagacttggtcttgtgtcttgcagtagctctcagcaatttagttttctcaacaaagctctggtcgcaaagaatggttcttgtagtatagatgaacttgaagaagcaaaatcagtgcttaggttagctccgatatggttaacatgcttggtttatgcggttgtgtttgcgcagtctccaactttcttcaccaaacaaggagctacaatggagagatcaatcacacctggttacaagatctctccggctaccctccagtccttcatcagcctctctatagtcatcttcatcccaatctacgaccgtgtactaatcccaattgcaagatcatttacacataaaccaggcggaatcacaatgcttcagagaatcggcacaggcatattcctctctttccttgctatggttgtagccgctctagtggagatgaaaaggcttaaaactgctgcggattacgggctcgtagattcacctgacgctacggttccaatgagtgtgtggtggttagttcctcagtatgttctctttggtatcacggatgttttcgcaatggtgggtcttcaagagttcttctatgaccaagtcccgaatgagctgaggagtgtggggttggctctgtacttgagcatattcggtattggtaactttctcagcagtttcatgatatcaatcattgagaaagcgacaagccaatctggtcaagcgagttggttcgcaaacaacctgaaccaagctcatctcgattacttttactggttactcgcttgtctcagcttcattggcttagcctcctacttgtatgttgcaaagtcttacgtctctaaaaggctcgacaccagttaa

SEQ ID NO: 70217 - protein, 557 aa, Arabidopsis thaliana
  peptide (1)..(557): Ceres Seq. ID no. 2181360
MSISGAVDEAGTPLLAVTVDYRNKPAVKSSSGGWRSAGFIIGVEVAERFAYYGISSNLITYLTGPLGQSTAAAAANVNAWSGTASLLPLLGAFVADSFLGRFRTILAASALYIVGLGVLTLSAMIPSDCKVSNLLSSCSPRFQVITFFSALYLVALAQGGHKPCVQAFGADQFDEKEPEECKAKSSFFNWWYFGMCFGTLTTLWVLNYIQDNLSWALGFGIPCIAMVVALVVLLLGTCTYRFSIRREDQSPFVRIGNVYVAAVKNWSVSALDVAAAEERLGLVSCSSSQQFSFLNKALVAKNGSCSIDELEEAKSVLRLAPIWLTCLVYAVVFAQSPTFFTKQGATMERSITPGYKISPATLQSFISLSIVIFIPIYDRVLIPIARSFTHKPGGITMLQRIGTGIFLSFLAMVVAALVEMKRLKTAADYGLVDSPDATVPMSVWWLVPQYVLFGITDVFAMVGLQEFFYDQVPNELRSVGLALYLSIFGIGNFLSSFMISIIEKATSQSGQASWFANNLNQAHLDYFYWLLACLSFIGLASYLYVAKSYVSKRLDTS

SEQ ID NO: 70218 - protein, 434 aa, Arabidopsis thaliana
  peptide (1)..(434): Ceres Seq. ID no. 2181361
MIPSDCKVSNLLSSCSPRFQVITFFSALYLVALAQGGHKPCVQAFGADQFDEKEPEECKAKSSFFNWWYFGMCFGTLTTLWVLNYIQDNLSWALGFGIPCIAMVVALVVLLLGTCTYRFSIRREDQSPFVRIGNVYVAAVKNWSVSALDVAAAEERLGLVSCSSSQQFSFLNKALVAKNGSCSIDELEEAKSVLRLAPIWLTCLVYAVVFAQSPTFFTKQGATMERSITPGYKISPATLQSFISLSIVIFIPIYDRVLIPIARSFTHKPGGITMLQRIGTGIFLSFLAMVVAALVEMKRLKTAADYGLVDSPDATVPMSVWWLVPQYVLFGITDVFAMVGLQEFFYDQVPNELRSVGLALYLSIFGIGNFLSSFMISIIEKATSQSGQASWFANNLNQAHLDYFYWLLACLSFIGLASYLYVAKSYVSKRLDTS

SEQ ID NO: 70219 - protein, 363 aa, Arabidopsis thaliana
  peptide (1)..(363): Ceres Seq. ID no. 2181362
MCFGTLTTLWVLNYIQDNLSWALGFGIPCIAMVVALVVLLLGTCTYRFSIRREDQSPFVRIGNVYVAAVKNWSVSALDVAAAEERLGLVSCSSSQQFSFLNKALVAKNGSCSIDELEEAKSVLRLAPIWLTCLVYAVVFAQSPTFFTKQGATMERSITPGYKISPATLQSFISLSIVIFIPIYDRVLIPIARSFTHKPGGITMLQRIGTGIFLSFLAMVVAALVEMKRLKTAADYGLVDSPDATVPMSVWWLVPQYVLFGITDVFAMVGLQEFFYDQVPNELRSVGLALYLSIFGIGNFLSSFMISIIEKATSQSGQASWFANNLNQAHLDYFYWLLACLSFIGLASYLYVAKSYVSKRLDTS

SEQ ID NO: 70220 - DNA, 546 bp, Arabidopsis thaliana
  misc_feature (1)..(546): Ceres Seq. ID no. 2182561
  misc_feature (1)..(546): Ortholog of  Ceres SEQ ID NO 13589868 as cited in SEQ ID NO 55521
  misc_feature (1)..(546): Ortholog of  Ceres SEQ ID NO 12617659 as cited in SEQ ID NO 65286
atggggctttcatttgcaaagctttttagccggctttttgccaagaaggagatgcgaatccttatggttggtcttgatgctgctggtaagaccaccattttgtacaagctcaagcttggtgagattgtcaccaccattcccaccatcgggtttaatgtggagacggttgagtacaagaacatcagcttcacggtttgggatgtcgggggtcaggacaagatccgtcccttgtggagacactacttccaaaacactcaaggtctgatatttgttgttgatagcaatgacagagaccgtgttgttgaagccagagatgaacttcacaggatgttgaatgaagatgagcttcgggatgcagtattgcttgtgtttgccaacaagcaggatcttccaaacgctatgaatgctgctgagattactgataagcttggccttcactcactccggcaacgccactggtacatccaaagcacatgcgcaactagcggtgaagggctctatgaaggtctggattggctttccaacaacattgctagcaaagcttga

SEQ ID NO: 70221 - protein, 181 aa, Arabidopsis thaliana
  peptide (1)..(181): Ceres Seq. ID no. 2182562
MGLSFAKLFSRLFAKKEMRILMVGLDAAGKTTILYKLKLGEIVTTIPTIGFNVETVEYKNISFTVWDVGGQDKIRPLWRHYFQNTQGLIFVVDSNDRDRVVEARDELHRMLNEDELRDAVLLVFANKQDLPNAMNAAEITDKLGLHSLRQRHWYIQSTCATSGEGLYEGLDWLSNNIASKA

SEQ ID NO: 70222 - protein, 164 aa, Arabidopsis thaliana; identical to SEQ ID NO: 22740
  peptide (1)..(164): Ceres Seq. ID no. 2182563

SEQ ID NO: 70223 - protein, 160 aa, Arabidopsis thaliana; identical to SEQ ID NO: 22741
  peptide (1)..(160): Ceres Seq. ID no. 2182564

SEQ ID NO: 70224 - DNA, 2193 bp, Arabidopsis thaliana
  misc_feature (1)..(2193): Ceres Seq. ID no. 2182678
  misc_feature (1)..(2193): Ortholog of  Ceres SEQ ID NO 14304565 as cited in SEQ ID NO 53297
  misc_feature (1)..(2193): Ortholog of  Ceres SEQ ID NO 15172170 as cited in SEQ ID NO 58957
  misc_feature (1)..(2193): Ortholog of  Ceres SEQ ID NO 13654989 as cited in SEQ ID NO 63117
  misc_feature (1)..(2193): Ortholog of  Ceres SEQ ID NO 13584744 as cited in SEQ ID NO 69137
atgaagacaaagactagcatcttccaatttattgtagcatctgtccttactctgctcatcaatgactcatcagcagcaacacctccacctccaattagcaattcttcaacgtcttgtaacaaaacctgtggaggaatctcgatcccgttcccattcggaattggcgggaaagattgttatctcaacggttggtacgaggttatctgcaacacaaccacttccgattctaacacaactgttcctttactctctatgatcaatcgggaagtggtgaatatctctctcccagacagtaacgaaccatacggacttgttcaaatcaaaggtcctgtgacatcgttgggttgttctagtaatactagtgaaggaccccaaaactcgctcccggttttgaatgtcacaggtaagggcagcccatatttcctgaccgacgagaaccgtcttgtggcggttggttgtggtataaaggcattgatgacagatacagaatcagagatcttgggttgtgaatcgagctgcgaacacagaaagagtggtgaagaagtaacaaatttgatctgtactggttacagatgctgccaggcgaggctaccggtggggcgtcctcaggctataaccgtaaatatagagaactctagtggaggagaagaaacgtgcaaagttgcgttcttgacggacaagaggtattcgccgtctaatgttacagagccagaacagtttcataacaatggatatgtggtgctagagttaggatggtactttgccacttcgaactctcgctttaagagcctcttgggttgtacaaatatgagccgaaaaggttctgggttctcggatgataattgcagttgcgagtatgattacttctccgggatgagttataggaattgttattgcgactatggctacacagggaacccataccttcgaggtggctgcgtagatactgattcatgcgaaggaaatcacaactgtggggaagatgctcattgtgttaacatgcctggaccaatgtccatgtgcaggcctaaccccaagataaccaaacctaccaaacccccggtgcttcaaggcattcttataggtttgtcaggattagtattttttgttgggctattctggctatttaaactcataaagaagcgaaggaacatcaaccgcagcaagaagtttttcaaacggaacggaggcttgctgttgaaacaacaattaactacaaaggacggaaatgtagaaatgtctaagattttcagttcaaaggagttaagaaaagccactgataacttcagcatagatagagtgcttgggcaaggcggtcaaggcactgtgtacaaaggaatgttggtagatgggagcatcgttgcggttaaaagatccaaagttgtggatgaagacaaaatggaagagtttatcaatgagattgttcttctgtcacaaatcaatcaccgcaacattgtgaaactcttgggatgttgcttggagacagaagttccaatcttggtgtacgaatatattcccaatggagatctgttcaagcggcttcatgatgaatctgatgattacaccatgacttgggaagtgcggcttcgcatagccatagagatagcaggagctcttacatacatgcactcagctgcaagttttccaatattccatagagatattaagactaccaatatcctactggacgagaaataccgagccaaagtgtctgactttggaacttcaagatcagtaaccttagatcaaactcacttgacaacattagttgcaggaacttttggttacatggatccagagtacttcttgtcaagccaatacactcacaagagcgatgtttatagtttcggggtcgtcttggtggagctcataaccggagaaaaaccattgtcccgtgtccggtctgaagaaggtagaggcttggcaactcatttcctcgaggccatgaaagagaacagagtgattgacataattgatattcggatcaaagacgaaagcaaactggagcaagtaatggcggtagcaaaactcgccagaaaatgtcttaaccggaaagggaagaaccggccaaacatgaaagaggtttcaaatgagctagagaggatccgttcatcacccgaagatttagatgtccgtaccgaaaacgaagacgaagaagaggatcaaccaatggcaatcaacaacaaaagatga

SEQ ID NO: 70225 - protein, 730 aa, Arabidopsis thaliana
  peptide (1)..(730): Ceres Seq. ID no. 2182679
MKTKTSIFQFIVASVLTLLINDSSAATPPPPISNSSTSCNKTCGGISIPFPFGIGGKDCYLNGWYEVICNTTTSDSNTTVPLLSMINREVVNISLPDSNEPYGLVQIKGPVTSLGCSSNTSEGPQNSLPVLNVTGKGSPYFLTDENRLVAVGCGIKALMTDTESEILGCESSCEHRKSGEEVTNLICTGYRCCQARLPVGRPQAITVNIENSSGGEETCKVAFLTDKRYSPSNVTEPEQFHNNGYVVLELGWYFATSNSRFKSLLGCTNMSRKGSGFSDDNCSCEYDYFSGMSYRNCYCDYGYTGNPYLRGGCVDTDSCEGNHNCGEDAHCVNMPGPMSMCRPNPKITKPTKPPVLQGILIGLSGLVFFVGLFWLFKLIKKRRNINRSKKFFKRNGGLLLKQQLTTKDGNVEMSKIFSSKELRKATDNFSIDRVLGQGGQGTVYKGMLVDGSIVAVKRSKVVDEDKMEEFINEIVLLSQINHRNIVKLLGCCLETEVPILVYEYIPNGDLFKRLHDESDDYTMTWEVRLRIAIEIAGALTYMHSAASFPIFHRDIKTTNILLDEKYRAKVSDFGTSRSVTLDQTHLTTLVAGTFGYMDPEYFLSSQYTHKSDVYSFGVVLVELITGEKPLSRVRSEEGRGLATHFLEAMKENRVIDIIDIRIKDESKLEQVMAVAKLARKCLNRKGKNRPNMKEVSNELERIRSSPEDLDVRTENEDEEEDQPMAINNKR

SEQ ID NO: 70226 - protein, 646 aa, Arabidopsis thaliana
  peptide (1)..(646): Ceres Seq. ID no. 2182680
MINREVVNISLPDSNEPYGLVQIKGPVTSLGCSSNTSEGPQNSLPVLNVTGKGSPYFLTDENRLVAVGCGIKALMTDTESEILGCESSCEHRKSGEEVTNLICTGYRCCQARLPVGRPQAITVNIENSSGGEETCKVAFLTDKRYSPSNVTEPEQFHNNGYVVLELGWYFATSNSRFKSLLGCTNMSRKGSGFSDDNCSCEYDYFSGMSYRNCYCDYGYTGNPYLRGGCVDTDSCEGNHNCGEDAHCVNMPGPMSMCRPNPKITKPTKPPVLQGILIGLSGLVFFVGLFWLFKLIKKRRNINRSKKFFKRNGGLLLKQQLTTKDGNVEMSKIFSSKELRKATDNFSIDRVLGQGGQGTVYKGMLVDGSIVAVKRSKVVDEDKMEEFINEIVLLSQINHRNIVKLLGCCLETEVPILVYEYIPNGDLFKRLHDESDDYTMTWEVRLRIAIEIAGALTYMHSAASFPIFHRDIKTTNILLDEKYRAKVSDFGTSRSVTLDQTHLTTLVAGTFGYMDPEYFLSSQYTHKSDVYSFGVVLVELITGEKPLSRVRSEEGRGLATHFLEAMKENRVIDIIDIRIKDESKLEQVMAVAKLARKCLNRKGKNRPNMKEVSNELERIRSSPEDLDVRTENEDEEEDQPMAINNKR

SEQ ID NO: 70227 - protein, 572 aa, Arabidopsis thaliana
  peptide (1)..(572): Ceres Seq. ID no. 2182681
MTDTESEILGCESSCEHRKSGEEVTNLICTGYRCCQARLPVGRPQAITVNIENSSGGEETCKVAFLTDKRYSPSNVTEPEQFHNNGYVVLELGWYFATSNSRFKSLLGCTNMSRKGSGFSDDNCSCEYDYFSGMSYRNCYCDYGYTGNPYLRGGCVDTDSCEGNHNCGEDAHCVNMPGPMSMCRPNPKITKPTKPPVLQGILIGLSGLVFFVGLFWLFKLIKKRRNINRSKKFFKRNGGLLLKQQLTTKDGNVEMSKIFSSKELRKATDNFSIDRVLGQGGQGTVYKGMLVDGSIVAVKRSKVVDEDKMEEFINEIVLLSQINHRNIVKLLGCCLETEVPILVYEYIPNGDLFKRLHDESDDYTMTWEVRLRIAIEIAGALTYMHSAASFPIFHRDIKTTNILLDEKYRAKVSDFGTSRSVTLDQTHLTTLVAGTFGYMDPEYFLSSQYTHKSDVYSFGVVLVELITGEKPLSRVRSEEGRGLATHFLEAMKENRVIDIIDIRIKDESKLEQVMAVAKLARKCLNRKGKNRPNMKEVSNELERIRSSPEDLDVRTENEDEEEDQPMAINNKR

SEQ ID NO: 70228 - DNA, 933 bp, Arabidopsis thaliana
  misc_feature (1)..(933): Ceres Seq. ID no. 2182836
  misc_feature (1)..(933): Ortholog of  Ceres SEQ ID NO 15172274 as cited in SEQ ID NO 59703
atgacggaagagtttgagatcgcaggaatctccaccggagcttggtggagctcgccaacaaacaccgccgcagtattctctggctactcgctgccatgttccactgagattagccctgatgtcacaaatttcggatggcaaaacttcgataacaagattaacgatcataatgatggttgtatgaacatgcataatagtttcttcgaaggactattaatcgatcctaacgatcaattactaccggatccatggtccaaaagtacaattcctaacgctaaatctgagctccttgaaaacttcccattcttagataacatgttcttggtcgattcagaagctgaatctttgttggatcatgaaatcagaaaccataagtcgtctaaggagcaaattacacaagactacaagaatcttacttcaaaggcacgtaacaaacataaaaacctaactatttttgttaggagtgaagaattagaagagaacagcgatgagtattcaccgcgattactaaaaagaccgagactcgagacactatctccattgccaagcttcaaagttcgtaaagaaaaactcggagatagaatcactgcgcttcagcaactggtttctccatttggcaagacagatacagcttctgttctcaacgaagctgtagagtacataaagtttcttcaagaacaagtcactgtattgagtaatccagaacagaacaccataggatctgttcaacaacagcagtgttcaaacaagaaatctatcaatactcaaggagaagtagaagaagacgaatgtagtccaagaagatatgtagatctttcgagccgtggactatgtctaatgccgatctcagcttcatatcccgtggctgcagctgcggcttcggctgcagagatgaacgtacatctggtttctggcatcttccattctttgtaa

SEQ ID NO: 70229 - protein, 310 aa, Arabidopsis thaliana
  peptide (1)..(310): Ceres Seq. ID no. 2182837
MTEEFEIAGISTGAWWSSPTNTAAVFSGYSLPCSTEISPDVTNFGWQNFDNKINDHNDGCMNMHNSFFEGLLIDPNDQLLPDPWSKSTIPNAKSELLENFPFLDNMFLVDSEAESLLDHEIRNHKSSKEQITQDYKNLTSKARNKHKNLTIFVRSEELEENSDEYSPRLLKRPRLETLSPLPSFKVRKEKLGDRITALQQLVSPFGKTDTASVLNEAVEYIKFLQEQVTVLSNPEQNTIGSVQQQQCSNKKSINTQGEVEEDECSPRRYVDLSSRGLCLMPISASYPVAAAAASAAEMNVHLVSGIFHSL

SEQ ID NO: 70230 - protein, 250 aa, Arabidopsis thaliana
  peptide (1)..(250): Ceres Seq. ID no. 2182838
MNMHNSFFEGLLIDPNDQLLPDPWSKSTIPNAKSELLENFPFLDNMFLVDSEAESLLDHEIRNHKSSKEQITQDYKNLTSKARNKHKNLTIFVRSEELEENSDEYSPRLLKRPRLETLSPLPSFKVRKEKLGDRITALQQLVSPFGKTDTASVLNEAVEYIKFLQEQVTVLSNPEQNTIGSVQQQQCSNKKSINTQGEVEEDECSPRRYVDLSSRGLCLMPISASYPVAAAAASAAEMNVHLVSGIFHSL

SEQ ID NO: 70231 - protein, 248 aa, Arabidopsis thaliana
  peptide (1)..(248): Ceres Seq. ID no. 2182839
MHNSFFEGLLIDPNDQLLPDPWSKSTIPNAKSELLENFPFLDNMFLVDSEAESLLDHEIRNHKSSKEQITQDYKNLTSKARNKHKNLTIFVRSEELEENSDEYSPRLLKRPRLETLSPLPSFKVRKEKLGDRITALQQLVSPFGKTDTASVLNEAVEYIKFLQEQVTVLSNPEQNTIGSVQQQQCSNKKSINTQGEVEEDECSPRRYVDLSSRGLCLMPISASYPVAAAAASAAEMNVHLVSGIFHSL

SEQ ID NO: 70232 - DNA, 690 bp, Arabidopsis thaliana
  misc_feature (1)..(690): Ceres Seq. ID no. 2183288
  misc_feature (1)..(690): Ortholog of  Ceres SEQ ID NO 12611884 as cited in SEQ ID NO 51018
  misc_feature (1)..(690): Ortholog of  Ceres SEQ ID NO 12609093 as cited in SEQ ID NO 52008
  misc_feature (1)..(690): Ortholog of  Ceres SEQ ID NO 12609839 as cited in SEQ ID NO 52022
  misc_feature (1)..(690): Ortholog of  Ceres SEQ ID NO 13638885 as cited in SEQ ID NO 55803
  misc_feature (1)..(690): Ortholog of  Ceres SEQ ID NO 12615635 as cited in SEQ ID NO 63133
  misc_feature (1)..(690): Ortholog of  Ceres SEQ ID NO 12586351 as cited in SEQ ID NO 64028
  misc_feature (1)..(690): Ortholog of  Ceres SEQ ID NO 13654441 as cited in SEQ ID NO 67814
  misc_feature (1)..(690): Ortholog of  Ceres SEQ ID NO 13596128 as cited in SEQ ID NO 67831
  misc_feature (1)..(690): Ortholog of  Ceres SEQ ID NO 12635608 as cited in SEQ ID NO 0
atggctcaaaatggttcgaatactactgtgaagctgatagggacatgggcaagcccattcgctataagggctcaagtggctctacacctcaagtcagtagagcacgagtatgtcgaagaaaccgatgttctgaaaggaaagagcgatcttcttattaaatccaaccctatacacaagaaagtccctgtcctcatccatggtgatgtatcaatctgtgaatctctcaacatcgtccaatacgtcgatgaatcttggccgtctgatctttccatcctcccaacacttccctcggaacgtgcctttgcccgtttttgggctcacttcgttgacggaaagttgtttgaatcgatcgatgcggtggcgggagcaaaagacgacgccgccaggatgacattggcggggaatctgatggagaatctagcggcacttgaagaggcgtttcaaaagagtagcaaaggcggggacttttttggaggggggaacattgggtttgtcgatataactgttggggccatagtaggtccaatctctgtcattgaagctttttcaggtgttaagtttttgcgtccagacacaacaccgggcctgattcagtgggctgagaaatttagggcccatgaagctgtaaaaccttacatgcctaccgttgccgagttcatcgagtttgccaaaaagaaattcagtgtttag

SEQ ID NO: 70233 - protein, 229 aa, Arabidopsis thaliana
  peptide (1)..(229): Ceres Seq. ID no. 2183289
MAQNGSNTTVKLIGTWASPFAIRAQVALHLKSVEHEYVEETDVLKGKSDLLIKSNPIHKKVPVLIHGDVSICESLNIVQYVDESWPSDLSILPTLPSERAFARFWAHFVDGKLFESIDAVAGAKDDAARMTLAGNLMENLAALEEAFQKSSKGGDFFGGGNIGFVDITVGAIVGPISVIEAFSGVKFLRPDTTPGLIQWAEKFRAHEAVKPYMPTVAEFIEFAKKKFSV

SEQ ID NO: 70234 - DNA, 1878 bp, Arabidopsis thaliana
  misc_feature (1)..(1878): Ceres Seq. ID no. 2183293
  misc_feature (1)..(1878): Ortholog of  Ceres SEQ ID NO 13584744 as cited in SEQ ID NO 69137
atgtctcaaccaccgtggagatgtttctctctactcatctttgttctcaccatttttagtactaaaccttcctctgcatctacttcatgttcttcttcatttcattgcccaccgttcaactcctcaccaccgtaccctttctcagcttctccgggatgtggccacccaaacttccagatccaatgctcatcttcacgcgccaccatcacaatcaaaaacctcactttctctatcctccattactcatcaatctcctcttctctaaccctctctcccattacaaacactaaccggaacacaaacaactgttcttctctccggttctcctcctcaccaaaccggttcatcgacttaaccggttcacctttcagagtctctgactcttcttgctctcgtctctctcttctccgtccttgctctccttttactctccccaactgttctcgttgtccttgggactgtaaactcctaaagaatccgggtcggatcctccacggttgtgaatcaacccacgggtcgttatctgaacaaggctgtcaaggagatcttcttggttttcttcaagatttcttcactagatttggatttgaagttgaatgggacgaatctcaagatccatacttcattaaatgcagagattgtcaaatcaagaatggtgtttgcgggtttaattcgacccacccgaatcaagatttcatctgtttccacaaatcaagatccgaattagtaactcaaagagataacaacaaaagagtcaatcatattgctgtgttgtctcttatcttcgctttgacttgtctcttacttgttttctccgtcgccgtagcgattttccgatcacgaagagctagctttttatcctcaatcaatgaagaagacccggctgctctgttcctccgtcaccaccgctccgccgctcttctcccaccagtcttcaccttcgaagaactcgaatccgccacaaacaaattcgaccccaagcgaaaaatcggagacggtggtttcggttctgtttacttaggccaactcagcgacggacaactcctcgccgttaaattcctccaccatcaccacgctttctcaatgaagtctttttgcaatgagattttgatcctttcttcaatcaaccatcctaacctcgtcaagctccatggctattgctctgacccgagaggacttcttcttgttcacgattacgtcactaacggtactctcgctgatcatcttcacggcaggggaccgaagatgacgtggcgtgtaaggttagatattgcgttgcaaacggctttagctatggagtatcttcacttcgatattgttcctccggttgttcatagagatataacttcgtcgaatatctttgtggagaaggatatgaaaatcaaagtcggagactttggtctctctaggctcttggtgttttcagagacgactgtgaattcagctacttcgtctgattacgtttgtaccggaccacaaggtacgcccggttatttagacccggattatcaccggtcttttcggttaacggagaaaagtgacgtgtatagctacggtgtcgttttgatggagttgattacgggtatgaaagcggttgatcaacgacgtgagaagagggacatggctttagcggatcttgttgtatccaagattcaaatgggtcttttggatcaggtgattgaccccttgcttgcgttagacggcgatgatgtggctgcggtgagtgacggattcggtgttgcggcggttgctgagctggcgttccggtgtgttgcgacggataaggatgatcgtccggatgctaaagagattgttcaggagttgaggaggattaggagccatacacgtgtagcggatgatgacgtggcgaaaaattga

SEQ ID NO: 70235 - protein, 625 aa, Arabidopsis thaliana
  peptide (1)..(625): Ceres Seq. ID no. 2183294
MSQPPWRCFSLLIFVLTIFSTKPSSASTSCSSSFHCPPFNSSPPYPFSASPGCGHPNFQIQCSSSRATITIKNLTFSILHYSSISSSLTLSPITNTNRNTNNCSSLRFSSSPNRFIDLTGSPFRVSDSSCSRLSLLRPCSPFTLPNCSRCPWDCKLLKNPGRILHGCESTHGSLSEQGCQGDLLGFLQDFFTRFGFEVEWDESQDPYFIKCRDCQIKNGVCGFNSTHPNQDFICFHKSRSELVTQRDNNKRVNHIAVLSLIFALTCLLLVFSVAVAIFRSRRASFLSSINEEDPAALFLRHHRSAALLPPVFTFEELESATNKFDPKRKIGDGGFGSVYLGQLSDGQLLAVKFLHHHHAFSMKSFCNEILILSSINHPNLVKLHGYCSDPRGLLLVHDYVTNGTLADHLHGRGPKMTWRVRLDIALQTALAMEYLHFDIVPPVVHRDITSSNIFVEKDMKIKVGDFGLSRLLVFSETTVNSATSSDYVCTGPQGTPGYLDPDYHRSFRLTEKSDVYSYGVVLMELITGMKAVDQRREKRDMALADLVVSKIQMGLLDQVIDPLLALDGDDVAAVSDGFGVAAVAELAFRCVATDKDDRPDAKEIVQELRRIRSHTRVADDDVAKN

SEQ ID NO: 70236 - DNA, 1668 bp, Arabidopsis thaliana
  misc_feature (1)..(1668): Ceres Seq. ID no. 2183315
  misc_feature (1)..(1668): Ortholog of  Ceres SEQ ID NO 12613725 as cited in SEQ ID NO 68196
  misc_feature (1)..(1668): Ortholog of  Ceres SEQ ID NO 14301486 as cited in SEQ ID NO 69222
atggacaatgagaaagggacaagttcctcggatttaacgacgagacaaaggaagcctcttggttggaaagcgatgccttatatcatagggaatgaaacattggagaggcttgccacattcggtttgatggcgaatttcatggtgtatatggtaagagagtatcatatggaccaagttcaagctgtcactcttatcaacacttggtctgctctcaccaactttgctcctatcatcggagctttcatctccgactcctacaccggaaaatttaataccattgtcttcggttccatcgctgagttgttgggcatgttggtgttgactttcacgtctctggtccctaatctacgaccaccaccttgcactgccgaccaaatcactggacaatgtattccctatagctattcgcagttatacgttttactctcaggacttttcttgttatcagttggaacaggtggaatccggtcatgcagtgttcctttcagtctcgatcagttcgatgattcgactgaagaaggaagagaaggaagtagaagcttctttagctggtactataccactcatacaatcgtccagttagtttcaatgacactagtgttgtacgtacagaacaacatcagttggggcattggattcgcaatcccgaccgttctcaatttttttgcgcttcttctgctttttgtgggtactcggtattatgtctttgtcaaacccgaaggaagtgtcttctctggagttttcaaggttcttgtggctgcttataagaaacgcaaggcacggtttacttctggaattgactaccatcaacccttactagagacagatttacaatcaaataaactcgtactcactgatcaattcagattcttgaacaaagctgtgatagtgatgaacaatgatgaagctggaaatgaggagtggagaacctgcacagtgagacagatagaggacatcaagtcaataatcagtattattccaatatttgcttcgagcattattggatttttggctatgaaccaacaacagacgtttacagtctcacaagcactaaaaatggacctccaatttccaggcacttcttacctaatccctcctgcttctataaccgtcatatcattattaaacataggtatatggcttcccttctatgaaaccgttttggtccgacacatcgaaaacattacaaaacaaaacggaggtatctcgttactacaaaaagtcggcattgggaatattttctccatctcgacgatgctcatatccggtattgtggagcgaaagagaagagatttatcgcttaatggagtaaaaatgtcggttttctggctaaccccgcaacaagtactaatgggattttatcaagtcttcacgattgttggtctcaccgagttcttcaacaaacaagttccaatcaacatgagaagcattgggaactcgttgctttacttaggtttgtctctagccagttatctaagcagtgccatggtgagcattgttcatagtgtgactgctcgtggaggacagagttggctaacggatgatattgacaaaagcaagttggattgtttctattactttattgccgctttaagcactcttaatttcatcttcttcttctggtgtgctcgaaggtatcgttacagaaactatagtaatgaacaataa

SEQ ID NO: 70237 - protein, 555 aa, Arabidopsis thaliana
  peptide (1)..(555): Ceres Seq. ID no. 2183316
MDNEKGTSSSDLTTRQRKPLGWKAMPYIIGNETLERLATFGLMANFMVYMVREYHMDQVQAVTLINTWSALTNFAPIIGAFISDSYTGKFNTIVFGSIAELLGMLVLTFTSLVPNLRPPPCTADQITGQCIPYSYSQLYVLLSGLFLLSVGTGGIRSCSVPFSLDQFDDSTEEGREGSRSFFSWYYTTHTIVQLVSMTLVLYVQNNISWGIGFAIPTVLNFFALLLLFVGTRYYVFVKPEGSVFSGVFKVLVAAYKKRKARFTSGIDYHQPLLETDLQSNKLVLTDQFRFLNKAVIVMNNDEAGNEEWRTCTVRQIEDIKSIISIIPIFASSIIGFLAMNQQQTFTVSQALKMDLQFPGTSYLIPPASITVISLLNIGIWLPFYETVLVRHIENITKQNGGISLLQKVGIGNIFSISTMLISGIVERKRRDLSLNGVKMSVFWLTPQQVLMGFYQVFTIVGLTEFFNKQVPINMRSIGNSLLYLGLSLASYLSSAMVSIVHSVTARGGQSWLTDDIDKSKLDCFYYFIAALSTLNFIFFFWCARRYRYRNYSNEQ

SEQ ID NO: 70238 - protein, 531 aa, Arabidopsis thaliana
  peptide (1)..(531): Ceres Seq. ID no. 2183317
MPYIIGNETLERLATFGLMANFMVYMVREYHMDQVQAVTLINTWSALTNFAPIIGAFISDSYTGKFNTIVFGSIAELLGMLVLTFTSLVPNLRPPPCTADQITGQCIPYSYSQLYVLLSGLFLLSVGTGGIRSCSVPFSLDQFDDSTEEGREGSRSFFSWYYTTHTIVQLVSMTLVLYVQNNISWGIGFAIPTVLNFFALLLLFVGTRYYVFVKPEGSVFSGVFKVLVAAYKKRKARFTSGIDYHQPLLETDLQSNKLVLTDQFRFLNKAVIVMNNDEAGNEEWRTCTVRQIEDIKSIISIIPIFASSIIGFLAMNQQQTFTVSQALKMDLQFPGTSYLIPPASITVISLLNIGIWLPFYETVLVRHIENITKQNGGISLLQKVGIGNIFSISTMLISGIVERKRRDLSLNGVKMSVFWLTPQQVLMGFYQVFTIVGLTEFFNKQVPINMRSIGNSLLYLGLSLASYLSSAMVSIVHSVTARGGQSWLTDDIDKSKLDCFYYFIAALSTLNFIFFFWCARRYRYRNYSNEQ

SEQ ID NO: 70239 - protein, 513 aa, Arabidopsis thaliana
  peptide (1)..(513): Ceres Seq. ID no. 2183318
MANFMVYMVREYHMDQVQAVTLINTWSALTNFAPIIGAFISDSYTGKFNTIVFGSIAELLGMLVLTFTSLVPNLRPPPCTADQITGQCIPYSYSQLYVLLSGLFLLSVGTGGIRSCSVPFSLDQFDDSTEEGREGSRSFFSWYYTTHTIVQLVSMTLVLYVQNNISWGIGFAIPTVLNFFALLLLFVGTRYYVFVKPEGSVFSGVFKVLVAAYKKRKARFTSGIDYHQPLLETDLQSNKLVLTDQFRFLNKAVIVMNNDEAGNEEWRTCTVRQIEDIKSIISIIPIFASSIIGFLAMNQQQTFTVSQALKMDLQFPGTSYLIPPASITVISLLNIGIWLPFYETVLVRHIENITKQNGGISLLQKVGIGNIFSISTMLISGIVERKRRDLSLNGVKMSVFWLTPQQVLMGFYQVFTIVGLTEFFNKQVPINMRSIGNSLLYLGLSLASYLSSAMVSIVHSVTARGGQSWLTDDIDKSKLDCFYYFIAALSTLNFIFFFWCARRYRYRNYSNEQ

SEQ ID NO: 70240 - DNA, 1740 bp, Arabidopsis thaliana
  misc_feature (1)..(1740): Ceres Seq. ID no. 2184283
  misc_feature (1)..(1740): Ortholog of  Ceres SEQ ID NO 13600419 as cited in SEQ ID NO 0
atggagaagcgagtcaaatacaagagctttgtgaaggatccaggaactcttggatccctcgaattaagtgaagtgatgctgctctttgtcccaaatgatcctaaatcagatttgaagcttaaagttcagactcacaacatcaaaagtcagaaatataccaaagaaggatcaaataaacctccttggctcaatctgaccagcaagcagggaaggagtcatatctttgagtttgaaaattatcctgacatgcatgcttgtcgtgatttcatcactaaggcccttgctaaatgtgaagaggagcctaataaactagttgtcttgacacctgctgaacaacttagtatggcagaatttgagctacgcttcaagcttcttcgagaaaatagtgagttgcagaaattgcataagcaatttgtggaaagtaaagtcctgacggaagacgaattctggtctacgaggaagaaattacttggtaaagattccattagaaagtcaaaacaacagatggggctcaaaagcatgatggtttcaggcatcaaaccgtctactgatggccggactaatagggtgacgtttaacttaacgtctgagataatttttcagatttttgctgagaagccggctgttcgccaggcattcataaattatgttccgaaaaagatgacagaaaaggacttttggacaaaatattttagagcagaatatctttacagcacaaaaaatacagcagtagctgcagcagaagctgctgaggatgaggaactcgctgtctttctgaagcctgacgagatattggctcaggaagctcgtcaaaagatgagacgggttgatccaactcttgacatggacgctgacgagggagatgactacacccatcttatggaccacgggatccagcgcgatggcaccaatgacattattgaaccacagaatgaccagcttaagaggtcacttttacaagatcttaatcgtcatgctgctgttgtattggaaggaagatgcatcaatgttcagtctgaagatacgagaattgttgcagaggctctcacacgggcgaaacaagtaagcaaagctgatggtgaaatcaccaaggacgctaatcaggagaggttggagagaatgtcccgtgcaacagaaatggaggatcttcaagcaccacaaaacttcccattagcaccactctctatcaaggaccctcgtgattactttgaatctcaacaaggaaacatcctcagtgaacccagaggagcaaaggcgtcaaaaagaaatgtccatgaagcttatggattactaaaagaatccattttggtgattagaatgacgggattaagtgatccgttgattaaacctgaagtttcctttgaggttttcagttcgttgacccgaactatctcaactgccaaaaatattctcgggaagaacccgcaagagagctttctggacagattaccaaagtccactaaggatgaagttatacatcactggacatcaatacaagaattagtgagacatttttggtcatcttacccaataacaacgacatatcttagtaccaaggttggtaaactgaaggatgcaatgtccaatacttattcactactcgatgcaatgaaacagtcggtgcagtctgatctccggcatcaagtttccttactagttcgtccaatgcaacaggctcttgatgctgcgttccaacactacgaatcggacttgcagagaagaaccgctaagattacatag

SEQ ID NO: 70241 - protein, 579 aa, Arabidopsis thaliana
  peptide (1)..(579): Ceres Seq. ID no. 2184284
MEKRVKYKSFVKDPGTLGSLELSEVMLLFVPNDPKSDLKLKVQTHNIKSQKYTKEGSNKPPWLNLTSKQGRSHIFEFENYPDMHACRDFITKALAKCEEEPNKLVVLTPAEQLSMAEFELRFKLLRENSELQKLHKQFVESKVLTEDEFWSTRKKLLGKDSIRKSKQQMGLKSMMVSGIKPSTDGRTNRVTFNLTSEIIFQIFAEKPAVRQAFINYVPKKMTEKDFWTKYFRAEYLYSTKNTAVAAAEAAEDEELAVFLKPDEILAQEARQKMRRVDPTLDMDADEGDDYTHLMDHGIQRDGTNDIIEPQNDQLKRSLLQDLNRHAAVVLEGRCINVQSEDTRIVAEALTRAKQVSKADGEITKDANQERLERMSRATEMEDLQAPQNFPLAPLSIKDPRDYFESQQGNILSEPRGAKASKRNVHEAYGLLKESILVIRMTGLSDPLIKPEVSFEVFSSLTRTISTAKNILGKNPQESFLDRLPKSTKDEVIHHWTSIQELVRHFWSSYPITTTYLSTKVGKLKDAMSNTYSLLDAMKQSVQSDLRHQVSLLVRPMQQALDAAFQHYESDLQRRTAKIT

SEQ ID NO: 70242 - protein, 554 aa, Arabidopsis thaliana
  peptide (1)..(554): Ceres Seq. ID no. 2184285
MLLFVPNDPKSDLKLKVQTHNIKSQKYTKEGSNKPPWLNLTSKQGRSHIFEFENYPDMHACRDFITKALAKCEEEPNKLVVLTPAEQLSMAEFELRFKLLRENSELQKLHKQFVESKVLTEDEFWSTRKKLLGKDSIRKSKQQMGLKSMMVSGIKPSTDGRTNRVTFNLTSEIIFQIFAEKPAVRQAFINYVPKKMTEKDFWTKYFRAEYLYSTKNTAVAAAEAAEDEELAVFLKPDEILAQEARQKMRRVDPTLDMDADEGDDYTHLMDHGIQRDGTNDIIEPQNDQLKRSLLQDLNRHAAVVLEGRCINVQSEDTRIVAEALTRAKQVSKADGEITKDANQERLERMSRATEMEDLQAPQNFPLAPLSIKDPRDYFESQQGNILSEPRGAKASKRNVHEAYGLLKESILVIRMTGLSDPLIKPEVSFEVFSSLTRTISTAKNILGKNPQESFLDRLPKSTKDEVIHHWTSIQELVRHFWSSYPITTTYLSTKVGKLKDAMSNTYSLLDAMKQSVQSDLRHQVSLLVRPMQQALDAAFQHYESDLQRRTAKIT

SEQ ID NO: 70243 - protein, 497 aa, Arabidopsis thaliana
  peptide (1)..(497): Ceres Seq. ID no. 2184286
MHACRDFITKALAKCEEEPNKLVVLTPAEQLSMAEFELRFKLLRENSELQKLHKQFVESKVLTEDEFWSTRKKLLGKDSIRKSKQQMGLKSMMVSGIKPSTDGRTNRVTFNLTSEIIFQIFAEKPAVRQAFINYVPKKMTEKDFWTKYFRAEYLYSTKNTAVAAAEAAEDEELAVFLKPDEILAQEARQKMRRVDPTLDMDADEGDDYTHLMDHGIQRDGTNDIIEPQNDQLKRSLLQDLNRHAAVVLEGRCINVQSEDTRIVAEALTRAKQVSKADGEITKDANQERLERMSRATEMEDLQAPQNFPLAPLSIKDPRDYFESQQGNILSEPRGAKASKRNVHEAYGLLKESILVIRMTGLSDPLIKPEVSFEVFSSLTRTISTAKNILGKNPQESFLDRLPKSTKDEVIHHWTSIQELVRHFWSSYPITTTYLSTKVGKLKDAMSNTYSLLDAMKQSVQSDLRHQVSLLVRPMQQALDAAFQHYESDLQRRTAKIT

SEQ ID NO: 70244 - DNA, 1056 bp, Arabidopsis thaliana
  misc_feature (1)..(1056): Ceres Seq. ID no. 2185574
  misc_feature (1)..(1056): Ortholog of  Ceres SEQ ID NO 13593955 as cited in SEQ ID NO 54278
  misc_feature (1)..(1056): Ortholog of  Ceres SEQ ID NO 14314092 as cited in SEQ ID NO 62788
  misc_feature (1)..(1056): Ortholog of  Ceres SEQ ID NO 13655302 as cited in SEQ ID NO 63307
  misc_feature (1)..(1056): Ortholog of  Ceres SEQ ID NO 13597380 as cited in SEQ ID NO 64054
  misc_feature (1)..(1056): Ortholog of  Ceres SEQ ID NO 12625474 as cited in SEQ ID NO 64169
  misc_feature (1)..(1056): Ortholog of  Ceres SEQ ID NO 13597502 as cited in SEQ ID NO 64681
atgcaaaagatgagagtttcggggtttagagttcttctcttggtttcttgtttcttctgcaaatccaaaggagctgttgttcctgcactcatcatgtttggcgactccattgttgacgttggcaacaacaataacttactcagcattgtcaaatccaactttcttccttacggtagagacttcatcgaccaaagacccaccggaagattctgcaacggaaaactcgctgtagatttctcagccgagtaccttggtttctcttcatacccacctgcattcctaagccgggaagcaagcaacgagaatatcctgatcggtgccaactttgcatcagcttcttcaggatactatgatgccacatctgttccatttggctcgatctccttaacacgacagctgagctattacagggcgtatcaaaatagagtaacgagaatgatcgggagggggaacgcgcgcatactgttctctagaggtatccacattttgagtgcgggatctagcgactttcttcagaattattacatcaatcctctactcaacatcctaaatacacctgatcagttcgctgacattctcctgagatccttctcagaattcatccagaatctgtatgaactaggagcaaggagaatcggagtgatatcgctaccgccgatgggttgcctgcctgcagctatcactcttttcggtgcaggaaacaaaagttgtgttgagagactgaacaatgatgctatcatgttcaatactaaacttgagaacacaacccggttactgatgaatagacactcaggcctcagactcgtcgcctttaatgtctaccaacctttcctggacatcatcaccaacccaactgacaatggattctttgaaacaaaaagggcatgctgcggaacagggacaatagaaacatcgttcctttgcaattctctatccttcggaacgtgtgtaaatgccacaggatatgtgttttgggatggatttcatcccacagaggctgtaaacgagctgttggctggtcaactactgggtcaagggatttctctaatcaattga

SEQ ID NO: 70245 - protein, 351 aa, Arabidopsis thaliana
  peptide (1)..(351): Ceres Seq. ID no. 2185575
MQKMRVSGFRVLLLVSCFFCKSKGAVVPALIMFGDSIVDVGNNNNLLSIVKSNFLPYGRDFIDQRPTGRFCNGKLAVDFSAEYLGFSSYPPAFLSREASNENILIGANFASASSGYYDATSVPFGSISLTRQLSYYRAYQNRVTRMIGRGNARILFSRGIHILSAGSSDFLQNYYINPLLNILNTPDQFADILLRSFSEFIQNLYELGARRIGVISLPPMGCLPAAITLFGAGNKSCVERLNNDAIMFNTKLENTTRLLMNRHSGLRLVAFNVYQPFLDIITNPTDNGFFETKRACCGTGTIETSFLCNSLSFGTCVNATGYVFWDGFHPTEAVNELLAGQLLGQGISLIN

SEQ ID NO: 70246 - protein, 348 aa, Arabidopsis thaliana
  peptide (1)..(348): Ceres Seq. ID no. 2185576
MRVSGFRVLLLVSCFFCKSKGAVVPALIMFGDSIVDVGNNNNLLSIVKSNFLPYGRDFIDQRPTGRFCNGKLAVDFSAEYLGFSSYPPAFLSREASNENILIGANFASASSGYYDATSVPFGSISLTRQLSYYRAYQNRVTRMIGRGNARILFSRGIHILSAGSSDFLQNYYINPLLNILNTPDQFADILLRSFSEFIQNLYELGARRIGVISLPPMGCLPAAITLFGAGNKSCVERLNNDAIMFNTKLENTTRLLMNRHSGLRLVAFNVYQPFLDIITNPTDNGFFETKRACCGTGTIETSFLCNSLSFGTCVNATGYVFWDGFHPTEAVNELLAGQLLGQGISLIN

SEQ ID NO: 70247 - protein, 320 aa, Arabidopsis thaliana
  peptide (1)..(320): Ceres Seq. ID no. 2185577
MFGDSIVDVGNNNNLLSIVKSNFLPYGRDFIDQRPTGRFCNGKLAVDFSAEYLGFSSYPPAFLSREASNENILIGANFASASSGYYDATSVPFGSISLTRQLSYYRAYQNRVTRMIGRGNARILFSRGIHILSAGSSDFLQNYYINPLLNILNTPDQFADILLRSFSEFIQNLYELGARRIGVISLPPMGCLPAAITLFGAGNKSCVERLNNDAIMFNTKLENTTRLLMNRHSGLRLVAFNVYQPFLDIITNPTDNGFFETKRACCGTGTIETSFLCNSLSFGTCVNATGYVFWDGFHPTEAVNELLAGQLLGQGISLIN

SEQ ID NO: 70248 - DNA, 1620 bp, Arabidopsis thaliana
  misc_feature (1)..(1620): Ceres Seq. ID no. 2185743
  misc_feature (1)..(1620): Ortholog of  Ceres SEQ ID NO 12608463 as cited in SEQ ID NO 60238
atgatgaggaactcgccgtcatatacctctgcaacgcactctcgtaatttcgacaccattttgtctccactcgtcaaaaccggcaccggtgcttctaaccgatcctacgccttcttctccatctttctcttcctcctcctcggcgcgtttctctccacgcgcctcctcctcgatccctccgttttgatagagaaagaagcggtgtccgtgactgagagagaaaccactcaatccccagaataccctcagtcgactaagctaattacggaaaaaccaaaagagtttacgctaaactgcgctgctttctccggcaacgacactggaacttgcccaaaggacaattatccgacgagtttccgatctagcgccggagaaggagaatctgaccgttctccatccgccacgtgcccagattacttccgatggattcacgaggatctacggccatgggagaagaccgggatcacgagggaagccttggagcgagccaatgcgacggcgattttccgcctggcgattatcaacgggagaatctacgtcgagaaatttcgtgaggcttttcagacaagagatgtgttcacgatctggggattcgtacagctcctacggagatatccgggaaagattccggatctcgagctcatgtttgactgcgttgactggccggtagtgaaggcggctgaattcgccggagttgatcaacctccaccgccgccattgttccgttattgcgcgaacgacgagacgctcgacattgtatttcccgattggtcctattggggatgggctgaggtgaatataaagccatgggaaagtctgttgaaagaactaagagaaggaaaccagaggactaaatggatagatagagagccttatgcttactggaaagggaatccaacggttgctgagacgagacttgatctcatgaaatgtaatctctccgaggtgtatgactggaaagctcgtttgtacaagcaggactgggtcaaggaatcaaaggaaggttacaagcagtcagacttggcgagccaatgccatcacaggtacaagatttacatagaagggtctgcgtggtcggtgagtgagaagtacattctggcttgtgactcggtgacattaatggtgaaacctcattactacgatttcttcacaagaggtatgtttccaggtcaccattactggcctgtcaaggaggacgacaaatgccgttccatcaaattcgctgttgattggggcaacttgcatatgcgaaaggcacaagacataggtaagaaggcaagtgagtttgtgcaacaagaactcaagatggactatgtgtacgattacatgtttcatctcttaatccaatactctaaactcctccggtttaaacccgagatccctcagaactccactgagctctgctcagaggcaatggcatgcccgagggatggaaatgaacgaaagtttatgatggaatcactcgtaaaacgcccagctgagacaggtccctgcgccatgccgcctccgtatgatccggcatcattttattcagttttgaaaaggagacagagtacgactagtagaatcgaacagtgggagagtaagtactggaggaagcagaacaagaccggttcgtaa

SEQ ID NO: 70249 - protein, 539 aa, Arabidopsis thaliana
  peptide (1)..(539): Ceres Seq. ID no. 2185744
MMRNSPSYTSATHSRNFDTILSPLVKTGTGASNRSYAFFSIFLFLLLGAFLSTRLLLDPSVLIEKEAVSVTERETTQSPEYPQSTKLITEKPKEFTLNCAAFSGNDTGTCPKDNYPTSFRSSAGEGESDRSPSATCPDYFRWIHEDLRPWEKTGITREALERANATAIFRLAIINGRIYVEKFREAFQTRDVFTIWGFVQLLRRYPGKIPDLELMFDCVDWPVVKAAEFAGVDQPPPPPLFRYCANDETLDIVFPDWSYWGWAEVNIKPWESLLKELREGNQRTKWIDREPYAYWKGNPTVAETRLDLMKCNLSEVYDWKARLYKQDWVKESKEGYKQSDLASQCHHRYKIYIEGSAWSVSEKYILACDSVTLMVKPHYYDFFTRGMFPGHHYWPVKEDDKCRSIKFAVDWGNLHMRKAQDIGKKASEFVQQELKMDYVYDYMFHLLIQYSKLLRFKPEIPQNSTELCSEAMACPRDGNERKFMMESLVKRPAETGPCAMPPPYDPASFYSVLKRRQSTTSRIEQWESKYWRKQNKTGS

SEQ ID NO: 70250 - protein, 538 aa, Arabidopsis thaliana
  peptide (1)..(538): Ceres Seq. ID no. 2185745
MRNSPSYTSATHSRNFDTILSPLVKTGTGASNRSYAFFSIFLFLLLGAFLSTRLLLDPSVLIEKEAVSVTERETTQSPEYPQSTKLITEKPKEFTLNCAAFSGNDTGTCPKDNYPTSFRSSAGEGESDRSPSATCPDYFRWIHEDLRPWEKTGITREALERANATAIFRLAIINGRIYVEKFREAFQTRDVFTIWGFVQLLRRYPGKIPDLELMFDCVDWPVVKAAEFAGVDQPPPPPLFRYCANDETLDIVFPDWSYWGWAEVNIKPWESLLKELREGNQRTKWIDREPYAYWKGNPTVAETRLDLMKCNLSEVYDWKARLYKQDWVKESKEGYKQSDLASQCHHRYKIYIEGSAWSVSEKYILACDSVTLMVKPHYYDFFTRGMFPGHHYWPVKEDDKCRSIKFAVDWGNLHMRKAQDIGKKASEFVQQELKMDYVYDYMFHLLIQYSKLLRFKPEIPQNSTELCSEAMACPRDGNERKFMMESLVKRPAETGPCAMPPPYDPASFYSVLKRRQSTTSRIEQWESKYWRKQNKTGS

SEQ ID NO: 70251 - protein, 325 aa, Arabidopsis thaliana
  peptide (1)..(325): Ceres Seq. ID no. 2185746
MFDCVDWPVVKAAEFAGVDQPPPPPLFRYCANDETLDIVFPDWSYWGWAEVNIKPWESLLKELREGNQRTKWIDREPYAYWKGNPTVAETRLDLMKCNLSEVYDWKARLYKQDWVKESKEGYKQSDLASQCHHRYKIYIEGSAWSVSEKYILACDSVTLMVKPHYYDFFTRGMFPGHHYWPVKEDDKCRSIKFAVDWGNLHMRKAQDIGKKASEFVQQELKMDYVYDYMFHLLIQYSKLLRFKPEIPQNSTELCSEAMACPRDGNERKFMMESLVKRPAETGPCAMPPPYDPASFYSVLKRRQSTTSRIEQWESKYWRKQNKTGS

SEQ ID NO: 70252 - DNA, 699 bp, Arabidopsis thaliana
  misc_feature (1)..(699): Ceres Seq. ID no. 2187003
  misc_feature (1)..(699): Ortholog of  Ceres SEQ ID NO 13584519 as cited in SEQ ID NO 64685
atgaactctcgagatcttacactcgtctctacatctgcaatcttcggtgctttgatttcagctctagcatttcgcttcttctcatcaaaccctaaaaaccccaaatcccgaaaattcacttccaccgaaatctctgcaatttccagaaaattccctgctctagatcctttcagtcctttgaaacgaaatgggtacttatcatgggatgattatttcatggcgattgcattcctttctgcagaacgatccaaggatcctaacaggcaggttggcgcatgtttggtgagccaaaatggtgtaatccttgggattggctataatggttttccaagaggctgctctgatgacaaacttccttgggccaagaaatcaagaactggggacccattagagaccaagtatccatatgtttgtcacgctgaagtcaatgccatactaaacacaaaccacgcatcggcggctggccagaagctttatgtgacaatgttcccttgcaatgaatgtgccaagattattttacagtctggtgttgctgaggtaatctattttgtggaaaagagaccaaatgactcagatgttgcctatgtagcttctcacaagctcttatccatggcaaacgtcaaagtcaggaaacatcaaccagagatggatgagatcttgatcaagttcgaagaacacttactccaaccagagacctaa

SEQ ID NO: 70253 - protein, 232 aa, Arabidopsis thaliana
  peptide (1)..(232): Ceres Seq. ID no. 2187004
MNSRDLTLVSTSAIFGALISALAFRFFSSNPKNPKSRKFTSTEISAISRKFPALDPFSPLKRNGYLSWDDYFMAIAFLSAERSKDPNRQVGACLVSQNGVILGIGYNGFPRGCSDDKLPWAKKSRTGDPLETKYPYVCHAEVNAILNTNHASAAGQKLYVTMFPCNECAKIILQSGVAEVIYFVEKRPNDSDVAYVASHKLLSMANVKVRKHQPEMDEILIKFEEHLLQPET

SEQ ID NO: 70254 - protein, 160 aa, Arabidopsis thaliana
  peptide (1)..(160): Ceres Seq. ID no. 2187005
MAIAFLSAERSKDPNRQVGACLVSQNGVILGIGYNGFPRGCSDDKLPWAKKSRTGDPLETKYPYVCHAEVNAILNTNHASAAGQKLYVTMFPCNECAKIILQSGVAEVIYFVEKRPNDSDVAYVASHKLLSMANVKVRKHQPEMDEILIKFEEHLLQPET

SEQ ID NO: 70255 - DNA, 1563 bp, Arabidopsis thaliana
  misc_feature (1)..(1563): Ceres Seq. ID no. 2187026
  misc_feature (1)..(1563): Ortholog of  Ceres SEQ ID NO 13655463 as cited in SEQ ID NO 69035
  misc_feature (1)..(1563): Ortholog of  Ceres SEQ ID NO 15180063 as cited in SEQ ID NO 0
atgaaaccatcatcagcttcaagattttctttaactttctcacactttctcacactctactgtcttctcacacaaacacatgtagctcaaggatctcatcaatggcaatcaccaatcaaaaccgtcgtcgttttagtgttggagaatcgatctttcgatcatctcttaggatggatgaagaactcagtaaacccgacaataaacggtgtaacgggtcaagaatgtaacccggttccgaattctacacaaactatatgtttcactagtgatgctgagtttgtggatccggatccgggtcattcgtttgaagctgttgagcaacaagtattcgggtctgggccgggtcagatcccgtccatgatgggtttcgttgagcaagcgctttccatgccgggaaatttgtcggagactgtaatgaaaggctttaggcctgaagctgttccggtttatgctgagctggttaaggaattcgctgtgttcgaccggtggttttcttcaattcccggtccgactcaaccaaaccggttatttgtctattcggctacctcacatggttccactagccatgtcaagaaacaactcgctcaagggtatccacagaagacgatatttgattcgcttcatagcaacgacatcgacttcggaatatactttcagaatattccgaccacattattctaccgtaatctccgacagctaaagtacattttcaatttgcatcaatacgatttgaaattcaagaaagacgcggccaaaggaaagttaccgagcttaaccgtaatcgaaccgaggtatttcgatctcaaaggtttaccggctaacgatgatcacccgtcgcatgacgtggctaacggtcaaaagctggttaaagaagtgtacgaggcacttaggtcgagtccacagtggaacgagacgctcctagttataacctatgatgagcatggtgggttctatgatcacgtcaagactccttatgtcggtataccaaatcccgatgggaatactggaccggctcctggtttctttaaattcgaccggttaggtgttcgtgttcctaccattatggtttcgccttggattcaaaaaggaaccgtcgtaagtgaagcaaaaggaccaacagagagctcagagtacgagcattcatcaataccagcgacaatcaagaaactcttcaatctctcttccaatttcttaacacatagagatgcatgggctgctactttcgaagacgttgtatctcacttaaccactcctcgaaccgattgtcccatgactctacctgaagttgcacctatgagagccactgagcctaaagaagacgctgctctttctgagtttcaaggtgaagtggttcagcttgcagcggttctcaatggtgatcacttcctcagtagcttcccggaagaaattggaaagaagatgactgtgaaacaagctcatgagtatgtcaaaggagctacttctcggttcattagagctagtaaagaggcaatgaagcttggtgccgataaatctgctattgtcgatatgcgatcttcgctcactacacggccacacaactga

SEQ ID NO: 70256 - protein, 520 aa, Arabidopsis thaliana
  peptide (1)..(520): Ceres Seq. ID no. 2187027
MKPSSASRFSLTFSHFLTLYCLLTQTHVAQGSHQWQSPIKTVVVLVLENRSFDHLLGWMKNSVNPTINGVTGQECNPVPNSTQTICFTSDAEFVDPDPGHSFEAVEQQVFGSGPGQIPSMMGFVEQALSMPGNLSETVMKGFRPEAVPVYAELVKEFAVFDRWFSSIPGPTQPNRLFVYSATSHGSTSHVKKQLAQGYPQKTIFDSLHSNDIDFGIYFQNIPTTLFYRNLRQLKYIFNLHQYDLKFKKDAAKGKLPSLTVIEPRYFDLKGLPANDDHPSHDVANGQKLVKEVYEALRSSPQWNETLLVITYDEHGGFYDHVKTPYVGIPNPDGNTGPAPGFFKFDRLGVRVPTIMVSPWIQKGTVVSEAKGPTESSEYEHSSIPATIKKLFNLSSNFLTHRDAWAATFEDVVSHLTTPRTDCPMTLPEVAPMRATEPKEDAALSEFQGEVVQLAAVLNGDHFLSSFPEEIGKKMTVKQAHEYVKGATSRFIRASKEAMKLGADKSAIVDMRSSLTTRPHN

SEQ ID NO: 70257 - protein, 462 aa, Arabidopsis thaliana
  peptide (1)..(462): Ceres Seq. ID no. 2187028
MKNSVNPTINGVTGQECNPVPNSTQTICFTSDAEFVDPDPGHSFEAVEQQVFGSGPGQIPSMMGFVEQALSMPGNLSETVMKGFRPEAVPVYAELVKEFAVFDRWFSSIPGPTQPNRLFVYSATSHGSTSHVKKQLAQGYPQKTIFDSLHSNDIDFGIYFQNIPTTLFYRNLRQLKYIFNLHQYDLKFKKDAAKGKLPSLTVIEPRYFDLKGLPANDDHPSHDVANGQKLVKEVYEALRSSPQWNETLLVITYDEHGGFYDHVKTPYVGIPNPDGNTGPAPGFFKFDRLGVRVPTIMVSPWIQKGTVVSEAKGPTESSEYEHSSIPATIKKLFNLSSNFLTHRDAWAATFEDVVSHLTTPRTDCPMTLPEVAPMRATEPKEDAALSEFQGEVVQLAAVLNGDHFLSSFPEEIGKKMTVKQAHEYVKGATSRFIRASKEAMKLGADKSAIVDMRSSLTTRPHN

SEQ ID NO: 70258 - protein, 401 aa, Arabidopsis thaliana
  peptide (1)..(401): Ceres Seq. ID no. 2187029
MMGFVEQALSMPGNLSETVMKGFRPEAVPVYAELVKEFAVFDRWFSSIPGPTQPNRLFVYSATSHGSTSHVKKQLAQGYPQKTIFDSLHSNDIDFGIYFQNIPTTLFYRNLRQLKYIFNLHQYDLKFKKDAAKGKLPSLTVIEPRYFDLKGLPANDDHPSHDVANGQKLVKEVYEALRSSPQWNETLLVITYDEHGGFYDHVKTPYVGIPNPDGNTGPAPGFFKFDRLGVRVPTIMVSPWIQKGTVVSEAKGPTESSEYEHSSIPATIKKLFNLSSNFLTHRDAWAATFEDVVSHLTTPRTDCPMTLPEVAPMRATEPKEDAALSEFQGEVVQLAAVLNGDHFLSSFPEEIGKKMTVKQAHEYVKGATSRFIRASKEAMKLGADKSAIVDMRSSLTTRPHN

SEQ ID NO: 70259 - DNA, 1626 bp, Arabidopsis thaliana
  misc_feature (1)..(1626): Ceres Seq. ID no. 2701859
  misc_feature (1)..(1626): Ortholog of  Ceres SEQ ID NO 14308370 as cited in SEQ ID NO 55399
atggcattggcagaggagcagcatcagaattatcatgtggctgaggcgattccgggtacgcctgggatccatgatgtcaggattcaacccggttctgagaattccgggttctgtgttgatccggttggtgtttctaatgtacctggaattaggagagttgggttgagagctgaaatcgatacttctcctccattcggatcggttcaggaggcggtgactcgattcggtggtcgtggttattgggttcctttcaagcttgatgacactttccattacaatattgagattgaatataactcgagtctagaatttcataatcgaggttttagcaacatatataatggtgaatttgacattaagagaatggaggagcatgcagcggagcttgagaaggatctgattgtgaaagagcttgaaactttggatgttttagaagctcttggatcaaccaaaaggatcgttgaagatttgaagcggcagcttcagcaagaagcactgagatgctctgaccaactcagttcagatatcaaagagatgaacgatgagcattgccatcacaatcccatgtcatctcctgatttgatcttgatggaattgaagcaagctaagatgaatcttggtaaaaccatggacaaccttgtagtgatccagtcctctgttgaatctctgaataagaaaatgaaagaagagaaagacttccttgagaagacacgggctaagctaacgtatgggtttggtggaccggtatctctagctgaggagttgagtcggattaaggtaaaaccacaggttcaagatgaaccgttaagggagcaggttaagatggttgctgaagccgatgaaacgggtttaaacctgcagaacaagaacagtctgagaactgcagagatgagattggttgctgctaggaaaatggaagaagctgcgaaagcagcggaagcacttgcgattgctgaaattacaatgttatcatccaatggtgaaagccaggacgatgattcggaattttgctttccagagcctccaagatctcctgtgacaccaagaggactcaggattgataatgacttctccacggataagagttcaagacgagggattttgaagaagcttgaggaagctactgaaggagttaaacaaagtaagcaggctttagaagctgcgttaaaccgagtagagatcgctaatgtgaagcaacttgcagctgaaaatgctttccgcgggtggacaaaagactcattgaaaggcgataactttacacctttgaatcatacccgacgctcctttttcagccatttgaacaagcatcacgagccacttgacattctcccaaagccagtgttaaagtctaatatctcaatgcgtgatgttctaaggcgtaagcaagttccaaaggaagatgttgttgctccccaaagacagagccttgaagggcaaataccgaggcgaaatgtgaatttgagccaaatgttgaaggaactaaagcaggatgtgaagttttcggcacggggagagaaagaggaggtacatgaagagaaacagtacgtcacgcagaggagaaagtttgggttcatacacattacacttccactgcagaagcagagcaagaaaaaatccagcctttaa

SEQ ID NO: 70260 - protein, 541 aa, Arabidopsis thaliana
  peptide (1)..(541): Ceres Seq. ID no. 2701860
MALAEEQHQNYHVAEAIPGTPGIHDVRIQPGSENSGFCVDPVGVSNVPGIRRVGLRAEIDTSPPFGSVQEAVTRFGGRGYWVPFKLDDTFHYNIEIEYNSSLEFHNRGFSNIYNGEFDIKRMEEHAAELEKDLIVKELETLDVLEALGSTKRIVEDLKRQLQQEALRCSDQLSSDIKEMNDEHCHHNPMSSPDLILMELKQAKMNLGKTMDNLVVIQSSVESLNKKMKEEKDFLEKTRAKLTYGFGGPVSLAEELSRIKVKPQVQDEPLREQVKMVAEADETGLNLQNKNSLRTAEMRLVAARKMEEAAKAAEALAIAEITMLSSNGESQDDDSEFCFPEPPRSPVTPRGLRIDNDFSTDKSSRRGILKKLEEATEGVKQSKQALEAALNRVEIANVKQLAAENAFRGWTKDSLKGDNFTPLNHTRRSFFSHLNKHHEPLDILPKPVLKSNISMRDVLRRKQVPKEDVVAPQRQSLEGQIPRRNVNLSQMLKELKQDVKFSARGEKEEVHEEKQYVTQRRKFGFIHITLPLQKQSKKKSSL

SEQ ID NO: 70261 - protein, 420 aa, Arabidopsis thaliana
  peptide (1)..(420): Ceres Seq. ID no. 2701861
MEEHAAELEKDLIVKELETLDVLEALGSTKRIVEDLKRQLQQEALRCSDQLSSDIKEMNDEHCHHNPMSSPDLILMELKQAKMNLGKTMDNLVVIQSSVESLNKKMKEEKDFLEKTRAKLTYGFGGPVSLAEELSRIKVKPQVQDEPLREQVKMVAEADETGLNLQNKNSLRTAEMRLVAARKMEEAAKAAEALAIAEITMLSSNGESQDDDSEFCFPEPPRSPVTPRGLRIDNDFSTDKSSRRGILKKLEEATEGVKQSKQALEAALNRVEIANVKQLAAENAFRGWTKDSLKGDNFTPLNHTRRSFFSHLNKHHEPLDILPKPVLKSNISMRDVLRRKQVPKEDVVAPQRQSLEGQIPRRNVNLSQMLKELKQDVKFSARGEKEEVHEEKQYVTQRRKFGFIHITLPLQKQSKKKSSL

SEQ ID NO: 70262 - protein, 363 aa, Arabidopsis thaliana
  peptide (1)..(363): Ceres Seq. ID no. 2701862
MNDEHCHHNPMSSPDLILMELKQAKMNLGKTMDNLVVIQSSVESLNKKMKEEKDFLEKTRAKLTYGFGGPVSLAEELSRIKVKPQVQDEPLREQVKMVAEADETGLNLQNKNSLRTAEMRLVAARKMEEAAKAAEALAIAEITMLSSNGESQDDDSEFCFPEPPRSPVTPRGLRIDNDFSTDKSSRRGILKKLEEATEGVKQSKQALEAALNRVEIANVKQLAAENAFRGWTKDSLKGDNFTPLNHTRRSFFSHLNKHHEPLDILPKPVLKSNISMRDVLRRKQVPKEDVVAPQRQSLEGQIPRRNVNLSQMLKELKQDVKFSARGEKEEVHEEKQYVTQRRKFGFIHITLPLQKQSKKKSSL

SEQ ID NO: 70263 - DNA, 1017 bp, Arabidopsis thaliana
  misc_feature (1)..(1017): Ceres Seq. ID no. 2702062
  misc_feature (1)..(1017): Ortholog of  Ceres SEQ ID NO 13654989 as cited in SEQ ID NO 63117
  misc_feature (1)..(1017): Ortholog of  Ceres SEQ ID NO 13657138 as cited in SEQ ID NO 65923
  misc_feature (1)..(1017): Ortholog of  Ceres SEQ ID NO 13584744 as cited in SEQ ID NO 69137
atgtttttttttcttgtcatcacatatgtagcaaatcaaaagaatcaaaaaccacaagatcttgcaaagcctaaggagattcttcccattatagttccttccttgtcagtggatgaggttaatgaacagactgacaattttggaccaaattctctgattggtgagggatcttatggaagggtatactatgcaactctaaatgatggaaaagcagttgctttgaagaaactcgatcttgcacctgaagatgaaacaaacaccgagtttttaagccaggtttccatggtttcaagactaaagcatgagaatctcattcaactggtcggttattgtgttgatgaaaaccttcgtgttcttgcttatgagtttgcaacaatgggatcattgcacgatattctgcatggtaggaagggagttcaagatgcactaccaggtccaacacttgactggataacaagggtgaagatagccgttgaggcagctagaggtttagaataccttcatgagaaggttcagcctcaagtaatacatagagacataagatctagcaatatacttctttttgacgactatcaagcaaaaattgctgattttaatctttcaaatcaatctcctgataatgctgctcgtttacaatctacaagagttttgggcagctttggctattactctccagaatatgctatgactggagagttgacacataagagtgatgtatatggttttggggttgtacttctagagctcttgacagggaggaaaccagttgaccatacaatgccgcgaggccaacaaagtcttgtaacttgggctacaccgaaacttagtgaagatacagtagaggagtgtgttgatccaaagctaaagggagaatattctcctaaatcagtagctaagctagcagcggtggcagcattgtgtgtgcaatatgaatctaattgtagaccaaaaatgagtacagttgtgaaagctttgcaacaacttcttatagcgacaggctcaataccgcaattctaa

SEQ ID NO: 70264 - protein, 338 aa, Arabidopsis thaliana
  peptide (1)..(338): Ceres Seq. ID no. 2702063
MFFFLVITYVANQKNQKPQDLAKPKEILPIIVPSLSVDEVNEQTDNFGPNSLIGEGSYGRVYYATLNDGKAVALKKLDLAPEDETNTEFLSQVSMVSRLKHENLIQLVGYCVDENLRVLAYEFATMGSLHDILHGRKGVQDALPGPTLDWITRVKIAVEAARGLEYLHEKVQPQVIHRDIRSSNILLFDDYQAKIADFNLSNQSPDNAARLQSTRVLGSFGYYSPEYAMTGELTHKSDVYGFGVVLLELLTGRKPVDHTMPRGQQSLVTWATPKLSEDTVEECVDPKLKGEYSPKSVAKLAAVAALCVQYESNCRPKMSTVVKALQQLLIATGSIPQF

SEQ ID NO: 70265 - protein, 244 aa, Arabidopsis thaliana
  peptide (1)..(244): Ceres Seq. ID no. 2702064
MVSRLKHENLIQLVGYCVDENLRVLAYEFATMGSLHDILHGRKGVQDALPGPTLDWITRVKIAVEAARGLEYLHEKVQPQVIHRDIRSSNILLFDDYQAKIADFNLSNQSPDNAARLQSTRVLGSFGYYSPEYAMTGELTHKSDVYGFGVVLLELLTGRKPVDHTMPRGQQSLVTWATPKLSEDTVEECVDPKLKGEYSPKSVAKLAAVAALCVQYESNCRPKMSTVVKALQQLLIATGSIPQF

SEQ ID NO: 70266 - protein, 213 aa, Arabidopsis thaliana
  peptide (1)..(213): Ceres Seq. ID no. 2702065
MGSLHDILHGRKGVQDALPGPTLDWITRVKIAVEAARGLEYLHEKVQPQVIHRDIRSSNILLFDDYQAKIADFNLSNQSPDNAARLQSTRVLGSFGYYSPEYAMTGELTHKSDVYGFGVVLLELLTGRKPVDHTMPRGQQSLVTWATPKLSEDTVEECVDPKLKGEYSPKSVAKLAAVAALCVQYESNCRPKMSTVVKALQQLLIATGSIPQF

SEQ ID NO: 70267 - DNA, 1317 bp, Arabidopsis thaliana
  misc_feature (1)..(1317): Ceres Seq. ID no. 2702066
  misc_feature (1)..(1317): Ortholog of  Ceres SEQ ID NO 14304479 as cited in SEQ ID NO 53547
atgagatcttcagcgggaaagcttctctcccattctctacggagaaaccgcgggaaacttggtgatggattttggattccggctacgaggtctcagaagatgtggaattcgacggtaccgtcagatgaaaatcctgatcaaaattcgatcgatgcaggatcttcaatgcggaaaccaattagcttatggcctggaatgtatcattctccggtgactaatgcgctttgggaagctcgtcgtaatatgttcgaaattcctaccggagacgacgcttctcagtcaaaattgacggctaaatctccgtctcgaagccgaacgaatccttggaatgagattcgtactggtaaattggttgaagatcttgacgctcttgctggaaccatctccttcaagcattgtggtggtgacagcagtgcgagatcgatgattttggtgactgcttcagtggataggattatcatgaaaagacctattcgtgtagatactgaccttagtatagttggtgctgttacatgggttggtagatcatccatggagatgcaattacaagtactccaaattcaagataccaacaactcctctgagtcggttgcccttgaagcaaactttacattcgtggctcgggatgctcagacaggcaagtcagctccaattaaccaagtcgtgccagaaactgagcatgaaaaatttctgtggaaagaggcagaagagaggaacaaactacgaaaacaaaagagagcacagggtaaagaagagcatgagaagttgaaggacttagagaggctaaatgagttattagcagaaggacgagtattcctggacatgccagctcttgcagatcggaacagcatcctaattaaggatacttcccatgaaaactcattgatctgccagccacagcaacgaaatattcatggcagaatttttggaggcttcttgatgcgcaaagcttttgagttggctttctccaatgcttacaccttcgctggggtttcaccacgttttctcgaagttgatcgcgtcgattttatcaaaccagtggatgttggaaatttccttcgtttcaagtcacgcgtattgtacacagaagcaaccagttcagctgaaccgctgataaacatcgaggttgtagctcatgttacaagtccagagctcagatccagcgaagtctccaacaggttttacttcaccttcagtgtgagacctgaggccatgaaagatggattgaaaataagaaatgtggttccagcaacagaagaagaagctagaagagtgatcgagcgcatggacgcagagagacccatctcattgccttga

SEQ ID NO: 70268 - protein, 438 aa, Arabidopsis thaliana
  peptide (1)..(438): Ceres Seq. ID no. 2702067
MRSSAGKLLSHSLRRNRGKLGDGFWIPATRSQKMWNSTVPSDENPDQNSIDAGSSMRKPISLWPGMYHSPVTNALWEARRNMFEIPTGDDASQSKLTAKSPSRSRTNPWNEIRTGKLVEDLDALAGTISFKHCGGDSSARSMILVTASVDRIIMKRPIRVDTDLSIVGAVTWVGRSSMEMQLQVLQIQDTNNSSESVALEANFTFVARDAQTGKSAPINQVVPETEHEKFLWKEAEERNKLRKQKRAQGKEEHEKLKDLERLNELLAEGRVFLDMPALADRNSILIKDTSHENSLICQPQQRNIHGRIFGGFLMRKAFELAFSNAYTFAGVSPRFLEVDRVDFIKPVDVGNFLRFKSRVLYTEATSSAEPLINIEVVAHVTSPELRSSEVSNRFYFTFSVRPEAMKDGLKIRNVVPATEEEARRVIERMDAERPISLP

SEQ ID NO: 70269 - protein, 405 aa, Arabidopsis thaliana
  peptide (1)..(405): Ceres Seq. ID no. 2702068
MWNSTVPSDENPDQNSIDAGSSMRKPISLWPGMYHSPVTNALWEARRNMFEIPTGDDASQSKLTAKSPSRSRTNPWNEIRTGKLVEDLDALAGTISFKHCGGDSSARSMILVTASVDRIIMKRPIRVDTDLSIVGAVTWVGRSSMEMQLQVLQIQDTNNSSESVALEANFTFVARDAQTGKSAPINQVVPETEHEKFLWKEAEERNKLRKQKRAQGKEEHEKLKDLERLNELLAEGRVFLDMPALADRNSILIKDTSHENSLICQPQQRNIHGRIFGGFLMRKAFELAFSNAYTFAGVSPRFLEVDRVDFIKPVDVGNFLRFKSRVLYTEATSSAEPLINIEVVAHVTSPELRSSEVSNRFYFTFSVRPEAMKDGLKIRNVVPATEEEARRVIERMDAERPISLP

SEQ ID NO: 70270 - protein, 383 aa, Arabidopsis thaliana
  peptide (1)..(383): Ceres Seq. ID no. 2702069
MRKPISLWPGMYHSPVTNALWEARRNMFEIPTGDDASQSKLTAKSPSRSRTNPWNEIRTGKLVEDLDALAGTISFKHCGGDSSARSMILVTASVDRIIMKRPIRVDTDLSIVGAVTWVGRSSMEMQLQVLQIQDTNNSSESVALEANFTFVARDAQTGKSAPINQVVPETEHEKFLWKEAEERNKLRKQKRAQGKEEHEKLKDLERLNELLAEGRVFLDMPALADRNSILIKDTSHENSLICQPQQRNIHGRIFGGFLMRKAFELAFSNAYTFAGVSPRFLEVDRVDFIKPVDVGNFLRFKSRVLYTEATSSAEPLINIEVVAHVTSPELRSSEVSNRFYFTFSVRPEAMKDGLKIRNVVPATEEEARRVIERMDAERPISLP

SEQ ID NO: 70271 - DNA, 2673 bp, Arabidopsis thaliana
  misc_feature (1)..(2673): Ceres Seq. ID no. 2702152
  misc_feature (1)..(2673): Ortholog of  Ceres SEQ ID NO 15170741 as cited in SEQ ID NO 58530
atggaagatgatggtggtagtgatggaggcgaaggaaatggtgggttttcacctaattctagctttggggcattcgctgacactgccatggatttggatttcatggatgaactcttgtttgatggatgttggctagagacaacagatagtaagagcttgaagcagacagaacaatctccttcagcttctaccgccatgaatgacaatagccctttcctctgctttggtgagaatccatctcaagataatttctctaatgaagaaacagagagaatgtttcctcaggctgaaaagtttctcctagaagaagctgaggtgggaaaaagttggtggattgctccaagtgcaagtgaaggcccgtcttcatctgtgaaggagaggctactacaagctattagtggtcttaacgaggcggtgcaagataaggacttcttggttcagatatgggtgccaattcagcaggaagggaagagctttcttactacttgggctcagccacatttattcaaccaagaatactccagccttgcagaatacagacatgtttcagagacttataatttcccggctgatgagggtatgaaagattttgtgggtcttcccggtcgtgttttcttgcagaagtttcctgagtggactcctgatgtgcgtttctttagaagagatgaatatccacgcatcaaagaagcacaaaagtgtgatgttcgtggttcacttgcccttcctgttttcgaaagaggtagtgggacttgtttgggtgttgttgagatcgtcacaacaactcagaagatgaattaccggcaagaacttgagaagatgtgtaaagctcttgaggtctatagtgatttctactgtgctgcattacctgaaataaaagatttcctggccacaatctgcagatcatatgattttcctctagctttgtcatgggcgccgtgtgctcggcaagggaaagttggttcccgacattctgatgagaacttctctgagtgtgtttcaacaatcgattctgcttgttctgtccccgacgaacagagcaaaagtttttgggaggcatgctctgaacaccatctgctccagggggaaggcattgttgggaaagcatttgaagccaccaaactcttttttgtgcccgaagtggccacatttagcaagactaactacccccttgcacaccacgccaagatatctggactacatgctgctttagcagttccattaaagagcaaatctggtttggttgagtttgtgttggaatttttctttccgaaagcatgccttgacactgaagcgcaacaggaaatgctcaagtcactatgtgtgacactgcagcaagatttcaggagttcaaatcttttcatcaaagacctagagttagaagtcgtattacctgtaagagagacaatgctcttctcagaaaacctgctatgtggagcagaaaccgtagagtcgttgacagaaattcaaatgcaagaatcctcatggatcgcccacatgataaaggcaaacgagaagggtaaagatgtatcactttcttgggagtaccagaaagaagatcctaaagagctctcatctggccgggagaacagtcagcttgatccagtccccaataatgttcctttagaagctgagcaattacagcaagcatcaactccaggactcagagtcgacatcggtccaagcacagaatcagcttcgactggtgggggaaatatgttaagcagtaggagaccaggggagaaaaaaagagcaaaaacagaaaagaccattggcttggaggttcttcgacaatactttgctggaagcctcaaggatgcagccaagagcattggtgtttgtccaactaccttgaaaaggatatgcaggcaacatggaataatgcgatggccctcccgaaaaatcaagaaggttgggcattcgttgaagaaactccaactagttatggactctgtccaaggtgcgcagggctctatccaactcgattcattctatacaagcttcccagagttgaactccccaaatatgtctagcaatggcccttccttgaagagtaatgaacagccaagtcatttgaatgctcaaaccgataatggtattatggcagaggaaaaccccaggtcaccatcatcttcttgcagcaagagctctggttcaagcaacaataatgagaatactggaaacattctagttgctgaggatgctgatgcggtgttaaagagagctcatagcgaagcacaactgcataatgtgaatcaggaggaaacaaaatgtcttgcaagaacccagagccataaaacattcaaggagcctcttgttcttgataattcatctccattaacaggtagtagcaacacgagtttaagagctagaggtgccatcaaagtgaaagcgacatttggtgaggccagaatacggtttaccttactcccgagttggggcttcgcagagctgaagcaagagattgctaggcgtttcaacatagatgacatttcctggtttgaccttaagtacctggatgatgataaggagtgggttcttctgacatgtgaagcggatctcgtggaatgcattgacatatatagattaacacagacccacacaattaaaataagtctgaacgaagcttctcaagtcaagctaagtggttcttttggcaacactggtctttcctga

SEQ ID NO: 70272 - protein, 890 aa, Arabidopsis thaliana
  peptide (1)..(890): Ceres Seq. ID no. 2702153
MEDDGGSDGGEGNGGFSPNSSFGAFADTAMDLDFMDELLFDGCWLETTDSKSLKQTEQSPSASTAMNDNSPFLCFGENPSQDNFSNEETERMFPQAEKFLLEEAEVGKSWWIAPSASEGPSSSVKERLLQAISGLNEAVQDKDFLVQIWVPIQQEGKSFLTTWAQPHLFNQEYSSLAEYRHVSETYNFPADEGMKDFVGLPGRVFLQKFPEWTPDVRFFRRDEYPRIKEAQKCDVRGSLALPVFERGSGTCLGVVEIVTTTQKMNYRQELEKMCKALEVYSDFYCAALPEIKDFLATICRSYDFPLALSWAPCARQGKVGSRHSDENFSECVSTIDSACSVPDEQSKSFWEACSEHHLLQGEGIVGKAFEATKLFFVPEVATFSKTNYPLAHHAKISGLHAALAVPLKSKSGLVEFVLEFFFPKACLDTEAQQEMLKSLCVTLQQDFRSSNLFIKDLELEVVLPVRETMLFSENLLCGAETVESLTEIQMQESSWIAHMIKANEKGKDVSLSWEYQKEDPKELSSGRENSQLDPVPNNVPLEAEQLQQASTPGLRVDIGPSTESASTGGGNMLSSRRPGEKKRAKTEKTIGLEVLRQYFAGSLKDAAKSIGVCPTTLKRICRQHGIMRWPSRKIKKVGHSLKKLQLVMDSVQGAQGSIQLDSFYTSFPELNSPNMSSNGPSLKSNEQPSHLNAQTDNGIMAEENPRSPSSSCSKSSGSSNNNENTGNILVAEDADAVLKRAHSEAQLHNVNQEETKCLARTQSHKTFKEPLVLDNSSPLTGSSNTSLRARGAIKVKATFGEARIRFTLLPSWGFAELKQEIARRFNIDDISWFDLKYLDDDKEWVLLTCEADLVECIDIYRLTQTHTIKISLNEASQVKLSGSFGNTGLS

SEQ ID NO: 70273 - protein, 861 aa, Arabidopsis thaliana
  peptide (1)..(861): Ceres Seq. ID no. 2702154
MDLDFMDELLFDGCWLETTDSKSLKQTEQSPSASTAMNDNSPFLCFGENPSQDNFSNEETERMFPQAEKFLLEEAEVGKSWWIAPSASEGPSSSVKERLLQAISGLNEAVQDKDFLVQIWVPIQQEGKSFLTTWAQPHLFNQEYSSLAEYRHVSETYNFPADEGMKDFVGLPGRVFLQKFPEWTPDVRFFRRDEYPRIKEAQKCDVRGSLALPVFERGSGTCLGVVEIVTTTQKMNYRQELEKMCKALEVYSDFYCAALPEIKDFLATICRSYDFPLALSWAPCARQGKVGSRHSDENFSECVSTIDSACSVPDEQSKSFWEACSEHHLLQGEGIVGKAFEATKLFFVPEVATFSKTNYPLAHHAKISGLHAALAVPLKSKSGLVEFVLEFFFPKACLDTEAQQEMLKSLCVTLQQDFRSSNLFIKDLELEVVLPVRETMLFSENLLCGAETVESLTEIQMQESSWIAHMIKANEKGKDVSLSWEYQKEDPKELSSGRENSQLDPVPNNVPLEAEQLQQASTPGLRVDIGPSTESASTGGGNMLSSRRPGEKKRAKTEKTIGLEVLRQYFAGSLKDAAKSIGVCPTTLKRICRQHGIMRWPSRKIKKVGHSLKKLQLVMDSVQGAQGSIQLDSFYTSFPELNSPNMSSNGPSLKSNEQPSHLNAQTDNGIMAEENPRSPSSSCSKSSGSSNNNENTGNILVAEDADAVLKRAHSEAQLHNVNQEETKCLARTQSHKTFKEPLVLDNSSPLTGSSNTSLRARGAIKVKATFGEARIRFTLLPSWGFAELKQEIARRFNIDDISWFDLKYLDDDKEWVLLTCEADLVECIDIYRLTQTHTIKISLNEASQVKLSGSFGNTGLS

SEQ ID NO: 70274 - protein, 856 aa, Arabidopsis thaliana
  peptide (1)..(856): Ceres Seq. ID no. 2702155
MDELLFDGCWLETTDSKSLKQTEQSPSASTAMNDNSPFLCFGENPSQDNFSNEETERMFPQAEKFLLEEAEVGKSWWIAPSASEGPSSSVKERLLQAISGLNEAVQDKDFLVQIWVPIQQEGKSFLTTWAQPHLFNQEYSSLAEYRHVSETYNFPADEGMKDFVGLPGRVFLQKFPEWTPDVRFFRRDEYPRIKEAQKCDVRGSLALPVFERGSGTCLGVVEIVTTTQKMNYRQELEKMCKALEVYSDFYCAALPEIKDFLATICRSYDFPLALSWAPCARQGKVGSRHSDENFSECVSTIDSACSVPDEQSKSFWEACSEHHLLQGEGIVGKAFEATKLFFVPEVATFSKTNYPLAHHAKISGLHAALAVPLKSKSGLVEFVLEFFFPKACLDTEAQQEMLKSLCVTLQQDFRSSNLFIKDLELEVVLPVRETMLFSENLLCGAETVESLTEIQMQESSWIAHMIKANEKGKDVSLSWEYQKEDPKELSSGRENSQLDPVPNNVPLEAEQLQQASTPGLRVDIGPSTESASTGGGNMLSSRRPGEKKRAKTEKTIGLEVLRQYFAGSLKDAAKSIGVCPTTLKRICRQHGIMRWPSRKIKKVGHSLKKLQLVMDSVQGAQGSIQLDSFYTSFPELNSPNMSSNGPSLKSNEQPSHLNAQTDNGIMAEENPRSPSSSCSKSSGSSNNNENTGNILVAEDADAVLKRAHSEAQLHNVNQEETKCLARTQSHKTFKEPLVLDNSSPLTGSSNTSLRARGAIKVKATFGEARIRFTLLPSWGFAELKQEIARRFNIDDISWFDLKYLDDDKEWVLLTCEADLVECIDIYRLTQTHTIKISLNEASQVKLSGSFGNTGLS

SEQ ID NO: 70275 - DNA, 1140 bp, Arabidopsis thaliana
  misc_feature (1)..(1140): Ceres Seq. ID no. 2702261
  misc_feature (1)..(1140): Ortholog of  Ceres SEQ ID NO 15178630 as cited in SEQ ID NO 0
atggaaatcgatgaagaagagccaatggtgttcttggaccgtacaacaagagcaacacggggtaaacggatgaccaagttgcttgatgacgaagtagaagaagatgaacagttttggaatcaagaagctcttaaagaggaagaacatgatgatgaatatgaagcagaacgtgaggttgctgatgagtttgacagtgacttcaatgacgatgtatttatgtcttgcttatgtattgagtacttattcatcaaggagcctgagcctgatgcagtcgctgtaaatgaaaaagaattgagggatctgccaaagaagcggctgatttaccctgggaaaactgcttcaaagaaaaagaaaaagaagacgaaggtagtttcacaactagaatatattcctggagatgagaagccaggtgaagaattgggaaacaaggaacaagaagaaaaagaagagaatgaagcacaagaagatatggaaggtgagaaagtcattaggaaatcaacacggacttcagtggttgtacggcaagcagaaagagatgcattgcgtgctgctatacaagcaacaacaaagccaatacaaaggaaaaaagtaggggaggaaaaacggatgacccaagaagaaatgctgctggaagctgctcaaacagaaatcatgaacttgaggaatttagaacgtgtcttggcaagggaagaagaagtaaaaaagaaagcgattgtgcataaagcagtctacaagggtcctcagattcggtatcattcaaaagatggatgtaactatttagaattctgtaatggtgcgtcattcaattcagagttgtcgacgaagtctgttccctatccagaaaaagctgtatgtgtgattacgggattacctgccaagtaccgggatccaaaaacgggtcttccttatgcaactagagacgccttcaaagcaatacgtgaaaggttcatggacgaacatgatggtttgagaaagaaaatggagatgggagatttgtttgatacactagtggcgaaaggttttgcaacaaaacaaaagagaacgaagattccaaagagtaacaaatcattttccctcagaagctcagctcgtttccttagctccgagtctgaagaagagagtgaagaagattcagattaa

SEQ ID NO: 70276 - protein, 379 aa, Arabidopsis thaliana
  peptide (1)..(379): Ceres Seq. ID no. 2702262
MEIDEEEPMVFLDRTTRATRGKRMTKLLDDEVEEDEQFWNQEALKEEEHDDEYEAEREVADEFDSDFNDDVFMSCLCIEYLFIKEPEPDAVAVNEKELRDLPKKRLIYPGKTASKKKKKKTKVVSQLEYIPGDEKPGEELGNKEQEEKEENEAQEDMEGEKVIRKSTRTSVVVRQAERDALRAAIQATTKPIQRKKVGEEKRMTQEEMLLEAAQTEIMNLRNLERVLAREEEVKKKAIVHKAVYKGPQIRYHSKDGCNYLEFCNGASFNSELSTKSVPYPEKAVCVITGLPAKYRDPKTGLPYATRDAFKAIRERFMDEHDGLRKKMEMGDLFDTLVAKGFATKQKRTKIPKSNKSFSLRSSARFLSSESEEESEEDSD

SEQ ID NO: 70277 - protein, 371 aa, Arabidopsis thaliana
  peptide (1)..(371): Ceres Seq. ID no. 2702263
MVFLDRTTRATRGKRMTKLLDDEVEEDEQFWNQEALKEEEHDDEYEAEREVADEFDSDFNDDVFMSCLCIEYLFIKEPEPDAVAVNEKELRDLPKKRLIYPGKTASKKKKKKTKVVSQLEYIPGDEKPGEELGNKEQEEKEENEAQEDMEGEKVIRKSTRTSVVVRQAERDALRAAIQATTKPIQRKKVGEEKRMTQEEMLLEAAQTEIMNLRNLERVLAREEEVKKKAIVHKAVYKGPQIRYHSKDGCNYLEFCNGASFNSELSTKSVPYPEKAVCVITGLPAKYRDPKTGLPYATRDAFKAIRERFMDEHDGLRKKMEMGDLFDTLVAKGFATKQKRTKIPKSNKSFSLRSSARFLSSESEEESEEDSD

SEQ ID NO: 70278 - protein, 356 aa, Arabidopsis thaliana
  peptide (1)..(356): Ceres Seq. ID no. 2702264
MTKLLDDEVEEDEQFWNQEALKEEEHDDEYEAEREVADEFDSDFNDDVFMSCLCIEYLFIKEPEPDAVAVNEKELRDLPKKRLIYPGKTASKKKKKKTKVVSQLEYIPGDEKPGEELGNKEQEEKEENEAQEDMEGEKVIRKSTRTSVVVRQAERDALRAAIQATTKPIQRKKVGEEKRMTQEEMLLEAAQTEIMNLRNLERVLAREEEVKKKAIVHKAVYKGPQIRYHSKDGCNYLEFCNGASFNSELSTKSVPYPEKAVCVITGLPAKYRDPKTGLPYATRDAFKAIRERFMDEHDGLRKKMEMGDLFDTLVAKGFATKQKRTKIPKSNKSFSLRSSARFLSSESEEESEEDSD

SEQ ID NO: 70279 - DNA, 1179 bp, Arabidopsis thaliana
  misc_feature (1)..(1179): Ceres Seq. ID no. 2702287
  misc_feature (1)..(1179): Ortholog of  Ceres SEQ ID NO 12636774 as cited in SEQ ID NO 372
  misc_feature (1)..(1179): Ortholog of  Ceres SEQ ID NO 13582350 as cited in SEQ ID NO 56734
  misc_feature (1)..(1179): Ortholog of  Ceres SEQ ID NO 13596470 as cited in SEQ ID NO 62158
  misc_feature (1)..(1179): Ortholog of  Ceres SEQ ID NO 12578315 as cited in SEQ ID NO 62451
  misc_feature (1)..(1179): Ortholog of  Ceres SEQ ID NO 12615466 as cited in SEQ ID NO 62761
  misc_feature (1)..(1179): Ortholog of  Ceres SEQ ID NO 12615907 as cited in SEQ ID NO 62860
  misc_feature (1)..(1179): Ortholog of  Ceres SEQ ID NO 13597295 as cited in SEQ ID NO 63743
  misc_feature (1)..(1179): Ortholog of  Ceres SEQ ID NO 12617090 as cited in SEQ ID NO 64005
  misc_feature (1)..(1179): Ortholog of  Ceres SEQ ID NO 13597233 as cited in SEQ ID NO 64370
  misc_feature (1)..(1179): Ortholog of  Ceres SEQ ID NO 13600370 as cited in SEQ ID NO 0
atgtcgccgtcaatgatagctccggtgatggaagaagagaacaagaaataccaaaaaggcgtgaaacatctttgtgaaaatggtctgaccaaagtaccaaccaagtatatatggcctgaacctgaccgacccatcttgacaaaatcggacaagctcatcaaaccaaacaaaaacctaaagctccccctcatagatttcgctgagctccttggacctaaccggcctcatgttctacgaaccatagccgaggcctgcaaaacctacggcttctttcaggttggttctctaaaccctaaagcacatgcggtgatatctagatttcttgctaaacaagtaagctatggtaatgggcaggttgtgaatcatgggatggaaggagacgtgagcaagaatatgatagacgtgtgtaagagattctttgagcttccgtacgaggagagatccaagtacatgtcgtcggacatgtcggctccagtacgatacggcacgagtttcaaccagatcaaagacaatgtcttttgttggagagacttcttgaaactctatgcacatccactccctgactatcttcctcattggccttcttctccttctgacttcaggagttcggcggctacatacgctaaagagacgaaagagatgttcgaaatgatggtcaaagccatcttagaaagtcttgaaattgatggcagtgatgaggcggctaaggagttggaagagggaagtcaggtggtggtggtgaactgttatccaccgtgtccggagccagagctgacgctagggatgccaccgcactcagactacggcttcttgacgcttctacttcaagacgaagtcgaaggtcttcaaattctgtatcgtgacgagtgggtcaccgttgatcccatccctggctcttttgttgtcaacgtaggcgatcatctcgagatatttagcaatgggaggtataaaagcgtgctacatagggtattggtgaactctacaaaacctaggatatcggtggcgtcgctacacagcttccctttgacttctgtcgtaaagccatcgccgaaactcgtcgataaacataatccatcacagtatatggacactgattttaccacttttcttcagtatataacttctcgtgaacccaaatggaagaattttcttgaatcacgcaagattcaccatgtatga

SEQ ID NO: 70280 - protein, 392 aa, Arabidopsis thaliana
  peptide (1)..(392): Ceres Seq. ID no. 2702288
MSPSMIAPVMEEENKKYQKGVKHLCENGLTKVPTKYIWPEPDRPILTKSDKLIKPNKNLKLPLIDFAELLGPNRPHVLRTIAEACKTYGFFQVGSLNPKAHAVISRFLAKQVSYGNGQVVNHGMEGDVSKNMIDVCKRFFELPYEERSKYMSSDMSAPVRYGTSFNQIKDNVFCWRDFLKLYAHPLPDYLPHWPSSPSDFRSSAATYAKETKEMFEMMVKAILESLEIDGSDEAAKELEEGSQVVVVNCYPPCPEPELTLGMPPHSDYGFLTLLLQDEVEGLQILYRDEWVTVDPIPGSFVVNVGDHLEIFSNGRYKSVLHRVLVNSTKPRISVASLHSFPLTSVVKPSPKLVDKHNPSQYMDTDFTTFLQYITSREPKWKNFLESRKIHHV

SEQ ID NO: 70281 - protein, 388 aa, Arabidopsis thaliana
  peptide (1)..(388): Ceres Seq. ID no. 2702289
MIAPVMEEENKKYQKGVKHLCENGLTKVPTKYIWPEPDRPILTKSDKLIKPNKNLKLPLIDFAELLGPNRPHVLRTIAEACKTYGFFQVGSLNPKAHAVISRFLAKQVSYGNGQVVNHGMEGDVSKNMIDVCKRFFELPYEERSKYMSSDMSAPVRYGTSFNQIKDNVFCWRDFLKLYAHPLPDYLPHWPSSPSDFRSSAATYAKETKEMFEMMVKAILESLEIDGSDEAAKELEEGSQVVVVNCYPPCPEPELTLGMPPHSDYGFLTLLLQDEVEGLQILYRDEWVTVDPIPGSFVVNVGDHLEIFSNGRYKSVLHRVLVNSTKPRISVASLHSFPLTSVVKPSPKLVDKHNPSQYMDTDFTTFLQYITSREPKWKNFLESRKIHHV

SEQ ID NO: 70282 - protein, 383 aa, Arabidopsis thaliana
  peptide (1)..(383): Ceres Seq. ID no. 2702290
MEEENKKYQKGVKHLCENGLTKVPTKYIWPEPDRPILTKSDKLIKPNKNLKLPLIDFAELLGPNRPHVLRTIAEACKTYGFFQVGSLNPKAHAVISRFLAKQVSYGNGQVVNHGMEGDVSKNMIDVCKRFFELPYEERSKYMSSDMSAPVRYGTSFNQIKDNVFCWRDFLKLYAHPLPDYLPHWPSSPSDFRSSAATYAKETKEMFEMMVKAILESLEIDGSDEAAKELEEGSQVVVVNCYPPCPEPELTLGMPPHSDYGFLTLLLQDEVEGLQILYRDEWVTVDPIPGSFVVNVGDHLEIFSNGRYKSVLHRVLVNSTKPRISVASLHSFPLTSVVKPSPKLVDKHNPSQYMDTDFTTFLQYITSREPKWKNFLESRKIHHV

SEQ ID NO: 70283 - DNA, 744 bp, Arabidopsis thaliana
  misc_feature (1)..(744): Ceres Seq. ID no. 2702364
  misc_feature (1)..(744): Ortholog of  Ceres SEQ ID NO 12784040 as cited in SEQ ID NO 66597
atggaaattgcaaccgatacagcaaagcagatgagagacgaagagttgttcaaagcagcggaatggggagattcatcgttgttcatgtcattatctgaagaacagctctctaaatctctcaatttcagaaacgaagatggtcgctctctcctccatgtcgctgcttccttcggccattctcaaatagtgaagttgttatcaagttcagatgaagcaaagactgtaatcaatagcaaggatgatgaaggatgggctcctttgcattccgctgctagcatcggtaatgctgagctcgttgaggtgcttttgaccagaggtgctgatgtcaatgccaaaaataacggtggtcgcactgctcttcactatgctgctagcaaaggccggttggagattgctcagcttttattaacacacggtgcaaagattaacatcacagacaaggttggttgcactccgcttcacagggcagcaagcgtgggaaagttagaagtttgtgaatttcttattgaagaaggagcagagatcgatgctacggataaaatgggtcaaactgcactcatgcattcagttatctgcgatgacaaacagttaaaagtttccatggatcaggttgcgttcctgcttataagacatggtgcagatgtggatgtagaagacaaggaaggctacactgttctaggccgagctaccaatgaattccgacctgcacttatcgatgctgctaaggccatgcttgaaggataa

SEQ ID NO: 70284 - protein, 247 aa, Arabidopsis thaliana
  peptide (1)..(247): Ceres Seq. ID no. 2702365
MEIATDTAKQMRDEELFKAAEWGDSSLFMSLSEEQLSKSLNFRNEDGRSLLHVAASFGHSQIVKLLSSSDEAKTVINSKDDEGWAPLHSAASIGNAELVEVLLTRGADVNAKNNGGRTALHYAASKGRLEIAQLLLTHGAKINITDKVGCTPLHRAASVGKLEVCEFLIEEGAEIDATDKMGQTALMHSVICDDKQLKVSMDQVAFLLIRHGADVDVEDKEGYTVLGRATNEFRPALIDAAKAMLEG

SEQ ID NO: 70285 - protein, 237 aa, Arabidopsis thaliana
  peptide (1)..(237): Ceres Seq. ID no. 2702366
MRDEELFKAAEWGDSSLFMSLSEEQLSKSLNFRNEDGRSLLHVAASFGHSQIVKLLSSSDEAKTVINSKDDEGWAPLHSAASIGNAELVEVLLTRGADVNAKNNGGRTALHYAASKGRLEIAQLLLTHGAKINITDKVGCTPLHRAASVGKLEVCEFLIEEGAEIDATDKMGQTALMHSVICDDKQLKVSMDQVAFLLIRHGADVDVEDKEGYTVLGRATNEFRPALIDAAKAMLEG

SEQ ID NO: 70286 - protein, 219 aa, Arabidopsis thaliana
  peptide (1)..(219): Ceres Seq. ID no. 2702367
MSLSEEQLSKSLNFRNEDGRSLLHVAASFGHSQIVKLLSSSDEAKTVINSKDDEGWAPLHSAASIGNAELVEVLLTRGADVNAKNNGGRTALHYAASKGRLEIAQLLLTHGAKINITDKVGCTPLHRAASVGKLEVCEFLIEEGAEIDATDKMGQTALMHSVICDDKQLKVSMDQVAFLLIRHGADVDVEDKEGYTVLGRATNEFRPALIDAAKAMLEG

SEQ ID NO: 70287 - DNA, 1860 bp, Arabidopsis thaliana
  misc_feature (1)..(1860): Ceres Seq. ID no. 2702375
  misc_feature (1)..(1860): Ortholog of  Ceres SEQ ID NO 15174591 as cited in SEQ ID NO 53383
atgagaggttcttggtacaagagtgtttcctctgtttttggtctcagaccacggatcagagggttgttattcttcattgttggtgttgtggctctagttactattttagcaccattgacatctaattcgtatgattcttcgtcaagttcgacacttgtgccgaacatttatagtaactataggaggataaaggagcaagctgctgttgattatcttgatctgaggtctctttctttaggggctagtttaaaagagtttcctttttgtggtaaagaaagagaaagttatgtgccttgttataacataactgggaatttgcttgctgggcttcaagagggtgaggagttagatcgacattgcgagtttgaaagagagaaggaaagatgtgtagttcgtcctccgagagattataaaataccacttaggtggccacttggtagagatatcatatggagtgggaacgtgaagattaccaaagaccagtttctttcttcaggaactgtgacaacgaggttaatgttgcttgaagagaatcaaataacctttcactcggaggacggcctggtctttgatggggtcaaagactatgctcgtcaaattgctgagatgataggtttaggaagtgatactgaatttgctcaagcgggtgtacggactgtgttagacattggttgcggatttggtagctttggtgctcatttagtgtctttgaagctgatgcctatatgtattgctgagtatgaggcaactgggagccaagttcagttagctctagagagaggccttcctgcaatgattggcaatttcttttcaaaacagcttccttatccagcactgtcttttgatatggtccattgtgctcaatgtggcactacttgggatatcaaagatgcaatgctacttttggaagtggatcgtgttctgaaacccgggggatactttgttttaacttctcccacaaacaaagcacagggaaacttaccagataccaagaaaacgagcatctcaacacgggtgaatgagttatctaagaaaatctgttggagtctaacagctcagcaggatgagacgtttctttggcagaaaacttctgattcaagttgctattcttctcgttcgcaagcttctatacctctttgcaaagatggagatagcgttccgtattaccacccattggttccatgtataagcggaaccacgagtaaacgctggatttctatacagaacaggtctgctgttgcaggaacaacctctgccgggcttgaaattcatggtttaaaaccggaagaattcttcgaggatacacaaatatggagatcagctctgaaaaactattggtccttgcttacacctctaattttctctgaccatccgaagagacccggtgatgaggatcctctcccgcctttcaacatgatacgcaatgtgatggacatgcatgctcgttttgggaatttaaatgccgctttactcgacgaaggaaaatctgcttgggtaatgaacgtcgtcccagtcaatgcacgtaatactcttcctatcatacttgatcgtggtttcgccggtgttctacatgactggtgtgaaccattcccgacatatcctcgaacatatgacatgcttcatgccaatgaacttctcacacatcttagctcagaacgatgcagcctaatggacttgttcttggagatggaccggattcttcgccctgagggatgggttgttctaagcgacaaagtgggagtaatcgagatggctcgagcacttgcagctcgagtgcgttgggaagcaagagtcattgatcttcaagatggtagtgaccaaagacttctcgtctgtcaaaaaccattcatcaaaaaataa

SEQ ID NO: 70288 - protein, 619 aa, Arabidopsis thaliana
  peptide (1)..(619): Ceres Seq. ID no. 2702376
MRGSWYKSVSSVFGLRPRIRGLLFFIVGVVALVTILAPLTSNSYDSSSSSTLVPNIYSNYRRIKEQAAVDYLDLRSLSLGASLKEFPFCGKERESYVPCYNITGNLLAGLQEGEELDRHCEFEREKERCVVRPPRDYKIPLRWPLGRDIIWSGNVKITKDQFLSSGTVTTRLMLLEENQITFHSEDGLVFDGVKDYARQIAEMIGLGSDTEFAQAGVRTVLDIGCGFGSFGAHLVSLKLMPICIAEYEATGSQVQLALERGLPAMIGNFFSKQLPYPALSFDMVHCAQCGTTWDIKDAMLLLEVDRVLKPGGYFVLTSPTNKAQGNLPDTKKTSISTRVNELSKKICWSLTAQQDETFLWQKTSDSSCYSSRSQASIPLCKDGDSVPYYHPLVPCISGTTSKRWISIQNRSAVAGTTSAGLEIHGLKPEEFFEDTQIWRSALKNYWSLLTPLIFSDHPKRPGDEDPLPPFNMIRNVMDMHARFGNLNAALLDEGKSAWVMNVVPVNARNTLPIILDRGFAGVLHDWCEPFPTYPRTYDMLHANELLTHLSSERCSLMDLFLEMDRILRPEGWVVLSDKVGVIEMARALAARVRWEARVIDLQDGSDQRLLVCQKPFIKK

SEQ ID NO: 70289 - protein, 447 aa, Arabidopsis thaliana
  peptide (1)..(447): Ceres Seq. ID no. 2702377
MLLEENQITFHSEDGLVFDGVKDYARQIAEMIGLGSDTEFAQAGVRTVLDIGCGFGSFGAHLVSLKLMPICIAEYEATGSQVQLALERGLPAMIGNFFSKQLPYPALSFDMVHCAQCGTTWDIKDAMLLLEVDRVLKPGGYFVLTSPTNKAQGNLPDTKKTSISTRVNELSKKICWSLTAQQDETFLWQKTSDSSCYSSRSQASIPLCKDGDSVPYYHPLVPCISGTTSKRWISIQNRSAVAGTTSAGLEIHGLKPEEFFEDTQIWRSALKNYWSLLTPLIFSDHPKRPGDEDPLPPFNMIRNVMDMHARFGNLNAALLDEGKSAWVMNVVPVNARNTLPIILDRGFAGVLHDWCEPFPTYPRTYDMLHANELLTHLSSERCSLMDLFLEMDRILRPEGWVVLSDKVGVIEMARALAARVRWEARVIDLQDGSDQRLLVCQKPFIKK

SEQ ID NO: 70290 - protein, 417 aa, Arabidopsis thaliana
  peptide (1)..(417): Ceres Seq. ID no. 2702378
MIGLGSDTEFAQAGVRTVLDIGCGFGSFGAHLVSLKLMPICIAEYEATGSQVQLALERGLPAMIGNFFSKQLPYPALSFDMVHCAQCGTTWDIKDAMLLLEVDRVLKPGGYFVLTSPTNKAQGNLPDTKKTSISTRVNELSKKICWSLTAQQDETFLWQKTSDSSCYSSRSQASIPLCKDGDSVPYYHPLVPCISGTTSKRWISIQNRSAVAGTTSAGLEIHGLKPEEFFEDTQIWRSALKNYWSLLTPLIFSDHPKRPGDEDPLPPFNMIRNVMDMHARFGNLNAALLDEGKSAWVMNVVPVNARNTLPIILDRGFAGVLHDWCEPFPTYPRTYDMLHANELLTHLSSERCSLMDLFLEMDRILRPEGWVVLSDKVGVIEMARALAARVRWEARVIDLQDGSDQRLLVCQKPFIKK

SEQ ID NO: 70291 - DNA, 1563 bp, Arabidopsis thaliana
  misc_feature (1)..(1563): Ceres Seq. ID no. 2702694
  misc_feature (1)..(1563): Ortholog of  Ceres SEQ ID NO 13584744 as cited in SEQ ID NO 69137
atgacaggtttgcttaatgacagggagctttatagcaataacattacaggggagatacctgaggagcttggcgacttggtggaactagtaagcttggatctttacgcaaacagcataagcggtcccatcccttcgtctcttggcaaactaggaaaactccggttcttgcgtcttaacaacaatagcttatcaggggaaattccaatgactttgacttctgtgcagctgcaagttctggatatctcaaacaatcggctcagtggagatattcctgttaatggttctttttcgctcttcactcctatcagttttgcgaataatagcttaacggatcttcccgaacctccgcctacttctacctctcctacgccaccaccaccttcaggttttcacttccattttcttcttagtgtttcttgtcggggggcaaatgactgcagcaatagcagggggagttgctgcaggtgcagcacttctatttgctgttccagccattgcgtttctgaagaagacccagaggttcatttaggacaactcaaaaggtttaccttgcgtgaactgttagttgctactgataactttagcaataaaaatgtattgggtagaggtggttttggtaaagtgtataaaggacgtttagccgatggcaatctagtggctgtcaaaaggctaaaagaagaacgtaccaagggtggggaactgcagtttcaaaccgaagttgagatgatcagtatggccgttcataggaacttgcttcggcttcgtggcttttgcatgactccaactgaaagattacttgtttatccctacatggctaatggaagtgttgcttcttgtttaagagagcgtcctgaaggcaatccagcacttgattggccaaaaagaaagcatattgctctgggatcagcaagggggcttgcgtatttacatgatcattgcgaccaaaaaatcattcaccgggatgttaaagctgctaatatattgttagatgaagagtttgaagctgttgttggagattttgggctcgcaaaattaatgaattataatgactcccatgtgacaactgctgtacgcggtacaattggccatatagcgcccgagtacctctcgacaggaaaatcttctgagaagactgatgtttttgggtacggggtcatgcttctcgagctcatcactggacaaaaggctttcgatcttgctcggcttgcaaatgatgatgatatcatgttactcgactgggtgaaagaggttttgaaagagaagaagttggaaagccttgtggatgcagaactcgaaggaaagtacgtggaaacagaagtggagcagctgatacaaatggctctgctctgcactcaaagttctgcaatggaacgtccaaagatgtcagaagtagtgagaatgctggaaggagatggtttagctgagagatgggaagaatggcaaaaggaggagatgccaatacatgattttaactatcaagcctatcctcatgctggcactgactggctcatcccctattccaattcccttatcgaaaacgattacccctcgggtccaagataa

SEQ ID NO: 70292 - protein, 520 aa, Arabidopsis thaliana
  peptide (1)..(520): Ceres Seq. ID no. 2702695
MTGLLNDRELYSNNITGEIPEELGDLVELVSLDLYANSISGPIPSSLGKLGKLRFLRLNNNSLSGEIPMTLTSVQLQVLDISNNRLSGDIPVNGSFSLFTPISFANNSLTDLPEPPPTSTSPTPPPPSGFHFHFLLSVSCRGANDCSNSRGSCCRCSTSICCSSHCVSEEDPEVHLGQLKRFTLRELLVATDNFSNKNVLGRGGFGKVYKGRLADGNLVAVKRLKEERTKGGELQFQTEVEMISMAVHRNLLRLRGFCMTPTERLLVYPYMANGSVASCLRERPEGNPALDWPKRKHIALGSARGLAYLHDHCDQKIIHRDVKAANILLDEEFEAVVGDFGLAKLMNYNDSHVTTAVRGTIGHIAPEYLSTGKSSEKTDVFGYGVMLLELITGQKAFDLARLANDDDIMLLDWVKEVLKEKKLESLVDAELEGKYVETEVEQLIQMALLCTQSSAMERPKMSEVVRMLEGDGLAERWEEWQKEEMPIHDFNYQAYPHAGTDWLIPYSNSLIENDYPSGPR

SEQ ID NO: 70293 - protein, 452 aa, Arabidopsis thaliana
  peptide (1)..(452): Ceres Seq. ID no. 2702696
MTLTSVQLQVLDISNNRLSGDIPVNGSFSLFTPISFANNSLTDLPEPPPTSTSPTPPPPSGFHFHFLLSVSCRGANDCSNSRGSCCRCSTSICCSSHCVSEEDPEVHLGQLKRFTLRELLVATDNFSNKNVLGRGGFGKVYKGRLADGNLVAVKRLKEERTKGGELQFQTEVEMISMAVHRNLLRLRGFCMTPTERLLVYPYMANGSVASCLRERPEGNPALDWPKRKHIALGSARGLAYLHDHCDQKIIHRDVKAANILLDEEFEAVVGDFGLAKLMNYNDSHVTTAVRGTIGHIAPEYLSTGKSSEKTDVFGYGVMLLELITGQKAFDLARLANDDDIMLLDWVKEVLKEKKLESLVDAELEGKYVETEVEQLIQMALLCTQSSAMERPKMSEVVRMLEGDGLAERWEEWQKEEMPIHDFNYQAYPHAGTDWLIPYSNSLIENDYPSGPR

SEQ ID NO: 70294 - protein, 279 aa, Arabidopsis thaliana
  peptide (1)..(279): Ceres Seq. ID no. 2702697
MISMAVHRNLLRLRGFCMTPTERLLVYPYMANGSVASCLRERPEGNPALDWPKRKHIALGSARGLAYLHDHCDQKIIHRDVKAANILLDEEFEAVVGDFGLAKLMNYNDSHVTTAVRGTIGHIAPEYLSTGKSSEKTDVFGYGVMLLELITGQKAFDLARLANDDDIMLLDWVKEVLKEKKLESLVDAELEGKYVETEVEQLIQMALLCTQSSAMERPKMSEVVRMLEGDGLAERWEEWQKEEMPIHDFNYQAYPHAGTDWLIPYSNSLIENDYPSGPR

SEQ ID NO: 70295 - DNA, 1638 bp, Arabidopsis thaliana
  misc_feature (1)..(1638): Ceres Seq. ID no. 2702830
  misc_feature (1)..(1638): Ortholog of  Ceres SEQ ID NO 12613725 as cited in SEQ ID NO 68196
atggcttccattgatgaagaaaggtcacttcttgaagttgaagaatctcttatacaggaagaagtaaaattatatgctgaagatggttcaatagatattcatggaaacccaccattgaagcagacaacaggaaactggaaagcttgtccattcatttttgcaaacgaatgctgcgaacggttggcttattatggaattgccaagaatctcatcacgtacttcacaaatgaattgcatgagactaatgtttctgctgctagacacgtcatgacatggcaaggaacatgttacatcactcctcttattggagctttaatagctgatgcttactggggaagatattggactattgcttgtttctctgccatttatttcaccggaatggttgcattgacactctcagcttcagttccgggtcttaagccagcggaatgcattggctctctatgtccaccagcaacaatggttcagtctacggttttattttcagggctttaccttatcgctcttggcactggaggaatcaaaccatgtgtctcatcctttggtgctgatcagtttgataagaccgatccaagcgaacgagtcagaaaagcttctttctttaactggttttacttcactatcaacattggtgcttttgtttcatctactgttctagtttggattcaagagaattatggatgggaattaggattcttgatacctaccgtgttcatgggacttgctactatgagtttcttctttggcacgccgctttatagatttcagaaaccgagaggtagcccgattactagcgtctgccaagttcttgtagccgcataccgtaaatcgaatctcaaggtccctgaagactccacggacgaaggagatgcaaacactaacccgtggaagctatgtaccgtgactcaagtcgaagaagttaagattctgttacgtttggtccccatttgggcctcaggaatcatcttctcagttctccattcacagatttacactctctttgttcaacaaggacggtgcatgaaacgaaccatcggcttattcgaaatccctcccgcaactctcgggatgttcgacactgcaagtgttctcatatctgtcccaatctatgaccgcgtcatcgttcccttagtgagacggttcacaggcttagctaaaggattcaccgagctacaaagaatggggattggtctttttgtctctgttttgagcttgacatttgcagctatcgttgagacggttcggttacagttagctagagatcttgatctagtggaaagtggagacattgttccattaaacatcttttggcaaatccctcagtactttttaatgggcactgctggagttttcttctttgttgggaggattgagtttttctatgagcaatctccagattcaatgagaagcttgtgtagtgcttgggctcttctcactactacactaggaaactacttgagctcgttgatcattacccttgtggcgtatttgagcggaaaagattgttggattccttcagacaacattaacaatggacatcttgattacttcttctggcttttggtcagtcttggatctgttaacatacctgtttttgtcttcttctctgtgaaatatactcatatgaaggtttga

SEQ ID NO: 70296 - protein, 545 aa, Arabidopsis thaliana
  peptide (1)..(545): Ceres Seq. ID no. 2702831
MASIDEERSLLEVEESLIQEEVKLYAEDGSIDIHGNPPLKQTTGNWKACPFIFANECCERLAYYGIAKNLITYFTNELHETNVSAARHVMTWQGTCYITPLIGALIADAYWGRYWTIACFSAIYFTGMVALTLSASVPGLKPAECIGSLCPPATMVQSTVLFSGLYLIALGTGGIKPCVSSFGADQFDKTDPSERVRKASFFNWFYFTINIGAFVSSTVLVWIQENYGWELGFLIPTVFMGLATMSFFFGTPLYRFQKPRGSPITSVCQVLVAAYRKSNLKVPEDSTDEGDANTNPWKLCTVTQVEEVKILLRLVPIWASGIIFSVLHSQIYTLFVQQGRCMKRTIGLFEIPPATLGMFDTASVLISVPIYDRVIVPLVRRFTGLAKGFTELQRMGIGLFVSVLSLTFAAIVETVRLQLARDLDLVESGDIVPLNIFWQIPQYFLMGTAGVFFFVGRIEFFYEQSPDSMRSLCSAWALLTTTLGNYLSSLIITLVAYLSGKDCWIPSDNINNGHLDYFFWLLVSLGSVNIPVFVFFSVKYTHMKV

SEQ ID NO: 70297 - protein, 456 aa, Arabidopsis thaliana
  peptide (1)..(456): Ceres Seq. ID no. 2702832
MTWQGTCYITPLIGALIADAYWGRYWTIACFSAIYFTGMVALTLSASVPGLKPAECIGSLCPPATMVQSTVLFSGLYLIALGTGGIKPCVSSFGADQFDKTDPSERVRKASFFNWFYFTINIGAFVSSTVLVWIQENYGWELGFLIPTVFMGLATMSFFFGTPLYRFQKPRGSPITSVCQVLVAAYRKSNLKVPEDSTDEGDANTNPWKLCTVTQVEEVKILLRLVPIWASGIIFSVLHSQIYTLFVQQGRCMKRTIGLFEIPPATLGMFDTASVLISVPIYDRVIVPLVRRFTGLAKGFTELQRMGIGLFVSVLSLTFAAIVETVRLQLARDLDLVESGDIVPLNIFWQIPQYFLMGTAGVFFFVGRIEFFYEQSPDSMRSLCSAWALLTTTLGNYLSSLIITLVAYLSGKDCWIPSDNINNGHLDYFFWLLVSLGSVNIPVFVFFSVKYTHMKV

SEQ ID NO: 70298 - protein, 418 aa, Arabidopsis thaliana
  peptide (1)..(418): Ceres Seq. ID no. 2702833
MVALTLSASVPGLKPAECIGSLCPPATMVQSTVLFSGLYLIALGTGGIKPCVSSFGADQFDKTDPSERVRKASFFNWFYFTINIGAFVSSTVLVWIQENYGWELGFLIPTVFMGLATMSFFFGTPLYRFQKPRGSPITSVCQVLVAAYRKSNLKVPEDSTDEGDANTNPWKLCTVTQVEEVKILLRLVPIWASGIIFSVLHSQIYTLFVQQGRCMKRTIGLFEIPPATLGMFDTASVLISVPIYDRVIVPLVRRFTGLAKGFTELQRMGIGLFVSVLSLTFAAIVETVRLQLARDLDLVESGDIVPLNIFWQIPQYFLMGTAGVFFFVGRIEFFYEQSPDSMRSLCSAWALLTTTLGNYLSSLIITLVAYLSGKDCWIPSDNINNGHLDYFFWLLVSLGSVNIPVFVFFSVKYTHMKV

SEQ ID NO: 70299 - DNA, 1989 bp, Arabidopsis thaliana
  misc_feature (1)..(1989): Ceres Seq. ID no. 2702881
  misc_feature (1)..(1989): Ortholog of  Ceres SEQ ID NO 15178728 as cited in SEQ ID NO 67280
atgactataatggaggagaagcagaacaacagtcctgtgggagagaagcaacagagctttaatggtataataataaaccaaacacaagagaatcagacaaaatcaatggagaaacaacagagtttccgatgtgtggtggagaatcaaccgagaaaggcgagagctttagagaaacaagtgagtttccaaggtgtgaatgtagagaactatcagcaaagcagactcggaagatcaatggagaagcaacagagttttcgaggtgtcaacgttgagaatcataaacgtggagttatggagaagctaccgagttttggtagagcaacaatggagaggcagaagagtttccgtggtgggtttttggagaagcagaagagcttccgtgtggtgatggagaggcaattgagttttataggtgagaggaggaagaagaatgaatcaccagggaaaagaggagactcttctcttcatatcgctgcgagaaccgggaacttaagtaaggttaaagaactgattcgaggttgtggtgatgagttgaaagagttgttgtcaaagcaaaatcttgaaggagagactcctctttatactgcagcagagaatgggcattcaattgttgttgaggagatgttgaagcatatggaccttgaaactgcttccatcgctgctagaaacgggtttgatccatttcatgtcgccgccaaacaaggccatctcgaggtgttgaagatactgttggagacattccctaatttggcaatgacaacggatttatcgtgtacaactgcgttacacactgctgcaacacagggacatattgatgtggtgaatcttcttttggagacagactctaatttggctaagattgctaagaacaacggtaaaactgcgcttcactctgcagcaaggatgggtcatgtggaagttgttaaatctctgataggtaaggatccaagcattgggtttagaaccgataaaaaagggcaaactgctcttcacatggctgtaaaaggtcaaaatgatgggattgttgttgagttggtgaaacctgatgttgctgttttgagcgttgaggataataaaggaaatacaccattgcacattgccacaaacaaggggcgtattaagatagtacggtgtttggtatcttttgaaggcataaacctcaacccaataaacaaagctggagatacgccactcgatgtctctgagaagataggaaacgcagagcttgtgtcagttctgaaggaagcaggagctgctacagctaaagatctcggaaagcctcagaacccagctaagcaactgaagcaaacagtcagcgacatcaaacatgaagtacaatctcagcttcagcaatccagacaaacaggtgtaagagtccagaagatagcaaaaagactcaagaagctacacattagtggtctaaacaacgctataaactcagcaactgttgtggcagtgcttattgccacagtggctttcgcagcaatcttcacaatacccggtcagtacgaagaggaccggtcgaaaggagagttgctaggacaagctcatatagcaaacaaagcaccgtttctggtcttcttcatctttgacagcttggcactgtttatatccttagctgttgttgtggtgcagacttcagttgttgtgattgagcagaaggcgaaaaagaagcttgtgtttgtaatcaacaagctcatgtggtgtgcttgtctgttcatatccattgcctttgtttctctctcttatattgttgttggcaaagaggagatgtggttggctgtttgcgcgactgttatcggcggcacgattatgttgactacgattggtgcgatgtgctattgtgtggtcatgcataggatggaagaatctaaattgaggagcataaggaaagaaagaagcaagtctcagtctttctctatgtctcgtatgccgtctgattcagatattctaaatggtgaatacaataagagaatgtatgccctctga

SEQ ID NO: 70300 - protein, 662 aa, Arabidopsis thaliana
  peptide (1)..(662): Ceres Seq. ID no. 2702882
MTIMEEKQNNSPVGEKQQSFNGIIINQTQENQTKSMEKQQSFRCVVENQPRKARALEKQVSFQGVNVENYQQSRLGRSMEKQQSFRGVNVENHKRGVMEKLPSFGRATMERQKSFRGGFLEKQKSFRVVMERQLSFIGERRKKNESPGKRGDSSLHIAARTGNLSKVKELIRGCGDELKELLSKQNLEGETPLYTAAENGHSIVVEEMLKHMDLETASIAARNGFDPFHVAAKQGHLEVLKILLETFPNLAMTTDLSCTTALHTAATQGHIDVVNLLLETDSNLAKIAKNNGKTALHSAARMGHVEVVKSLIGKDPSIGFRTDKKGQTALHMAVKGQNDGIVVELVKPDVAVLSVEDNKGNTPLHIATNKGRIKIVRCLVSFEGINLNPINKAGDTPLDVSEKIGNAELVSVLKEAGAATAKDLGKPQNPAKQLKQTVSDIKHEVQSQLQQSRQTGVRVQKIAKRLKKLHISGLNNAINSATVVAVLIATVAFAAIFTIPGQYEEDRSKGELLGQAHIANKAPFLVFFIFDSLALFISLAVVVVQTSVVVIEQKAKKKLVFVINKLMWCACLFISIAFVSLSYIVVGKEEMWLAVCATVIGGTIMLTTIGAMCYCVVMHRMEESKLRSIRKERSKSQSFSMSRMPSDSDILNGEYNKRMYAL

SEQ ID NO: 70301 - protein, 659 aa, Arabidopsis thaliana
  peptide (1)..(659): Ceres Seq. ID no. 2702883
MEEKQNNSPVGEKQQSFNGIIINQTQENQTKSMEKQQSFRCVVENQPRKARALEKQVSFQGVNVENYQQSRLGRSMEKQQSFRGVNVENHKRGVMEKLPSFGRATMERQKSFRGGFLEKQKSFRVVMERQLSFIGERRKKNESPGKRGDSSLHIAARTGNLSKVKELIRGCGDELKELLSKQNLEGETPLYTAAENGHSIVVEEMLKHMDLETASIAARNGFDPFHVAAKQGHLEVLKILLETFPNLAMTTDLSCTTALHTAATQGHIDVVNLLLETDSNLAKIAKNNGKTALHSAARMGHVEVVKSLIGKDPSIGFRTDKKGQTALHMAVKGQNDGIVVELVKPDVAVLSVEDNKGNTPLHIATNKGRIKIVRCLVSFEGINLNPINKAGDTPLDVSEKIGNAELVSVLKEAGAATAKDLGKPQNPAKQLKQTVSDIKHEVQSQLQQSRQTGVRVQKIAKRLKKLHISGLNNAINSATVVAVLIATVAFAAIFTIPGQYEEDRSKGELLGQAHIANKAPFLVFFIFDSLALFISLAVVVVQTSVVVIEQKAKKKLVFVINKLMWCACLFISIAFVSLSYIVVGKEEMWLAVCATVIGGTIMLTTIGAMCYCVVMHRMEESKLRSIRKERSKSQSFSMSRMPSDSDILNGEYNKRMYAL

SEQ ID NO: 70302 - protein, 627 aa, Arabidopsis thaliana
  peptide (1)..(627): Ceres Seq. ID no. 2702884
MEKQQSFRCVVENQPRKARALEKQVSFQGVNVENYQQSRLGRSMEKQQSFRGVNVENHKRGVMEKLPSFGRATMERQKSFRGGFLEKQKSFRVVMERQLSFIGERRKKNESPGKRGDSSLHIAARTGNLSKVKELIRGCGDELKELLSKQNLEGETPLYTAAENGHSIVVEEMLKHMDLETASIAARNGFDPFHVAAKQGHLEVLKILLETFPNLAMTTDLSCTTALHTAATQGHIDVVNLLLETDSNLAKIAKNNGKTALHSAARMGHVEVVKSLIGKDPSIGFRTDKKGQTALHMAVKGQNDGIVVELVKPDVAVLSVEDNKGNTPLHIATNKGRIKIVRCLVSFEGINLNPINKAGDTPLDVSEKIGNAELVSVLKEAGAATAKDLGKPQNPAKQLKQTVSDIKHEVQSQLQQSRQTGVRVQKIAKRLKKLHISGLNNAINSATVVAVLIATVAFAAIFTIPGQYEEDRSKGELLGQAHIANKAPFLVFFIFDSLALFISLAVVVVQTSVVVIEQKAKKKLVFVINKLMWCACLFISIAFVSLSYIVVGKEEMWLAVCATVIGGTIMLTTIGAMCYCVVMHRMEESKLRSIRKERSKSQSFSMSRMPSDSDILNGEYNKRMYAL

SEQ ID NO: 70303 - DNA, 1701 bp, Arabidopsis thaliana
  misc_feature (1)..(1701): Ceres Seq. ID no. 2703078
  misc_feature (1)..(1701): Ortholog of  Ceres SEQ ID NO 13502874 as cited in SEQ ID NO 66298
  misc_feature (1)..(1701): Ortholog of  Ceres SEQ ID NO 12614124 as cited in SEQ ID NO 68392
atgcagaaacaattagcatatattacaaaacacatactaattgtttctccttctccttcttccttgcaaatggatactttagcttcaaactcttcggatctcacgaccaagtcaagtctcggaatgtcgtcgtttaccaacatgtatctcctcacaacgcttcaagcccttgcggccctttgcttcttgatgattctcaacaaaataaagtcatcttcacgaaacaagaagttgcatcctctcccgccaggacccaccggttttccaattgttggaatgattccggcgatgcttaaaaaccgtccagttttccggtggctccacagcctcatgaaggagcttaacacggagatagcttgtgtgcgtctaggaaacactcacgtgatccctgtgacatgtcctaagattgcacgtgagatcttcaagcaacaagacgcactctttgcgtcaagaccactcacttatgctcaaaagattctctctaacggctacaaaacctgcgtgatcacaccgtttggcgaacaattcaagaagatgaggaaagtgatcatgacagagattgtttgtccagcgagacaccgttggctacacgacaatagagctgaggaaaccgatcacttgaccgcttggctctacaacatggttaagaactctgaaccagtcgatctccgttttgttacgaggcattattgtggaaatgcaatcaagaggcttatgttcgggacgaggacgttctcggagaaaaccgaagccgatggtggaccgactttggaagatatcgagcatatggatgctatgttcgaggggttagggtttacgtttgcgttttgtatatcggattatctaccgatgcttacgggattggatctaaacggacatgaaaagattatgagagaatccagtgcaattatggataaatatcacgatcctataattgatgagaggattaagatgtggagagaaggtaagagaactcagatcgaagattttctagacattttcatctctatcaaggacgaagctggccagcctttgcttaccgctgatgaaatcaaaccaaccattaaggaacttgtaatggcggcgccagacaacccatcaaacgccgtggaatgggccattgcggagatgataaacaaaccggagatcctccacaaagctatggaagagatcgatagagtcgtcggaaaagaaagattcgtccaagaatccgatataccaaaacttaactatgttaaagctattatccgagaagctttccgtcttcatcccgtcgccgccttcaacctcccacacgtggcactctctgatacgaccgtcgcaggttaccatattcctaaaggaagtcaagttttacttagccgttacggtcttggtcgtaaccccaaggtttggtctgatccacttagcttcaaaccagaaaggcatctcaatgagtgttcggaagtgactttgacggagaatgatctccgttttatctcgtttagtaccggaaagagaggatgtgctgctccggcgttaggtacggcgataacgaccatgatgctagcgaggcttttgcaagggtttaagtggaaactagcaggaagtgagacacgtgtcgagcttatggaatcgagtcatgatatgtttctttcgaagcctttggtgttggtcggagaattgagattgtcggaggacctttacccaatggtgaagtga

SEQ ID NO: 70304 - protein, 566 aa, Arabidopsis thaliana
  peptide (1)..(566): Ceres Seq. ID no. 2703079
MQKQLAYITKHILIVSPSPSSLQMDTLASNSSDLTTKSSLGMSSFTNMYLLTTLQALAALCFLMILNKIKSSSRNKKLHPLPPGPTGFPIVGMIPAMLKNRPVFRWLHSLMKELNTEIACVRLGNTHVIPVTCPKIAREIFKQQDALFASRPLTYAQKILSNGYKTCVITPFGEQFKKMRKVIMTEIVCPARHRWLHDNRAEETDHLTAWLYNMVKNSEPVDLRFVTRHYCGNAIKRLMFGTRTFSEKTEADGGPTLEDIEHMDAMFEGLGFTFAFCISDYLPMLTGLDLNGHEKIMRESSAIMDKYHDPIIDERIKMWREGKRTQIEDFLDIFISIKDEAGQPLLTADEIKPTIKELVMAAPDNPSNAVEWAIAEMINKPEILHKAMEEIDRVVGKERFVQESDIPKLNYVKAIIREAFRLHPVAAFNLPHVALSDTTVAGYHIPKGSQVLLSRYGLGRNPKVWSDPLSFKPERHLNECSEVTLTENDLRFISFSTGKRGCAAPALGTAITTMMLARLLQGFKWKLAGSETRVELMESSHDMFLSKPLVLVGELRLSEDLYPMVK

SEQ ID NO: 70305 - protein, 543 aa, Arabidopsis thaliana
  peptide (1)..(543): Ceres Seq. ID no. 2703080
MDTLASNSSDLTTKSSLGMSSFTNMYLLTTLQALAALCFLMILNKIKSSSRNKKLHPLPPGPTGFPIVGMIPAMLKNRPVFRWLHSLMKELNTEIACVRLGNTHVIPVTCPKIAREIFKQQDALFASRPLTYAQKILSNGYKTCVITPFGEQFKKMRKVIMTEIVCPARHRWLHDNRAEETDHLTAWLYNMVKNSEPVDLRFVTRHYCGNAIKRLMFGTRTFSEKTEADGGPTLEDIEHMDAMFEGLGFTFAFCISDYLPMLTGLDLNGHEKIMRESSAIMDKYHDPIIDERIKMWREGKRTQIEDFLDIFISIKDEAGQPLLTADEIKPTIKELVMAAPDNPSNAVEWAIAEMINKPEILHKAMEEIDRVVGKERFVQESDIPKLNYVKAIIREAFRLHPVAAFNLPHVALSDTTVAGYHIPKGSQVLLSRYGLGRNPKVWSDPLSFKPERHLNECSEVTLTENDLRFISFSTGKRGCAAPALGTAITTMMLARLLQGFKWKLAGSETRVELMESSHDMFLSKPLVLVGELRLSEDLYPMVK

SEQ ID NO: 70306 - protein, 525 aa, Arabidopsis thaliana
  peptide (1)..(525): Ceres Seq. ID no. 2703081
MSSFTNMYLLTTLQALAALCFLMILNKIKSSSRNKKLHPLPPGPTGFPIVGMIPAMLKNRPVFRWLHSLMKELNTEIACVRLGNTHVIPVTCPKIAREIFKQQDALFASRPLTYAQKILSNGYKTCVITPFGEQFKKMRKVIMTEIVCPARHRWLHDNRAEETDHLTAWLYNMVKNSEPVDLRFVTRHYCGNAIKRLMFGTRTFSEKTEADGGPTLEDIEHMDAMFEGLGFTFAFCISDYLPMLTGLDLNGHEKIMRESSAIMDKYHDPIIDERIKMWREGKRTQIEDFLDIFISIKDEAGQPLLTADEIKPTIKELVMAAPDNPSNAVEWAIAEMINKPEILHKAMEEIDRVVGKERFVQESDIPKLNYVKAIIREAFRLHPVAAFNLPHVALSDTTVAGYHIPKGSQVLLSRYGLGRNPKVWSDPLSFKPERHLNECSEVTLTENDLRFISFSTGKRGCAAPALGTAITTMMLARLLQGFKWKLAGSETRVELMESSHDMFLSKPLVLVGELRLSEDLYPMVK

SEQ ID NO: 70307 - DNA, 2796 bp, Arabidopsis thaliana
  misc_feature (1)..(2796): Ceres Seq. ID no. 2703558
  misc_feature (1)..(2796): Ortholog of  Ceres SEQ ID NO 13646569 as cited in SEQ ID NO 20745
atggaggaagtgttcgaggagctgaaatgtacaaaacaaggtcttacggcaaatgaagcttctcaccgtcttgacgtttttggtcctaacaagcttgaagagaagaaggaaagcaagttacttaagtttttagggttcatgtggaacccattgtcgtgggtgatggaggtggctgcactaatggcaatcgctttggccaacggaggaggacggccaccggattggcaagactttgtggggatagtgtgtttactattaatcaactcaaccattagtttcattgaggaaaataacgccggtaatgctgcagccgctctcatggccggtctagcccctaagacaaaggttctcagagataatcaatggagcgagcaagaagcatcgattctcgtccccggagatgtaatcagcatcaagctcggcgatatcattcccgccgatgcacgtttactcgacggcgatcctctcaaaatcgatcaatcatcactcaccggtgaatcaatccccgtcacaaaaaaccccagcgatgaagtcttctccggctcaatatgcaaacaaggcgaaatcgaagcaatcgtcatcgccactggagtccacacattcttcggcaaagcagctcatctcgtcgacaacacaaaccaaatcggccatttccagaaagttctcacttcgattggtaacttctgtatctgttcgattgctttaggaatcatcgttgagcttttagtaatgtatccgattcaacgccggagatatcgagacggaatcgataatttacttgttttgttgatcggagggattcctatagctatgcctagtgtgttatctgttacaatggcgactggttctcatagattgtttcaacaaggagctattactaagagaatgactgctattgaggaaatggctggtatggatgtattgtgttgtgataagactggtactcttacgcttaataagcttacggttgataagaacttagtcgaggttttcgctaaaggagttggtaaagaacatgttttccttttggctgcgagagcttcgaggattgagaatcaagatgcgattgatgctgctattgttggaatgcttgctgatcctaaagaggctagagctggtgttagagaggttcattttttcccttttaatccggttgataagagaactgctttgacttatgttgactctgatggaaactggcatagagctagtaaaggagctccagagcagatactgaacctctgtaattgcaaggaagatgttaggaggaaagttcatggagtgattgataagtttgctgagcgtggacttcgctctttggctgttgcaagacaggaagttctcgagaagaagaaagatgctcctggtggcccatggcaacttgtaggtcttttacctctttttgatcctccgaggcatgacagtgccgagacaatcaggagggctttaaacctcggtgttaatgttaagatgataaccggggaccagcttgcaattgggaaagagaccggtcgaaggcttggaatgggtacgaacatgtatccttcttctgcgctgctcggacaagtcaaagattcttccttgggtgcacttcctgtggatgaactgatagagaaggctgatgggtttgcaggagtctttccagaacataagtatgagattgttcataggctgcaacaaaggaatcacatatgtggcatgactggagatggtgtgaatgatgccccggctctcaagaaggcggatattggtatagctgttgttgatgctactgatgctgcgagaggcgcttctgatatcgttctcacagaacccggattgagtgttatcattagtgctgtactcaccagtagagccatattccaaagaatgaaaaattacactatttatgcggtttcaatcacgatacgaattgtgtttggcttcatgttcattgccctcatatggcagttcgatttttcgcctttcatggttctgatcatagcaatcttaaacgacggaacaatcatgacaatatcaaaagacagaatgaagccatctccacagccagatagctggaaactcagagatatattctcgaccggcgtcgtgcttggaggttaccaggccttgatgacagtcgttttcttctgggtgatgaaagacagtgattttttctcgaactattttggtgtgagaccactgagccaacgtcctgaacaaatgatggctgctctgtatctacaagttagcatcataagccaggctctcatcttcgtcaccagatcccgtagctggtcctacgccgaatgccctggccttctcttacttggtgcatttgtcatagctcagctggtggcgacatttatagcagtttatgcaaactggagttttgcccggatagaaggagccggttggggatgggctggagtgatctggctatacagtttcctaacgtacatccctcttgacttactcaagtttggaatccgctatgttttgagtggaaaagcttggttaaatcttcttgagaacaagactgccttcacgacgaagaaagactatgggaaagaggaaagagaagctcaatgggctgcagctcaaagaaccctccacggacttcaaccagcagagaaaaacaacatctttaacgaaaagaatagttacagtgaactctctcagattgctgaacaggctaaacgccgagctgaggttgtcaggctgagagagataaatacattaaaagggcatgtagagtcagtggtgaagcttaaaggacttgacattgacacgattcagcaacattacaccgtttaa

SEQ ID NO: 70308 - protein, 931 aa, Arabidopsis thaliana
  peptide (1)..(931): Ceres Seq. ID no. 2703559
MEEVFEELKCTKQGLTANEASHRLDVFGPNKLEEKKESKLLKFLGFMWNPLSWVMEVAALMAIALANGGGRPPDWQDFVGIVCLLLINSTISFIEENNAGNAAAALMAGLAPKTKVLRDNQWSEQEASILVPGDVISIKLGDIIPADARLLDGDPLKIDQSSLTGESIPVTKNPSDEVFSGSICKQGEIEAIVIATGVHTFFGKAAHLVDNTNQIGHFQKVLTSIGNFCICSIALGIIVELLVMYPIQRRRYRDGIDNLLVLLIGGIPIAMPSVLSVTMATGSHRLFQQGAITKRMTAIEEMAGMDVLCCDKTGTLTLNKLTVDKNLVEVFAKGVGKEHVFLLAARASRIENQDAIDAAIVGMLADPKEARAGVREVHFFPFNPVDKRTALTYVDSDGNWHRASKGAPEQILNLCNCKEDVRRKVHGVIDKFAERGLRSLAVARQEVLEKKKDAPGGPWQLVGLLPLFDPPRHDSAETIRRALNLGVNVKMITGDQLAIGKETGRRLGMGTNMYPSSALLGQVKDSSLGALPVDELIEKADGFAGVFPEHKYEIVHRLQQRNHICGMTGDGVNDAPALKKADIGIAVVDATDAARGASDIVLTEPGLSVIISAVLTSRAIFQRMKNYTIYAVSITIRIVFGFMFIALIWQFDFSPFMVLIIAILNDGTIMTISKDRMKPSPQPDSWKLRDIFSTGVVLGGYQALMTVVFFWVMKDSDFFSNYFGVRPLSQRPEQMMAALYLQVSIISQALIFVTRSRSWSYAECPGLLLLGAFVIAQLVATFIAVYANWSFARIEGAGWGWAGVIWLYSFLTYIPLDLLKFGIRYVLSGKAWLNLLENKTAFTTKKDYGKEEREAQWAAAQRTLHGLQPAEKNNIFNEKNSYSELSQIAEQAKRRAEVVRLREINTLKGHVESVVKLKGLDIDTIQQHYTV

SEQ ID NO: 70309 - protein, 885 aa, Arabidopsis thaliana
  peptide (1)..(885): Ceres Seq. ID no. 2703560
MWNPLSWVMEVAALMAIALANGGGRPPDWQDFVGIVCLLLINSTISFIEENNAGNAAAALMAGLAPKTKVLRDNQWSEQEASILVPGDVISIKLGDIIPADARLLDGDPLKIDQSSLTGESIPVTKNPSDEVFSGSICKQGEIEAIVIATGVHTFFGKAAHLVDNTNQIGHFQKVLTSIGNFCICSIALGIIVELLVMYPIQRRRYRDGIDNLLVLLIGGIPIAMPSVLSVTMATGSHRLFQQGAITKRMTAIEEMAGMDVLCCDKTGTLTLNKLTVDKNLVEVFAKGVGKEHVFLLAARASRIENQDAIDAAIVGMLADPKEARAGVREVHFFPFNPVDKRTALTYVDSDGNWHRASKGAPEQILNLCNCKEDVRRKVHGVIDKFAERGLRSLAVARQEVLEKKKDAPGGPWQLVGLLPLFDPPRHDSAETIRRALNLGVNVKMITGDQLAIGKETGRRLGMGTNMYPSSALLGQVKDSSLGALPVDELIEKADGFAGVFPEHKYEIVHRLQQRNHICGMTGDGVNDAPALKKADIGIAVVDATDAARGASDIVLTEPGLSVIISAVLTSRAIFQRMKNYTIYAVSITIRIVFGFMFIALIWQFDFSPFMVLIIAILNDGTIMTISKDRMKPSPQPDSWKLRDIFSTGVVLGGYQALMTVVFFWVMKDSDFFSNYFGVRPLSQRPEQMMAALYLQVSIISQALIFVTRSRSWSYAECPGLLLLGAFVIAQLVATFIAVYANWSFARIEGAGWGWAGVIWLYSFLTYIPLDLLKFGIRYVLSGKAWLNLLENKTAFTTKKDYGKEEREAQWAAAQRTLHGLQPAEKNNIFNEKNSYSELSQIAEQAKRRAEVVRLREINTLKGHVESVVKLKGLDIDTIQQHYTV

SEQ ID NO: 70310 - protein, 877 aa, Arabidopsis thaliana
  peptide (1)..(877): Ceres Seq. ID no. 2703561
MEVAALMAIALANGGGRPPDWQDFVGIVCLLLINSTISFIEENNAGNAAAALMAGLAPKTKVLRDNQWSEQEASILVPGDVISIKLGDIIPADARLLDGDPLKIDQSSLTGESIPVTKNPSDEVFSGSICKQGEIEAIVIATGVHTFFGKAAHLVDNTNQIGHFQKVLTSIGNFCICSIALGIIVELLVMYPIQRRRYRDGIDNLLVLLIGGIPIAMPSVLSVTMATGSHRLFQQGAITKRMTAIEEMAGMDVLCCDKTGTLTLNKLTVDKNLVEVFAKGVGKEHVFLLAARASRIENQDAIDAAIVGMLADPKEARAGVREVHFFPFNPVDKRTALTYVDSDGNWHRASKGAPEQILNLCNCKEDVRRKVHGVIDKFAERGLRSLAVARQEVLEKKKDAPGGPWQLVGLLPLFDPPRHDSAETIRRALNLGVNVKMITGDQLAIGKETGRRLGMGTNMYPSSALLGQVKDSSLGALPVDELIEKADGFAGVFPEHKYEIVHRLQQRNHICGMTGDGVNDAPALKKADIGIAVVDATDAARGASDIVLTEPGLSVIISAVLTSRAIFQRMKNYTIYAVSITIRIVFGFMFIALIWQFDFSPFMVLIIAILNDGTIMTISKDRMKPSPQPDSWKLRDIFSTGVVLGGYQALMTVVFFWVMKDSDFFSNYFGVRPLSQRPEQMMAALYLQVSIISQALIFVTRSRSWSYAECPGLLLLGAFVIAQLVATFIAVYANWSFARIEGAGWGWAGVIWLYSFLTYIPLDLLKFGIRYVLSGKAWLNLLENKTAFTTKKDYGKEEREAQWAAAQRTLHGLQPAEKNNIFNEKNSYSELSQIAEQAKRRAEVVRLREINTLKGHVESVVKLKGLDIDTIQQHYTV

SEQ ID NO: 70311 - DNA, 4323 bp, Arabidopsis thaliana
  misc_feature (1)..(4323): Ceres Seq. ID no. 2703588
  misc_feature (1)..(4323): Ortholog of  Ceres SEQ ID NO 13648124 as cited in SEQ ID NO 20362
atggcgaattcaaggatttatccgcaattcttccacacacttgttcctagcttccacactcacttgatgattcctgaagacttcttctcagagtatatcgaaggaagaagcgtcgcagagctgaaattggacttttcagacaaatcttgggaagtgaagttgtctgatcggagaatcactgacggctgggaagagtttgtggtggctaatgattttcgtatcggcgatgttgtcgcttttagatatgttggaaatttggtgttccatgtttctaatttaggacctaattactatgagattgaacacaatgatgagcttcccaaagagaagaaagcgaagacgaacagtgaagaagcagatgcagtttcttcttcttcatcagcagacaagtcatgttttatggccattatcacagctttagatctaacgacagatacactgtatcttccactacattttacaagcgcaaatggtcttacacgaaaaaaccgggagattattttaacagatggaggggaaagatcaagggtattggatctgaggttcgacgaatcatctggtactttttatatcagccggggttggagaaatttctgtgatgaaaatggacaaaaagcaggaggtttctttctgtttaaactagtgggaaaaggtgaaacgctggtgctcagtttctgtcctacagaatctatcaatggggaagagaacataacaagggaggacagtaaagacgagtgcagctcgttggactcattgatgaatatagtagaaaaaaagaagtatattccgaaaccaagaggttcaccatattcatcatattcaccaagtcataaacaattcgtaacatttacgcttccaccggattatgctagaattggaaaattgagtctttcggcgcctttcgttagggaaaatggcatcaacaagcctggggagatatgtcttttggataaacatggtagaaagtggttgacaagtcttctgctggacagtaaaggaacaatgtctttgggaaagggttggaaagagtttgttaaagcaaacagcttagagacgggcttcacactcaagttgatatgggaagaaacaactcctgtgcttagtttgtgtagtccagaatctaacagtgacagagagcaggaagagatttcaaaagctatcgagaaacattctcttttcatagatcctagcaacagggacaaaatcagcaacaatgacaaagaggagaacatgtcatgggagagaaagaaggatcatctgaaaagtagagattcaactctatcaagccaaaaacaatttgtaacaataacaattacaccttccagtgatagattggtaagtttatcaaatgactcttgtttagtggttgttagtttattgtactttgatatgcgtctcccaaaggtattcacgagggagaatggcatcaacaagccggggaggattactctgttgggaaaagacggtataaagcagcagacgaatttgttattcgacaaagcaaatggtgccatgtctttgggacacggctggaaagattttgttaaagataatggcttaaagacaggtgactccttcacgctaaagttgatttgggaagaccaaactcctgttcttagcttgtgtcctgcagactgtagcattgacagagaagcaggaggagggcgatctgaaacaaaccagaaaaagtctcttccaatagaacctagcacatgtaaaaaaatcaggaaagacgtgaacatcaaagatgacaacagcaaagagaaaaatgacaaagaagagagcaaatcagtggatggagagaggaaatatctgagagggacatatttaactccatcaagccaaaaacactttgtgacattaacaattacaccttcctctataaaaaaagatagacttattctttccccacaatttgcaaggaagaacaatattgacaagcctggaatgatatatctgctggatacagatggtacaaagtggctgataagccttcaacgagataagaaaggaacaatgagtttgggaaaaggttggaaagaatttgctgaagcaaatgactttaagttaggcgaatcctttacgatggagttagtatgggaagacacaactcctatgctcagtttgttacgtaccgagtttaggagttcaaaagctaacgagaaagagtcaatttcctcagaacataaaaccagagaatcatccccaacaatcaaaaaccgaatcgtgactccagcactcacacctgaagatgttaaagcctgtaaattggtaacttcatcaaactactcttgtttttcagagattctttcagcgcaatttgcaagggagaacaatattaaccagcctggaacgatatatctattggatacagatggtaggaagtggctgacaacggttaaacgggacaagaaaggaacaatgagtttgggaaagggttggaaagagtttgctgatacaaaagacttaaagtcaggcgactcctttacgatggagttaatatgggaagacacaaatcctgtgctcagtttgttacgtacaaagtttagcagttctaaatctaacaaggaagagtccatttttttagaaccaaaaagtagagattcatcctccccaacaatcgtaaacagattcgtgacattagcacttacaccagaagatgttacagcctgtaaactgattcttccaagtcagttcatgaaggctaatggcatcaacaacaaacttgggaagataactcttttgggtgaaaacggagtcgaatggccgggatatatgttgtcgctagatggaactctcgctttaggaaatggttgggaaggcttttgtgaggctaatggcgtgaagttaggacagacttttactttggagtttgttaatgaacaagatacaacaacaactccgagaatacctgtagccttcttcttgaagaatatagaaggaagatatgagcagaagacggcggagctgagatcagatgcgtcaaagataacttgggaagtgaagatagatggacagagactcactgacggttggaaagagtttgctctctcacatgatcttcgaatcggtgacattgttgttttcagacaagagagagatatgtctttccacgttacaatgttgggacctagttgttgtgagatccaatatggttcgtgttcagacgaggagagaaacctcgagaagaagaagaatccaaatggagaagcaaagtcttcttcactagatccttcttgtttttcggctaatgtggcgccttcgagtctacgttatgacttaatgctttttccaatgggttttgtgagggaaaatggtgtagtcggatctggaaagattgttctgatgaatgaaaagggcagatcatggaattttaacttgagacaaaagccatcatgcggaacagtttatgttagaggagggtgggtgagtttttgtgatgccaatggacttcaagctggagatatctacactttcaaactgatcaaaagaggaggaactcttgttctacgtttgttacccaaaggggcagagtcttgttcactagatccctcttgttttgtggctaatgttgcgccttcgactctacgctatgacacactgtatcttccaaagcgttttatgagggaaaatggtgtagacaaaagacgtggagagatgattctgatgaatgaaaagggcaaatcatggactttagatttgaaactaaagaaatcatgcggaacttccctcatcagacgaggatggagaagtttctgtagtgccaatggactaagagctggaagtatcattactttcaaactgattaagaaaagtggaactcttgttctatgtttgctctccaacgagccagaagaagaagtgtgctcagaagctaatgaagtagagtctctttcgacagatcaagaaagccatgaagagagtagccacaacgagaaaatctcaagaagaaaggaaaagaagggtagaatgatatggaaagcttcgtcttcaccatccgaaaaccgatttgtgacattaaatcttacaccttataacatcctacgttctgcactgcgtcttccgatacccttcacgaggatgaatggtatcaatgaagaaactaaaatgactctgttggataaacatggtatgaagtggttaacgactctgcggttggtggactacaaaagaaaaagactgggaatggtaggaggctggaaaggattcatccaagctaacggtgtgaaggcaaacgaatccatcatgttggaactgatttgggaagaagaaacaagttgcgtccttaagttctgctccaaggtgaagctagcaatcaaatga

SEQ ID NO: 70312 - protein, 1440 aa, Arabidopsis thaliana
  peptide (1)..(1440): Ceres Seq. ID no. 2703589
MANSRIYPQFFHTLVPSFHTHLMIPEDFFSEYIEGRSVAELKLDFSDKSWEVKLSDRRITDGWEEFVVANDFRIGDVVAFRYVGNLVFHVSNLGPNYYEIEHNDELPKEKKAKTNSEEADAVSSSSSADKSCFMAIITALDLTTDTLYLPLHFTSANGLTRKNREIILTDGGERSRVLDLRFDESSGTFYISRGWRNFCDENGQKAGGFFLFKLVGKGETLVLSFCPTESINGEENITREDSKDECSSLDSLMNIVEKKKYIPKPRGSPYSSYSPSHKQFVTFTLPPDYARIGKLSLSAPFVRENGINKPGEICLLDKHGRKWLTSLLLDSKGTMSLGKGWKEFVKANSLETGFTLKLIWEETTPVLSLCSPESNSDREQEEISKAIEKHSLFIDPSNRDKISNNDKEENMSWERKKDHLKSRDSTLSSQKQFVTITITPSSDRLVSLSNDSCLVVVSLLYFDMRLPKVFTRENGINKPGRITLLGKDGIKQQTNLLFDKANGAMSLGHGWKDFVKDNGLKTGDSFTLKLIWEDQTPVLSLCPADCSIDREAGGGRSETNQKKSLPIEPSTCKKIRKDVNIKDDNSKEKNDKEESKSVDGERKYLRGTYLTPSSQKHFVTLTITPSSIKKDRLILSPQFARKNNIDKPGMIYLLDTDGTKWLISLQRDKKGTMSLGKGWKEFAEANDFKLGESFTMELVWEDTTPMLSLLRTEFRSSKANEKESISSEHKTRESSPTIKNRIVTPALTPEDVKACKLVTSSNYSCFSEILSAQFARENNINQPGTIYLLDTDGRKWLTTVKRDKKGTMSLGKGWKEFADTKDLKSGDSFTMELIWEDTNPVLSLLRTKFSSSKSNKEESIFLEPKSRDSSSPTIVNRFVTLALTPEDVTACKLILPSQFMKANGINNKLGKITLLGENGVEWPGYMLSLDGTLALGNGWEGFCEANGVKLGQTFTLEFVNEQDTTTTPRIPVAFFLKNIEGRYEQKTAELRSDASKITWEVKIDGQRLTDGWKEFALSHDLRIGDIVVFRQERDMSFHVTMLGPSCCEIQYGSCSDEERNLEKKKNPNGEAKSSSLDPSCFSANVAPSSLRYDLMLFPMGFVRENGVVGSGKIVLMNEKGRSWNFNLRQKPSCGTVYVRGGWVSFCDANGLQAGDIYTFKLIKRGGTLVLRLLPKGAESCSLDPSCFVANVAPSTLRYDTLYLPKRFMRENGVDKRRGEMILMNEKGKSWTLDLKLKKSCGTSLIRRGWRSFCSANGLRAGSIITFKLIKKSGTLVLCLLSNEPEEEVCSEANEVESLSTDQESHEESSHNEKISRRKEKKGRMIWKASSSPSENRFVTLNLTPYNILRSALRLPIPFTRMNGINEETKMTLLDKHGMKWLTTLRLVDYKRKRLGMVGGWKGFIQANGVKANESIMLELIWEEETSCVLKFCSKVKLAIK

SEQ ID NO: 70313 - protein, 1418 aa, Arabidopsis thaliana
  peptide (1)..(1418): Ceres Seq. ID no. 2703590
MIPEDFFSEYIEGRSVAELKLDFSDKSWEVKLSDRRITDGWEEFVVANDFRIGDVVAFRYVGNLVFHVSNLGPNYYEIEHNDELPKEKKAKTNSEEADAVSSSSSADKSCFMAIITALDLTTDTLYLPLHFTSANGLTRKNREIILTDGGERSRVLDLRFDESSGTFYISRGWRNFCDENGQKAGGFFLFKLVGKGETLVLSFCPTESINGEENITREDSKDECSSLDSLMNIVEKKKYIPKPRGSPYSSYSPSHKQFVTFTLPPDYARIGKLSLSAPFVRENGINKPGEICLLDKHGRKWLTSLLLDSKGTMSLGKGWKEFVKANSLETGFTLKLIWEETTPVLSLCSPESNSDREQEEISKAIEKHSLFIDPSNRDKISNNDKEENMSWERKKDHLKSRDSTLSSQKQFVTITITPSSDRLVSLSNDSCLVVVSLLYFDMRLPKVFTRENGINKPGRITLLGKDGIKQQTNLLFDKANGAMSLGHGWKDFVKDNGLKTGDSFTLKLIWEDQTPVLSLCPADCSIDREAGGGRSETNQKKSLPIEPSTCKKIRKDVNIKDDNSKEKNDKEESKSVDGERKYLRGTYLTPSSQKHFVTLTITPSSIKKDRLILSPQFARKNNIDKPGMIYLLDTDGTKWLISLQRDKKGTMSLGKGWKEFAEANDFKLGESFTMELVWEDTTPMLSLLRTEFRSSKANEKESISSEHKTRESSPTIKNRIVTPALTPEDVKACKLVTSSNYSCFSEILSAQFARENNINQPGTIYLLDTDGRKWLTTVKRDKKGTMSLGKGWKEFADTKDLKSGDSFTMELIWEDTNPVLSLLRTKFSSSKSNKEESIFLEPKSRDSSSPTIVNRFVTLALTPEDVTACKLILPSQFMKANGINNKLGKITLLGENGVEWPGYMLSLDGTLALGNGWEGFCEANGVKLGQTFTLEFVNEQDTTTTPRIPVAFFLKNIEGRYEQKTAELRSDASKITWEVKIDGQRLTDGWKEFALSHDLRIGDIVVFRQERDMSFHVTMLGPSCCEIQYGSCSDEERNLEKKKNPNGEAKSSSLDPSCFSANVAPSSLRYDLMLFPMGFVRENGVVGSGKIVLMNEKGRSWNFNLRQKPSCGTVYVRGGWVSFCDANGLQAGDIYTFKLIKRGGTLVLRLLPKGAESCSLDPSCFVANVAPSTLRYDTLYLPKRFMRENGVDKRRGEMILMNEKGKSWTLDLKLKKSCGTSLIRRGWRSFCSANGLRAGSIITFKLIKKSGTLVLCLLSNEPEEEVCSEANEVESLSTDQESHEESSHNEKISRRKEKKGRMIWKASSSPSENRFVTLNLTPYNILRSALRLPIPFTRMNGINEETKMTLLDKHGMKWLTTLRLVDYKRKRLGMVGGWKGFIQANGVKANESIMLELIWEEETSCVLKFCSKVKLAIK

SEQ ID NO: 70314 - protein, 1307 aa, Arabidopsis thaliana
  peptide (1)..(1307): Ceres Seq. ID no. 2703591
MAIITALDLTTDTLYLPLHFTSANGLTRKNREIILTDGGERSRVLDLRFDESSGTFYISRGWRNFCDENGQKAGGFFLFKLVGKGETLVLSFCPTESINGEENITREDSKDECSSLDSLMNIVEKKKYIPKPRGSPYSSYSPSHKQFVTFTLPPDYARIGKLSLSAPFVRENGINKPGEICLLDKHGRKWLTSLLLDSKGTMSLGKGWKEFVKANSLETGFTLKLIWEETTPVLSLCSPESNSDREQEEISKAIEKHSLFIDPSNRDKISNNDKEENMSWERKKDHLKSRDSTLSSQKQFVTITITPSSDRLVSLSNDSCLVVVSLLYFDMRLPKVFTRENGINKPGRITLLGKDGIKQQTNLLFDKANGAMSLGHGWKDFVKDNGLKTGDSFTLKLIWEDQTPVLSLCPADCSIDREAGGGRSETNQKKSLPIEPSTCKKIRKDVNIKDDNSKEKNDKEESKSVDGERKYLRGTYLTPSSQKHFVTLTITPSSIKKDRLILSPQFARKNNIDKPGMIYLLDTDGTKWLISLQRDKKGTMSLGKGWKEFAEANDFKLGESFTMELVWEDTTPMLSLLRTEFRSSKANEKESISSEHKTRESSPTIKNRIVTPALTPEDVKACKLVTSSNYSCFSEILSAQFARENNINQPGTIYLLDTDGRKWLTTVKRDKKGTMSLGKGWKEFADTKDLKSGDSFTMELIWEDTNPVLSLLRTKFSSSKSNKEESIFLEPKSRDSSSPTIVNRFVTLALTPEDVTACKLILPSQFMKANGINNKLGKITLLGENGVEWPGYMLSLDGTLALGNGWEGFCEANGVKLGQTFTLEFVNEQDTTTTPRIPVAFFLKNIEGRYEQKTAELRSDASKITWEVKIDGQRLTDGWKEFALSHDLRIGDIVVFRQERDMSFHVTMLGPSCCEIQYGSCSDEERNLEKKKNPNGEAKSSSLDPSCFSANVAPSSLRYDLMLFPMGFVRENGVVGSGKIVLMNEKGRSWNFNLRQKPSCGTVYVRGGWVSFCDANGLQAGDIYTFKLIKRGGTLVLRLLPKGAESCSLDPSCFVANVAPSTLRYDTLYLPKRFMRENGVDKRRGEMILMNEKGKSWTLDLKLKKSCGTSLIRRGWRSFCSANGLRAGSIITFKLIKKSGTLVLCLLSNEPEEEVCSEANEVESLSTDQESHEESSHNEKISRRKEKKGRMIWKASSSPSENRFVTLNLTPYNILRSALRLPIPFTRMNGINEETKMTLLDKHGMKWLTTLRLVDYKRKRLGMVGGWKGFIQANGVKANESIMLELIWEEETSCVLKFCSKVKLAIK

SEQ ID NO: 70315 - DNA, 2556 bp, Arabidopsis thaliana
  misc_feature (1)..(2556): Ceres Seq. ID no. 2703596
  misc_feature (1)..(2556): Ortholog of  Ceres SEQ ID NO 13648124 as cited in SEQ ID NO 20362
atggcttggaacctggcgataataactttggttggcaaagatggtacaaagttggaggcaactcttcgacgggaaaacagaggattgatgtgtctcggaaatggctggaaagatttatctatatccaacggcttgaagagtggcaagtcgttcacgctggagctaattttggagaatggaactcctatgctcagtttggtgagtacacagtccacaagtcataaaagccagaaaagagagtgctcaaaacatagcgagaaagagtcgatctctgcagtacctagcaaaggaaaaaagaacaggaaagccaggagcaacagagaggagaggagagactcgtcttcagcaatccaaaatcgatttgtgacattcacaccagaagatatcagagactgtatactaattcttccaagccaattcatcaaagctaatggcatcaacaacctcggggagataactttgttgggtcaaaacagaatgaagtggtttgcatatctactgtcaatgtcaaaagatggaagtttggctctgggatctggttggaagggcatctgtgaggctaatggcgttaatacaggggaggcattcacgttggaatacattgatgaacaagaaacagctcataagacctcccagtgtgttggagaagatgacgctctgtggaaagtgggattagagatggtgctaaattcgtcagatttaggacctagccgctgtgatattcgagatttaccagctccgagcagcaccaatgatcagggcaagaccgaacttgcgaggaagaagaaagtgaagaggagcaatacagaaatagaagctgatgcttcttcctccgacaactcttgttttgtggcccttgtcacggcttcgaatctacgcaaagatgctctggtaactgtatgtattttctcaaatttatactctaactttagtttggttttcatttcgattctgtttggtgaaagtgttttctcacgtttgctatacttatgtttatatcttccacaagatttaacaagttcagttggtcttgaaaggaaataccgtgagattgttgtaacagatgaaagggaaagaagatcatgggcgttggatctgaggttcaacaaatcatctgatactttctacataagccgaggttggaggagtttctgtgatgaaaacggtaaaaagccaggaggtgtctttgttttcaaactagttggaaacagggaaactccggtgcttagtttctgttccactgaatctatcaacgatggaacacaaggacataagaacaacaaatacaattgtatggagctgaagagcaagaagaagcgtatgagatgtagagattcaacttcaccaagccaaaaccggtttatgacattaacacttactcatgacaacctcataaaaagtagacggcaacttcctttgccatttatgagagaaaatggcttggtcaaacctgggattataaatttgttgggtaaagatggtacaaagtgggaggtaaatcttcgacgggaagccaacggaaccatgtatttgggaaaaggctggaaagatttcactatagctaacggcttaaagaccggcgaatctttcacgttggaggcagttttggagaatggaactcgtatgctcagtttggtcagtacacagtccacaagtgatagaaaccagcaaggagagtgtttaaaagatagcgagaaagagtcaaattctacagaacctagcagtggaaaaaggaaagccatgataaacagaggcgtgagaagaaagtcatttccagcaagccaaaaccggtgtgtgacattaaaacttactcatgacaacctcatcaaaagtagacggtatcttccgttgtcattcacaagagataatggcttggacaaacctgggatgatttttctgttgggcaaaactggtagaaagtgggaggcaaatcttctaagggaagcctcaggaagaattgttttgacgggaaagggctggaaagagttcgccatggcaaacggcttaaaaagcggtgaattgttcacgttggaggcaattttggagaagggaactcctatgctcagtttggtcaatacacagtccacaaattatagaagccaacaaggagaatgttcaagagatagcgagaaggagtcgtcgatttgtgctgaacctagtagaggaaacaagaagtggaaagctactaacaacagaaaggagaggagagactcgtcgtcagcaatccaaaatcgatatgtgacattaacactcacaccagaagatgtcagagcctgtacactaattcttccgagtcaattcatgaaagctaatggcatcaacaagcttgggaagaaaactttgttgggtcaaaacagaaagaagtggtttgcatatctactgtcaaaaagtggatttgtggcactgggatctggttggaaaggtttctgtgaagctaatggcgttaagacaggagaatcattcaatttggaatatattgatgaacaagacacaactcctgtgtttaagttctgttccaactccgtagagtatgtaaagttcacaagccttccttaa

SEQ ID NO: 70316 - protein, 851 aa, Arabidopsis thaliana
  peptide (1)..(851): Ceres Seq. ID no. 2703597
MAWNLAIITLVGKDGTKLEATLRRENRGLMCLGNGWKDLSISNGLKSGKSFTLELILENGTPMLSLVSTQSTSHKSQKRECSKHSEKESISAVPSKGKKNRKARSNREERRDSSSAIQNRFVTFTPEDIRDCILILPSQFIKANGINNLGEITLLGQNRMKWFAYLLSMSKDGSLALGSGWKGICEANGVNTGEAFTLEYIDEQETAHKTSQCVGEDDALWKVGLEMVLNSSDLGPSRCDIRDLPAPSSTNDQGKTELARKKKVKRSNTEIEADASSSDNSCFVALVTASNLRKDALVTVCIFSNLYSNFSLVFISILFGESVFSRLLYLCLYLPQDLTSSVGLERKYREIVVTDERERRSWALDLRFNKSSDTFYISRGWRSFCDENGKKPGGVFVFKLVGNRETPVLSFCSTESINDGTQGHKNNKYNCMELKSKKKRMRCRDSTSPSQNRFMTLTLTHDNLIKSRRQLPLPFMRENGLVKPGIINLLGKDGTKWEVNLRREANGTMYLGKGWKDFTIANGLKTGESFTLEAVLENGTRMLSLVSTQSTSDRNQQGECLKDSEKESNSTEPSSGKRKAMINRGVRRKSFPASQNRCVTLKLTHDNLIKSRRYLPLSFTRDNGLDKPGMIFLLGKTGRKWEANLLREASGRIVLTGKGWKEFAMANGLKSGELFTLEAILEKGTPMLSLVNTQSTNYRSQQGECSRDSEKESSICAEPSRGNKKWKATNNRKERRDSSSAIQNRYVTLTLTPEDVRACTLILPSQFMKANGINKLGKKTLLGQNRKKWFAYLLSKSGFVALGSGWKGFCEANGVKTGESFNLEYIDEQDTTPVFKFCSNSVEYVKFTSLP

SEQ ID NO: 70317 - protein, 822 aa, Arabidopsis thaliana
  peptide (1)..(822): Ceres Seq. ID no. 2703598
MCLGNGWKDLSISNGLKSGKSFTLELILENGTPMLSLVSTQSTSHKSQKRECSKHSEKESISAVPSKGKKNRKARSNREERRDSSSAIQNRFVTFTPEDIRDCILILPSQFIKANGINNLGEITLLGQNRMKWFAYLLSMSKDGSLALGSGWKGICEANGVNTGEAFTLEYIDEQETAHKTSQCVGEDDALWKVGLEMVLNSSDLGPSRCDIRDLPAPSSTNDQGKTELARKKKVKRSNTEIEADASSSDNSCFVALVTASNLRKDALVTVCIFSNLYSNFSLVFISILFGESVFSRLLYLCLYLPQDLTSSVGLERKYREIVVTDERERRSWALDLRFNKSSDTFYISRGWRSFCDENGKKPGGVFVFKLVGNRETPVLSFCSTESINDGTQGHKNNKYNCMELKSKKKRMRCRDSTSPSQNRFMTLTLTHDNLIKSRRQLPLPFMRENGLVKPGIINLLGKDGTKWEVNLRREANGTMYLGKGWKDFTIANGLKTGESFTLEAVLENGTRMLSLVSTQSTSDRNQQGECLKDSEKESNSTEPSSGKRKAMINRGVRRKSFPASQNRCVTLKLTHDNLIKSRRYLPLSFTRDNGLDKPGMIFLLGKTGRKWEANLLREASGRIVLTGKGWKEFAMANGLKSGELFTLEAILEKGTPMLSLVNTQSTNYRSQQGECSRDSEKESSICAEPSRGNKKWKATNNRKERRDSSSAIQNRYVTLTLTPEDVRACTLILPSQFMKANGINKLGKKTLLGQNRKKWFAYLLSKSGFVALGSGWKGFCEANGVKTGESFNLEYIDEQDTTPVFKFCSNSVEYVKFTSLP

SEQ ID NO: 70318 - protein, 789 aa, Arabidopsis thaliana
  peptide (1)..(789): Ceres Seq. ID no. 2703599
MLSLVSTQSTSHKSQKRECSKHSEKESISAVPSKGKKNRKARSNREERRDSSSAIQNRFVTFTPEDIRDCILILPSQFIKANGINNLGEITLLGQNRMKWFAYLLSMSKDGSLALGSGWKGICEANGVNTGEAFTLEYIDEQETAHKTSQCVGEDDALWKVGLEMVLNSSDLGPSRCDIRDLPAPSSTNDQGKTELARKKKVKRSNTEIEADASSSDNSCFVALVTASNLRKDALVTVCIFSNLYSNFSLVFISILFGESVFSRLLYLCLYLPQDLTSSVGLERKYREIVVTDERERRSWALDLRFNKSSDTFYISRGWRSFCDENGKKPGGVFVFKLVGNRETPVLSFCSTESINDGTQGHKNNKYNCMELKSKKKRMRCRDSTSPSQNRFMTLTLTHDNLIKSRRQLPLPFMRENGLVKPGIINLLGKDGTKWEVNLRREANGTMYLGKGWKDFTIANGLKTGESFTLEAVLENGTRMLSLVSTQSTSDRNQQGECLKDSEKESNSTEPSSGKRKAMINRGVRRKSFPASQNRCVTLKLTHDNLIKSRRYLPLSFTRDNGLDKPGMIFLLGKTGRKWEANLLREASGRIVLTGKGWKEFAMANGLKSGELFTLEAILEKGTPMLSLVNTQSTNYRSQQGECSRDSEKESSICAEPSRGNKKWKATNNRKERRDSSSAIQNRYVTLTLTPEDVRACTLILPSQFMKANGINKLGKKTLLGQNRKKWFAYLLSKSGFVALGSGWKGFCEANGVKTGESFNLEYIDEQDTTPVFKFCSNSVEYVKFTSLP

SEQ ID NO: 70319 - DNA, 3267 bp, Arabidopsis thaliana
  misc_feature (1)..(3267): Ceres Seq. ID no. 2703833
  misc_feature (1)..(3267): Ortholog of  Ceres SEQ ID NO 14311156 as cited in SEQ ID NO 54767
  misc_feature (1)..(3267): Ortholog of  Ceres SEQ ID NO 13658778 as cited in SEQ ID NO 66511
atgaacactggagggagactcattgctgggtctcacaacaggaatgaattcgttctcattaacgccgacgacactgccagaatacgatcagcagaagaactgagtgggcaaacttgtaaaatctgtagagatgagattgagttaacagataatggtgagccatttatcgcttgcaacgaatgtgctttccctacgtgtagaccgtgctatgagtatgaaagaagagaaggaaaccaagcttgtcctcagtgcggaacccgatacaagcgtattaaaggtagtccaagggtcgaaggggatgaagaagatgatgacattgatgatctggagcatgagttttatggaatggatcctgaacatgttactgaagctgcgctctattatatgcgtcttaacactggtcgtggtactgatgaagtgtcacacttgtattcagcttcaccaggctctgaggttcctcttttgacgtattgtgatgaggattctgatatgtattcggatagacatgctcttatcgtgcccccatctacgggtttggggaacagagtccatcatgtgccatttacagattcttttgcatctatacacacaagacccatggttcctcagaaggatcttacagtttatggatatggaagtgttgcatggaaagaccgtatggaagtatggaagaaacaacaaatagaaaagctacaagtcgttaagaatgaaagagtaaatgatggtgatggcgatggattcattgttgacgagctcgatgatcccgggctaccaatgatggatgaaggaagacaacctctgtcacgaaagctacccattcgttcgagcagaataaacccttataggatgttgattttctgtcggctcgccattcttggcttgttcttccattataggattctccatccggtgaatgatgcattcggcttgtggttaacatcggttatatgcgaaatatggttcgctgtgtcttggattcttgatcagttcccaaaatggtatcccatcgaaagagaaacatatctcgacaggctttctctaaggtatgagaaggaagggaagccatcagagttagcgcctgtcgatgtctttgttagtactgtggatccattgaaagagcctccactgattacagcaaatacggttctgtctattctcgctgttgattatccggttgagaaggttgcatgttatgtatcagatgatggtgctgcaatgcttacatttgaagctctctcttacacagccgagtttgcaagaaaatgggttcctttctgtaagaagttcagcatcgagccacgcgctcctgaatggtatttttcacagaagatggattacttgaagcataaagtcgatcccgcttttgttatggaacgccgtgccatgaagagagactatgaggaattcaaagtaaagataaatgcattggtttctgtatcacagaaagttcctgaagatggttggactatgcaagatggaactccttggcctggaaacaatgtccgggaccatccaggaatgattcaggttttcctgggacacagcggagtttgtgatatggatggaaatgagttacctcgtttggtgtatgtttctcgtgagaagcgaccgggatttgatcaccataagaaggctggagctatgaattccttgatccgggtatctgctgttctctcaaatgctccttaccttcttaatgtggactgtgatcattacatcaacaacagcaaggcaattagagaagctatgtgtttcatgatggacccgcagtccggaaagaaaatatgttatgttcagtttcctcagaggtttgatgggattgatagacacgatcgatactcaaatcgcaatgtggttttcttcgatatcaacatgaaaggtttagatggcatacaaggaccgatatatgtggggaccgggtgtgtcttcagaaggcaagcactttatggatttgatgcaccaaagaagaagcaaccaccaggcagaacctgcaactgttggccaaaatggtgctgtttgtgttgcggtatgagaaagaagaagacaggtaaggtcaaagataatcagagaaagaagcctaaagagacttcaaagcagatacatgcccttgagcacatagaagaaggccttcaagtgacaaatgctgagaataactctgagactgcccaactgaagctggagaagaaatttggtcaatcaccggttttagtagcttctactcttctgctaaatggtggagtgcctagcaatgtgaacccagcgtctttattgagggaatccattcaggttattagctgtggctacgaagagaaaaccgaatggggaaaagagattgggtggatttatggctcggtcactgaggatatcttaacgggtttcaagatgcattgccatggatggagatctgtatattgtatgccaaagcgagcggctttcaaaggttctgctcccattaacttgtcggatcgtcttcatcaagttctacgttgggcacttggctctgtcgagattttcttgagtaggcattgccctatttggtacggttatggtggtggtttaaaatggttggaaagattctcttacattaactctgttgtctatccttggacatcccttcctttgcttgtctactgctcacttcccgccatttgtctactcaccggaaaattcatcgtccctgagataagtaactacgcgggtatactcttcctgctaatgtttatgtccattgcggtaacgggtatactagaaatgcaatggggcaaaataggaatcgatgattggtggagaaacgagcagttttgggtcattggaggagtctcttcgcatctatttgctctgtttcaaggtttactcaaagttcttgcaggagtcagcacgaacttcacagtcacatctaaagcagcagatgatggagaattctcagagctttacattttcaaatggacatctttgttgattcctccgactactctgctgatcattaacatcgttggagtcattgtcggagtttcggatgcgataaataacgggtatgactcttggggaccgctttttgggagattgttctttgcgctttgggtgattgttcatttgtatccgttcctcaaagggttacttgggaaacaagatagagtaccaaccattatattggtttggtcgattcttcttgcttccatcttgactctcttgtgggtcagagtcaatccgtttgtgtccaaagatggaccggtcttggagatctgtggtcttgactgtttaaagtga

SEQ ID NO: 70320 - protein, 1088 aa, Arabidopsis thaliana
  peptide (1)..(1088): Ceres Seq. ID no. 2703834
MNTGGRLIAGSHNRNEFVLINADDTARIRSAEELSGQTCKICRDEIELTDNGEPFIACNECAFPTCRPCYEYERREGNQACPQCGTRYKRIKGSPRVEGDEEDDDIDDLEHEFYGMDPEHVTEAALYYMRLNTGRGTDEVSHLYSASPGSEVPLLTYCDEDSDMYSDRHALIVPPSTGLGNRVHHVPFTDSFASIHTRPMVPQKDLTVYGYGSVAWKDRMEVWKKQQIEKLQVVKNERVNDGDGDGFIVDELDDPGLPMMDEGRQPLSRKLPIRSSRINPYRMLIFCRLAILGLFFHYRILHPVNDAFGLWLTSVICEIWFAVSWILDQFPKWYPIERETYLDRLSLRYEKEGKPSELAPVDVFVSTVDPLKEPPLITANTVLSILAVDYPVEKVACYVSDDGAAMLTFEALSYTAEFARKWVPFCKKFSIEPRAPEWYFSQKMDYLKHKVDPAFVMERRAMKRDYEEFKVKINALVSVSQKVPEDGWTMQDGTPWPGNNVRDHPGMIQVFLGHSGVCDMDGNELPRLVYVSREKRPGFDHHKKAGAMNSLIRVSAVLSNAPYLLNVDCDHYINNSKAIREAMCFMMDPQSGKKICYVQFPQRFDGIDRHDRYSNRNVVFFDINMKGLDGIQGPIYVGTGCVFRRQALYGFDAPKKKQPPGRTCNCWPKWCCLCCGMRKKKTGKVKDNQRKKPKETSKQIHALEHIEEGLQVTNAENNSETAQLKLEKKFGQSPVLVASTLLLNGGVPSNVNPASLLRESIQVISCGYEEKTEWGKEIGWIYGSVTEDILTGFKMHCHGWRSVYCMPKRAAFKGSAPINLSDRLHQVLRWALGSVEIFLSRHCPIWYGYGGGLKWLERFSYINSVVYPWTSLPLLVYCSLPAICLLTGKFIVPEISNYAGILFLLMFMSIAVTGILEMQWGKIGIDDWWRNEQFWVIGGVSSHLFALFQGLLKVLAGVSTNFTVTSKAADDGEFSELYIFKWTSLLIPPTTLLIINIVGVIVGVSDAINNGYDSWGPLFGRLFFALWVIVHLYPFLKGLLGKQDRVPTIILVWSILLASILTLLWVRVNPFVSKDGPVLEICGLDCLK

SEQ ID NO: 70321 - protein, 973 aa, Arabidopsis thaliana
  peptide (1)..(973): Ceres Seq. ID no. 2703835
MDPEHVTEAALYYMRLNTGRGTDEVSHLYSASPGSEVPLLTYCDEDSDMYSDRHALIVPPSTGLGNRVHHVPFTDSFASIHTRPMVPQKDLTVYGYGSVAWKDRMEVWKKQQIEKLQVVKNERVNDGDGDGFIVDELDDPGLPMMDEGRQPLSRKLPIRSSRINPYRMLIFCRLAILGLFFHYRILHPVNDAFGLWLTSVICEIWFAVSWILDQFPKWYPIERETYLDRLSLRYEKEGKPSELAPVDVFVSTVDPLKEPPLITANTVLSILAVDYPVEKVACYVSDDGAAMLTFEALSYTAEFARKWVPFCKKFSIEPRAPEWYFSQKMDYLKHKVDPAFVMERRAMKRDYEEFKVKINALVSVSQKVPEDGWTMQDGTPWPGNNVRDHPGMIQVFLGHSGVCDMDGNELPRLVYVSREKRPGFDHHKKAGAMNSLIRVSAVLSNAPYLLNVDCDHYINNSKAIREAMCFMMDPQSGKKICYVQFPQRFDGIDRHDRYSNRNVVFFDINMKGLDGIQGPIYVGTGCVFRRQALYGFDAPKKKQPPGRTCNCWPKWCCLCCGMRKKKTGKVKDNQRKKPKETSKQIHALEHIEEGLQVTNAENNSETAQLKLEKKFGQSPVLVASTLLLNGGVPSNVNPASLLRESIQVISCGYEEKTEWGKEIGWIYGSVTEDILTGFKMHCHGWRSVYCMPKRAAFKGSAPINLSDRLHQVLRWALGSVEIFLSRHCPIWYGYGGGLKWLERFSYINSVVYPWTSLPLLVYCSLPAICLLTGKFIVPEISNYAGILFLLMFMSIAVTGILEMQWGKIGIDDWWRNEQFWVIGGVSSHLFALFQGLLKVLAGVSTNFTVTSKAADDGEFSELYIFKWTSLLIPPTTLLIINIVGVIVGVSDAINNGYDSWGPLFGRLFFALWVIVHLYPFLKGLLGKQDRVPTIILVWSILLASILTLLWVRVNPFVSKDGPVLEICGLDCLK

SEQ ID NO: 70322 - protein, 960 aa, Arabidopsis thaliana
  peptide (1)..(960): Ceres Seq. ID no. 2703836
MRLNTGRGTDEVSHLYSASPGSEVPLLTYCDEDSDMYSDRHALIVPPSTGLGNRVHHVPFTDSFASIHTRPMVPQKDLTVYGYGSVAWKDRMEVWKKQQIEKLQVVKNERVNDGDGDGFIVDELDDPGLPMMDEGRQPLSRKLPIRSSRINPYRMLIFCRLAILGLFFHYRILHPVNDAFGLWLTSVICEIWFAVSWILDQFPKWYPIERETYLDRLSLRYEKEGKPSELAPVDVFVSTVDPLKEPPLITANTVLSILAVDYPVEKVACYVSDDGAAMLTFEALSYTAEFARKWVPFCKKFSIEPRAPEWYFSQKMDYLKHKVDPAFVMERRAMKRDYEEFKVKINALVSVSQKVPEDGWTMQDGTPWPGNNVRDHPGMIQVFLGHSGVCDMDGNELPRLVYVSREKRPGFDHHKKAGAMNSLIRVSAVLSNAPYLLNVDCDHYINNSKAIREAMCFMMDPQSGKKICYVQFPQRFDGIDRHDRYSNRNVVFFDINMKGLDGIQGPIYVGTGCVFRRQALYGFDAPKKKQPPGRTCNCWPKWCCLCCGMRKKKTGKVKDNQRKKPKETSKQIHALEHIEEGLQVTNAENNSETAQLKLEKKFGQSPVLVASTLLLNGGVPSNVNPASLLRESIQVISCGYEEKTEWGKEIGWIYGSVTEDILTGFKMHCHGWRSVYCMPKRAAFKGSAPINLSDRLHQVLRWALGSVEIFLSRHCPIWYGYGGGLKWLERFSYINSVVYPWTSLPLLVYCSLPAICLLTGKFIVPEISNYAGILFLLMFMSIAVTGILEMQWGKIGIDDWWRNEQFWVIGGVSSHLFALFQGLLKVLAGVSTNFTVTSKAADDGEFSELYIFKWTSLLIPPTTLLIINIVGVIVGVSDAINNGYDSWGPLFGRLFFALWVIVHLYPFLKGLLGKQDRVPTIILVWSILLASILTLLWVRVNPFVSKDGPVLEICGLDCLK

SEQ ID NO: 70323 - DNA, 1248 bp, Arabidopsis thaliana
  misc_feature (1)..(1248): Ceres Seq. ID no. 2703868
  misc_feature (1)..(1248): Ortholog of  Ceres SEQ ID NO 14310547 as cited in SEQ ID NO 55132
  misc_feature (1)..(1248): Ortholog of  Ceres SEQ ID NO 13596261 as cited in SEQ ID NO 67817
  misc_feature (1)..(1248): Ortholog of  Ceres SEQ ID NO 13662360 as cited in SEQ ID NO 68830
atgtctcctgcgatcaaagcaccgctcttaccaaaccaagagccttcatcatcatcatcggagaaccatggatcattcgccggagctgtgtttaacatctcgacaagcatcgtcggagctggaattatggcgattccggcggctttcaaagtcctagctgggtttttaatgaaatccagtctcgccggagaatcaacaacttacgccggcgtgatgaaggaatcgttcggaaaatctggtgccgttgctgttacggttgttacaatggttgtgacttttgggtctatgattattttctcgattatcattggtgatgttatttcgggtaatgagaaagatggaatcatacatttaggtcttcttcaagaatggtttggttctcattggtggaatacgagattctttgaaagattggcatttagttctgcaatttcgtttctgcttgcgttactctttgttgtcataagctcggtgttagcgattattgctctcgtgcaagggaagacaaagcctccgagactcttccctgaactcaatgatggtggattatcgtttttcagtctcttcactgcttcccctgtcattgtaacagccttcacctttcatttcaatggtaagaaaccaagaaccaagaactttatggttattgcagtccatccagtagcattcgaactcaaagatccattaaatgtgctttcagcaacaaggatctctgtgattctgtgtgctacgatctactcagctactggtctcttttgttaccttctgtttggggattccactatgacagatgttctaatgaactttgatcaaagcaccagttcttcggttggttcattactaaatgatattgttagactcagctacgcgattcacctcatgctcgtgtttcctctgctcaacttctcgcttagagccaacctcgacgaactcttgttccctatgaagctttctttagtggaagacaacaaaagattcttcgcactcacttttccattactgatatcttgtttcttgggtgcaattgccataccagacatttggtacttctttcagttcttgggatcaacttctacagtctctatagcattcatctttccagctgcaattgtcctacggaatgtaaatggtttctcgactttaagagagaagattgtagcttcagtaatgcttgttcttgctgttgccacaagtatcatcgctatttcgacaaatatatacactttcacagcaacagaagaaacatga

SEQ ID NO: 70324 - protein, 415 aa, Arabidopsis thaliana
  peptide (1)..(415): Ceres Seq. ID no. 2703869
MSPAIKAPLLPNQEPSSSSSENHGSFAGAVFNISTSIVGAGIMAIPAAFKVLAGFLMKSSLAGESTTYAGVMKESFGKSGAVAVTVVTMVVTFGSMIIFSIIIGDVISGNEKDGIIHLGLLQEWFGSHWWNTRFFERLAFSSAISFLLALLFVVISSVLAIIALVQGKTKPPRLFPELNDGGLSFFSLFTASPVIVTAFTFHFNGKKPRTKNFMVIAVHPVAFELKDPLNVLSATRISVILCATIYSATGLFCYLLFGDSTMTDVLMNFDQSTSSSVGSLLNDIVRLSYAIHLMLVFPLLNFSLRANLDELLFPMKLSLVEDNKRFFALTFPLLISCFLGAIAIPDIWYFFQFLGSTSTVSIAFIFPAAIVLRNVNGFSTLREKIVASVMLVLAVATSIIAISTNIYTFTATEET

SEQ ID NO: 70325 - protein, 373 aa, Arabidopsis thaliana
  peptide (1)..(373): Ceres Seq. ID no. 2703870
MAIPAAFKVLAGFLMKSSLAGESTTYAGVMKESFGKSGAVAVTVVTMVVTFGSMIIFSIIIGDVISGNEKDGIIHLGLLQEWFGSHWWNTRFFERLAFSSAISFLLALLFVVISSVLAIIALVQGKTKPPRLFPELNDGGLSFFSLFTASPVIVTAFTFHFNGKKPRTKNFMVIAVHPVAFELKDPLNVLSATRISVILCATIYSATGLFCYLLFGDSTMTDVLMNFDQSTSSSVGSLLNDIVRLSYAIHLMLVFPLLNFSLRANLDELLFPMKLSLVEDNKRFFALTFPLLISCFLGAIAIPDIWYFFQFLGSTSTVSIAFIFPAAIVLRNVNGFSTLREKIVASVMLVLAVATSIIAISTNIYTFTATEET

SEQ ID NO: 70326 - protein, 359 aa, Arabidopsis thaliana
  peptide (1)..(359): Ceres Seq. ID no. 2703871
MKSSLAGESTTYAGVMKESFGKSGAVAVTVVTMVVTFGSMIIFSIIIGDVISGNEKDGIIHLGLLQEWFGSHWWNTRFFERLAFSSAISFLLALLFVVISSVLAIIALVQGKTKPPRLFPELNDGGLSFFSLFTASPVIVTAFTFHFNGKKPRTKNFMVIAVHPVAFELKDPLNVLSATRISVILCATIYSATGLFCYLLFGDSTMTDVLMNFDQSTSSSVGSLLNDIVRLSYAIHLMLVFPLLNFSLRANLDELLFPMKLSLVEDNKRFFALTFPLLISCFLGAIAIPDIWYFFQFLGSTSTVSIAFIFPAAIVLRNVNGFSTLREKIVASVMLVLAVATSIIAISTNIYTFTATEET

SEQ ID NO: 70327 - DNA, 558 bp, Arabidopsis thaliana
  misc_feature (1)..(558): Ceres Seq. ID no. 2703920
  misc_feature (1)..(558): Ortholog of  Ceres SEQ ID NO 12563124 as cited in SEQ ID NO 57104
atgcgtccaagagagtgttttggtcacagttctaatcatatttctgaatgcatgttaagcaccgaatcaacaaccgtcgtcgtcatcatcttcctcaaatctttggacgtggcttatgcagacaacgagtatcgatgcttcgtcggaggtttagcttgggccaccgatgaacagtctatagagaggtgtttcaacgagtttggtgaagttttcgactccaagatcatcattgatcgtgagaccgggaggtctaaggggtttagatttgtgacttttaaagatgaggattccatgaggactgcgatcgatagaatgaatggtcaagaacttgatggtcgtaacattactgctcaggctcgtggtagtggtactcgcggtggtatggttggtggttacggaagtggtggttacagaggtagacgtgatcaaggtggttacaaccgtggcggtggaggtggatacggtggtggttatggaggtgatcgtcgtgaaggtggttatggagacggaggttacggtggtcaggggcgatctgaaggaggaagctggagaaattga

SEQ ID NO: 70328 - protein, 185 aa, Arabidopsis thaliana
  peptide (1)..(185): Ceres Seq. ID no. 2703921
MRPRECFGHSSNHISECMLSTESTTVVVIIFLKSLDVAYADNEYRCFVGGLAWATDEQSIERCFNEFGEVFDSKIIIDRETGRSKGFRFVTFKDEDSMRTAIDRMNGQELDGRNITAQARGSGTRGGMVGGYGSGGYRGRRDQGGYNRGGGGGYGGGYGGDRREGGYGDGGYGGQGRSEGGSWRN

SEQ ID NO: 70329 - protein, 168 aa, Arabidopsis thaliana
  peptide (1)..(168): Ceres Seq. ID no. 2703922
MLSTESTTVVVIIFLKSLDVAYADNEYRCFVGGLAWATDEQSIERCFNEFGEVFDSKIIIDRETGRSKGFRFVTFKDEDSMRTAIDRMNGQELDGRNITAQARGSGTRGGMVGGYGSGGYRGRRDQGGYNRGGGGGYGGGYGGDRREGGYGDGGYGGQGRSEGGSWRN

SEQ ID NO: 70330 - DNA, 2778 bp, Arabidopsis thaliana
  misc_feature (1)..(2778): Ceres Seq. ID no. 2703953
  misc_feature (1)..(2778): Ortholog of  Ceres SEQ ID NO 13518411 as cited in SEQ ID NO 55230
  misc_feature (1)..(2778): Ortholog of  Ceres SEQ ID NO 13598724 as cited in SEQ ID NO 61069
atggttgatcaaagaagaagcgcattgggttttgtcttgttgttgttgtgtttggtactgttcttcgactgtgttgttgttggtcaaacacagagtcgattcagtgagaaactcattttgcttaatctcaggtcttctttagggttaagaggaacagattggccaattaaaggtgacccttgtgttgattggagaggtatacaatgtgagaatggtagtatcattgggatcaatatctctgggtttaggagaacaagaattggtaagctaaacccacaattctctgttgatcctcttcgtaatctaactcgtttgtcgtattttaacgcgtccgggttagcgttaccggggactatacctgagtggtttggtgttagtttgttggcattggaagtattggatcttagttcgtgttctgttaacggtgttgttccttttactcttggtaatctcactagtttaagaactttgaatctgtctcagaacagtcttactagtttagttcctagcagtttaggacagttgttgaatctatcacagcttgatctctctaggaactcattcactggtgttcttcctcaatcttttagctctctgaagaatctgttgactcttgatgtttcttccaattaccttactggacctatccctcctggtttaggagcgttatcaaagcttatccatctgaacttttcaagcaatagtttctcgtctccgattccttcagagcttggtgatcttgtcaatctggttgactttgatctcagcatcaattcattgtctggttcagttcctcaggagctaagaaagttaagtaagttgcagctaatggcgattggcgataaccttttgagtggtactttaccagtagatttgtttagtgctgagagccaactgcaaactttagttttgagggaaaatggtttctctggtagtctacctgatgtgtgctggtcgttgccaaaattgcggattcttgacattgctaagaacaacttcacaggactgctgccatattctagttatgattcagaccagatagctgaaatggttgatatctcttcgaacacattctatggagagctcacaccgattcttagacggttcaggataatggacctctctggtaattatttcgaaggtaagcttcctgattatgtgaccggggaaaatgtgtctgttacaagcaattgccttcgaaatgagaggagacagaagccgtcagcaatatgtgcagcattctataagtctagaggattagattttgatgatttcggacgtcctaatttgacacaaccgacatcgaaaaatgcttcttcagggataagccgcagaacagtaattatattggcagcagtgggtggtggagttgcttttattcttctttttgttatcttgccaattattctggttctatgcatgcgccatagacgcagagcggcacaaagaggaaataacgacaggccaaaacctgccggggaagcttcacaacaaccacctaaaggagcacaaacctttgatttgtcacgtcttggaaatgcattttcttatgagcagcttcttcaggcaacagaggaattcaatgatgctaatctgataaaacgtggtcattcggggaatctgtttcgtggtttcttggaaaatggtatacccgttgttataaaaaagatcgatgtgcgggaaggtaaaagtgaaggctatatatcagaactggagttgtttagtaaggctggacaccagaggctggttccctttttgggacactgcttggagaatgagagccaaaagttcttggtatacaagtttatgagacacggtgatttggctagctctttgttcaggaaatccgaaaacgaaggtgatggattgaagtctttggattggataacaaggttgaaaattgctcttggtgcagctgagggactctcttatttgcatcatgagtgttcaccgcctctagttcatagggatgtacaagcaagtagcatacttcttgatgataaatttgaggtacgtcttggaagcctaagcgaggcatatgctcaaggtgatgcttatcaaagcagaatttctcgtttacttcgattaccgcagatataccatctccgattaaccgatagacatctgattggtttattcttttcaggtgtaacaaatgcaatatgttcgtatgatgtctactgctttggcaaagtgttacttgagctagtaacggggaagctcgggattagctcgccagacaacgcacttgcaaaagagtacatggaagaagctttgccatacatcagcacaaacgagaaagaactagtaaccaagatcttagacccgtcattaatggtggacgaagaccttctagaagaagtatgggcaatggctatcattgcaaagtcatgcctaaacccaaaaccaacaagaagaccattaatgagacacattgtgaacgcacttgagaacccactgaaagtagtaagagaagataccaactcgggttcaggctcttcccggttaagaacaaactcgtcgagagggtcttggaacgctgctatatttgggagctggaggcagagtgcgtcggatgtaacagctgttcaagcgggagcaacaacaagcggtggtggtggtggtggtggtggtaatggtttgagaaactcggggtcgcaaggaagtagcggaaggaacaataacaacaacgggaattcatcgtcgtcgagaagacggcaatctagtgagattgtaccggaacctgctgcttatggagtagtagaggataatttatga

SEQ ID NO: 70331 - protein, 925 aa, Arabidopsis thaliana
  peptide (1)..(925): Ceres Seq. ID no. 2703954
MVDQRRSALGFVLLLLCLVLFFDCVVVGQTQSRFSEKLILLNLRSSLGLRGTDWPIKGDPCVDWRGIQCENGSIIGINISGFRRTRIGKLNPQFSVDPLRNLTRLSYFNASGLALPGTIPEWFGVSLLALEVLDLSSCSVNGVVPFTLGNLTSLRTLNLSQNSLTSLVPSSLGQLLNLSQLDLSRNSFTGVLPQSFSSLKNLLTLDVSSNYLTGPIPPGLGALSKLIHLNFSSNSFSSPIPSELGDLVNLVDFDLSINSLSGSVPQELRKLSKLQLMAIGDNLLSGTLPVDLFSAESQLQTLVLRENGFSGSLPDVCWSLPKLRILDIAKNNFTGLLPYSSYDSDQIAEMVDISSNTFYGELTPILRRFRIMDLSGNYFEGKLPDYVTGENVSVTSNCLRNERRQKPSAICAAFYKSRGLDFDDFGRPNLTQPTSKNASSGISRRTVIILAAVGGGVAFILLFVILPIILVLCMRHRRRAAQRGNNDRPKPAGEASQQPPKGAQTFDLSRLGNAFSYEQLLQATEEFNDANLIKRGHSGNLFRGFLENGIPVVIKKIDVREGKSEGYISELELFSKAGHQRLVPFLGHCLENESQKFLVYKFMRHGDLASSLFRKSENEGDGLKSLDWITRLKIALGAAEGLSYLHHECSPPLVHRDVQASSILLDDKFEVRLGSLSEAYAQGDAYQSRISRLLRLPQIYHLRLTDRHLIGLFFSGVTNAICSYDVYCFGKVLLELVTGKLGISSPDNALAKEYMEEALPYISTNEKELVTKILDPSLMVDEDLLEEVWAMAIIAKSCLNPKPTRRPLMRHIVNALENPLKVVREDTNSGSGSSRLRTNSSRGSWNAAIFGSWRQSASDVTAVQAGATTSGGGGGGGGNGLRNSGSQGSSGRNNNNNGNSSSSRRRQSSEIVPEPAAYGVVEDNL

SEQ ID NO: 70332 - protein, 649 aa, Arabidopsis thaliana
  peptide (1)..(649): Ceres Seq. ID no. 2703955
MAIGDNLLSGTLPVDLFSAESQLQTLVLRENGFSGSLPDVCWSLPKLRILDIAKNNFTGLLPYSSYDSDQIAEMVDISSNTFYGELTPILRRFRIMDLSGNYFEGKLPDYVTGENVSVTSNCLRNERRQKPSAICAAFYKSRGLDFDDFGRPNLTQPTSKNASSGISRRTVIILAAVGGGVAFILLFVILPIILVLCMRHRRRAAQRGNNDRPKPAGEASQQPPKGAQTFDLSRLGNAFSYEQLLQATEEFNDANLIKRGHSGNLFRGFLENGIPVVIKKIDVREGKSEGYISELELFSKAGHQRLVPFLGHCLENESQKFLVYKFMRHGDLASSLFRKSENEGDGLKSLDWITRLKIALGAAEGLSYLHHECSPPLVHRDVQASSILLDDKFEVRLGSLSEAYAQGDAYQSRISRLLRLPQIYHLRLTDRHLIGLFFSGVTNAICSYDVYCFGKVLLELVTGKLGISSPDNALAKEYMEEALPYISTNEKELVTKILDPSLMVDEDLLEEVWAMAIIAKSCLNPKPTRRPLMRHIVNALENPLKVVREDTNSGSGSSRLRTNSSRGSWNAAIFGSWRQSASDVTAVQAGATTSGGGGGGGGNGLRNSGSQGSSGRNNNNNGNSSSSRRRQSSEIVPEPAAYGVVEDNL

SEQ ID NO: 70333 - protein, 576 aa, Arabidopsis thaliana
  peptide (1)..(576): Ceres Seq. ID no. 2703956
MVDISSNTFYGELTPILRRFRIMDLSGNYFEGKLPDYVTGENVSVTSNCLRNERRQKPSAICAAFYKSRGLDFDDFGRPNLTQPTSKNASSGISRRTVIILAAVGGGVAFILLFVILPIILVLCMRHRRRAAQRGNNDRPKPAGEASQQPPKGAQTFDLSRLGNAFSYEQLLQATEEFNDANLIKRGHSGNLFRGFLENGIPVVIKKIDVREGKSEGYISELELFSKAGHQRLVPFLGHCLENESQKFLVYKFMRHGDLASSLFRKSENEGDGLKSLDWITRLKIALGAAEGLSYLHHECSPPLVHRDVQASSILLDDKFEVRLGSLSEAYAQGDAYQSRISRLLRLPQIYHLRLTDRHLIGLFFSGVTNAICSYDVYCFGKVLLELVTGKLGISSPDNALAKEYMEEALPYISTNEKELVTKILDPSLMVDEDLLEEVWAMAIIAKSCLNPKPTRRPLMRHIVNALENPLKVVREDTNSGSGSSRLRTNSSRGSWNAAIFGSWRQSASDVTAVQAGATTSGGGGGGGGNGLRNSGSQGSSGRNNNNNGNSSSSRRRQSSEIVPEPAAYGVVEDNL

SEQ ID NO: 70334 - DNA, 810 bp, Arabidopsis thaliana
  misc_feature (1)..(810): Ceres Seq. ID no. 2704409
  misc_feature (1)..(810): Ortholog of  Ceres SEQ ID NO 15179824 as cited in SEQ ID NO 66250
  misc_feature (1)..(810): Ortholog of  Ceres SEQ ID NO 13657872 as cited in SEQ ID NO 66357
atgttcgaagaaatacttcataaatctgaaggaaaacaaatagttatgtttcttgattatgatggtactctctctcccattgttgatgatcctgatcgagctttcatgtccaagaagatgcgaaatactgtgaggaaacttgcaaagtgttttccaacagccatagttagtgggagatgcagagagaaggtttctagttttgtgaaattaactgagttatactacgctggaagtcatggcatggacatcaaaggaccagagcaaggatctaaatacaagaaagaaaatcagtctcttctttgtcaacccgcaactgaattcctcccggtgataaacgaggtttataaaaaactagtcgagaacactcaatcgattccaggagcgaaagttgagaacaacaaattttgtgcgtctgttcactttcgatgcgtagaagaaaataaatggagtgacttggcccatcaagttcgatcagtcttgaagaattaccccaagctcatgcttacccaaggaagaaaagtattggagattcgtccaatcattaagtgggataaaggcaaagcactcgagtttttgttagaatcactaggatatgataattgtaccgatgtttttcctatatatattggagatgatcgtaccgacgaagacgcctttaagatactgagagacaaaaaacaaggtcttggaattcttgtgtccaaatacgcaaaggagactaatgcttcttattctttgcaagagccagatgaggttatggtttttttagaacgtttggtggaatggaaacagtcaaggtgtggggcatga

SEQ ID NO: 70335 - protein, 269 aa, Arabidopsis thaliana
  peptide (1)..(269): Ceres Seq. ID no. 2704410
MFEEILHKSEGKQIVMFLDYDGTLSPIVDDPDRAFMSKKMRNTVRKLAKCFPTAIVSGRCREKVSSFVKLTELYYAGSHGMDIKGPEQGSKYKKENQSLLCQPATEFLPVINEVYKKLVENTQSIPGAKVENNKFCASVHFRCVEENKWSDLAHQVRSVLKNYPKLMLTQGRKVLEIRPIIKWDKGKALEFLLESLGYDNCTDVFPIYIGDDRTDEDAFKILRDKKQGLGILVSKYAKETNASYSLQEPDEVMVFLERLVEWKQSRCGA

SEQ ID NO: 70336 - protein, 254 aa, Arabidopsis thaliana
  peptide (1)..(254): Ceres Seq. ID no. 2704411
MFLDYDGTLSPIVDDPDRAFMSKKMRNTVRKLAKCFPTAIVSGRCREKVSSFVKLTELYYAGSHGMDIKGPEQGSKYKKENQSLLCQPATEFLPVINEVYKKLVENTQSIPGAKVENNKFCASVHFRCVEENKWSDLAHQVRSVLKNYPKLMLTQGRKVLEIRPIIKWDKGKALEFLLESLGYDNCTDVFPIYIGDDRTDEDAFKILRDKKQGLGILVSKYAKETNASYSLQEPDEVMVFLERLVEWKQSRCGA

SEQ ID NO: 70337 - protein, 234 aa, Arabidopsis thaliana
  peptide (1)..(234): Ceres Seq. ID no. 2704412
MSKKMRNTVRKLAKCFPTAIVSGRCREKVSSFVKLTELYYAGSHGMDIKGPEQGSKYKKENQSLLCQPATEFLPVINEVYKKLVENTQSIPGAKVENNKFCASVHFRCVEENKWSDLAHQVRSVLKNYPKLMLTQGRKVLEIRPIIKWDKGKALEFLLESLGYDNCTDVFPIYIGDDRTDEDAFKILRDKKQGLGILVSKYAKETNASYSLQEPDEVMVFLERLVEWKQSRCGA

SEQ ID NO: 70338 - DNA, 1818 bp, Arabidopsis thaliana
  misc_feature (1)..(1818): Ceres Seq. ID no. 2704510
  misc_feature (1)..(1818): Ortholog of  Ceres SEQ ID NO 13598865 as cited in SEQ ID NO 0
atgatgctactatttaaaccgtctttaactctaggaagaaggataaaaccacgtccatgccaaagcttctctgagtctcttctaatggatagtattgaagcagctgaaactctcacacgtaaatggatttctccagatctctctagttcatcttcttgctccctctcctcgattttctccaccgataatcgcgtagaaggacgaagattcgtcgaagttatcaacagcttacaatacgcaattcaaggagtggtcttggtgaatcctgaatcaccaaagcttactagagcgcataatcttgtgacaatcgctatgaaacagttggaaaaagagttttaccggattttaaaatcgaatcgacggaatcttgatccggaatccgtatccgttcgatcttccccatctttcaatgcaagaaacaaagtgtctatttattcccaagttccaaaatctgaagaagctgatgttatgacggatttgaaaatgatcgctgattgtatgatatcttcgggttacgaaaacgaatgtatcaagatttacaagaagattagaggatcaatcatggttgaagcgttgagtaacttagggtttgagaatctaagttttggcaagattcaaaaattggattgggatagtatggagaagaacatcaagaaatggttagaagctacgaaagtcctaatcacaaacttgttcgagggagaaagaatccttagcgatcacgttttctcgccttcagtctctgtcgcggagtcttgtttcacggagatcacgttagatagtgctttaacactctttatcttccccgtgagtgtagctcgatgtaagaaaaccgtcgagaaaatcttccttactctcgacatttaccaaacgatatcgcagcttatgcctcaaatcgaagagatttttagttatgattcgactactgcggttcgactacaagctgctgattctctcaacaatctcggtgaagagattaattcaatggtggctgaattcgaagcttcgattacgaaagaatcttcgaaaaccccaatccgtggaggcagtgttcatcagctcacaaggtacgtaatgaatttcatcgtttttctcgcggattaccacgaatgtctcgctggagttctcaccgaatcgacgttgccattaccggaagattactttgggaacaatgacgaagacaacaacgaaggagaaaccggatcttcttctactgtaaccacaagaattgcatggctaatcctcgtcttgctctgtaaaatcgacacgaaatctcgaatgtacaacgacatggctctttcatacctcttcctagccaacaatctgcattacgtgatctccaaggtacgtacatcgaatatgagagtcgtgcttggcgacgaatgggtaacgaatcacgaagggaaagttactcagtacctcgaaaaatacgagaaaattgcttggggagaagtgataacgtcacttttcgattccaacgaagaaatgctcgaagaacacgtggcgaaagagcggttgatgcggttcaacgaagggtttgaggaagcgtttcagaaacagagtgagtgggtcgtaccggattcgaaacttagagacgatttaaaagattccgtgacggagaagttaacaactgttacgacgacgttttatgaaaagtaccacgttgaaaattgggaggaagtcaaatttgcccctgaagatttggataattacctctctgaccttttcttaggtacgggacgatcttgtattatcgttccttcgcttaaacaatcggactcgggacgttcacttaaagattcagaatcaggacgttga

SEQ ID NO: 70339 - protein, 605 aa, Arabidopsis thaliana
  peptide (1)..(605): Ceres Seq. ID no. 2704511
MMLLFKPSLTLGRRIKPRPCQSFSESLLMDSIEAAETLTRKWISPDLSSSSSCSLSSIFSTDNRVEGRRFVEVINSLQYAIQGVVLVNPESPKLTRAHNLVTIAMKQLEKEFYRILKSNRRNLDPESVSVRSSPSFNARNKVSIYSQVPKSEEADVMTDLKMIADCMISSGYENECIKIYKKIRGSIMVEALSNLGFENLSFGKIQKLDWDSMEKNIKKWLEATKVLITNLFEGERILSDHVFSPSVSVAESCFTEITLDSALTLFIFPVSVARCKKTVEKIFLTLDIYQTISQLMPQIEEIFSYDSTTAVRLQAADSLNNLGEEINSMVAEFEASITKESSKTPIRGGSVHQLTRYVMNFIVFLADYHECLAGVLTESTLPLPEDYFGNNDEDNNEGETGSSSTVTTRIAWLILVLLCKIDTKSRMYNDMALSYLFLANNLHYVISKVRTSNMRVVLGDEWVTNHEGKVTQYLEKYEKIAWGEVITSLFDSNEEMLEEHVAKERLMRFNEGFEEAFQKQSEWVVPDSKLRDDLKDSVTEKLTTVTTTFYEKYHVENWEEVKFAPEDLDNYLSDLFLGTGRSCIIVPSLKQSDSGRSLKDSESGR

SEQ ID NO: 70340 - protein, 604 aa, Arabidopsis thaliana
  peptide (1)..(604): Ceres Seq. ID no. 2704512
MLLFKPSLTLGRRIKPRPCQSFSESLLMDSIEAAETLTRKWISPDLSSSSSCSLSSIFSTDNRVEGRRFVEVINSLQYAIQGVVLVNPESPKLTRAHNLVTIAMKQLEKEFYRILKSNRRNLDPESVSVRSSPSFNARNKVSIYSQVPKSEEADVMTDLKMIADCMISSGYENECIKIYKKIRGSIMVEALSNLGFENLSFGKIQKLDWDSMEKNIKKWLEATKVLITNLFEGERILSDHVFSPSVSVAESCFTEITLDSALTLFIFPVSVARCKKTVEKIFLTLDIYQTISQLMPQIEEIFSYDSTTAVRLQAADSLNNLGEEINSMVAEFEASITKESSKTPIRGGSVHQLTRYVMNFIVFLADYHECLAGVLTESTLPLPEDYFGNNDEDNNEGETGSSSTVTTRIAWLILVLLCKIDTKSRMYNDMALSYLFLANNLHYVISKVRTSNMRVVLGDEWVTNHEGKVTQYLEKYEKIAWGEVITSLFDSNEEMLEEHVAKERLMRFNEGFEEAFQKQSEWVVPDSKLRDDLKDSVTEKLTTVTTTFYEKYHVENWEEVKFAPEDLDNYLSDLFLGTGRSCIIVPSLKQSDSGRSLKDSESGR

SEQ ID NO: 70341 - protein, 577 aa, Arabidopsis thaliana
  peptide (1)..(577): Ceres Seq. ID no. 2704513
MDSIEAAETLTRKWISPDLSSSSSCSLSSIFSTDNRVEGRRFVEVINSLQYAIQGVVLVNPESPKLTRAHNLVTIAMKQLEKEFYRILKSNRRNLDPESVSVRSSPSFNARNKVSIYSQVPKSEEADVMTDLKMIADCMISSGYENECIKIYKKIRGSIMVEALSNLGFENLSFGKIQKLDWDSMEKNIKKWLEATKVLITNLFEGERILSDHVFSPSVSVAESCFTEITLDSALTLFIFPVSVARCKKTVEKIFLTLDIYQTISQLMPQIEEIFSYDSTTAVRLQAADSLNNLGEEINSMVAEFEASITKESSKTPIRGGSVHQLTRYVMNFIVFLADYHECLAGVLTESTLPLPEDYFGNNDEDNNEGETGSSSTVTTRIAWLILVLLCKIDTKSRMYNDMALSYLFLANNLHYVISKVRTSNMRVVLGDEWVTNHEGKVTQYLEKYEKIAWGEVITSLFDSNEEMLEEHVAKERLMRFNEGFEEAFQKQSEWVVPDSKLRDDLKDSVTEKLTTVTTTFYEKYHVENWEEVKFAPEDLDNYLSDLFLGTGRSCIIVPSLKQSDSGRSLKDSESGR

SEQ ID NO: 70342 - DNA, 3231 bp, Arabidopsis thaliana
  misc_feature (1)..(3231): Ceres Seq. ID no. 2704537
  misc_feature (1)..(3231): Ortholog of  Ceres SEQ ID NO 13600310 as cited in SEQ ID NO 5086
  misc_feature (1)..(3231): Ortholog of  Ceres SEQ ID NO 15172491 as cited in SEQ ID NO 58719
atggattctaacaattcgaaaaaaggaagttcggtgaaatctccatgtcaaactccacgttcgactgagaagtcaaatcgagattttcgagttgactcaaactcaaactcgaatccagttagcaagaatgagaaagaaaagggtgtgaatatacaagttattgttcgttgcagaccgtttaattcagaggagacgaggttacaaacaccggctgttcttacctgtaatgaccggaaaaaggaagtagcggtagcacaaaatatagctgggaagcagattgataaaacgtttttgtttgacaaggtttttggcccaacatcccagcaaaaggatctgtatcatcaagcagtttctccaattgtctttgaggttcttgatgggtataactgcaccatctttgcatatgggcaaacaggaactggtaagacatacacaatggaaggaggagcaagaaaaaagaatggtgaaattccgagtgatgcaggtgttatccctagagcagttaaacagatatttgatatactggaagcacaaagtgctgctgaatacagtttgaaagtttcatttcttgagctctacaatgaagaactgacagaccttttagctccggaagaaacaaaattcgctgatgataaatcaaagaaacctctggctcttatggaagatggcaaaggtggtgtttttgtccgcggattggaagaagagattgtgtctactgctgatgaaatttacaaagtcttggagaaaggttcagctaagagacgcacagcagagactcttctcaacaaacaaagtagtagatctcattcaatattttcggttacaatccatattaaggaatgtactccagaaggggaagagattgtcaaaagtggaaagctgaatctagttgatcttgctggttcagagaatatttcacggtctggtgctcgagagggtagagccagggaagctggtgagatcaacaaaagtttgctcacacttggacgtgtcataaatgctttggttgaacactctggtcacattccatatagagaaagcaagttgacaagattattgagagactctttgggaggaaaaacaaaaacatgtgtaattgctacagtttcaccctctgttcattgcctggaagaaacactcagcacacttgattatgcacaccgtgcgaaacacatcaaaaataaaccagaggttaaccagaagatgatgaaatcagctattatgaaagatttgtattctgaaattgaacgtctgaagcaagaggtctatgctgctagggagaaaaatggaatttatattccaaaggagaggtatactcaagaagaagctgagaaaaaggctatggctgataagatagagcaaatggaagtagagggtgaagcaaaagacaagcaaattattgatcttcaagagctgtacaactcggaacagcttgtaactgctggattgagagaaaagcttgacaagacagagaaaaagctctatgaaactgaacaagcattgctagatctcgaagagaaacatagacaagcagttgcaacaattaaagaaaaggagtacttaatatccaatctccttaaatctgagaaaacacttgttgaccgggctgtcgagcttcaggcagaattggcaaatgcagcatccgatgtttcaaacttgttcgccaaaattggtaggaaggacaagattgaagacagtaatagatcgctcatccaagatttccagtcacaattgctacgacaacttgaactcttgaacaacagtgttgccggttcagtaagccagcaggaaaaacaattgcaagacatggaaaatgttatggtttctttcgtatctgcaaagacaaaggctactgaaacactacgaggaagtttagcacagttgaaggaaaaatacaatacaggcatcaagtctttagatgatatagctgggaatctggataaagatagccaatcaactttgaatgacttgaactcggaagtgacaaaacattcttgtgcactggaagatatgtttaaaggatttacatcagaagcttacacgctacttgaagggcttcaaggtagcctccacaatcaagaggagaagctctctgcattcacacagcaacagagagacttgcattcccgatcaatggattctgctaagtccgtctccacggtgatgttagacttcttcaagactctagacacacatgccaataagctaacaaagctagcagaagatgctcaaaatgtcaacgagcagaaattatctgcattcactaagaaattcgaggaatccattgcaaatgaagaaaaacaaatgctcgaaaaagtggcggaattactagcgagttcaaacgctaggaagaaagaattggttcagatagctgtgcaagatatacgccaaggatcatcttcccaaacaggtgcattgcagcaagaaatgtctgcaatgcaagattctgcttcttccattaaagtccagtggaactctcacatagtccaagcggaatctcatcatctcgataacatatccgcagttgaggttgcaaaggaagatatgcagaaaatgcatctaaaatgtctggagaattcaaaaaccggaacccaacaatggaagactgctcaagaatcattagttgatctcgaaaaaaggaatgttgcaaccgcggattctattattcggggagccatagaaaacaatgagaaactacgaacgcagttttcttccgcggtctcaaccactttaagcgatgtcgattcttcaaacagagaaatcatctcatccattgacaactcgttacaactcgataaagacgcatcaacggatgttaattccacaatcgttccttgctctgaaaacttgaaagaactaagaacacaccatgatgacaacgttgtcgaaatcaaacagaacacaggaaaatgtcttggtcacgagtacaaggtaacacgatttgatccttttttatataatcatcatatatacatgattgaattggacaaaattgttaaccgtaaattaaattccctgaaaacatcaacacaggtggatgaagcaacaagctcaacaccgaggaagagagagtacaacattccaactgttggatcaatagaagaacttaaaacgccgtcgtttgaggaattgttgaaggcgtttcacgattgtaagtcaccaaaacaaatgcagaacggagaagctaaacacgttagtaacggtcgacctccgttaacggccattaactga

SEQ ID NO: 70343 - protein, 1076 aa, Arabidopsis thaliana
  peptide (1)..(1076): Ceres Seq. ID no. 2704538
MDSNNSKKGSSVKSPCQTPRSTEKSNRDFRVDSNSNSNPVSKNEKEKGVNIQVIVRCRPFNSEETRLQTPAVLTCNDRKKEVAVAQNIAGKQIDKTFLFDKVFGPTSQQKDLYHQAVSPIVFEVLDGYNCTIFAYGQTGTGKTYTMEGGARKKNGEIPSDAGVIPRAVKQIFDILEAQSAAEYSLKVSFLELYNEELTDLLAPEETKFADDKSKKPLALMEDGKGGVFVRGLEEEIVSTADEIYKVLEKGSAKRRTAETLLNKQSSRSHSIFSVTIHIKECTPEGEEIVKSGKLNLVDLAGSENISRSGAREGRAREAGEINKSLLTLGRVINALVEHSGHIPYRESKLTRLLRDSLGGKTKTCVIATVSPSVHCLEETLSTLDYAHRAKHIKNKPEVNQKMMKSAIMKDLYSEIERLKQEVYAAREKNGIYIPKERYTQEEAEKKAMADKIEQMEVEGEAKDKQIIDLQELYNSEQLVTAGLREKLDKTEKKLYETEQALLDLEEKHRQAVATIKEKEYLISNLLKSEKTLVDRAVELQAELANAASDVSNLFAKIGRKDKIEDSNRSLIQDFQSQLLRQLELLNNSVAGSVSQQEKQLQDMENVMVSFVSAKTKATETLRGSLAQLKEKYNTGIKSLDDIAGNLDKDSQSTLNDLNSEVTKHSCALEDMFKGFTSEAYTLLEGLQGSLHNQEEKLSAFTQQQRDLHSRSMDSAKSVSTVMLDFFKTLDTHANKLTKLAEDAQNVNEQKLSAFTKKFEESIANEEKQMLEKVAELLASSNARKKELVQIAVQDIRQGSSSQTGALQQEMSAMQDSASSIKVQWNSHIVQAESHHLDNISAVEVAKEDMQKMHLKCLENSKTGTQQWKTAQESLVDLEKRNVATADSIIRGAIENNEKLRTQFSSAVSTTLSDVDSSNREIISSIDNSLQLDKDASTDVNSTIVPCSENLKELRTHHDDNVVEIKQNTGKCLGHEYKVTRFDPFLYNHHIYMIELDKIVNRKLNSLKTSTQVDEATSSTPRKREYNIPTVGSIEELKTPSFEELLKAFHDCKSPKQMQNGEAKHVSNGRPPLTAIN

SEQ ID NO: 70344 - protein, 931 aa, Arabidopsis thaliana
  peptide (1)..(931): Ceres Seq. ID no. 2704539
MEGGARKKNGEIPSDAGVIPRAVKQIFDILEAQSAAEYSLKVSFLELYNEELTDLLAPEETKFADDKSKKPLALMEDGKGGVFVRGLEEEIVSTADEIYKVLEKGSAKRRTAETLLNKQSSRSHSIFSVTIHIKECTPEGEEIVKSGKLNLVDLAGSENISRSGAREGRAREAGEINKSLLTLGRVINALVEHSGHIPYRESKLTRLLRDSLGGKTKTCVIATVSPSVHCLEETLSTLDYAHRAKHIKNKPEVNQKMMKSAIMKDLYSEIERLKQEVYAAREKNGIYIPKERYTQEEAEKKAMADKIEQMEVEGEAKDKQIIDLQELYNSEQLVTAGLREKLDKTEKKLYETEQALLDLEEKHRQAVATIKEKEYLISNLLKSEKTLVDRAVELQAELANAASDVSNLFAKIGRKDKIEDSNRSLIQDFQSQLLRQLELLNNSVAGSVSQQEKQLQDMENVMVSFVSAKTKATETLRGSLAQLKEKYNTGIKSLDDIAGNLDKDSQSTLNDLNSEVTKHSCALEDMFKGFTSEAYTLLEGLQGSLHNQEEKLSAFTQQQRDLHSRSMDSAKSVSTVMLDFFKTLDTHANKLTKLAEDAQNVNEQKLSAFTKKFEESIANEEKQMLEKVAELLASSNARKKELVQIAVQDIRQGSSSQTGALQQEMSAMQDSASSIKVQWNSHIVQAESHHLDNISAVEVAKEDMQKMHLKCLENSKTGTQQWKTAQESLVDLEKRNVATADSIIRGAIENNEKLRTQFSSAVSTTLSDVDSSNREIISSIDNSLQLDKDASTDVNSTIVPCSENLKELRTHHDDNVVEIKQNTGKCLGHEYKVTRFDPFLYNHHIYMIELDKIVNRKLNSLKTSTQVDEATSSTPRKREYNIPTVGSIEELKTPSFEELLKAFHDCKSPKQMQNGEAKHVSNGRPPLTAIN

SEQ ID NO: 70345 - protein, 857 aa, Arabidopsis thaliana
  peptide (1)..(857): Ceres Seq. ID no. 2704540
MEDGKGGVFVRGLEEEIVSTADEIYKVLEKGSAKRRTAETLLNKQSSRSHSIFSVTIHIKECTPEGEEIVKSGKLNLVDLAGSENISRSGAREGRAREAGEINKSLLTLGRVINALVEHSGHIPYRESKLTRLLRDSLGGKTKTCVIATVSPSVHCLEETLSTLDYAHRAKHIKNKPEVNQKMMKSAIMKDLYSEIERLKQEVYAAREKNGIYIPKERYTQEEAEKKAMADKIEQMEVEGEAKDKQIIDLQELYNSEQLVTAGLREKLDKTEKKLYETEQALLDLEEKHRQAVATIKEKEYLISNLLKSEKTLVDRAVELQAELANAASDVSNLFAKIGRKDKIEDSNRSLIQDFQSQLLRQLELLNNSVAGSVSQQEKQLQDMENVMVSFVSAKTKATETLRGSLAQLKEKYNTGIKSLDDIAGNLDKDSQSTLNDLNSEVTKHSCALEDMFKGFTSEAYTLLEGLQGSLHNQEEKLSAFTQQQRDLHSRSMDSAKSVSTVMLDFFKTLDTHANKLTKLAEDAQNVNEQKLSAFTKKFEESIANEEKQMLEKVAELLASSNARKKELVQIAVQDIRQGSSSQTGALQQEMSAMQDSASSIKVQWNSHIVQAESHHLDNISAVEVAKEDMQKMHLKCLENSKTGTQQWKTAQESLVDLEKRNVATADSIIRGAIENNEKLRTQFSSAVSTTLSDVDSSNREIISSIDNSLQLDKDASTDVNSTIVPCSENLKELRTHHDDNVVEIKQNTGKCLGHEYKVTRFDPFLYNHHIYMIELDKIVNRKLNSLKTSTQVDEATSSTPRKREYNIPTVGSIEELKTPSFEELLKAFHDCKSPKQMQNGEAKHVSNGRPPLTAIN

SEQ ID NO: 70346 - DNA, 531 bp, Arabidopsis thaliana
  misc_feature (1)..(531): Ceres Seq. ID no. 2704770
  misc_feature (1)..(531): Ortholog of  Ceres SEQ ID NO 13663631 as cited in SEQ ID NO 67073
atgaatgaaatgtcgttctttggttatagtttcatcgtagtagcattattcttcgatttaactcaagcctatcgtcacactcccgctcaaccgccaaaagcaaacgcaaacggtgatgtcaaaccgcaagaaacgctcgtggttcacaacaaggcccgagccatggtcggagtcggaccaatggtgtggaacgaaactcttgcgacctatgcacagagctacgcacatgaacgagccagagactgtgccatgaagcattccttgggaccattcggcgagaatctagccgcgggttggggaacgatgagcggtccggtagcaactgagtattggatgacggagaaggaaaattacgattatgatagtaacacgtgtggtggtgatggtgtgtgtggacactacactcagatcgtgtggcgtgactcggttcgacttggttgtgcctccgtgagatgtaagaatgatgagtatatttgggtgatttgtagctatgatcctccggggaattacatcggtcaacgtccatattag

SEQ ID NO: 70347 - protein, 176 aa, Arabidopsis thaliana
  peptide (1)..(176): Ceres Seq. ID no. 2704771
MNEMSFFGYSFIVVALFFDLTQAYRHTPAQPPKANANGDVKPQETLVVHNKARAMVGVGPMVWNETLATYAQSYAHERARDCAMKHSLGPFGENLAAGWGTMSGPVATEYWMTEKENYDYDSNTCGGDGVCGHYTQIVWRDSVRLGCASVRCKNDEYIWVICSYDPPGNYIGQRPY

SEQ ID NO: 70348 - protein, 173 aa, Arabidopsis thaliana
  peptide (1)..(173): Ceres Seq. ID no. 2704772
MSFFGYSFIVVALFFDLTQAYRHTPAQPPKANANGDVKPQETLVVHNKARAMVGVGPMVWNETLATYAQSYAHERARDCAMKHSLGPFGENLAAGWGTMSGPVATEYWMTEKENYDYDSNTCGGDGVCGHYTQIVWRDSVRLGCASVRCKNDEYIWVICSYDPPGNYIGQRPY

SEQ ID NO: 70349 - protein, 122 aa, Arabidopsis thaliana
  peptide (1)..(122): Ceres Seq. ID no. 2704773
MVGVGPMVWNETLATYAQSYAHERARDCAMKHSLGPFGENLAAGWGTMSGPVATEYWMTEKENYDYDSNTCGGDGVCGHYTQIVWRDSVRLGCASVRCKNDEYIWVICSYDPPGNYIGQRPY

SEQ ID NO: 70350 - DNA, 1008 bp, Arabidopsis thaliana
  misc_feature (1)..(1008): Ceres Seq. ID no. 2704836
  misc_feature (1)..(1008): Ortholog of  Ceres SEQ ID NO 13582619 as cited in SEQ ID NO 56520
  misc_feature (1)..(1008): Ortholog of  Ceres SEQ ID NO 13660872 as cited in SEQ ID NO 60830
atgtctaaagaagctgagatgtcgatcgcggtgtcggctttgttccctggttttagattctctcctactgatgttgaacttatctcgtactatcttcgtcgtaaaatcgatggtgatgagaactctgttgctgtgattgctgaggtcgagatttacaagttcgagccgtgggacttgccagaggaatcgaaactgaaatcggagaacgagtggttttacttctgcgcgagggggaggaagtacccgcacgggtcacaaagccggcgagccacacagctaggatattggaaagcgaccggtaaagagcggagtgttaaatccgggaaccaagttgttggaaccaagagaacgcttgtatttcatatcggtcgggctcctcgtggcgagagaacggagtggattatgcatgaatactgcatccatggagccccacaggatgcattagtggtgtgccggttaagaaaaaatgctgattttcgggctagttcgacccaaaaaatggaggatggtgttgtgcaagacgatggctacgttggccaaagaggtggtttggagaaggaggacaaatcctactatgaatctgagcatcagataccaaatggtgacatcgcagaatcatcaaatgttgttgaggatcaggccgataccgatgatgattgttacgccgagattctgaacgatgatataataaagctcgacgaagaagcgttgaaagctagccaagcgtttcgaccaactaatccaactcatcaagaaacaatatcaagcgagtcatcgagtaagaggtcaaaatgtggtataaaaaaagaatcaacggaaacaatgaattgttacgctttgttcaggatcaagaacgttgccggaaccgactccagctggagattcccgaacccgttcaaaatcaagaaagatgatagccagagattgatgaagaatgttctggccactactgttttcttggctatcttattttctttcttttggactgtattaatagctaggaactaa

SEQ ID NO: 70351 - protein, 335 aa, Arabidopsis thaliana
  peptide (1)..(335): Ceres Seq. ID no. 2704837
MSKEAEMSIAVSALFPGFRFSPTDVELISYYLRRKIDGDENSVAVIAEVEIYKFEPWDLPEESKLKSENEWFYFCARGRKYPHGSQSRRATQLGYWKATGKERSVKSGNQVVGTKRTLVFHIGRAPRGERTEWIMHEYCIHGAPQDALVVCRLRKNADFRASSTQKMEDGVVQDDGYVGQRGGLEKEDKSYYESEHQIPNGDIAESSNVVEDQADTDDDCYAEILNDDIIKLDEEALKASQAFRPTNPTHQETISSESSSKRSKCGIKKESTETMNCYALFRIKNVAGTDSSWRFPNPFKIKKDDSQRLMKNVLATTVFLAILFSFFWTVLIARN

SEQ ID NO: 70352 - protein, 329 aa, Arabidopsis thaliana
  peptide (1)..(329): Ceres Seq. ID no. 2704838
MSIAVSALFPGFRFSPTDVELISYYLRRKIDGDENSVAVIAEVEIYKFEPWDLPEESKLKSENEWFYFCARGRKYPHGSQSRRATQLGYWKATGKERSVKSGNQVVGTKRTLVFHIGRAPRGERTEWIMHEYCIHGAPQDALVVCRLRKNADFRASSTQKMEDGVVQDDGYVGQRGGLEKEDKSYYESEHQIPNGDIAESSNVVEDQADTDDDCYAEILNDDIIKLDEEALKASQAFRPTNPTHQETISSESSSKRSKCGIKKESTETMNCYALFRIKNVAGTDSSWRFPNPFKIKKDDSQRLMKNVLATTVFLAILFSFFWTVLIARN

SEQ ID NO: 70353 - protein, 201 aa, Arabidopsis thaliana
  peptide (1)..(201): Ceres Seq. ID no. 2704839
MHEYCIHGAPQDALVVCRLRKNADFRASSTQKMEDGVVQDDGYVGQRGGLEKEDKSYYESEHQIPNGDIAESSNVVEDQADTDDDCYAEILNDDIIKLDEEALKASQAFRPTNPTHQETISSESSSKRSKCGIKKESTETMNCYALFRIKNVAGTDSSWRFPNPFKIKKDDSQRLMKNVLATTVFLAILFSFFWTVLIARN

SEQ ID NO: 70354 - DNA, 1431 bp, Arabidopsis thaliana
  misc_feature (1)..(1431): Ceres Seq. ID no. 2705490
  misc_feature (1)..(1431): Ortholog of  Ceres SEQ ID NO 13660287 as cited in SEQ ID NO 67316
atggaagagccatttcttccgcaagatgagcagatagtcccctgtaaagccacatggaaaagtggtcagctcaatgtcgagctgaagaaagtgagccgcttggctgttcctatggccaccgtgaccattgcacagtacttattgccagtcatctcagtcatggtcgctggccacaacggcgagctccagctctccggtgtcgctcttgctacctccttcacaaatgtctccggtttcagcattatgtttgggttagtgggttcactagaaactctttctggccaagcttatggagccaaacaatacgaaaaaatgggaacctatacatactccgcaatttcctctaacatccctatatgtgtcctcatatcaattctctggatatacatggaaaaactcttgatctctctcggacaagaccctgacatctccagagtcgctggctcctacgccttgcggctcataccgactttgtttgcccatgcgattgtcttaccactgacccggtttctgctagcacaagggttggttcttccactgctttactttgccctgaccacccttttgttccacattgcggtttgctggactttggtttccgcacttggtttgggaagcaatggagctgccttggctattagtgtgtctttctggtttttcgctatgacactctcatgttatgtgagattctccagctcttgcgagaagactcgccgatttgtatcccaagatttcttgtcttctgtcaagcagttcttccgttatggagtcccatcagcggcaatgctttgcctagaatggtggctatttgagctacttatactctgttcaggtcttctccaaaacccaaaactcgagacctctgttctttcaatttgtcttacaacagcaactttgcactatgtgattccagttggagtcgcggccgctgtgagcacacgcgtgtcaaacaaattgggagctgggattcctcaagttgctagggtttcagtattggcagggctttgtctctggcttgtagagtcatctttctttagcatacttctcttcgccttcaggaacatcataggctacgcattcagcaacagtaaagaagttgtggactatgtggctgatctatctcctttgctctgtctctcctttgttcttgacggatttaccgcagttcttaatggggttgccaggggatgtggttggcaacacattggagctttgaacaacgtagtagcttattatctcgtaggagctccggttggaatatatttagctttcagttgtgagttgaacggaaaaggactatggtgtggtgtagtggttggatccgctgtgcaagccattatactggctattgtcacggcttccatgaattggaaggaacaggttagagcttattacaatacattcttttttttttttaattctctaaagtaa

SEQ ID NO: 70355 - protein, 476 aa, Arabidopsis thaliana
  peptide (1)..(476): Ceres Seq. ID no. 2705491
MEEPFLPQDEQIVPCKATWKSGQLNVELKKVSRLAVPMATVTIAQYLLPVISVMVAGHNGELQLSGVALATSFTNVSGFSIMFGLVGSLETLSGQAYGAKQYEKMGTYTYSAISSNIPICVLISILWIYMEKLLISLGQDPDISRVAGSYALRLIPTLFAHAIVLPLTRFLLAQGLVLPLLYFALTTLLFHIAVCWTLVSALGLGSNGAALAISVSFWFFAMTLSCYVRFSSSCEKTRRFVSQDFLSSVKQFFRYGVPSAAMLCLEWWLFELLILCSGLLQNPKLETSVLSICLTTATLHYVIPVGVAAAVSTRVSNKLGAGIPQVARVSVLAGLCLWLVESSFFSILLFAFRNIIGYAFSNSKEVVDYVADLSPLLCLSFVLDGFTAVLNGVARGCGWQHIGALNNVVAYYLVGAPVGIYLAFSCELNGKGLWCGVVVGSAVQAIILAIVTASMNWKEQVRAYYNTFFFFFNSLK

SEQ ID NO: 70356 - protein, 439 aa, Arabidopsis thaliana
  peptide (1)..(439): Ceres Seq. ID no. 2705492
MATVTIAQYLLPVISVMVAGHNGELQLSGVALATSFTNVSGFSIMFGLVGSLETLSGQAYGAKQYEKMGTYTYSAISSNIPICVLISILWIYMEKLLISLGQDPDISRVAGSYALRLIPTLFAHAIVLPLTRFLLAQGLVLPLLYFALTTLLFHIAVCWTLVSALGLGSNGAALAISVSFWFFAMTLSCYVRFSSSCEKTRRFVSQDFLSSVKQFFRYGVPSAAMLCLEWWLFELLILCSGLLQNPKLETSVLSICLTTATLHYVIPVGVAAAVSTRVSNKLGAGIPQVARVSVLAGLCLWLVESSFFSILLFAFRNIIGYAFSNSKEVVDYVADLSPLLCLSFVLDGFTAVLNGVARGCGWQHIGALNNVVAYYLVGAPVGIYLAFSCELNGKGLWCGVVVGSAVQAIILAIVTASMNWKEQVRAYYNTFFFFFNSLK

SEQ ID NO: 70357 - protein, 423 aa, Arabidopsis thaliana
  peptide (1)..(423): Ceres Seq. ID no. 2705493
MVAGHNGELQLSGVALATSFTNVSGFSIMFGLVGSLETLSGQAYGAKQYEKMGTYTYSAISSNIPICVLISILWIYMEKLLISLGQDPDISRVAGSYALRLIPTLFAHAIVLPLTRFLLAQGLVLPLLYFALTTLLFHIAVCWTLVSALGLGSNGAALAISVSFWFFAMTLSCYVRFSSSCEKTRRFVSQDFLSSVKQFFRYGVPSAAMLCLEWWLFELLILCSGLLQNPKLETSVLSICLTTATLHYVIPVGVAAAVSTRVSNKLGAGIPQVARVSVLAGLCLWLVESSFFSILLFAFRNIIGYAFSNSKEVVDYVADLSPLLCLSFVLDGFTAVLNGVARGCGWQHIGALNNVVAYYLVGAPVGIYLAFSCELNGKGLWCGVVVGSAVQAIILAIVTASMNWKEQVRAYYNTFFFFFNSLK

SEQ ID NO: 70358 - DNA, 1410 bp, Arabidopsis thaliana
  misc_feature (1)..(1410): Ceres Seq. ID no. 2705494
  misc_feature (1)..(1410): Ortholog of  Ceres SEQ ID NO 13660287 as cited in SEQ ID NO 67316
atggaagagccatttcttccgagagacgagcagttagtctcttgtaaatccacatggcaaagtggtcaggtcaccgtcgagctgaagaaagtgagccgcttggccgctcctatggccaccgtaaccatagctcagtacttattgcctgtcatctcagtcatggtcgccggccacatcggcgagttggagctcgccggtgtcgcgcttgccacgtctttcacaaacgtttccggcttcagcataatgtttgggttagttggtgcattggaaactctttgtggccaagcctatggagcagaacaatacgaaaaaatcggaacctatacatactctgcaatggcttccaacataccaatttgtttcatcatatcaattctatggatttacatcgaaaagctcttgatcactctcgggcaagagcctgacatctctagagtcgctggctcctactcattgtggctcgtaccggctttgtttgcccatgctattttcttaccactgactcggtttctgctagcacaagggttggttatttccctgctatactctgccatgaccacccttttgttccatattgcggtttgctggactttggttttcgcgcttggtcttggaagcaatggagctgctattgctattagtttgtctttctggttttacgctgtgatactctcatgtcatgtgagatttttcagctcttgcgagaagactcgcggatttgtatcaaatgattttatgtctagtatcaagcagtacttccagtacggagtcccatccgctggattgatttgcttagaatggtggctgtttgagctactcatactctgctcaggtcttctcccaaacccaaaactcgagacatctgttctttcgatttgtcttacaataggaactttacactatgtgattccatctggagtcgcggcggctgtgagcacacgagtgtcaaacaaattgggagctggaaatcctcaagttgctagggtttccgtattggcagggctttgtctctggcttgtagagtcagctttctttagcacacttctcttcacctgccgaaacatcataggctacacattcagcaacagcaaagaagttgttgactatgttgctgacatatctcctttgctctgtctctccttcatcctcgacggattaacggcagttctaaatggagtggctaggggatgtgggtggcaacacattggagctttgatcaacgtggtggcttattatcttgtaggagctcctgttggagtttacttagctttcagtcgtgagtggaatggaaaaggactctggtgcggtgttatggttggatccgcggtgcaagccactttactggctatcgtcacagcctccatgaactggaaggaacaggttagagtttgttacattctagttttttga

SEQ ID NO: 70359 - protein, 469 aa, Arabidopsis thaliana
  peptide (1)..(469): Ceres Seq. ID no. 2705495
MEEPFLPRDEQLVSCKSTWQSGQVTVELKKVSRLAAPMATVTIAQYLLPVISVMVAGHIGELELAGVALATSFTNVSGFSIMFGLVGALETLCGQAYGAEQYEKIGTYTYSAMASNIPICFIISILWIYIEKLLITLGQEPDISRVAGSYSLWLVPALFAHAIFLPLTRFLLAQGLVISLLYSAMTTLLFHIAVCWTLVFALGLGSNGAAIAISLSFWFYAVILSCHVRFFSSCEKTRGFVSNDFMSSIKQYFQYGVPSAGLICLEWWLFELLILCSGLLPNPKLETSVLSICLTIGTLHYVIPSGVAAAVSTRVSNKLGAGNPQVARVSVLAGLCLWLVESAFFSTLLFTCRNIIGYTFSNSKEVVDYVADISPLLCLSFILDGLTAVLNGVARGCGWQHIGALINVVAYYLVGAPVGVYLAFSREWNGKGLWCGVMVGSAVQATLLAIVTASMNWKEQVRVCYILVF

SEQ ID NO: 70360 - protein, 432 aa, Arabidopsis thaliana
  peptide (1)..(432): Ceres Seq. ID no. 2705496
MATVTIAQYLLPVISVMVAGHIGELELAGVALATSFTNVSGFSIMFGLVGALETLCGQAYGAEQYEKIGTYTYSAMASNIPICFIISILWIYIEKLLITLGQEPDISRVAGSYSLWLVPALFAHAIFLPLTRFLLAQGLVISLLYSAMTTLLFHIAVCWTLVFALGLGSNGAAIAISLSFWFYAVILSCHVRFFSSCEKTRGFVSNDFMSSIKQYFQYGVPSAGLICLEWWLFELLILCSGLLPNPKLETSVLSICLTIGTLHYVIPSGVAAAVSTRVSNKLGAGNPQVARVSVLAGLCLWLVESAFFSTLLFTCRNIIGYTFSNSKEVVDYVADISPLLCLSFILDGLTAVLNGVARGCGWQHIGALINVVAYYLVGAPVGVYLAFSREWNGKGLWCGVMVGSAVQATLLAIVTASMNWKEQVRVCYILVF

SEQ ID NO: 70361 - protein, 416 aa, Arabidopsis thaliana
  peptide (1)..(416): Ceres Seq. ID no. 2705497
MVAGHIGELELAGVALATSFTNVSGFSIMFGLVGALETLCGQAYGAEQYEKIGTYTYSAMASNIPICFIISILWIYIEKLLITLGQEPDISRVAGSYSLWLVPALFAHAIFLPLTRFLLAQGLVISLLYSAMTTLLFHIAVCWTLVFALGLGSNGAAIAISLSFWFYAVILSCHVRFFSSCEKTRGFVSNDFMSSIKQYFQYGVPSAGLICLEWWLFELLILCSGLLPNPKLETSVLSICLTIGTLHYVIPSGVAAAVSTRVSNKLGAGNPQVARVSVLAGLCLWLVESAFFSTLLFTCRNIIGYTFSNSKEVVDYVADISPLLCLSFILDGLTAVLNGVARGCGWQHIGALINVVAYYLVGAPVGVYLAFSREWNGKGLWCGVMVGSAVQATLLAIVTASMNWKEQVRVCYILVF

SEQ ID NO: 70362 - DNA, 837 bp, Arabidopsis thaliana
  misc_feature (1)..(837): Ceres Seq. ID no. 2705531
  misc_feature (1)..(837): Ortholog of  Ceres SEQ ID NO 14308243 as cited in SEQ ID NO 60493
atgtgtgaaaacgaggaatatcgggaacggtttccagacaaacatttcgatctcgagacggttctccaagcaaaagtcagacccatctgtgttgtccctgaaagaacattcatcgggtttttccatcgagagaaatcaaaggaagaagaagaaaaagaagatgttagtctagattttcttaaaggtgtaatgtcctttgacagtatctgggaagagatcatgaaacaagaaccagaagagtcggcaagcgaacatgtgatctacattgtaagctggaatgatcattacttcgtactccttgtgaaccacgatgcttattacatcatagacacgcttggagagagggtctatgagggttgcaaccaagcgtatgtcttgaaatttgaccaagatgcagagatcaaaagattaccatccgtcatcaaagacaacaaagccgacatgggaagccagaaacaaggtggtaagaacaagtatgagcaacccgaaagatcaaaagaatcagaagaacaaggagaagaagtagtagtgtgtagaggtaaagagtcatgtagagagtatataaagagctttctcgcagcgattccaatacagcaagtgaaagctgatatgaaggaaggactggtttcatcttttcatcaccgtcttcaaatagagctttactacaccaaacaccttcatcaccgccaacccaatatgtttgaatcctctacaaccaaagtaactgtgtcagaagctactgtgtctatgacagtggcttggttattggcgagccaattcagcaatagtggtgggtttggttgcgaaatggctgagcttttggggataaaagtttaa

SEQ ID NO: 70363 - protein, 278 aa, Arabidopsis thaliana
  peptide (1)..(278): Ceres Seq. ID no. 2705532
MCENEEYRERFPDKHFDLETVLQAKVRPICVVPERTFIGFFHREKSKEEEEKEDVSLDFLKGVMSFDSIWEEIMKQEPEESASEHVIYIVSWNDHYFVLLVNHDAYYIIDTLGERVYEGCNQAYVLKFDQDAEIKRLPSVIKDNKADMGSQKQGGKNKYEQPERSKESEEQGEEVVVCRGKESCREYIKSFLAAIPIQQVKADMKEGLVSSFHHRLQIELYYTKHLHHRQPNMFESSTTKVTVSEATVSMTVAWLLASQFSNSGGFGCEMAELLGIKV

SEQ ID NO: 70364 - protein, 215 aa, Arabidopsis thaliana
  peptide (1)..(215): Ceres Seq. ID no. 2705533
MSFDSIWEEIMKQEPEESASEHVIYIVSWNDHYFVLLVNHDAYYIIDTLGERVYEGCNQAYVLKFDQDAEIKRLPSVIKDNKADMGSQKQGGKNKYEQPERSKESEEQGEEVVVCRGKESCREYIKSFLAAIPIQQVKADMKEGLVSSFHHRLQIELYYTKHLHHRQPNMFESSTTKVTVSEATVSMTVAWLLASQFSNSGGFGCEMAELLGIKV

SEQ ID NO: 70365 - protein, 205 aa, Arabidopsis thaliana
  peptide (1)..(205): Ceres Seq. ID no. 2705534
MKQEPEESASEHVIYIVSWNDHYFVLLVNHDAYYIIDTLGERVYEGCNQAYVLKFDQDAEIKRLPSVIKDNKADMGSQKQGGKNKYEQPERSKESEEQGEEVVVCRGKESCREYIKSFLAAIPIQQVKADMKEGLVSSFHHRLQIELYYTKHLHHRQPNMFESSTTKVTVSEATVSMTVAWLLASQFSNSGGFGCEMAELLGIKV

SEQ ID NO: 70366 - DNA, 1677 bp, Arabidopsis thaliana
  misc_feature (1)..(1677): Ceres Seq. ID no. 2705651
  misc_feature (1)..(1677): Ortholog of  Ceres SEQ ID NO 15175771 as cited in SEQ ID NO 55443
atgtctctcaacgttgatcttgacgtatgtgttttggagagacccaatgtgtgttcttttaaaaagaggagttgctccaagttgagttgttccttgacgaagaagagaagaagtagcaaggtgatgtccgtggagatcttcgaggatgagcatgacgcggaggagttaaaggtggttgatgcattccgccaagtgcttattctcgatgaactacttccggacaaacatgatgattaccatatgatgcttaggtttttgaaggctagaaaatttgatcttgagaaaacaaatcaaatgtggtctgacatgctccgatggaggaaggagtttggtgctgacacagttatggaggattttgaatttaaggaaattgatgaagtgttgaaatactaccctcaaggacaccatggagtcgacaaggaaggaagaccggtgtacattgagaggctaggtcaagtagactctaccaagttgatgcaagtcacaaccatggatagatatgtgaactaccatgtgatggagtttgagaggactttcaatgttaagttcccagcatgctccatcgcggcaaagaagcacattgatcaaagtacaacaattcttgatgtccaaggagtggggctgaaaaacttcaacaaggcagcaagggatttgattacgcgtcttcaaaaggtcgatggtgacaactatccagagaccttgaacaggatgtttatcatcaatgctggctcaggattcaggatgttgtggaacacggttaagtctttccttgacccaaagactacagcaaagatccatgttcttggcaacaagtaccaaagcaagttgcttgaaataattgatgctagtgagctgcctgagttcttgggaggttcttgtacttgtgctgacaatgggggttgcatgcgctcggacaaaggaccatggaacaatccagatattatgaagagagttaataatggtgaccacatatgctcaaagagatctcaagctgataatgctggagagaatattatctctcaggggaataactctgcagttgaggaagctcctgaaactgaccagtcacagccctctccttgtcaaaatgtcgtggttgctcatccagcttggaacataccagaagctcacaaattttccctctcaaaaagggatgtttacgccattcaagaagcttgcaaagctacaaatgaaagtggaaggtctcctattttcactggagtcatggcttttgtaatgggtgtagtcaccatgattagagtgactaaaaacgttccaaggaagctaaccgagtcaactatatactctagcccggtttactgcgacgaaaactcgatgaacaagagctcgatgcatgggaagaaaatggcaacaacaaccatctcaggggaagatttcatggcggtcatgaaacgaatggctgagcttgagcagaaagtcacaaacttgagtgcacagccagcaactatgcctcctgaaaaggaagagatgcttaatgctgccattagccgagccgatttcttggaacaagaacttgctgcaaccaagaaggctcttgatgattctcttacccgacaagaggaccttgtggcatacgttgagagaaagaagaagaagaagaagctggtccgctttcaaatcaatgcctacttaactaatttttgttttggtgtttaa

SEQ ID NO: 70367 - protein, 558 aa, Arabidopsis thaliana
  peptide (1)..(558): Ceres Seq. ID no. 2705652
MSLNVDLDVCVLERPNVCSFKKRSCSKLSCSLTKKRRSSKVMSVEIFEDEHDAEELKVVDAFRQVLILDELLPDKHDDYHMMLRFLKARKFDLEKTNQMWSDMLRWRKEFGADTVMEDFEFKEIDEVLKYYPQGHHGVDKEGRPVYIERLGQVDSTKLMQVTTMDRYVNYHVMEFERTFNVKFPACSIAAKKHIDQSTTILDVQGVGLKNFNKAARDLITRLQKVDGDNYPETLNRMFIINAGSGFRMLWNTVKSFLDPKTTAKIHVLGNKYQSKLLEIIDASELPEFLGGSCTCADNGGCMRSDKGPWNNPDIMKRVNNGDHICSKRSQADNAGENIISQGNNSAVEEAPETDQSQPSPCQNVVVAHPAWNIPEAHKFSLSKRDVYAIQEACKATNESGRSPIFTGVMAFVMGVVTMIRVTKNVPRKLTESTIYSSPVYCDENSMNKSSMHGKKMATTTISGEDFMAVMKRMAELEQKVTNLSAQPATMPPEKEEMLNAAISRADFLEQELAATKKALDDSLTRQEDLVAYVERKKKKKKLVRFQINAYLTNFCFGV

SEQ ID NO: 70368 - protein, 517 aa, Arabidopsis thaliana
  peptide (1)..(517): Ceres Seq. ID no. 2705653
MSVEIFEDEHDAEELKVVDAFRQVLILDELLPDKHDDYHMMLRFLKARKFDLEKTNQMWSDMLRWRKEFGADTVMEDFEFKEIDEVLKYYPQGHHGVDKEGRPVYIERLGQVDSTKLMQVTTMDRYVNYHVMEFERTFNVKFPACSIAAKKHIDQSTTILDVQGVGLKNFNKAARDLITRLQKVDGDNYPETLNRMFIINAGSGFRMLWNTVKSFLDPKTTAKIHVLGNKYQSKLLEIIDASELPEFLGGSCTCADNGGCMRSDKGPWNNPDIMKRVNNGDHICSKRSQADNAGENIISQGNNSAVEEAPETDQSQPSPCQNVVVAHPAWNIPEAHKFSLSKRDVYAIQEACKATNESGRSPIFTGVMAFVMGVVTMIRVTKNVPRKLTESTIYSSPVYCDENSMNKSSMHGKKMATTTISGEDFMAVMKRMAELEQKVTNLSAQPATMPPEKEEMLNAAISRADFLEQELAATKKALDDSLTRQEDLVAYVERKKKKKKLVRFQINAYLTNFCFGV

SEQ ID NO: 70369 - protein, 478 aa, Arabidopsis thaliana
  peptide (1)..(478): Ceres Seq. ID no. 2705654
MMLRFLKARKFDLEKTNQMWSDMLRWRKEFGADTVMEDFEFKEIDEVLKYYPQGHHGVDKEGRPVYIERLGQVDSTKLMQVTTMDRYVNYHVMEFERTFNVKFPACSIAAKKHIDQSTTILDVQGVGLKNFNKAARDLITRLQKVDGDNYPETLNRMFIINAGSGFRMLWNTVKSFLDPKTTAKIHVLGNKYQSKLLEIIDASELPEFLGGSCTCADNGGCMRSDKGPWNNPDIMKRVNNGDHICSKRSQADNAGENIISQGNNSAVEEAPETDQSQPSPCQNVVVAHPAWNIPEAHKFSLSKRDVYAIQEACKATNESGRSPIFTGVMAFVMGVVTMIRVTKNVPRKLTESTIYSSPVYCDENSMNKSSMHGKKMATTTISGEDFMAVMKRMAELEQKVTNLSAQPATMPPEKEEMLNAAISRADFLEQELAATKKALDDSLTRQEDLVAYVERKKKKKKLVRFQINAYLTNFCFGV

SEQ ID NO: 70370 - DNA, 2991 bp, Arabidopsis thaliana
  misc_feature (1)..(2991): Ceres Seq. ID no. 2705655
  misc_feature (1)..(2991): Ortholog of  Ceres SEQ ID NO 12612314 as cited in SEQ ID NO 51420
  misc_feature (1)..(2991): Ortholog of  Ceres SEQ ID NO 14306493 as cited in SEQ ID NO 53170
  misc_feature (1)..(2991): Ortholog of  Ceres SEQ ID NO 14311095 as cited in SEQ ID NO 53197
atgtttccttcatcagatttctctttctcaccgtcgtcgctgttctcagcgtacgcatctttaaccggattcttgatgctctttagatcgatgctccatgatttcgtaccggagaagcttcgatcttacttctccagcttactcgaccggtttttcactccgaaatcaaagtatctcactgtgatcatcgacgagaacttcggattgaaccggaatcaagtcttcgacgcggcggagatgtatctcaggagcaagatcggaccggaaacagagcggttgcgagttggtaagatcccaaaacagaagcatttcacaatctctatcgaaagaggcgaagagatcctcgatactttcgaggagtcggaggtgaaatggagttatgttcaatcggagaacgagaaaggagataaagtgaaacgttactacgagctcacattcgagaagaagcttagagacaaagtcttgaactcttatttaacccacgttgtagccgaatccgaggagatcaagaggaatctgagagtggtgaagctttatagcagagatgtgtatgctagtgatgatgatgatggaatggctggtgggaattggggatgtatcaatctcgagcatccgtctacgttcgatacgttggcgatggatccgaatgcgaagaagaagatcatcgatgatttggagaggtttttgaagaggaaggagttttacaaaagagttggtaaagcttggaaacgaggttacttgttgtatgggccaccaggaactggtaaatctagtttgattgctgcgatggcgaattatcttaagtttgatgtgtttgatcttgagcttagtagtatttatgacaatggtgagttgaagagggttttgttatctacgacgaatcgttcgattttggttattgaggatattgattgtaatgctgaagtgagagatagggaagctgagaatcaagaagatgaacaaattaagggaaaggtgactctatcagggattctgaatttcattgatggtttatggtcgagtttcggagatgagagaatcattgtgttcacgacgaatcacaaagaacggcttgatcctgctctgctacgtcctggaagaatggatgtgcatatcaacatgtcttattgtacaggtttaggatttaggacattggtctctaactaccttggtttagatggcttaaaccatcctctttgcgaggaaatcgaggcgctggtcgattctactgaagttactccagctgagttagctgaagagctgatgcaagacgatgatactgacgttgttcttcgtggagtaataagctttgttgagaagaggaaggttgagagaagcaagactaagaaggaggtttctatttgtaaagcaactgatgatgacgaaaaacagaatggttctttgggttgtgtaaagaagaagaagaaagggggtaaacagaaaggtaaagggaaagctaggtcaaaggaaattccgcaagataattgtggatttcgattaacagagatgtttccttcaatatccaatatctctttatcaccatcgtcgctgtttacagcgtacgcgtccttaaccggattcttgatgctctttagatcactgttcaatgatgaagtaccggagaggctccgatcatacatcaccgacttactcaaccggtttttcactccgaaatcaaagaatttgactatggttatcgacgagatcatcggatttaagaggaaccaagtgttcgacgcggcagaggtgtacctccggaacaaaatcggacccgagacagcccgtttacgagtaggtaaactccctaagcagaagcacttcacaatctatatcgagaaaggagaagagatcttggatactttcgagaatagcgagctgagatggacttatgttgaatcagagaacgaggcaagccaaaaagagaaacgttactacgagctcacgttcgagaagaagcttagagataaagtcatgaactcttatttgagccacgttgtagctgaatctgaggagactaagagggatctgagagcggtgaagctttatagccgagatgtgcgtgcgagcaaagatgatgacggaatggctggtgccggttggggatgtatcaatcttgagcatccatcgacattcgaaacattggcaatggacccgggtgcgaagaagaagataatcgatgatatggagaggtttttgaagagaagagagttttacaaaagagttggtaaagcttggaaacgaggttacttgttgtatgggccaccaggaactggtaaatctagtttgattgctgccatggcgaattatcttaagtttgatgtgtttgatcttgagcttagtagtatttatgaaaatgctcaactaaagagcatcttgttatcaaccacgaaccgttcgattttggttattgaggatatcgattgtagtagtgccgaggtggtagacagggaagctgatgagtatcaagaatacgaagaaggttattatggaagggtgactctatcagggcttttgaatttcgttgatgggttgtggtcaagttttggggatgagagaatcattgtgttcacgacgaatcacaaagaacggcttgaccctgctctgttacgtcctggaagaatggatatgcatatcaacatgtcttactgtacaggtttagggtttaggacattggtctctaattacctcggtttaggtggcttaaaccatcctctttgcgaggaaatcgaggcgctgatcgattccactgaggtgactccggctgagttagctgaagagttgatgcaagaagatgatactgatgttgtccttcgtggagtagttagctttgttgagaatagaaaggtcgagataagcaaaaccaaggagctggaaggttctacttgtagaaaacttgatggtgacgataaacacaatgtttcttctaccaatgatttgaagaagacgaagaagaagaagaaaggtggaaaaggaaaagcgaaaggaaactag

SEQ ID NO: 70371 - protein, 996 aa, Arabidopsis thaliana
  peptide (1)..(996): Ceres Seq. ID no. 2705656
MFPSSDFSFSPSSLFSAYASLTGFLMLFRSMLHDFVPEKLRSYFSSLLDRFFTPKSKYLTVIIDENFGLNRNQVFDAAEMYLRSKIGPETERLRVGKIPKQKHFTISIERGEEILDTFEESEVKWSYVQSENEKGDKVKRYYELTFEKKLRDKVLNSYLTHVVAESEEIKRNLRVVKLYSRDVYASDDDDGMAGGNWGCINLEHPSTFDTLAMDPNAKKKIIDDLERFLKRKEFYKRVGKAWKRGYLLYGPPGTGKSSLIAAMANYLKFDVFDLELSSIYDNGELKRVLLSTTNRSILVIEDIDCNAEVRDREAENQEDEQIKGKVTLSGILNFIDGLWSSFGDERIIVFTTNHKERLDPALLRPGRMDVHINMSYCTGLGFRTLVSNYLGLDGLNHPLCEEIEALVDSTEVTPAELAEELMQDDDTDVVLRGVISFVEKRKVERSKTKKEVSICKATDDDEKQNGSLGCVKKKKKGGKQKGKGKARSKEIPQDNCGFRLTEMFPSISNISLSPSSLFTAYASLTGFLMLFRSLFNDEVPERLRSYITDLLNRFFTPKSKNLTMVIDEIIGFKRNQVFDAAEVYLRNKIGPETARLRVGKLPKQKHFTIYIEKGEEILDTFENSELRWTYVESENEASQKEKRYYELTFEKKLRDKVMNSYLSHVVAESEETKRDLRAVKLYSRDVRASKDDDGMAGAGWGCINLEHPSTFETLAMDPGAKKKIIDDMERFLKRREFYKRVGKAWKRGYLLYGPPGTGKSSLIAAMANYLKFDVFDLELSSIYENAQLKSILLSTTNRSILVIEDIDCSSAEVVDREADEYQEYEEGYYGRVTLSGLLNFVDGLWSSFGDERIIVFTTNHKERLDPALLRPGRMDMHINMSYCTGLGFRTLVSNYLGLGGLNHPLCEEIEALIDSTEVTPAELAEELMQEDDTDVVLRGVVSFVENRKVEISKTKELEGSTCRKLDGDDKHNVSSTNDLKKTKKKKKGGKGKAKGN

SEQ ID NO: 70372 - protein, 971 aa, Arabidopsis thaliana
  peptide (1)..(971): Ceres Seq. ID no. 2705657
MLFRSMLHDFVPEKLRSYFSSLLDRFFTPKSKYLTVIIDENFGLNRNQVFDAAEMYLRSKIGPETERLRVGKIPKQKHFTISIERGEEILDTFEESEVKWSYVQSENEKGDKVKRYYELTFEKKLRDKVLNSYLTHVVAESEEIKRNLRVVKLYSRDVYASDDDDGMAGGNWGCINLEHPSTFDTLAMDPNAKKKIIDDLERFLKRKEFYKRVGKAWKRGYLLYGPPGTGKSSLIAAMANYLKFDVFDLELSSIYDNGELKRVLLSTTNRSILVIEDIDCNAEVRDREAENQEDEQIKGKVTLSGILNFIDGLWSSFGDERIIVFTTNHKERLDPALLRPGRMDVHINMSYCTGLGFRTLVSNYLGLDGLNHPLCEEIEALVDSTEVTPAELAEELMQDDDTDVVLRGVISFVEKRKVERSKTKKEVSICKATDDDEKQNGSLGCVKKKKKGGKQKGKGKARSKEIPQDNCGFRLTEMFPSISNISLSPSSLFTAYASLTGFLMLFRSLFNDEVPERLRSYITDLLNRFFTPKSKNLTMVIDEIIGFKRNQVFDAAEVYLRNKIGPETARLRVGKLPKQKHFTIYIEKGEEILDTFENSELRWTYVESENEASQKEKRYYELTFEKKLRDKVMNSYLSHVVAESEETKRDLRAVKLYSRDVRASKDDDGMAGAGWGCINLEHPSTFETLAMDPGAKKKIIDDMERFLKRREFYKRVGKAWKRGYLLYGPPGTGKSSLIAAMANYLKFDVFDLELSSIYENAQLKSILLSTTNRSILVIEDIDCSSAEVVDREADEYQEYEEGYYGRVTLSGLLNFVDGLWSSFGDERIIVFTTNHKERLDPALLRPGRMDMHINMSYCTGLGFRTLVSNYLGLGGLNHPLCEEIEALIDSTEVTPAELAEELMQEDDTDVVLRGVVSFVENRKVEISKTKELEGSTCRKLDGDDKHNVSSTNDLKKTKKKKKGGKGKAKGN

SEQ ID NO: 70373 - protein, 966 aa, Arabidopsis thaliana
  peptide (1)..(966): Ceres Seq. ID no. 2705658
MLHDFVPEKLRSYFSSLLDRFFTPKSKYLTVIIDENFGLNRNQVFDAAEMYLRSKIGPETERLRVGKIPKQKHFTISIERGEEILDTFEESEVKWSYVQSENEKGDKVKRYYELTFEKKLRDKVLNSYLTHVVAESEEIKRNLRVVKLYSRDVYASDDDDGMAGGNWGCINLEHPSTFDTLAMDPNAKKKIIDDLERFLKRKEFYKRVGKAWKRGYLLYGPPGTGKSSLIAAMANYLKFDVFDLELSSIYDNGELKRVLLSTTNRSILVIEDIDCNAEVRDREAENQEDEQIKGKVTLSGILNFIDGLWSSFGDERIIVFTTNHKERLDPALLRPGRMDVHINMSYCTGLGFRTLVSNYLGLDGLNHPLCEEIEALVDSTEVTPAELAEELMQDDDTDVVLRGVISFVEKRKVERSKTKKEVSICKATDDDEKQNGSLGCVKKKKKGGKQKGKGKARSKEIPQDNCGFRLTEMFPSISNISLSPSSLFTAYASLTGFLMLFRSLFNDEVPERLRSYITDLLNRFFTPKSKNLTMVIDEIIGFKRNQVFDAAEVYLRNKIGPETARLRVGKLPKQKHFTIYIEKGEEILDTFENSELRWTYVESENEASQKEKRYYELTFEKKLRDKVMNSYLSHVVAESEETKRDLRAVKLYSRDVRASKDDDGMAGAGWGCINLEHPSTFETLAMDPGAKKKIIDDMERFLKRREFYKRVGKAWKRGYLLYGPPGTGKSSLIAAMANYLKFDVFDLELSSIYENAQLKSILLSTTNRSILVIEDIDCSSAEVVDREADEYQEYEEGYYGRVTLSGLLNFVDGLWSSFGDERIIVFTTNHKERLDPALLRPGRMDMHINMSYCTGLGFRTLVSNYLGLGGLNHPLCEEIEALIDSTEVTPAELAEELMQEDDTDVVLRGVVSFVENRKVEISKTKELEGSTCRKLDGDDKHNVSSTNDLKKTKKKKKGGKGKAKGN

SEQ ID NO: 70374 - DNA, 2361 bp, Arabidopsis thaliana
  misc_feature (1)..(2361): Ceres Seq. ID no. 2705693
  misc_feature (1)..(2361): Ortholog of  Ceres SEQ ID NO 14312989 as cited in SEQ ID NO 59121
  misc_feature (1)..(2361): Ortholog of  Ceres SEQ ID NO 12586556 as cited in SEQ ID NO 64667
  misc_feature (1)..(2361): Ortholog of  Ceres SEQ ID NO 13660894 as cited in SEQ ID NO 67475
atggatgctccggttccactctctttatctactctgttagaactctgcaccaatctcttgcaaaaatctgtaaacaagtccaatggtcgtttcacagcgcaattggttcattgccgtgttatcaaatcgggtcttatgttcagcgtctacctgatgaataatctcatgaacgtctactcaaaaactggttatgctcttcacgcacgcaagctgttcgacgaaatgcctctaagaacagctttttcatggaacacggttctttcggcttattctaaacgaggagatatggattcgacttgtgagttctttgatcagttgcctcaaagggattcggtttcgtggactacgatgattgttgggtataagaacattggtcaatatcataaggctataagagttatgggggatatggtcaaggaagggattgagccgacgcagtttacgcttacgaatgtgcttgcatcggtggctgcaacgcggtgtatggaaacaggtaaaaaggttcattctttcatcgttaagcttggtcttcgcggtaacgtttctgtgtcgaattcactgcttaatatgtatgcaaaatgtggtgatccaatgatggcaaaatttgttttcgatagaatggttgttagagatatctcaagctggaatgctatgattgcgttacatatgcaggtcggtcaaatggatcttgctatggcgcagttcgagcaaatggctgagcgagatatagtcacttggaattctatgatttctggtttcaatcagagagggtatgatctcagagctctagatatcttttcgaagatgctgagggattctctgttgtcgccggatagattcactctggcgagtgtgttatctgcttgtgccaatcttgagaaactttgtattgggaagcagattcattcgcacattgttactacagggtttgatatttccggaatcgtgttaaatgcattgatctcgatgtattcgaggtgtggaggggtcgagactgcccggagactgatagaacaaagaggaaccaaagatctcaagattgaaggttttacagctttacttgatgggtacattaagcttggagatatgaatcaagctaagaatatatttgtttcgttgaaagatcgtgatgtagtcgcatggaccgccatgattgtaggatatgagcaacacggttcgtatggtgaagctataaaccttttcagatcaatggttggaggagggcagagaccaaacagttacactcttgcagcaatgttaagtgtagcttcaagtttggcatcattgagccatggcaagcaaatccatgggagtgctgtaaagtcaggggaaatttattcagtttctgtcagcaatgcattgataacaatgtatgcaaaggcgggtaacattacatcggcaagccgggcatttgatttgatacgctgtgagagggatacagtatcgtggacatccatgattatcgcgttggcacagcacggtcacgcagaagaagcacttgagctttttgagacaatgctgatggaaggactaagacctgatcacataacatatgttggtgttttctctgcctgtactcatgccggtttggtcaaccaaggtcgtcaatacttcgatatgatgaaggacgttgataagattatacctacccttagccactatgcttgtatggtggacctgtttggacgtgctggtttattgcaggaagcacaagagttcatcgaaaagatgcctattgagcctgatgtagtgacatggggttcactgctttctgcttgcagagttcacaagaacatcgatcttgggaaagttgcagcagagagattgcttcttctcgagccagagaacagcggggcatactcagccttggctaacttatactcagcttgtggaaaatgggaagaagctgctaagataagaaaatcaatgaaagatggaagagtaaagaaggaacaagggtttagctggattgaagtgaagcataaagtccatgtctttggagtggaagacgggactcatccagagaagaacgagatctacatgaccatgaagaagatttgggacgagatcaagaaaatgggttatgttcccgacacagcttctgtactacacgacctcgaagaagaggttaaagaacagattctaaggcaccacagcgagaaactagcaatcgcatttggactaattagcactccggataaaaccacattgaggatcatgaagaatctcagagtgtgcaatgattgccacacggctataaagttcatttccaagcttgtgggaagggaaatcatagtgagagatacaacaagatttcaccatttcaaagatgggttttgttcttgccgagattattggtga

SEQ ID NO: 70375 - protein, 786 aa, Arabidopsis thaliana
  peptide (1)..(786): Ceres Seq. ID no. 2705694
MDAPVPLSLSTLLELCTNLLQKSVNKSNGRFTAQLVHCRVIKSGLMFSVYLMNNLMNVYSKTGYALHARKLFDEMPLRTAFSWNTVLSAYSKRGDMDSTCEFFDQLPQRDSVSWTTMIVGYKNIGQYHKAIRVMGDMVKEGIEPTQFTLTNVLASVAATRCMETGKKVHSFIVKLGLRGNVSVSNSLLNMYAKCGDPMMAKFVFDRMVVRDISSWNAMIALHMQVGQMDLAMAQFEQMAERDIVTWNSMISGFNQRGYDLRALDIFSKMLRDSLLSPDRFTLASVLSACANLEKLCIGKQIHSHIVTTGFDISGIVLNALISMYSRCGGVETARRLIEQRGTKDLKIEGFTALLDGYIKLGDMNQAKNIFVSLKDRDVVAWTAMIVGYEQHGSYGEAINLFRSMVGGGQRPNSYTLAAMLSVASSLASLSHGKQIHGSAVKSGEIYSVSVSNALITMYAKAGNITSASRAFDLIRCERDTVSWTSMIIALAQHGHAEEALELFETMLMEGLRPDHITYVGVFSACTHAGLVNQGRQYFDMMKDVDKIIPTLSHYACMVDLFGRAGLLQEAQEFIEKMPIEPDVVTWGSLLSACRVHKNIDLGKVAAERLLLLEPENSGAYSALANLYSACGKWEEAAKIRKSMKDGRVKKEQGFSWIEVKHKVHVFGVEDGTHPEKNEIYMTMKKIWDEIKKMGYVPDTASVLHDLEEEVKEQILRHHSEKLAIAFGLISTPDKTTLRIMKNLRVCNDCHTAIKFISKLVGREIIVRDTTRFHHFKDGFCSCRDYW

SEQ ID NO: 70376 - protein, 741 aa, Arabidopsis thaliana
  peptide (1)..(741): Ceres Seq. ID no. 2705695
MFSVYLMNNLMNVYSKTGYALHARKLFDEMPLRTAFSWNTVLSAYSKRGDMDSTCEFFDQLPQRDSVSWTTMIVGYKNIGQYHKAIRVMGDMVKEGIEPTQFTLTNVLASVAATRCMETGKKVHSFIVKLGLRGNVSVSNSLLNMYAKCGDPMMAKFVFDRMVVRDISSWNAMIALHMQVGQMDLAMAQFEQMAERDIVTWNSMISGFNQRGYDLRALDIFSKMLRDSLLSPDRFTLASVLSACANLEKLCIGKQIHSHIVTTGFDISGIVLNALISMYSRCGGVETARRLIEQRGTKDLKIEGFTALLDGYIKLGDMNQAKNIFVSLKDRDVVAWTAMIVGYEQHGSYGEAINLFRSMVGGGQRPNSYTLAAMLSVASSLASLSHGKQIHGSAVKSGEIYSVSVSNALITMYAKAGNITSASRAFDLIRCERDTVSWTSMIIALAQHGHAEEALELFETMLMEGLRPDHITYVGVFSACTHAGLVNQGRQYFDMMKDVDKIIPTLSHYACMVDLFGRAGLLQEAQEFIEKMPIEPDVVTWGSLLSACRVHKNIDLGKVAAERLLLLEPENSGAYSALANLYSACGKWEEAAKIRKSMKDGRVKKEQGFSWIEVKHKVHVFGVEDGTHPEKNEIYMTMKKIWDEIKKMGYVPDTASVLHDLEEEVKEQILRHHSEKLAIAFGLISTPDKTTLRIMKNLRVCNDCHTAIKFISKLVGREIIVRDTTRFHHFKDGFCSCRDYW

SEQ ID NO: 70377 - protein, 735 aa, Arabidopsis thaliana
  peptide (1)..(735): Ceres Seq. ID no. 2705696
MNNLMNVYSKTGYALHARKLFDEMPLRTAFSWNTVLSAYSKRGDMDSTCEFFDQLPQRDSVSWTTMIVGYKNIGQYHKAIRVMGDMVKEGIEPTQFTLTNVLASVAATRCMETGKKVHSFIVKLGLRGNVSVSNSLLNMYAKCGDPMMAKFVFDRMVVRDISSWNAMIALHMQVGQMDLAMAQFEQMAERDIVTWNSMISGFNQRGYDLRALDIFSKMLRDSLLSPDRFTLASVLSACANLEKLCIGKQIHSHIVTTGFDISGIVLNALISMYSRCGGVETARRLIEQRGTKDLKIEGFTALLDGYIKLGDMNQAKNIFVSLKDRDVVAWTAMIVGYEQHGSYGEAINLFRSMVGGGQRPNSYTLAAMLSVASSLASLSHGKQIHGSAVKSGEIYSVSVSNALITMYAKAGNITSASRAFDLIRCERDTVSWTSMIIALAQHGHAEEALELFETMLMEGLRPDHITYVGVFSACTHAGLVNQGRQYFDMMKDVDKIIPTLSHYACMVDLFGRAGLLQEAQEFIEKMPIEPDVVTWGSLLSACRVHKNIDLGKVAAERLLLLEPENSGAYSALANLYSACGKWEEAAKIRKSMKDGRVKKEQGFSWIEVKHKVHVFGVEDGTHPEKNEIYMTMKKIWDEIKKMGYVPDTASVLHDLEEEVKEQILRHHSEKLAIAFGLISTPDKTTLRIMKNLRVCNDCHTAIKFISKLVGREIIVRDTTRFHHFKDGFCSCRDYW

SEQ ID NO: 70378 - DNA, 2148 bp, Arabidopsis thaliana
  misc_feature (1)..(2148): Ceres Seq. ID no. 2705789
  misc_feature (1)..(2148): Ortholog of  Ceres SEQ ID NO 13596392 as cited in SEQ ID NO 62136
  misc_feature (1)..(2148): Ortholog of  Ceres SEQ ID NO 13654360 as cited in SEQ ID NO 67980
  misc_feature (1)..(2148): Ortholog of  Ceres SEQ ID NO 13596394 as cited in SEQ ID NO 68561
atggaggagaaagaagaagcgtctgagcaacaaaccggatccgaatccgaatcggcgtctttgactccttctcttcctcctccttcgcagcaacaacaacaacagcagcaacagccgcaggtaacggcggtggttggtccgagatgtgcgccaacgtattcggttgtgaatgctataatcgagaagaaagaagatggtcctggtcctagatgtggacatacgctgacggcggttcctgctgttggtgaagaagggacgtcttcttatattggcccgagactgatcttgtttggtggtgctactgctcttgagggtaattctggaggaacgggaacacctacttcaagtaatgtttcctatgcagggttagctggtgcaaccgctgatgttcattgttatgatgttctttctaataagtggtcgaggcttacaccttatggagaaccacctagtccaagagctgctcatgttgctactgctgttgggaccatggtagtaattcaggggggaataggtcctgctggtttatcagctgaggatcttcacgttcttgatctcacacagcaacggccacgatggcacagggttgttgttcagggtcctggaccaggaccacgttatggacatgtcatggcactggtaggacagaggtatctcatgcccctagcaagtgcatatggacttgccaagcacagagatggacgttgggaatgggccatagccccaggtgtctccccttctgccagataccagcatgctgcagtctttgtaaatgcaagactccatgtctctggtggggcacttggtggtggacgcatggtagaagactcgtccagtgttgcaggagttttacttgatgacctattggttgctgaagatcttgctgcagcggaaacaacatctgctgcctctcatgctgctgctgcagcagcagcaacaaacacgccacctggccgttcacctggaagatatggattttctgatgaaaggacaggggagctaccagaatcagctcctgacgctgtggtgctgggaagccctgttgcaccccctgctacgcccagtggaaaaccttcattatcattgattaagcctgattctgcagtaccaaatagtgttattcctgcaggggttcgacttcatcatagagctgtgactcatcttttgaagcctcgggggtggaagcctccagttcgtcgccagtttttcttggattgcaatgaaatagctgatctttgcgacagtgcagaacgtatcttctcaagcgaacctactgtgttacagcttaaagctcctattaagatatttggtgatttgcatggccagtttggggatctcatgcgcctttttgatgaatatggttcaccatcaacagctggagacatatcatacatcgattacctcttcttaggagactatgttgatcggggtcaacacagcctagagacaattacacttctgcttgctttaaaggttgaataccaacataacgtacacctgattcgtggaaatcatgaagctgccgacattaatgcactttttggtttccggatagagtgtattgagcgaatgggtgaacgtgatgggatctgggtgtggcatcgaataaaccgtttattcaattggctacctctggctgcactgattgagaagaaaatcatctgtatgcatgggggaattggtcggtcgataaatcatgtggagcagatagaaaatatccaacgtccaattacgatggaagcaggctcaattgtacttatggatttattatggtcggatccaactgaaaatgacagtgtcgaaggtttaaggcccaatgctagaggccctgggttggttacttttgggcctgaccgtgtcatggagttttgcaacaacaatgatctgcaattgattgtacgtgcgcatgaatgcgtgatggacggatttgagcgttttgcccaaggtcatttgataacgctcttttcggcaacaaattattgtggtaccgcaaacaatgccggggctatcttggtgttggggagagatcttgtggtggttcctaagcttatccatccattgcctccagcgataacctcacctgaaacttcaccagaaagacatatagaggatacatggatgcaggtttttatctcaaacagatactaa

SEQ ID NO: 70379 - protein, 715 aa, Arabidopsis thaliana
  peptide (1)..(715): Ceres Seq. ID no. 2705790
MEEKEEASEQQTGSESESASLTPSLPPPSQQQQQQQQQPQVTAVVGPRCAPTYSVVNAIIEKKEDGPGPRCGHTLTAVPAVGEEGTSSYIGPRLILFGGATALEGNSGGTGTPTSSNVSYAGLAGATADVHCYDVLSNKWSRLTPYGEPPSPRAAHVATAVGTMVVIQGGIGPAGLSAEDLHVLDLTQQRPRWHRVVVQGPGPGPRYGHVMALVGQRYLMPLASAYGLAKHRDGRWEWAIAPGVSPSARYQHAAVFVNARLHVSGGALGGGRMVEDSSSVAGVLLDDLLVAEDLAAAETTSAASHAAAAAAATNTPPGRSPGRYGFSDERTGELPESAPDAVVLGSPVAPPATPSGKPSLSLIKPDSAVPNSVIPAGVRLHHRAVTHLLKPRGWKPPVRRQFFLDCNEIADLCDSAERIFSSEPTVLQLKAPIKIFGDLHGQFGDLMRLFDEYGSPSTAGDISYIDYLFLGDYVDRGQHSLETITLLLALKVEYQHNVHLIRGNHEAADINALFGFRIECIERMGERDGIWVWHRINRLFNWLPLAALIEKKIICMHGGIGRSINHVEQIENIQRPITMEAGSIVLMDLLWSDPTENDSVEGLRPNARGPGLVTFGPDRVMEFCNNNDLQLIVRAHECVMDGFERFAQGHLITLFSATNYCGTANNAGAILVLGRDLVVVPKLIHPLPPAITSPETSPERHIEDTWMQVFISNRY

SEQ ID NO: 70380 - protein, 552 aa, Arabidopsis thaliana
  peptide (1)..(552): Ceres Seq. ID no. 2705791
MVVIQGGIGPAGLSAEDLHVLDLTQQRPRWHRVVVQGPGPGPRYGHVMALVGQRYLMPLASAYGLAKHRDGRWEWAIAPGVSPSARYQHAAVFVNARLHVSGGALGGGRMVEDSSSVAGVLLDDLLVAEDLAAAETTSAASHAAAAAAATNTPPGRSPGRYGFSDERTGELPESAPDAVVLGSPVAPPATPSGKPSLSLIKPDSAVPNSVIPAGVRLHHRAVTHLLKPRGWKPPVRRQFFLDCNEIADLCDSAERIFSSEPTVLQLKAPIKIFGDLHGQFGDLMRLFDEYGSPSTAGDISYIDYLFLGDYVDRGQHSLETITLLLALKVEYQHNVHLIRGNHEAADINALFGFRIECIERMGERDGIWVWHRINRLFNWLPLAALIEKKIICMHGGIGRSINHVEQIENIQRPITMEAGSIVLMDLLWSDPTENDSVEGLRPNARGPGLVTFGPDRVMEFCNNNDLQLIVRAHECVMDGFERFAQGHLITLFSATNYCGTANNAGAILVLGRDLVVVPKLIHPLPPAITSPETSPERHIEDTWMQVFISNRY

SEQ ID NO: 70381 - protein, 505 aa, Arabidopsis thaliana
  peptide (1)..(505): Ceres Seq. ID no. 2705792
MALVGQRYLMPLASAYGLAKHRDGRWEWAIAPGVSPSARYQHAAVFVNARLHVSGGALGGGRMVEDSSSVAGVLLDDLLVAEDLAAAETTSAASHAAAAAAATNTPPGRSPGRYGFSDERTGELPESAPDAVVLGSPVAPPATPSGKPSLSLIKPDSAVPNSVIPAGVRLHHRAVTHLLKPRGWKPPVRRQFFLDCNEIADLCDSAERIFSSEPTVLQLKAPIKIFGDLHGQFGDLMRLFDEYGSPSTAGDISYIDYLFLGDYVDRGQHSLETITLLLALKVEYQHNVHLIRGNHEAADINALFGFRIECIERMGERDGIWVWHRINRLFNWLPLAALIEKKIICMHGGIGRSINHVEQIENIQRPITMEAGSIVLMDLLWSDPTENDSVEGLRPNARGPGLVTFGPDRVMEFCNNNDLQLIVRAHECVMDGFERFAQGHLITLFSATNYCGTANNAGAILVLGRDLVVVPKLIHPLPPAITSPETSPERHIEDTWMQVFISNRY

SEQ ID NO: 70382 - DNA, 2148 bp, Arabidopsis thaliana
  misc_feature (1)..(2148): Ceres Seq. ID no. 2705971
  misc_feature (1)..(2148): Ortholog of  Ceres SEQ ID NO 14307817 as cited in SEQ ID NO 54722
atggctgtttcactaccattgtttcaatttatactctttcttcttcttcttcttctttcaagaacggtttatgcatacttaatcggagtcggaagctatgacatcactggtcctgccgctgatgtcaacatgatgggctacgcaaactcagatcaaatcgcttccggtattcatttccggttacgagctcgtgccttcatcgtcgctgagcctcaagagaagaatgtagcaataagtggaattcacacacatgctggaccaggaggatatcttcaatacgtcacatatattgtgacgtctcttggatttgttcgtcaatcttttgacgttgttgttaacggcattgagcaaagcattgtccaagcacacgaaagcctacgtcctggttctgcttttgttaacaaaggggatcttttggatgctggtgtgaatcgaagtccgagttcttatctgaacaatcctgcagctgagaggagtaaatataagtatgatgttgataaggaaatgactcttgttaagtttgttgattctcagttgggacctactggtagttttaactggtttgctactcatgggacttccatgagtcggactaactcgttgattagtggagataacaaaggcgctgcagctcggtttatggaggattggtttgagaatggacagaagaattctgttagctctagaaacatccctcggagagtatcaaccattgtttctgatttcagtagaaaccagagtagacttttggatattgcggctacttataagtcatctagaggacattctgtggataagtcccttgatgttaaaacccgagtaagaaacggttcgaagcgtaaatttgtctctgccttctgtcaatcaaactgtggtgatgtgagtccaaatactcttggtaccttttgcattgacactggactgccttgtgatttcaatcacagtacctgcaatggacagaacgagttgtgctatggccgtggtccgggctaccctgatgaatttgagagtacacgtatcattggagaaaagcaattcaaaatggctgtggaactttttaacaaagctacagagaagctgcaggggaaaattggttaccaacatgcgtatctagatttctcgaatcttgatgtcacagttcctaaagcaggcggtggctctgagacggttaagacatgtccagctgcaatggggtttggttttgctgctggaacaactgatggtccaggtgcttttgatttcaaacaaggagatgatcagggtaatgtgttttggagactagtgaggaatgtgttaagaactcctggtccagaacaggtccaatgccaaaaaccaaaacccattttacttgacactggtgagatgaaagaaccatatgactgggcgatacttcgcattggccaattagtcatcctcagtgttcccggagagttcacaacaatggctggaagacgtctccgtgacgctatcaagtcttttctcatttcttcggaccccaaggaattcagcaacaacatgcatgtcgtaatcgcaggtctcaccaacacctattctcagtacatcgccactttcgaagagtacgaggttcaaagatacgagggcgcctcaacgttatacggacgacacacactcactgcttatatccaagagttcaagaaactagccacagctttagttaacggtctaacactcccacgtggtccgcaacctcctgaccttttagacaaacagatcagtttactatcccctgtggttgtagactcaactcctctaggagtcaaattcggtgacgtcaaagctgatgtacctccaaagtcaacgttcaggagaggtcaacaagttaacgcaacgttttggtcaggatgtcctcgaaatgatttgatgactgaaggatcattcgctgtggtggagacgctgcgtgagggagggaaatgggctccggtgtatgatgacgatgacttcagtttgaagttcaagtggtcgagaccggcaaagctgagttcggagagccaagccacgattgagtggagggtaccggaatctgcggtagccggagtttatagaataagacattatggagcttctaagtcgttgtttggatccattagtagcttctctggttcttctagtgcctttgtagttgtatga

SEQ ID NO: 70383 - protein, 715 aa, Arabidopsis thaliana
  peptide (1)..(715): Ceres Seq. ID no. 2705972
MAVSLPLFQFILFLLLLLLSRTVYAYLIGVGSYDITGPAADVNMMGYANSDQIASGIHFRLRARAFIVAEPQEKNVAISGIHTHAGPGGYLQYVTYIVTSLGFVRQSFDVVVNGIEQSIVQAHESLRPGSAFVNKGDLLDAGVNRSPSSYLNNPAAERSKYKYDVDKEMTLVKFVDSQLGPTGSFNWFATHGTSMSRTNSLISGDNKGAAARFMEDWFENGQKNSVSSRNIPRRVSTIVSDFSRNQSRLLDIAATYKSSRGHSVDKSLDVKTRVRNGSKRKFVSAFCQSNCGDVSPNTLGTFCIDTGLPCDFNHSTCNGQNELCYGRGPGYPDEFESTRIIGEKQFKMAVELFNKATEKLQGKIGYQHAYLDFSNLDVTVPKAGGGSETVKTCPAAMGFGFAAGTTDGPGAFDFKQGDDQGNVFWRLVRNVLRTPGPEQVQCQKPKPILLDTGEMKEPYDWAILRIGQLVILSVPGEFTTMAGRRLRDAIKSFLISSDPKEFSNNMHVVIAGLTNTYSQYIATFEEYEVQRYEGASTLYGRHTLTAYIQEFKKLATALVNGLTLPRGPQPPDLLDKQISLLSPVVVDSTPLGVKFGDVKADVPPKSTFRRGQQVNATFWSGCPRNDLMTEGSFAVVETLREGGKWAPVYDDDDFSLKFKWSRPAKLSSESQATIEWRVPESAVAGVYRIRHYGASKSLFGSISSFSGSSSAFVVV

SEQ ID NO: 70384 - protein, 672 aa, Arabidopsis thaliana
  peptide (1)..(672): Ceres Seq. ID no. 2705973
MMGYANSDQIASGIHFRLRARAFIVAEPQEKNVAISGIHTHAGPGGYLQYVTYIVTSLGFVRQSFDVVVNGIEQSIVQAHESLRPGSAFVNKGDLLDAGVNRSPSSYLNNPAAERSKYKYDVDKEMTLVKFVDSQLGPTGSFNWFATHGTSMSRTNSLISGDNKGAAARFMEDWFENGQKNSVSSRNIPRRVSTIVSDFSRNQSRLLDIAATYKSSRGHSVDKSLDVKTRVRNGSKRKFVSAFCQSNCGDVSPNTLGTFCIDTGLPCDFNHSTCNGQNELCYGRGPGYPDEFESTRIIGEKQFKMAVELFNKATEKLQGKIGYQHAYLDFSNLDVTVPKAGGGSETVKTCPAAMGFGFAAGTTDGPGAFDFKQGDDQGNVFWRLVRNVLRTPGPEQVQCQKPKPILLDTGEMKEPYDWAILRIGQLVILSVPGEFTTMAGRRLRDAIKSFLISSDPKEFSNNMHVVIAGLTNTYSQYIATFEEYEVQRYEGASTLYGRHTLTAYIQEFKKLATALVNGLTLPRGPQPPDLLDKQISLLSPVVVDSTPLGVKFGDVKADVPPKSTFRRGQQVNATFWSGCPRNDLMTEGSFAVVETLREGGKWAPVYDDDDFSLKFKWSRPAKLSSESQATIEWRVPESAVAGVYRIRHYGASKSLFGSISSFSGSSSAFVVV

SEQ ID NO: 70385 - protein, 671 aa, Arabidopsis thaliana
  peptide (1)..(671): Ceres Seq. ID no. 2705974
MGYANSDQIASGIHFRLRARAFIVAEPQEKNVAISGIHTHAGPGGYLQYVTYIVTSLGFVRQSFDVVVNGIEQSIVQAHESLRPGSAFVNKGDLLDAGVNRSPSSYLNNPAAERSKYKYDVDKEMTLVKFVDSQLGPTGSFNWFATHGTSMSRTNSLISGDNKGAAARFMEDWFENGQKNSVSSRNIPRRVSTIVSDFSRNQSRLLDIAATYKSSRGHSVDKSLDVKTRVRNGSKRKFVSAFCQSNCGDVSPNTLGTFCIDTGLPCDFNHSTCNGQNELCYGRGPGYPDEFESTRIIGEKQFKMAVELFNKATEKLQGKIGYQHAYLDFSNLDVTVPKAGGGSETVKTCPAAMGFGFAAGTTDGPGAFDFKQGDDQGNVFWRLVRNVLRTPGPEQVQCQKPKPILLDTGEMKEPYDWAILRIGQLVILSVPGEFTTMAGRRLRDAIKSFLISSDPKEFSNNMHVVIAGLTNTYSQYIATFEEYEVQRYEGASTLYGRHTLTAYIQEFKKLATALVNGLTLPRGPQPPDLLDKQISLLSPVVVDSTPLGVKFGDVKADVPPKSTFRRGQQVNATFWSGCPRNDLMTEGSFAVVETLREGGKWAPVYDDDDFSLKFKWSRPAKLSSESQATIEWRVPESAVAGVYRIRHYGASKSLFGSISSFSGSSSAFVVV

SEQ ID NO: 70386 - DNA, 1686 bp, Arabidopsis thaliana
  misc_feature (1)..(1686): Ceres Seq. ID no. 2705983
  misc_feature (1)..(1686): Ortholog of  Ceres SEQ ID NO 13594317 as cited in SEQ ID NO 57796
atggcgacagtaggatccctgaaacctctgcaccattcctcatgttcatcgagtttccctcggaatccgatcgtaaaccggaaagcccttcttggttttgtgtttgattctgcccggaaaaaccagattcgatgtgagaatttacgatattcatcggaaagcgatgggaagagaagaaatgcggcggcgaagaagaggaatcaatccccggaaagatgtgcggcggagggagtactgaccggaggaggggggtcggaggcgattgcggaggtgaggacgatgatgcctgagaggattaaggtagtgatattgacggcgtgcatgatgtgtctatgtaacgccgacagagttgttatgtccgtcgcggtggttccactcgccgataagcttggctggtcgagttctttcttaggggtagttcagtcctccttcctatggggttacattttttcatccgttatcggaggggcattggtggatcggtatggaggaaaaagagtgttggcttggggtgtggcattgtggtccttagccactctactcactccttgggcagctgcacactcgaccttagccttattgtgtgtccgcgccttttttggcctcgctgaaggcgttgcaatgccctccatgaccaccctactctctcggtggtttccaatggatgaacgagcgagtgcggttggtatatctatggccgggtttcacatgggaaatgttgtgggacttctgttgacgccactcatgttatcttccataggaatctctggtccatttattctttttgcatccttaggtctattgtgggtatccacttggtcaagcggagttacaaacaaccctcaggacagtcctttcatcactaggtcagaactcaggcttatccaggctggaaaaccagttcaaccgtcaaccatttcgccgaaaccaaacccatctttgcgacttcttttgtcgaaattgcctacttgggcgatcatttttgctaatgtgactaacaactggggatactttgttcttctctcatggatgcctgtttacttccagacggtgtttaatgtgaatttgaagcaagcagcttggtttagcgctcttccatgggcgacaatggcgatctcaggttactatgcaggagcagcatcggacttcttgataagaactggtcactctgtaacctcagtacgaaagatcatgcaatctattggatttatgggtcccgggctgtctctgctctgcctcaacttcgcaaagtcgccttcttgtgcagcggttttcatgaccattgcattgagcttgagttcctttagccaagctggatttctcctcaatatgcaagacatcgcaccgcaatatgctggtttcctgcacggtaataatgttatcagatggtggatcttttcttcttcttcttttgcatcgattttgtttcttgctgaaaaagttagggtttgtatatctggtgtgcgagacaggtatttcgaattgtgcgggtacgttggctgcgatcgtaagtacaatagggacgggatattttgtgcagtggctcggctcttttcaggcgttcttgacggttacggcctttctttactttgcaaccaccgtgttttggctcctctttgcaaccggagaacgagtcttctagatccaaaacgctctccttggacactttactgtttagagctttga

SEQ ID NO: 70387 - protein, 561 aa, Arabidopsis thaliana
  peptide (1)..(561): Ceres Seq. ID no. 2705984
MATVGSLKPLHHSSCSSSFPRNPIVNRKALLGFVFDSARKNQIRCENLRYSSESDGKRRNAAAKKRNQSPERCAAEGVLTGGGGSEAIAEVRTMMPERIKVVILTACMMCLCNADRVVMSVAVVPLADKLGWSSSFLGVVQSSFLWGYIFSSVIGGALVDRYGGKRVLAWGVALWSLATLLTPWAAAHSTLALLCVRAFFGLAEGVAMPSMTTLLSRWFPMDERASAVGISMAGFHMGNVVGLLLTPLMLSSIGISGPFILFASLGLLWVSTWSSGVTNNPQDSPFITRSELRLIQAGKPVQPSTISPKPNPSLRLLLSKLPTWAIIFANVTNNWGYFVLLSWMPVYFQTVFNVNLKQAAWFSALPWATMAISGYYAGAASDFLIRTGHSVTSVRKIMQSIGFMGPGLSLLCLNFAKSPSCAAVFMTIALSLSSFSQAGFLLNMQDIAPQYAGFLHGNNVIRWWIFSSSSFASILFLAEKVRVCISGVRDRYFELCGYVGCDRKYNRDGIFCAVARLFSGVLDGYGLSLLCNHRVLAPLCNRRTSLLDPKRSPWTLYCLEL

SEQ ID NO: 70388 - protein, 468 aa, Arabidopsis thaliana
  peptide (1)..(468): Ceres Seq. ID no. 2705985
MMPERIKVVILTACMMCLCNADRVVMSVAVVPLADKLGWSSSFLGVVQSSFLWGYIFSSVIGGALVDRYGGKRVLAWGVALWSLATLLTPWAAAHSTLALLCVRAFFGLAEGVAMPSMTTLLSRWFPMDERASAVGISMAGFHMGNVVGLLLTPLMLSSIGISGPFILFASLGLLWVSTWSSGVTNNPQDSPFITRSELRLIQAGKPVQPSTISPKPNPSLRLLLSKLPTWAIIFANVTNNWGYFVLLSWMPVYFQTVFNVNLKQAAWFSALPWATMAISGYYAGAASDFLIRTGHSVTSVRKIMQSIGFMGPGLSLLCLNFAKSPSCAAVFMTIALSLSSFSQAGFLLNMQDIAPQYAGFLHGNNVIRWWIFSSSSFASILFLAEKVRVCISGVRDRYFELCGYVGCDRKYNRDGIFCAVARLFSGVLDGYGLSLLCNHRVLAPLCNRRTSLLDPKRSPWTLYCLEL

SEQ ID NO: 70389 - protein, 467 aa, Arabidopsis thaliana
  peptide (1)..(467): Ceres Seq. ID no. 2705986
MPERIKVVILTACMMCLCNADRVVMSVAVVPLADKLGWSSSFLGVVQSSFLWGYIFSSVIGGALVDRYGGKRVLAWGVALWSLATLLTPWAAAHSTLALLCVRAFFGLAEGVAMPSMTTLLSRWFPMDERASAVGISMAGFHMGNVVGLLLTPLMLSSIGISGPFILFASLGLLWVSTWSSGVTNNPQDSPFITRSELRLIQAGKPVQPSTISPKPNPSLRLLLSKLPTWAIIFANVTNNWGYFVLLSWMPVYFQTVFNVNLKQAAWFSALPWATMAISGYYAGAASDFLIRTGHSVTSVRKIMQSIGFMGPGLSLLCLNFAKSPSCAAVFMTIALSLSSFSQAGFLLNMQDIAPQYAGFLHGNNVIRWWIFSSSSFASILFLAEKVRVCISGVRDRYFELCGYVGCDRKYNRDGIFCAVARLFSGVLDGYGLSLLCNHRVLAPLCNRRTSLLDPKRSPWTLYCLEL

SEQ ID NO: 70390 - DNA, 966 bp, Arabidopsis thaliana
  misc_feature (1)..(966): Ceres Seq. ID no. 2706071
  misc_feature (1)..(966): Ortholog of  Ceres SEQ ID NO 15170099 as cited in SEQ ID NO 66491
atggcttcttcgaatagacactggccaagcatgttcaagtccaaacctcatccccatcaatggcaacatgacatcaactctcctctcttgccttctgcttctcaccgatcttctcctttctcttcaggatgtgaagtggagaggagtccagagccaaaaccaagatggaatccaaagccagagcagattcggatacttgaagcaatctttaactccgggatggtgaatcctccaagagaggagatcaggaggattagggctcagcttcaagaatacggccaagtcggtgatgctaacgtcttctactggttccaaaaccgtaagtcccgtagtaaacacaaactccgcctcctccacaaccactccaaacactctctccctcaaacgcaaccgcagccgcagccgcaaccttcggcttcctcttcctcttcctcctcctcttcctcctccaaatccaccaaaccccgaaaaagcaagaacaagaacaacactaatctctctttgggtggtagtcaaatgatggggatgtttccaccggaaccggcgtttctcttcccggtctccactgtcggagggtttgaaggtatcaccgtctcatcccaattagggtttctctccggtgatatgattgagcaacaaaaaccggctccaacgtgtaccggactcctgctgagtgagatcatgaacggtagtgtgagttatggaactcatcatcaacaacacttgagtgagaaagaagttgaagaaatgaggatgaagatgttgcaacagccacagactcagatttgttacgctaccactaatcatcaaatagcttcttacaacaacaacaacaacaacaataacatcatgcttcatattcctcccactacttctactgccaccactattactacttcgcattctctcgctactgtcccatcaacttcggaccagcttcaagttcaaggtaatgttaatatataa

SEQ ID NO: 70391 - protein, 321 aa, Arabidopsis thaliana
  peptide (1)..(321): Ceres Seq. ID no. 2706072
MASSNRHWPSMFKSKPHPHQWQHDINSPLLPSASHRSSPFSSGCEVERSPEPKPRWNPKPEQIRILEAIFNSGMVNPPREEIRRIRAQLQEYGQVGDANVFYWFQNRKSRSKHKLRLLHNHSKHSLPQTQPQPQPQPSASSSSSSSSSSSKSTKPRKSKNKNNTNLSLGGSQMMGMFPPEPAFLFPVSTVGGFEGITVSSQLGFLSGDMIEQQKPAPTCTGLLLSEIMNGSVSYGTHHQQHLSEKEVEEMRMKMLQQPQTQICYATTNHQIASYNNNNNNNNIMLHIPPTTSTATTITTSHSLATVPSTSDQLQVQGNVNI

SEQ ID NO: 70392 - protein, 311 aa, Arabidopsis thaliana
  peptide (1)..(311): Ceres Seq. ID no. 2706073
MFKSKPHPHQWQHDINSPLLPSASHRSSPFSSGCEVERSPEPKPRWNPKPEQIRILEAIFNSGMVNPPREEIRRIRAQLQEYGQVGDANVFYWFQNRKSRSKHKLRLLHNHSKHSLPQTQPQPQPQPSASSSSSSSSSSSKSTKPRKSKNKNNTNLSLGGSQMMGMFPPEPAFLFPVSTVGGFEGITVSSQLGFLSGDMIEQQKPAPTCTGLLLSEIMNGSVSYGTHHQQHLSEKEVEEMRMKMLQQPQTQICYATTNHQIASYNNNNNNNNIMLHIPPTTSTATTITTSHSLATVPSTSDQLQVQGNVNI

SEQ ID NO: 70393 - protein, 248 aa, Arabidopsis thaliana
  peptide (1)..(248): Ceres Seq. ID no. 2706074
MVNPPREEIRRIRAQLQEYGQVGDANVFYWFQNRKSRSKHKLRLLHNHSKHSLPQTQPQPQPQPSASSSSSSSSSSSKSTKPRKSKNKNNTNLSLGGSQMMGMFPPEPAFLFPVSTVGGFEGITVSSQLGFLSGDMIEQQKPAPTCTGLLLSEIMNGSVSYGTHHQQHLSEKEVEEMRMKMLQQPQTQICYATTNHQIASYNNNNNNNNIMLHIPPTTSTATTITTSHSLATVPSTSDQLQVQGNVNI

SEQ ID NO: 70394 - DNA, 1203 bp, Arabidopsis thaliana
  misc_feature (1)..(1203): Ceres Seq. ID no. 2706381
  misc_feature (1)..(1203): Ortholog of  Ceres SEQ ID NO 13595351 as cited in SEQ ID NO 55934
  misc_feature (1)..(1203): Ortholog of  Ceres SEQ ID NO 13639645 as cited in SEQ ID NO 57488
atgggattaaggatgtcagaatcagctaaaccttattttgcaatggtctgtcttcagttcggatacgcaggtatgaacttagtaactaaaaccgtcctagaccgcggtatgagccattacgttcttgttgcataccgcaacgcttttgccacagccgctatcgcacccttcgctcttctctccgaaaggaaagtgagatcaaagatgacgtttccaatattcatgcgaatatttcttcttgctcttctcgggccggtgattgatcagaacttatactatatcggtctaaaactcacatcaccaacgttttcctccgccgttagcaacatcgtgcctgcaattaccattatccttgccacacttttcaggatggagaaagtggagatgagaaaagtaagatgcctggtaaaagtgatggggacgttagtgacagtggttggatccatattgatgatattctacaaaggtcctttcattaatttcttccggtctcacctcacggccgcctcttcgccgccgacggctgactatcttaaggctgccgtcttcctactcctcgcttccctctcatgggcgtcgttctttgttcttcaggctgcgactttgaagaaatactcagcccatctctcaatgtcaacaatggtgtgtttcatgggaacgttacagtctttagccctagccttcgtaatggaacacaatccttctgctttgaacatcggttttgacatgaaccttctcgcttctgcctacgcgggaataatgtcgtcgagcatagcttactacgttcaaggacttatgatgcagcgaaaaggaccggtctttgtcactgcttttaaccctcttatcgttgtcattgtctccatcatgagcttcttcgttctcggtcaaggaatctaccttggagggtacgttaacaacaaccgggttattggagtggttgttttgatggtgggagtctacgccgtgttatggggcaaacatgtagatgatgacggcgaagaaacacgccatgaagataacgttgtagccgttaagtgttgtagtggcaataatggtctaacgataatgccgaaaatcgacgaagctgatgaggaggatgttgaaaccggaaaggctacgtcggagaaggagtcgtcagttccggaagtggtggtggtagttttttgtagtgaaaatgtgcatagcgtttcacgacctaactag

SEQ ID NO: 70395 - protein, 400 aa, Arabidopsis thaliana
  peptide (1)..(400): Ceres Seq. ID no. 2706382
MGLRMSESAKPYFAMVCLQFGYAGMNLVTKTVLDRGMSHYVLVAYRNAFATAAIAPFALLSERKVRSKMTFPIFMRIFLLALLGPVIDQNLYYIGLKLTSPTFSSAVSNIVPAITIILATLFRMEKVEMRKVRCLVKVMGTLVTVVGSILMIFYKGPFINFFRSHLTAASSPPTADYLKAAVFLLLASLSWASFFVLQAATLKKYSAHLSMSTMVCFMGTLQSLALAFVMEHNPSALNIGFDMNLLASAYAGIMSSSIAYYVQGLMMQRKGPVFVTAFNPLIVVIVSIMSFFVLGQGIYLGGYVNNNRVIGVVVLMVGVYAVLWGKHVDDDGEETRHEDNVVAVKCCSGNNGLTIMPKIDEADEEDVETGKATSEKESSVPEVVVVVFCSENVHSVSRPN

SEQ ID NO: 70396 - protein, 396 aa, Arabidopsis thaliana
  peptide (1)..(396): Ceres Seq. ID no. 2706383
MSESAKPYFAMVCLQFGYAGMNLVTKTVLDRGMSHYVLVAYRNAFATAAIAPFALLSERKVRSKMTFPIFMRIFLLALLGPVIDQNLYYIGLKLTSPTFSSAVSNIVPAITIILATLFRMEKVEMRKVRCLVKVMGTLVTVVGSILMIFYKGPFINFFRSHLTAASSPPTADYLKAAVFLLLASLSWASFFVLQAATLKKYSAHLSMSTMVCFMGTLQSLALAFVMEHNPSALNIGFDMNLLASAYAGIMSSSIAYYVQGLMMQRKGPVFVTAFNPLIVVIVSIMSFFVLGQGIYLGGYVNNNRVIGVVVLMVGVYAVLWGKHVDDDGEETRHEDNVVAVKCCSGNNGLTIMPKIDEADEEDVETGKATSEKESSVPEVVVVVFCSENVHSVSRPN

SEQ ID NO: 70397 - protein, 386 aa, Arabidopsis thaliana
  peptide (1)..(386): Ceres Seq. ID no. 2706384
MVCLQFGYAGMNLVTKTVLDRGMSHYVLVAYRNAFATAAIAPFALLSERKVRSKMTFPIFMRIFLLALLGPVIDQNLYYIGLKLTSPTFSSAVSNIVPAITIILATLFRMEKVEMRKVRCLVKVMGTLVTVVGSILMIFYKGPFINFFRSHLTAASSPPTADYLKAAVFLLLASLSWASFFVLQAATLKKYSAHLSMSTMVCFMGTLQSLALAFVMEHNPSALNIGFDMNLLASAYAGIMSSSIAYYVQGLMMQRKGPVFVTAFNPLIVVIVSIMSFFVLGQGIYLGGYVNNNRVIGVVVLMVGVYAVLWGKHVDDDGEETRHEDNVVAVKCCSGNNGLTIMPKIDEADEEDVETGKATSEKESSVPEVVVVVFCSENVHSVSRPN

SEQ ID NO: 70398 - DNA, 1359 bp, Arabidopsis thaliana
  misc_feature (1)..(1359): Ceres Seq. ID no. 2706438
  misc_feature (1)..(1359): Ortholog of  Ceres SEQ ID NO 13597574 as cited in SEQ ID NO 64677
  misc_feature (1)..(1359): Ortholog of  Ceres SEQ ID NO 12779098 as cited in SEQ ID NO 67698
  misc_feature (1)..(1359): Ortholog of  Ceres SEQ ID NO 13591190 as cited in SEQ ID NO 68044
  misc_feature (1)..(1359): Ortholog of  Ceres SEQ ID NO 13596089 as cited in SEQ ID NO 68373
atggcagagattcgccagagaagagtgttgatggtcccagcaccgttccaaggccatttaccttcgatgatgaatctagcgtcctacctttcttcccaaggcttttcaatcacaatcgttagaaacgaattcaatttcaaagatatctcccataatttccctggtataaaattcttcaccatcaaggacggcttgtcagaatctgacgtgaagtctctgggtctccttgaatttgtcctggagcttaactctgtctgtgaacccctattgaaagagtttctaaccaaccatgatgatgttgttgactttatcatttatgatgaatttgtttacttccctcgacgtgttgcggaagatatgaatctgccaaagatggtctttagcccttcttccgccgctacctcgatcagccggtgtgtgcttatggagaaccaatcaaatgggttacttcctccacaagacgcaagatctcaactagaagaaacggtgccagagtttcatccctttcgtttcaaagatctgccttttacagcttatggatctatggagagattaatgatactttacgagaatgtaagcaatagagcctcatcttctggcataatacacaactcttcggattgcttagagaactcattcataacaactgcacaagagaaatggggagttccggtatacccggttggtccactccatatgaccaattccgcaatgtcatgtccaagtttatttgaagaagaaagaaactgtcttgaatggcttgagaagcaagaaacaagctcagtgatctacataagcatggggagcttggcgatgacacaagatatagaggctgtggagatggccatgggatttgtccagagtaatcaacccttcttgtgggtgatccgaccaggctctataaacggacaagaatctttagacttcttaccggaacagttcaaccaaacggtgaccgatggaagaggttttgttgtgaaatgggccccacaaaaagaggtattaaggcatagagcagtgggagggttttggaaccatggtggatggaactcgtgcttggagagcataagcagtggtgtaccaatgatttgtaggccgtattctggtgatcagagggtgaatactcgacttatgtcacatgtttggcaaaccgcgtatgagatcgaaggtgaattggaaagaggagctgttgagatggccgtgaggaggctcattgtggatcaagaaggtcaggagatgagaatgagagccaccatattgaaggaagaggttgaagcctctgtcacaaccgaaggctcttctcacaattctttaaacaatttggtccatgcaataatgatgcaaattgacgaacaatga

SEQ ID NO: 70399 - protein, 452 aa, Arabidopsis thaliana
  peptide (1)..(452): Ceres Seq. ID no. 2706439
MAEIRQRRVLMVPAPFQGHLPSMMNLASYLSSQGFSITIVRNEFNFKDISHNFPGIKFFTIKDGLSESDVKSLGLLEFVLELNSVCEPLLKEFLTNHDDVVDFIIYDEFVYFPRRVAEDMNLPKMVFSPSSAATSISRCVLMENQSNGLLPPQDARSQLEETVPEFHPFRFKDLPFTAYGSMERLMILYENVSNRASSSGIIHNSSDCLENSFITTAQEKWGVPVYPVGPLHMTNSAMSCPSLFEEERNCLEWLEKQETSSVIYISMGSLAMTQDIEAVEMAMGFVQSNQPFLWVIRPGSINGQESLDFLPEQFNQTVTDGRGFVVKWAPQKEVLRHRAVGGFWNHGGWNSCLESISSGVPMICRPYSGDQRVNTRLMSHVWQTAYEIEGELERGAVEMAVRRLIVDQEGQEMRMRATILKEEVEASVTTEGSSHNSLNNLVHAIMMQIDEQ

SEQ ID NO: 70400 - protein, 442 aa, Arabidopsis thaliana
  peptide (1)..(442): Ceres Seq. ID no. 2706440
MVPAPFQGHLPSMMNLASYLSSQGFSITIVRNEFNFKDISHNFPGIKFFTIKDGLSESDVKSLGLLEFVLELNSVCEPLLKEFLTNHDDVVDFIIYDEFVYFPRRVAEDMNLPKMVFSPSSAATSISRCVLMENQSNGLLPPQDARSQLEETVPEFHPFRFKDLPFTAYGSMERLMILYENVSNRASSSGIIHNSSDCLENSFITTAQEKWGVPVYPVGPLHMTNSAMSCPSLFEEERNCLEWLEKQETSSVIYISMGSLAMTQDIEAVEMAMGFVQSNQPFLWVIRPGSINGQESLDFLPEQFNQTVTDGRGFVVKWAPQKEVLRHRAVGGFWNHGGWNSCLESISSGVPMICRPYSGDQRVNTRLMSHVWQTAYEIEGELERGAVEMAVRRLIVDQEGQEMRMRATILKEEVEASVTTEGSSHNSLNNLVHAIMMQIDEQ

SEQ ID NO: 70401 - protein, 430 aa, Arabidopsis thaliana
  peptide (1)..(430): Ceres Seq. ID no. 2706441
MMNLASYLSSQGFSITIVRNEFNFKDISHNFPGIKFFTIKDGLSESDVKSLGLLEFVLELNSVCEPLLKEFLTNHDDVVDFIIYDEFVYFPRRVAEDMNLPKMVFSPSSAATSISRCVLMENQSNGLLPPQDARSQLEETVPEFHPFRFKDLPFTAYGSMERLMILYENVSNRASSSGIIHNSSDCLENSFITTAQEKWGVPVYPVGPLHMTNSAMSCPSLFEEERNCLEWLEKQETSSVIYISMGSLAMTQDIEAVEMAMGFVQSNQPFLWVIRPGSINGQESLDFLPEQFNQTVTDGRGFVVKWAPQKEVLRHRAVGGFWNHGGWNSCLESISSGVPMICRPYSGDQRVNTRLMSHVWQTAYEIEGELERGAVEMAVRRLIVDQEGQEMRMRATILKEEVEASVTTEGSSHNSLNNLVHAIMMQIDEQ

SEQ ID NO: 70402 - DNA, 1554 bp, Arabidopsis thaliana
  misc_feature (1)..(1554): Ceres Seq. ID no. 2706442
  misc_feature (1)..(1554): Ortholog of  Ceres SEQ ID NO 14304094 as cited in SEQ ID NO 53422
atgtgcggtaggactcgatgtactttaagacccgacgatgtccccagagcttctcaccgccacaccgttcctacccgatttcttcacctcgaccggtttatttctcttttctctttaatcaatttcaagttccaatttttaacctttgcaaagtctaaaactgttcctttctgttgtcaaatcagttatcgtccatcttacaatgttgcccctggatcctatatacctgttctacggagagacaatgaagaagttgttggtgatggtgttgttgttcattgtatgaagtggggattagtgccaagtttcactaagaaaactgataagcctgatttcttcaaaatgtttaatgctcggtctgaatctgtggctgagaaagcgtcttttcgtcgattgcttcccaagaataggtgccttgttgcagttgatgggttctatgagtggaagaaggaaggttcaaaaaagcaaccctactacatccattttgaggatgggagacctctcgtatttgctgctctttttgatacttggcagaactcaggaggtgagacactttacacctttacgattttgacaaccgcttcctcttcagccctccaatggctccatgacagaatgcctgtaattcttggtgataaggattcaatcgacacatggttagatgatccctcgacaacgaaactgcagccattactttcaccatatgaaaaatcggatttggtatggtatccagtaacctctgcaattggtaaaccaacgtttgatggaccagagtgtattcaacagataccgctaaagacttcacaaaatagcttgatctcgaagtttttctcaacaaagcagcccaaaacagatgaaggagacaaagaaaccaaatcaacagatgcaaatatcatagttgatttgaaaaaggaacctacggctgaaaaggacacgttttctgacagcattaagaaaattgaagaactagacggggagaaagatatgtcgaatgtagccaaaaatctggagtttcaagagattgtgaaagcagaaccatttgttgaagataactcagcagttgcgtcacttcctgaacctgtaaagaatgatgttcaggagggtacaaaggaagaaggcaaatccctaaagactggtcttactaaagaaacaggtgagagcagtgccagtataccggctgagtcctacatccttgatctccaaagaatctcaaaagaagaacccgagactcaaagccatcatttctttactgcagatgagagattgaatcagctgcatgaggctgtcgaagatattccaggaaatgaaaaccagaagacagttttaactagcccgacgacgaaggaaggtggcttagtgtttagcgaaaagagtgggacaaagcgagactatgaggtattctcagctcaagaaaagccacagaaacactatgagaggttgcaaaatgttaaaagcagtgggaaacaaggaaagatgcatggaatggggaaatctaacatcaagaaatctaaggagacgcagtctacattacatttctttttcgatgagaaatag

SEQ ID NO: 70403 - protein, 517 aa, Arabidopsis thaliana
  peptide (1)..(517): Ceres Seq. ID no. 2706443
MCGRTRCTLRPDDVPRASHRHTVPTRFLHLDRFISLFSLINFKFQFLTFAKSKTVPFCCQISYRPSYNVAPGSYIPVLRRDNEEVVGDGVVVHCMKWGLVPSFTKKTDKPDFFKMFNARSESVAEKASFRRLLPKNRCLVAVDGFYEWKKEGSKKQPYYIHFEDGRPLVFAALFDTWQNSGGETLYTFTILTTASSSALQWLHDRMPVILGDKDSIDTWLDDPSTTKLQPLLSPYEKSDLVWYPVTSAIGKPTFDGPECIQQIPLKTSQNSLISKFFSTKQPKTDEGDKETKSTDANIIVDLKKEPTAEKDTFSDSIKKIEELDGEKDMSNVAKNLEFQEIVKAEPFVEDNSAVASLPEPVKNDVQEGTKEEGKSLKTGLTKETGESSASIPAESYILDLQRISKEEPETQSHHFFTADERLNQLHEAVEDIPGNENQKTVLTSPTTKEGGLVFSEKSGTKRDYEVFSAQEKPQKHYERLQNVKSSGKQGKMHGMGKSNIKKSKETQSTLHFFFDEK

SEQ ID NO: 70404 - protein, 423 aa, Arabidopsis thaliana
  peptide (1)..(423): Ceres Seq. ID no. 2706444
MKWGLVPSFTKKTDKPDFFKMFNARSESVAEKASFRRLLPKNRCLVAVDGFYEWKKEGSKKQPYYIHFEDGRPLVFAALFDTWQNSGGETLYTFTILTTASSSALQWLHDRMPVILGDKDSIDTWLDDPSTTKLQPLLSPYEKSDLVWYPVTSAIGKPTFDGPECIQQIPLKTSQNSLISKFFSTKQPKTDEGDKETKSTDANIIVDLKKEPTAEKDTFSDSIKKIEELDGEKDMSNVAKNLEFQEIVKAEPFVEDNSAVASLPEPVKNDVQEGTKEEGKSLKTGLTKETGESSASIPAESYILDLQRISKEEPETQSHHFFTADERLNQLHEAVEDIPGNENQKTVLTSPTTKEGGLVFSEKSGTKRDYEVFSAQEKPQKHYERLQNVKSSGKQGKMHGMGKSNIKKSKETQSTLHFFFDEK

SEQ ID NO: 70405 - protein, 403 aa, Arabidopsis thaliana
  peptide (1)..(403): Ceres Seq. ID no. 2706445
MFNARSESVAEKASFRRLLPKNRCLVAVDGFYEWKKEGSKKQPYYIHFEDGRPLVFAALFDTWQNSGGETLYTFTILTTASSSALQWLHDRMPVILGDKDSIDTWLDDPSTTKLQPLLSPYEKSDLVWYPVTSAIGKPTFDGPECIQQIPLKTSQNSLISKFFSTKQPKTDEGDKETKSTDANIIVDLKKEPTAEKDTFSDSIKKIEELDGEKDMSNVAKNLEFQEIVKAEPFVEDNSAVASLPEPVKNDVQEGTKEEGKSLKTGLTKETGESSASIPAESYILDLQRISKEEPETQSHHFFTADERLNQLHEAVEDIPGNENQKTVLTSPTTKEGGLVFSEKSGTKRDYEVFSAQEKPQKHYERLQNVKSSGKQGKMHGMGKSNIKKSKETQSTLHFFFDEK

SEQ ID NO: 70406 - DNA, 1758 bp, Arabidopsis thaliana
  misc_feature (1)..(1758): Ceres Seq. ID no. 2706446
  misc_feature (1)..(1758): Ortholog of  Ceres SEQ ID NO 13658720 as cited in SEQ ID NO 66306
atgaaaccttcaaaatcgcatcacaaggagaaaaccgctcgtcggagagaggagaaactagaggaatccgataatccaaaatacagagatcgtgctaaagaaagaagagagaatcaaaatcctgattatgatccatcagagcttagttctttccatgccgttgctcctcccggagctgtcgatatccgtgctgctgatgcacttaagatatctattgagaacagcaaatatcttggaggtgatgttgaacatacccatttagttaagggtttggattatgctttgttgaataaagtacgaagcgaaatcgttaagaaacctgatggtgaagatggtgatggtgggaagactagtgcgcctaaggaagatcagcgagttactttccgtaccatagctgcaaagtcagtttaccagtggattgttaagcctcagactatcatcaagtctaatgagatgtttcttcccggtagaatgacatttgtctatgatatggaaggtggctatacccatgacataccgaccacgttatataggagtaaagctgactgcccggtgcccgaggaatttgtcacagtcaatgttgatggttctgtgctagatcgaattgctaaaatcatgtcatatcttcgccttgggtcgtcggggaaagttctcaagaagaaaaagaaagaaaaagatgggaaaggaaagatgtcaactattgctaatgattatgatgaagacgacaataaatctaagattgagaatggatcttctgtgaacataagtgacagggaagttttacctcctcctccgccattaccacctgggataaaccatctggatttgagtacgaaacaagaagaaccccctgttgccaggacagacgatgatgacatatttgttggtgaaggcgtcgattacacggttcctggtaaagatgtgacacagagtcctatttctgaggacatggaagaatctcccagggataaggagaaagtatcttatttcgatgagcctgcttatggtccagtgcaggagaaggtaccttatttcgctgagcctgcttatggtccagtgcagccatctgctggtcaggaatggcaagatatgagtgcatatggtgcaatgcaaactcaaggactggctcctgggtaccccggagagtggcaggaataccaatatgcagagcaaactgggtatcaggagcagtaccttcaacctggaatggagggttacgaggtccaaccagaaaccgatgttttactagatcctcaactcatgtcgcaggaagagaaagataggggtttgggatcggttttcaagcgtgatgaccaaaggcttcaacagttgagggagagtgacgcaagggagaaagatccaacttttgtatccgagagttattcagagtgttatccaggttaccaagagtacaaccatgagattgtcggtagtgatgaagaacctgatttgtctaaaatggacatgggtggaaaggcaaagggtggtttacatcgatgggactttgagacagaagaggaatgggaaaaatataatgagcagaaggaagcgatgccaaaagcggcgttccaattcggggtaaagatgcaagatggtcgaaagacaaggaagcagaaccgtgaccgtgaccagaagctcaataatgaacttcaccagatcaataagatacttacgagaaagaagatggagaaggagggtggggatgttgcttctttggatgccgccgaggcacaaactcctaagagatccaagcattga

SEQ ID NO: 70407 - protein, 585 aa, Arabidopsis thaliana
  peptide (1)..(585): Ceres Seq. ID no. 2706447
MKPSKSHHKEKTARRREEKLEESDNPKYRDRAKERRENQNPDYDPSELSSFHAVAPPGAVDIRAADALKISIENSKYLGGDVEHTHLVKGLDYALLNKVRSEIVKKPDGEDGDGGKTSAPKEDQRVTFRTIAAKSVYQWIVKPQTIIKSNEMFLPGRMTFVYDMEGGYTHDIPTTLYRSKADCPVPEEFVTVNVDGSVLDRIAKIMSYLRLGSSGKVLKKKKKEKDGKGKMSTIANDYDEDDNKSKIENGSSVNISDREVLPPPPPLPPGINHLDLSTKQEEPPVARTDDDDIFVGEGVDYTVPGKDVTQSPISEDMEESPRDKEKVSYFDEPAYGPVQEKVPYFAEPAYGPVQPSAGQEWQDMSAYGAMQTQGLAPGYPGEWQEYQYAEQTGYQEQYLQPGMEGYEVQPETDVLLDPQLMSQEEKDRGLGSVFKRDDQRLQQLRESDAREKDPTFVSESYSECYPGYQEYNHEIVGSDEEPDLSKMDMGGKAKGGLHRWDFETEEEWEKYNEQKEAMPKAAFQFGVKMQDGRKTRKQNRDRDQKLNNELHQINKILTRKKMEKEGGDVASLDAAEAQTPKRSKH

SEQ ID NO: 70408 - protein, 434 aa, Arabidopsis thaliana
  peptide (1)..(434): Ceres Seq. ID no. 2706448
MFLPGRMTFVYDMEGGYTHDIPTTLYRSKADCPVPEEFVTVNVDGSVLDRIAKIMSYLRLGSSGKVLKKKKKEKDGKGKMSTIANDYDEDDNKSKIENGSSVNISDREVLPPPPPLPPGINHLDLSTKQEEPPVARTDDDDIFVGEGVDYTVPGKDVTQSPISEDMEESPRDKEKVSYFDEPAYGPVQEKVPYFAEPAYGPVQPSAGQEWQDMSAYGAMQTQGLAPGYPGEWQEYQYAEQTGYQEQYLQPGMEGYEVQPETDVLLDPQLMSQEEKDRGLGSVFKRDDQRLQQLRESDAREKDPTFVSESYSECYPGYQEYNHEIVGSDEEPDLSKMDMGGKAKGGLHRWDFETEEEWEKYNEQKEAMPKAAFQFGVKMQDGRKTRKQNRDRDQKLNNELHQINKILTRKKMEKEGGDVASLDAAEAQTPKRSKH

SEQ ID NO: 70409 - protein, 428 aa, Arabidopsis thaliana
  peptide (1)..(428): Ceres Seq. ID no. 2706449
MTFVYDMEGGYTHDIPTTLYRSKADCPVPEEFVTVNVDGSVLDRIAKIMSYLRLGSSGKVLKKKKKEKDGKGKMSTIANDYDEDDNKSKIENGSSVNISDREVLPPPPPLPPGINHLDLSTKQEEPPVARTDDDDIFVGEGVDYTVPGKDVTQSPISEDMEESPRDKEKVSYFDEPAYGPVQEKVPYFAEPAYGPVQPSAGQEWQDMSAYGAMQTQGLAPGYPGEWQEYQYAEQTGYQEQYLQPGMEGYEVQPETDVLLDPQLMSQEEKDRGLGSVFKRDDQRLQQLRESDAREKDPTFVSESYSECYPGYQEYNHEIVGSDEEPDLSKMDMGGKAKGGLHRWDFETEEEWEKYNEQKEAMPKAAFQFGVKMQDGRKTRKQNRDRDQKLNNELHQINKILTRKKMEKEGGDVASLDAAEAQTPKRSKH

SEQ ID NO: 70410 - DNA, 1521 bp, Arabidopsis thaliana
  misc_feature (1)..(1521): Ceres Seq. ID no. 2706628
  misc_feature (1)..(1521): Ortholog of  Ceres SEQ ID NO 15171693 as cited in SEQ ID NO 60124
atgttcatcctcagagttcattccgttgactccgagagaccaatctccgttgaagaagaagaatcaggtttcacttacgcatcgaaaagagctcagcctcctcttaaactcatacaaccatctctcaaactcaccgaccgcaaaggcttgatccatctctatcgcaaatcttcacatagctctctgcctaaccctagctcccgatccaccactctcttcatcgtcgctgttcccaattatctctcctctctcgattttatccgtttctgtgattcccgcatctcccaagtctccgacatcctcttcatcaggaacgatggaatggaagatagatatagtgttcttatcacattttctgatcaatccgaagctgatggtttctacaacaacttgaatgggaaaaagttcgcaccatctgaggctgaggtttgtcatattctatatgtaatgtcggtggaacacacagaatttgatgaggttgctgcagaagcacctactggatttaccgagttacctacgtgtccaatatgtcttgagagattagatcctgacaccagtggtatagttagcactctttgtgatcactcgtttcagtgttcttgcacttcgaaatggacttatctgtcttgtcaggtttgtcgattgtgtcaacagcaagatgagatattaaactgttctatttgtggaaaaactgagaatgtatgggcatgccttgtctgtggcttcgtaggttgtggaagatacaaggaagggcattctattaggcactggaaagaaacgcatcactgctattctcttgatttgcgaacacaacaaatctgggattatgttggtgacagctatgttcatcggttaaaccattcaaaaattgatggaaagtcagtagagatgagcaccagttgtctgtcacaccagggggactgtggcctctgtgagtgtagtgaggatacaggaattagcggagctatctttaacagcaaagttgattcaaatatgaatcttagatcatcagtttgcctcagtggttttatttttgtggaacagattgtaatcgagtataatgaccttcttgcaagtcaactaaagggacagcgacagtactatgaatctctcattgttgaggcgagaagcaagcaagaaagtagtattgccgaagcagtagagcaaattgttgttaacacaatgcaggagcttcagaataagattgaaaaatgtgaagaggaaaaaagtggtatcactgaagttaacacaaaacttataaaagagcaggatacttggcggaagaaggccaaagaaatagaagagagggaagctgcattgctaggatcaaaagacgagatgataactgatcttcaagaacagataagagatattacggtcttcattgaagccaagaaaaccttaaagaagatgtcatcagatacggatggtatacgcgaaggaaccgtcttaccagtgcctatcagtcccgagccagtttcctcagttagaaggcaaaagaagtcaaaccggagaaagtaa

SEQ ID NO: 70411 - protein, 506 aa, Arabidopsis thaliana
  peptide (1)..(506): Ceres Seq. ID no. 2706629
MFILRVHSVDSERPISVEEEESGFTYASKRAQPPLKLIQPSLKLTDRKGLIHLYRKSSHSSLPNPSSRSTTLFIVAVPNYLSSLDFIRFCDSRISQVSDILFIRNDGMEDRYSVLITFSDQSEADGFYNNLNGKKFAPSEAEVCHILYVMSVEHTEFDEVAAEAPTGFTELPTCPICLERLDPDTSGIVSTLCDHSFQCSCTSKWTYLSCQVCRLCQQQDEILNCSICGKTENVWACLVCGFVGCGRYKEGHSIRHWKETHHCYSLDLRTQQIWDYVGDSYVHRLNHSKIDGKSVEMSTSCLSHQGDCGLCECSEDTGISGAIFNSKVDSNMNLRSSVCLSGFIFVEQIVIEYNDLLASQLKGQRQYYESLIVEARSKQESSIAEAVEQIVVNTMQELQNKIEKCEEEKSGITEVNTKLIKEQDTWRKKAKEIEEREAALLGSKDEMITDLQEQIRDITVFIEAKKTLKKMSSDTDGIREGTVLPVPISPEPVSSVRRQKKSNRRK

SEQ ID NO: 70412 - protein, 399 aa, Arabidopsis thaliana
  peptide (1)..(399): Ceres Seq. ID no. 2706630
MEDRYSVLITFSDQSEADGFYNNLNGKKFAPSEAEVCHILYVMSVEHTEFDEVAAEAPTGFTELPTCPICLERLDPDTSGIVSTLCDHSFQCSCTSKWTYLSCQVCRLCQQQDEILNCSICGKTENVWACLVCGFVGCGRYKEGHSIRHWKETHHCYSLDLRTQQIWDYVGDSYVHRLNHSKIDGKSVEMSTSCLSHQGDCGLCECSEDTGISGAIFNSKVDSNMNLRSSVCLSGFIFVEQIVIEYNDLLASQLKGQRQYYESLIVEARSKQESSIAEAVEQIVVNTMQELQNKIEKCEEEKSGITEVNTKLIKEQDTWRKKAKEIEEREAALLGSKDEMITDLQEQIRDITVFIEAKKTLKKMSSDTDGIREGTVLPVPISPEPVSSVRRQKKSNRRK

SEQ ID NO: 70413 - protein, 357 aa, Arabidopsis thaliana
  peptide (1)..(357): Ceres Seq. ID no. 2706631
MSVEHTEFDEVAAEAPTGFTELPTCPICLERLDPDTSGIVSTLCDHSFQCSCTSKWTYLSCQVCRLCQQQDEILNCSICGKTENVWACLVCGFVGCGRYKEGHSIRHWKETHHCYSLDLRTQQIWDYVGDSYVHRLNHSKIDGKSVEMSTSCLSHQGDCGLCECSEDTGISGAIFNSKVDSNMNLRSSVCLSGFIFVEQIVIEYNDLLASQLKGQRQYYESLIVEARSKQESSIAEAVEQIVVNTMQELQNKIEKCEEEKSGITEVNTKLIKEQDTWRKKAKEIEEREAALLGSKDEMITDLQEQIRDITVFIEAKKTLKKMSSDTDGIREGTVLPVPISPEPVSSVRRQKKSNRRK

SEQ ID NO: 70414 - DNA, 1305 bp, Arabidopsis thaliana
  misc_feature (1)..(1305): Ceres Seq. ID no. 2706655
  misc_feature (1)..(1305): Ortholog of  Ceres SEQ ID NO 13646221 as cited in SEQ ID NO 20310
  misc_feature (1)..(1305): Ortholog of  Ceres SEQ ID NO 14315261 as cited in SEQ ID NO 58451
atggattcttcttcctcttcctcttcttcttctccttcttcttcctacggtgttgctcgtgtcagccatatctccaatccttgcatcttcggggaagttgggtcgtcatcttcgtcaacgtatagagataagaaatggaagttgatgaaatgggtgagtaaacttttcaagagtggctcgaatggtggtggtagtggtgctcacactaatcatcatcctcctcagtttcaagaagacgagaatatggtctttcctctacctccttcttctttggatgatcggtcaagaggtgcacgggacaaagaagaactcgaccgttcaatttcactttctctagctgacaacacgaagcgcccacatgggtatggttggtctatggataacaaccgagattttccaaggccttttcacggtggcttgaatccatcatctttcattccaccttatgagccttcctatcaatatagacgaagacaaagaatatgtggcggttgcaatagcgatattggatcggggaactatctaggatgcatgggcacattctttcatcctgaatgcttccgttgccattcttgtggttatgctatcactgagcatgagataccaactaatgatgctggcttgatcgagtatcgatgccatccgttttggaaccaaaagtattgcccgtctcacgaatatgataaaactgctcgttgttgtagctgcgaacgtttggagtcatgggatgtgagatattacacgttagaggatgggagaagtttgtgtttagaatgtatggaaaccgcgataaccgatactggagaatgtcaaccgctttaccacgctataagagactattacgaaggaatgtacatgaaacttgatcaacagattcctatgcttcttgttcaaagagaagctctcaatgatgctatcgtaggagagaaaaacgttcttagaagaccgagacttggtgctcaccgtcttgttgggtttaggaaccttaaccctgaggtagaggaaggaatctgccaagtcctctcttacatgtggcttgaatctgaagttctctcagatccttcaacaagaaacttgccttcaacatcatcggtggccacatcatcatcatcatccttctcgaacaagaaaggaggaaaatcaaacgtggagaagaaacttggagagttctttaaacatcagatagctcatgatgcgtctccagcttatggaggaggtttcagggcagcaaatgcagcggcttgtaagtacggtcttcgtcgaacactcgatcatatccgcttaactggaacttttcctttgtga

SEQ ID NO: 70415 - protein, 434 aa, Arabidopsis thaliana
  peptide (1)..(434): Ceres Seq. ID no. 2706656
MDSSSSSSSSSPSSSYGVARVSHISNPCIFGEVGSSSSSTYRDKKWKLMKWVSKLFKSGSNGGGSGAHTNHHPPQFQEDENMVFPLPPSSLDDRSRGARDKEELDRSISLSLADNTKRPHGYGWSMDNNRDFPRPFHGGLNPSSFIPPYEPSYQYRRRQRICGGCNSDIGSGNYLGCMGTFFHPECFRCHSCGYAITEHEIPTNDAGLIEYRCHPFWNQKYCPSHEYDKTARCCSCERLESWDVRYYTLEDGRSLCLECMETAITDTGECQPLYHAIRDYYEGMYMKLDQQIPMLLVQREALNDAIVGEKNVLRRPRLGAHRLVGFRNLNPEVEEGICQVLSYMWLESEVLSDPSTRNLPSTSSVATSSSSSFSNKKGGKSNVEKKLGEFFKHQIAHDASPAYGGGFRAANAAACKYGLRRTLDHIRLTGTFPL

SEQ ID NO: 70416 - protein, 386 aa, Arabidopsis thaliana
  peptide (1)..(386): Ceres Seq. ID no. 2706657
MKWVSKLFKSGSNGGGSGAHTNHHPPQFQEDENMVFPLPPSSLDDRSRGARDKEELDRSISLSLADNTKRPHGYGWSMDNNRDFPRPFHGGLNPSSFIPPYEPSYQYRRRQRICGGCNSDIGSGNYLGCMGTFFHPECFRCHSCGYAITEHEIPTNDAGLIEYRCHPFWNQKYCPSHEYDKTARCCSCERLESWDVRYYTLEDGRSLCLECMETAITDTGECQPLYHAIRDYYEGMYMKLDQQIPMLLVQREALNDAIVGEKNVLRRPRLGAHRLVGFRNLNPEVEEGICQVLSYMWLESEVLSDPSTRNLPSTSSVATSSSSSFSNKKGGKSNVEKKLGEFFKHQIAHDASPAYGGGFRAANAAACKYGLRRTLDHIRLTGTFPL

SEQ ID NO: 70417 - protein, 353 aa, Arabidopsis thaliana
  peptide (1)..(353): Ceres Seq. ID no. 2706658
MVFPLPPSSLDDRSRGARDKEELDRSISLSLADNTKRPHGYGWSMDNNRDFPRPFHGGLNPSSFIPPYEPSYQYRRRQRICGGCNSDIGSGNYLGCMGTFFHPECFRCHSCGYAITEHEIPTNDAGLIEYRCHPFWNQKYCPSHEYDKTARCCSCERLESWDVRYYTLEDGRSLCLECMETAITDTGECQPLYHAIRDYYEGMYMKLDQQIPMLLVQREALNDAIVGEKNVLRRPRLGAHRLVGFRNLNPEVEEGICQVLSYMWLESEVLSDPSTRNLPSTSSVATSSSSSFSNKKGGKSNVEKKLGEFFKHQIAHDASPAYGGGFRAANAAACKYGLRRTLDHIRLTGTFPL

SEQ ID NO: 70418 - DNA, 1566 bp, Arabidopsis thaliana
  misc_feature (1)..(1566): Ceres Seq. ID no. 2706693
  misc_feature (1)..(1566): Ortholog of  Ceres SEQ ID NO 12613725 as cited in SEQ ID NO 68196
atgtcagttctgtcatgggcttttaccgttgcgtggtttaccctctggatgttgatgctatacttgacgaacgagatgaagctaaagttcacagacgcagctgcgattgtaaatgtgtttgctggtgtatcagctattggtcatcttggcatgcaatttcttgttgatgcatttattggtcacttttggatgctctgtctctctactttagcattcagtttcggtttcgggttcttggcaatatcagcgtcaccaatactttcaggcaatggacaaaagggcctgttctacgtagcgctaacggttatatccgttggtatatttggacggtctatctctttgggagtatttacagaagaccaactagaagacggtaggaacaagggaaaccccgccaagctcgttagctttgtcattggaaatgtggggaattttgtgttcttgttacttgctgctattgcaatgcctcagataagtccgtggtttgttaggttcacgatcccctcgggctgtgaggtattagcaatgctgatttttatttccggtgcgtgttcatacaaacgggttaaaccaggtgggagccctttgacaacggttttccgggtctttatggcttctgcttccaaaatgtcttgtgcatactcgaacaactcaagccagctctatgaaaaagctgagtgtgatcaagatattaagccccacacaagcagcttaaggtatctagatagagctgcaatgatactccaaacagagtctttggaacaacagaggaaaaacagatggaagctttgtcgggtgacagaagtggagcaaacgaaaagcgtcatacgcacggttcctttgtttgcgacatctctcatttcggggattgtcttctctcttggtaatactttcttccttgaacaagcaaaccatatggactccaagttcggatcatggaaccttcctctcccactcctcttactctttagtgaagctgcaaggctaggatcccgagaactatgtgtcatggctgcaaaacgccatgccattgacttccctgaatcacctaaacaaaccaaaacgccttatggtataccagtctccatcatcctatcgatattttgctgctccatcgctgcacatgttgagtctaggaggctcaaagtagttagtactcaaggtttactacatgaaactgtccccatgagtgtattctggctgctcccacagtacattctactcggttcaatcacaggaatctacgaaaacagctttgcgctttacctagaagaaacggtgcctgaagagttgagccaatacatggttctattaaacgtgggagtgtgcggggtcgggatcatgagcaacattgctcttgttagtttggtgggcagtgtaagcggaggcaaatggtttcaagacacaataaacaagagccgggtggataactattattgggttataacagtgttttgcatgttcaatctcttgttatatttcattgtaacctataggtacacagtgtgtaacaagaaagatggtgcaacacaagaaaatgatcgaaggataatcgcttctgtgtag

SEQ ID NO: 70419 - protein, 521 aa, Arabidopsis thaliana
  peptide (1)..(521): Ceres Seq. ID no. 2706694
MSVLSWAFTVAWFTLWMLMLYLTNEMKLKFTDAAAIVNVFAGVSAIGHLGMQFLVDAFIGHFWMLCLSTLAFSFGFGFLAISASPILSGNGQKGLFYVALTVISVGIFGRSISLGVFTEDQLEDGRNKGNPAKLVSFVIGNVGNFVFLLLAAIAMPQISPWFVRFTIPSGCEVLAMLIFISGACSYKRVKPGGSPLTTVFRVFMASASKMSCAYSNNSSQLYEKAECDQDIKPHTSSLRYLDRAAMILQTESLEQQRKNRWKLCRVTEVEQTKSVIRTVPLFATSLISGIVFSLGNTFFLEQANHMDSKFGSWNLPLPLLLLFSEAARLGSRELCVMAAKRHAIDFPESPKQTKTPYGIPVSIILSIFCCSIAAHVESRRLKVVSTQGLLHETVPMSVFWLLPQYILLGSITGIYENSFALYLEETVPEELSQYMVLLNVGVCGVGIMSNIALVSLVGSVSGGKWFQDTINKSRVDNYYWVITVFCMFNLLLYFIVTYRYTVCNKKDGATQENDRRIIASV

SEQ ID NO: 70420 - protein, 505 aa, Arabidopsis thaliana
  peptide (1)..(505): Ceres Seq. ID no. 2706695
MLMLYLTNEMKLKFTDAAAIVNVFAGVSAIGHLGMQFLVDAFIGHFWMLCLSTLAFSFGFGFLAISASPILSGNGQKGLFYVALTVISVGIFGRSISLGVFTEDQLEDGRNKGNPAKLVSFVIGNVGNFVFLLLAAIAMPQISPWFVRFTIPSGCEVLAMLIFISGACSYKRVKPGGSPLTTVFRVFMASASKMSCAYSNNSSQLYEKAECDQDIKPHTSSLRYLDRAAMILQTESLEQQRKNRWKLCRVTEVEQTKSVIRTVPLFATSLISGIVFSLGNTFFLEQANHMDSKFGSWNLPLPLLLLFSEAARLGSRELCVMAAKRHAIDFPESPKQTKTPYGIPVSIILSIFCCSIAAHVESRRLKVVSTQGLLHETVPMSVFWLLPQYILLGSITGIYENSFALYLEETVPEELSQYMVLLNVGVCGVGIMSNIALVSLVGSVSGGKWFQDTINKSRVDNYYWVITVFCMFNLLLYFIVTYRYTVCNKKDGATQENDRRIIASV

SEQ ID NO: 70421 - protein, 503 aa, Arabidopsis thaliana
  peptide (1)..(503): Ceres Seq. ID no. 2706696
MLYLTNEMKLKFTDAAAIVNVFAGVSAIGHLGMQFLVDAFIGHFWMLCLSTLAFSFGFGFLAISASPILSGNGQKGLFYVALTVISVGIFGRSISLGVFTEDQLEDGRNKGNPAKLVSFVIGNVGNFVFLLLAAIAMPQISPWFVRFTIPSGCEVLAMLIFISGACSYKRVKPGGSPLTTVFRVFMASASKMSCAYSNNSSQLYEKAECDQDIKPHTSSLRYLDRAAMILQTESLEQQRKNRWKLCRVTEVEQTKSVIRTVPLFATSLISGIVFSLGNTFFLEQANHMDSKFGSWNLPLPLLLLFSEAARLGSRELCVMAAKRHAIDFPESPKQTKTPYGIPVSIILSIFCCSIAAHVESRRLKVVSTQGLLHETVPMSVFWLLPQYILLGSITGIYENSFALYLEETVPEELSQYMVLLNVGVCGVGIMSNIALVSLVGSVSGGKWFQDTINKSRVDNYYWVITVFCMFNLLLYFIVTYRYTVCNKKDGATQENDRRIIASV

SEQ ID NO: 70422 - DNA, 657 bp, Arabidopsis thaliana
  misc_feature (1)..(657): Ceres Seq. ID no. 2706745
  misc_feature (1)..(657): Ortholog of  Ceres SEQ ID NO 14316436 as cited in SEQ ID NO 59213
atgagcatgaaccagtttaggactatggaggaggagaagcaagacggtggtgagcttttccataccatcgaggtagctaaagttgaccggaacaacgtgtctcagccgccgccggctgctactgcagcactgctagaagttcccggtgatgaacttaacctaattccaccgttgaacttttcgatggtcgataatggtatattccggtctggattcccggactcggcgaacttctccttcatcaagactcttggccttcgctcaatcatatctttgtgtccagagccatatcctgagaacaacatgcagttcctcaaatccaatggaattagtctttttcagtttggcattgaaggctctaagtccaaggagccatttgtagatatcctagatcagaaaatccgtgaagcactcaaagtccttctcgatgagaagaaccatccacttttgattcattgcaaacgaggcaagcacagaaccgggtgtcttgttgggtgcatgaggaaactccagaaatggtgcataacatcgatactcgatgagtataagcgatttgcagcggctaaagctagagtttcggatcaaaggttcttggagtcattcgatgtatcaggcttgaagcacactccaatgtctttttcttgctccaataggtaa

SEQ ID NO: 70423 - protein, 218 aa, Arabidopsis thaliana
  peptide (1)..(218): Ceres Seq. ID no. 2706746
MSMNQFRTMEEEKQDGGELFHTIEVAKVDRNNVSQPPPAATAALLEVPGDELNLIPPLNFSMVDNGIFRSGFPDSANFSFIKTLGLRSIISLCPEPYPENNMQFLKSNGISLFQFGIEGSKSKEPFVDILDQKIREALKVLLDEKNHPLLIHCKRGKHRTGCLVGCMRKLQKWCITSILDEYKRFAAAKARVSDQRFLESFDVSGLKHTPMSFSCSNR

SEQ ID NO: 70424 - protein, 216 aa, Arabidopsis thaliana
  peptide (1)..(216): Ceres Seq. ID no. 2706747
MNQFRTMEEEKQDGGELFHTIEVAKVDRNNVSQPPPAATAALLEVPGDELNLIPPLNFSMVDNGIFRSGFPDSANFSFIKTLGLRSIISLCPEPYPENNMQFLKSNGISLFQFGIEGSKSKEPFVDILDQKIREALKVLLDEKNHPLLIHCKRGKHRTGCLVGCMRKLQKWCITSILDEYKRFAAAKARVSDQRFLESFDVSGLKHTPMSFSCSNR

SEQ ID NO: 70425 - protein, 210 aa, Arabidopsis thaliana
  peptide (1)..(210): Ceres Seq. ID no. 2706748
MEEEKQDGGELFHTIEVAKVDRNNVSQPPPAATAALLEVPGDELNLIPPLNFSMVDNGIFRSGFPDSANFSFIKTLGLRSIISLCPEPYPENNMQFLKSNGISLFQFGIEGSKSKEPFVDILDQKIREALKVLLDEKNHPLLIHCKRGKHRTGCLVGCMRKLQKWCITSILDEYKRFAAAKARVSDQRFLESFDVSGLKHTPMSFSCSNR

SEQ ID NO: 70426 - DNA, 792 bp, Arabidopsis thaliana
  misc_feature (1)..(792): Ceres Seq. ID no. 2706787
  misc_feature (1)..(792): Ortholog of  Ceres SEQ ID NO 13638849 as cited in SEQ ID NO 52046
  misc_feature (1)..(792): Ortholog of  Ceres SEQ ID NO 13599613 as cited in SEQ ID NO 0
atggagaagaacaacaagaagcggtttgtcctcgtccatgggctgtgccacggcgcttggtgttggtacaaggtgaaaacgcatctggaggctgtaggtcactgtgtgaccgcggtggatctagctgcatccggtataaatatgactagattggaagagattcagactttgaaggattactgcaaacctttgcttgagttactgaactcacttggctcggatgacgataaggtgattcttgttgcgcatagtatgggaggaatacctgctgctctcgcttctgacatattccctagtaagattgctactattgttttcttgacagcttttatgcccgacacaagaaacctacctgcttatgtttaccaaaagctaatcagaagcgttccacaagaaggatggttggacaccgtgtttggaacgtatgggaaacatgaatgtcctctagagtttgctctttttggaccaaagttcatggccaagaatttgtatcaactctctccggtccaagatcttgaattggcgaaaatgttggtgagagtaaaccccatcattacaaataatctggcagggacaagaagctttagtgaggaagggtacggtaccgttacacgtatatatattgtatgtggagaggacatggcggtacccgaggattaccagtggtggatgatcaagaactttccgccaaaagaagtaatggagatcaaatgtgcagatcatatggcaatgttctccaagcctcacaaactatgtgctcttctcgtggagattgcatgtaaatatgcctaa

SEQ ID NO: 70427 - protein, 263 aa, Arabidopsis thaliana
  peptide (1)..(263): Ceres Seq. ID no. 2706788
MEKNNKKRFVLVHGLCHGAWCWYKVKTHLEAVGHCVTAVDLAASGINMTRLEEIQTLKDYCKPLLELLNSLGSDDDKVILVAHSMGGIPAALASDIFPSKIATIVFLTAFMPDTRNLPAYVYQKLIRSVPQEGWLDTVFGTYGKHECPLEFALFGPKFMAKNLYQLSPVQDLELAKMLVRVNPIITNNLAGTRSFSEEGYGTVTRIYIVCGEDMAVPEDYQWWMIKNFPPKEVMEIKCADHMAMFSKPHKLCALLVEIACKYA

SEQ ID NO: 70428 - protein, 216 aa, Arabidopsis thaliana
  peptide (1)..(216): Ceres Seq. ID no. 2706789
MTRLEEIQTLKDYCKPLLELLNSLGSDDDKVILVAHSMGGIPAALASDIFPSKIATIVFLTAFMPDTRNLPAYVYQKLIRSVPQEGWLDTVFGTYGKHECPLEFALFGPKFMAKNLYQLSPVQDLELAKMLVRVNPIITNNLAGTRSFSEEGYGTVTRIYIVCGEDMAVPEDYQWWMIKNFPPKEVMEIKCADHMAMFSKPHKLCALLVEIACKYA

SEQ ID NO: 70429 - protein, 179 aa, Arabidopsis thaliana
  peptide (1)..(179): Ceres Seq. ID no. 2706790
MGGIPAALASDIFPSKIATIVFLTAFMPDTRNLPAYVYQKLIRSVPQEGWLDTVFGTYGKHECPLEFALFGPKFMAKNLYQLSPVQDLELAKMLVRVNPIITNNLAGTRSFSEEGYGTVTRIYIVCGEDMAVPEDYQWWMIKNFPPKEVMEIKCADHMAMFSKPHKLCALLVEIACKYA

SEQ ID NO: 70430 - DNA, 783 bp, Arabidopsis thaliana
  misc_feature (1)..(783): Ceres Seq. ID no. 2706791
  misc_feature (1)..(783): Ortholog of  Ceres SEQ ID NO 13638849 as cited in SEQ ID NO 52046
  misc_feature (1)..(783): Ortholog of  Ceres SEQ ID NO 13599613 as cited in SEQ ID NO 0
atggataagaataaccagaagaagtttgtgcttgtacatggaatctgccatggagcttggtgttggtacaaggtgaaagcccagctggaggctgctggtcattctgtgaccgcagttgatctagctgcatctggtgtaaacatgactagcctggatgagattcagactttgaaggattactgcaaaccgctgctcgagtttctgagctcacttggctcggatgacgataaggtgattcttgttgctcatagcatgggaggaatatcagcttcacttgctgctgatatcttccctagtaaagttgctgctattgtctttgtggcagcttttatgcccgacataagcaacccgcctgcttacgttttccaaaagctggtcaaagacgttacacaagaggtatggatggatactgtgtttgggaaacctgatcgtcctctagagtttgctctttttggaccagagttcatggccaagtatttgtataacctatctcccctccaagattttgaattggcgaaaatgtcggtgagggtaagcccgttcatgacaaacaacctggcagggacaataagcttcagtgaggacaggtacggatccgttacacgtatatatatcgtatgcggagaggacgttgcggtacctgtggattaccagcgtgggatgatcaatgacttcccggtgaaggaagtactggagatcaaagatgcagatcatatgccaatgttctctaagcctcaagaactctgtgctcttctcttggagattgcagataaatacgcctaa

SEQ ID NO: 70431 - protein, 260 aa, Arabidopsis thaliana
  peptide (1)..(260): Ceres Seq. ID no. 2706792
MDKNNQKKFVLVHGICHGAWCWYKVKAQLEAAGHSVTAVDLAASGVNMTSLDEIQTLKDYCKPLLEFLSSLGSDDDKVILVAHSMGGISASLAADIFPSKVAAIVFVAAFMPDISNPPAYVFQKLVKDVTQEVWMDTVFGKPDRPLEFALFGPEFMAKYLYNLSPLQDFELAKMSVRVSPFMTNNLAGTISFSEDRYGSVTRIYIVCGEDVAVPVDYQRGMINDFPVKEVLEIKDADHMPMFSKPQELCALLLEIADKYA

SEQ ID NO: 70432 - protein, 213 aa, Arabidopsis thaliana
  peptide (1)..(213): Ceres Seq. ID no. 2706793
MTSLDEIQTLKDYCKPLLEFLSSLGSDDDKVILVAHSMGGISASLAADIFPSKVAAIVFVAAFMPDISNPPAYVFQKLVKDVTQEVWMDTVFGKPDRPLEFALFGPEFMAKYLYNLSPLQDFELAKMSVRVSPFMTNNLAGTISFSEDRYGSVTRIYIVCGEDVAVPVDYQRGMINDFPVKEVLEIKDADHMPMFSKPQELCALLLEIADKYA

SEQ ID NO: 70433 - protein, 176 aa, Arabidopsis thaliana
  peptide (1)..(176): Ceres Seq. ID no. 2706794
MGGISASLAADIFPSKVAAIVFVAAFMPDISNPPAYVFQKLVKDVTQEVWMDTVFGKPDRPLEFALFGPEFMAKYLYNLSPLQDFELAKMSVRVSPFMTNNLAGTISFSEDRYGSVTRIYIVCGEDVAVPVDYQRGMINDFPVKEVLEIKDADHMPMFSKPQELCALLLEIADKYA

SEQ ID NO: 70434 - DNA, 1668 bp, Arabidopsis thaliana
  misc_feature (1)..(1668): Ceres Seq. ID no. 2706830
  misc_feature (1)..(1668): Ortholog of  Ceres SEQ ID NO 15171144 as cited in SEQ ID NO 60227
atgagaactgaagcacaagattcagtacctaaatcaaaccctaatccggaactaatcaaagaaaccccaaaggtctctctttacgaacaatgcagggaagagaggatcaaagagaatcttcagaggatgaacaatctgggtctcttaaatctctctcgcaaactcaaacccaagacccgacccgttaaaagatcttacggtaaccgtaattctgttcagaatccgactcctcctcttcagccttctcgccgatcttctcgattggagaacacaactccagttatctacactgatgggatcaatgagaagggcaagaaagcatctaaacgagagagtgttgtgattggtgaagggataagagctgagatttacacagaggaacatgagaagcttcttgggaatacagaaagaagctggacttgttttgttgatggctatgataagaatgggaaacggatttatgatccgtttaacggtaagacttgtcaccaatgcaggcagaagacgatggggcatcgtacacagtgcagtgaatgcaatttggttcaaggacagttctgtgatatggtgaacatgtgcttgaagctcttgagaatccagactggatttgtcccgcttgtcgcgggatctgcaattgcagtttgtgccggaataataaaggatgggttccaactggcccgatttacagaaggagctgaagatttctttctttctttggattgtttccagatagctgcacttgggtataagtctgtggcacattatctgattcaaaccaaacgggcgccaactgatgacacaacaccaagtcaagcgtctgcaaagagatcactttcctttcaagaaaagattgctggtgatgaagacgtaccaatgcttgagaatgatgattccttacagaaagaagaaggtgaaaacacgaacgaagatcagaatggtgatctccctgaagaagtacaaaaggttcagaatatggaatgtcagagtggtggttccttgaagaaagaggaggatgagacaccaaattcagctagaaggtcactgagcttcttattgccttctgtagaggatgatcaaacttcattggtggatgttcaggtcttaagttgtcttgtgccaccaaagcaagaacattcatgtgcacacaatggtgatgatcttccagatattcaggaaaggataggacaacactcaaatttggagacgaaaccagatagctacttgcttcatgtggatgagcagattccattggttgatgttcaggtcttgagttatcttgagacgccgaagcaagaacattcatgtgcccacattggtgatggtcttccaaaaattcaagaatggataggacaagacccgacttctgagacaaaaccagttagctacttgattcctatagatgatgatcaaacttcattggtggatgcgcaggtcatgtatcttgagacaccaaagcaagataaacaagaacattcatgtgcccacatcggtgatgatcttccagaaattcaacaagggacaggacaagactcgaatttggagacaagacttggggaaagtcagacccttgtggtcaaagctcgagtaacgagaagtaagaggaaagcggctctagaaccaaatccagatagcattggtggaagactaaggcagcgaagaaggacctaa

SEQ ID NO: 70435 - protein, 555 aa, Arabidopsis thaliana
  peptide (1)..(555): Ceres Seq. ID no. 2706831
MRTEAQDSVPKSNPNPELIKETPKVSLYEQCREERIKENLQRMNNLGLLNLSRKLKPKTRPVKRSYGNRNSVQNPTPPLQPSRRSSRLENTTPVIYTDGINEKGKKASKRESVVIGEGIRAEIYTEEHEKLLGNTERSWTCFVDGYDKNGKRIYDPFNGKTCHQCRQKTMGHRTQCSECNLVQGQFCDMVNMCLKLLRIQTGFVPLVAGSAIAVCAGIIKDGFQLARFTEGAEDFFLSLDCFQIAALGYKSVAHYLIQTKRAPTDDTTPSQASAKRSLSFQEKIAGDEDVPMLENDDSLQKEEGENTNEDQNGDLPEEVQKVQNMECQSGGSLKKEEDETPNSARRSLSFLLPSVEDDQTSLVDVQVLSCLVPPKQEHSCAHNGDDLPDIQERIGQHSNLETKPDSYLLHVDEQIPLVDVQVLSYLETPKQEHSCAHIGDGLPKIQEWIGQDPTSETKPVSYLIPIDDDQTSLVDAQVMYLETPKQDKQEHSCAHIGDDLPEIQQGTGQDSNLETRLGESQTLVVKARVTRSKRKAALEPNPDSIGGRLRQRRRT

SEQ ID NO: 70436 - protein, 513 aa, Arabidopsis thaliana
  peptide (1)..(513): Ceres Seq. ID no. 2706832
MNNLGLLNLSRKLKPKTRPVKRSYGNRNSVQNPTPPLQPSRRSSRLENTTPVIYTDGINEKGKKASKRESVVIGEGIRAEIYTEEHEKLLGNTERSWTCFVDGYDKNGKRIYDPFNGKTCHQCRQKTMGHRTQCSECNLVQGQFCDMVNMCLKLLRIQTGFVPLVAGSAIAVCAGIIKDGFQLARFTEGAEDFFLSLDCFQIAALGYKSVAHYLIQTKRAPTDDTTPSQASAKRSLSFQEKIAGDEDVPMLENDDSLQKEEGENTNEDQNGDLPEEVQKVQNMECQSGGSLKKEEDETPNSARRSLSFLLPSVEDDQTSLVDVQVLSCLVPPKQEHSCAHNGDDLPDIQERIGQHSNLETKPDSYLLHVDEQIPLVDVQVLSYLETPKQEHSCAHIGDGLPKIQEWIGQDPTSETKPVSYLIPIDDDQTSLVDAQVMYLETPKQDKQEHSCAHIGDDLPEIQQGTGQDSNLETRLGESQTLVVKARVTRSKRKAALEPNPDSIGGRLRQRRRT

SEQ ID NO: 70437 - protein, 386 aa, Arabidopsis thaliana
  peptide (1)..(386): Ceres Seq. ID no. 2706833
MGHRTQCSECNLVQGQFCDMVNMCLKLLRIQTGFVPLVAGSAIAVCAGIIKDGFQLARFTEGAEDFFLSLDCFQIAALGYKSVAHYLIQTKRAPTDDTTPSQASAKRSLSFQEKIAGDEDVPMLENDDSLQKEEGENTNEDQNGDLPEEVQKVQNMECQSGGSLKKEEDETPNSARRSLSFLLPSVEDDQTSLVDVQVLSCLVPPKQEHSCAHNGDDLPDIQERIGQHSNLETKPDSYLLHVDEQIPLVDVQVLSYLETPKQEHSCAHIGDGLPKIQEWIGQDPTSETKPVSYLIPIDDDQTSLVDAQVMYLETPKQDKQEHSCAHIGDDLPEIQQGTGQDSNLETRLGESQTLVVKARVTRSKRKAALEPNPDSIGGRLRQRRRT

SEQ ID NO: 70438 - DNA, 2406 bp, Arabidopsis thaliana
  misc_feature (1)..(2406): Ceres Seq. ID no. 2706877
  misc_feature (1)..(2406): Ortholog of  Ceres SEQ ID NO 13654989 as cited in SEQ ID NO 63117
  misc_feature (1)..(2406): Ortholog of  Ceres SEQ ID NO 13584744 as cited in SEQ ID NO 69137
atggtggtgatgctgacgcaagaaatgagtggcggtggtggtccaaaggcggaagagggtcagctgtttgtggcggtggccgtgaagggtttgatcggagacaaattaggcggtgcaggaagtcgtcgtgccgtacggtgggctgtcgataatcttttaccgaaggctgataaatttgtgatgatccacgtcatccctaccattacttctattcctactccgaatattttgatattaatgtttacgagaatgtgggttgttacagccggagatagattgccggtggaagaagtggaggagagtgtggtggaaatgtatgtaagagacgtgaaaaaagaatatgaaacagtctttgttccctttttgaaaatgtgcaagagtactaggagtaccaagcgatattttcggtctaggagaacaaaaggtacaggagtaccactgaccgttttaagatacgcaccagaaacatgtgaagtatacattgtgtgtaaagacagaatcactacaaaatctatggatccattaatcaaccgagagccgtgcacaagtccacacgcagccgcgactgcccatgacttcttgagagactgggcggctagtttccacactctacggtctccaacgttacccgatcctcgacagtcaactgaggcaggaacaaggaggtcagcatcggcaagagagctgagatttgaggcattaagccttacttgtaataaacccaaaacgcctcaaagtagtaaggcttctagtgcaacaactccagagatttttaggcgacggagaggatccgatattcctcagctgaattactcagattttgataaaacatgtaccaagccccaatcaaatgttgagaacatcgttagcgaacaccgagactctgatcgttcacccccggaaacatcaagaaaatccaagaaggttgagattgaagaagaggtcgaacgtttgaagaatgagctacaaagtacagtctttaaatataaacaagcttgtgaagagctcttctccacacaaaacaaggttaaaatgctttcgactgaatatttgaatgaatctaaaagagtgaacaatgctgtggagaaagaagagttgcagaggaacaccgcggcgctggagaaagagcggtacatgaaggcggtgaaagaggtcgaaaccgcgaaagcgttgctcgcaagagagttttgtcagcgacagatcgcggaggtgaatgctttaaggacttacttggagaagaagaaagtgatcgatcagcttttagggactgatcaccggtacagaaaatacacaattgaggaaattgtaacagccacagaaggattctcgccagagaaagtgattggagaaggaggatacgggaaagtttaccaatgtagccttgatagtactccggcggctgttaaagttgtccggctagatacaccggagaagaaacaagagttcttgaaagaggttgaggttctaagccaactccgacacccacacgtggttctcctcctcggagcttgtccggagaatggttgtttggtttacgagtacttggaaaatggaagcctcgaggaatatatatttcaccgaaaaaataaaccgcctttgccttggtttatccggtttagggtaattttcgaggtagcttgcggtttggccttcttacacagctctaaaccggaaccaattgttcaccgtgacttaaaaccgggaaatatcttgttaaaccggaactacgttagcaaaatcgctgacgttggcctagccaagctggttacggatgttgcacccgataatgtcacgatgtaccgaaactcggttcttgccggtacattgcattatattgatccagaataccacagaaccggaacaattagaccaaagtcggatctatatgcgttcggcataatcattcttcagttgttgacggctcgtaacccgagcgggattgtaccagcggtcgaaaacgcggtaaagaaagggacgttaaccgaaatgctagataaatcggttaccgattggcctttggcagaaaccgaggaattggctcggatcggtttaaaatgtgctgaatttcgatgccgagatagaccggatcttaaatcagaggttataccggttttgaaacggcttgtggagacggcgaattcgaaagtaaagaaagaaggaagcaatttacgtgcaccgagtcattacttctgtccaatcttacgggagataatggaggagccagagattgctgccgatggattcacgtacgagaggaaagcgatcttagcgtggcttgagaaacataacatttcaccggtgactcgacaaaagctagaccacttcaagctcacaccgaaccatacgctccggtctgcgattcgcgattggaaatcaagagtccggttttctaatgtcgttgtttaa

SEQ ID NO: 70439 - protein, 801 aa, Arabidopsis thaliana
  peptide (1)..(801): Ceres Seq. ID no. 2706878
MVVMLTQEMSGGGGPKAEEGQLFVAVAVKGLIGDKLGGAGSRRAVRWAVDNLLPKADKFVMIHVIPTITSIPTPNILILMFTRMWVVTAGDRLPVEEVEESVVEMYVRDVKKEYETVFVPFLKMCKSTRSTKRYFRSRRTKGTGVPLTVLRYAPETCEVYIVCKDRITTKSMDPLINREPCTSPHAAATAHDFLRDWAASFHTLRSPTLPDPRQSTEAGTRRSASARELRFEALSLTCNKPKTPQSSKASSATTPEIFRRRRGSDIPQLNYSDFDKTCTKPQSNVENIVSEHRDSDRSPPETSRKSKKVEIEEEVERLKNELQSTVFKYKQACEELFSTQNKVKMLSTEYLNESKRVNNAVEKEELQRNTAALEKERYMKAVKEVETAKALLAREFCQRQIAEVNALRTYLEKKKVIDQLLGTDHRYRKYTIEEIVTATEGFSPEKVIGEGGYGKVYQCSLDSTPAAVKVVRLDTPEKKQEFLKEVEVLSQLRHPHVVLLLGACPENGCLVYEYLENGSLEEYIFHRKNKPPLPWFIRFRVIFEVACGLAFLHSSKPEPIVHRDLKPGNILLNRNYVSKIADVGLAKLVTDVAPDNVTMYRNSVLAGTLHYIDPEYHRTGTIRPKSDLYAFGIIILQLLTARNPSGIVPAVENAVKKGTLTEMLDKSVTDWPLAETEELARIGLKCAEFRCRDRPDLKSEVIPVLKRLVETANSKVKKEGSNLRAPSHYFCPILREIMEEPEIAADGFTYERKAILAWLEKHNISPVTRQKLDHFKLTPNHTLRSAIRDWKSRVRFSNVVV

SEQ ID NO: 70440 - protein, 798 aa, Arabidopsis thaliana
  peptide (1)..(798): Ceres Seq. ID no. 2706879
MLTQEMSGGGGPKAEEGQLFVAVAVKGLIGDKLGGAGSRRAVRWAVDNLLPKADKFVMIHVIPTITSIPTPNILILMFTRMWVVTAGDRLPVEEVEESVVEMYVRDVKKEYETVFVPFLKMCKSTRSTKRYFRSRRTKGTGVPLTVLRYAPETCEVYIVCKDRITTKSMDPLINREPCTSPHAAATAHDFLRDWAASFHTLRSPTLPDPRQSTEAGTRRSASARELRFEALSLTCNKPKTPQSSKASSATTPEIFRRRRGSDIPQLNYSDFDKTCTKPQSNVENIVSEHRDSDRSPPETSRKSKKVEIEEEVERLKNELQSTVFKYKQACEELFSTQNKVKMLSTEYLNESKRVNNAVEKEELQRNTAALEKERYMKAVKEVETAKALLAREFCQRQIAEVNALRTYLEKKKVIDQLLGTDHRYRKYTIEEIVTATEGFSPEKVIGEGGYGKVYQCSLDSTPAAVKVVRLDTPEKKQEFLKEVEVLSQLRHPHVVLLLGACPENGCLVYEYLENGSLEEYIFHRKNKPPLPWFIRFRVIFEVACGLAFLHSSKPEPIVHRDLKPGNILLNRNYVSKIADVGLAKLVTDVAPDNVTMYRNSVLAGTLHYIDPEYHRTGTIRPKSDLYAFGIIILQLLTARNPSGIVPAVENAVKKGTLTEMLDKSVTDWPLAETEELARIGLKCAEFRCRDRPDLKSEVIPVLKRLVETANSKVKKEGSNLRAPSHYFCPILREIMEEPEIAADGFTYERKAILAWLEKHNISPVTRQKLDHFKLTPNHTLRSAIRDWKSRVRFSNVVV

SEQ ID NO: 70441 - protein, 793 aa, Arabidopsis thaliana
  peptide (1)..(793): Ceres Seq. ID no. 2706880
MSGGGGPKAEEGQLFVAVAVKGLIGDKLGGAGSRRAVRWAVDNLLPKADKFVMIHVIPTITSIPTPNILILMFTRMWVVTAGDRLPVEEVEESVVEMYVRDVKKEYETVFVPFLKMCKSTRSTKRYFRSRRTKGTGVPLTVLRYAPETCEVYIVCKDRITTKSMDPLINREPCTSPHAAATAHDFLRDWAASFHTLRSPTLPDPRQSTEAGTRRSASARELRFEALSLTCNKPKTPQSSKASSATTPEIFRRRRGSDIPQLNYSDFDKTCTKPQSNVENIVSEHRDSDRSPPETSRKSKKVEIEEEVERLKNELQSTVFKYKQACEELFSTQNKVKMLSTEYLNESKRVNNAVEKEELQRNTAALEKERYMKAVKEVETAKALLAREFCQRQIAEVNALRTYLEKKKVIDQLLGTDHRYRKYTIEEIVTATEGFSPEKVIGEGGYGKVYQCSLDSTPAAVKVVRLDTPEKKQEFLKEVEVLSQLRHPHVVLLLGACPENGCLVYEYLENGSLEEYIFHRKNKPPLPWFIRFRVIFEVACGLAFLHSSKPEPIVHRDLKPGNILLNRNYVSKIADVGLAKLVTDVAPDNVTMYRNSVLAGTLHYIDPEYHRTGTIRPKSDLYAFGIIILQLLTARNPSGIVPAVENAVKKGTLTEMLDKSVTDWPLAETEELARIGLKCAEFRCRDRPDLKSEVIPVLKRLVETANSKVKKEGSNLRAPSHYFCPILREIMEEPEIAADGFTYERKAILAWLEKHNISPVTRQKLDHFKLTPNHTLRSAIRDWKSRVRFSNVVV

SEQ ID NO: 70442 - DNA, 411 bp, Arabidopsis thaliana
  misc_feature (1)..(411): Ceres Seq. ID no. 2707490
  misc_feature (1)..(411): Ortholog of  Ceres SEQ ID NO 15173178 as cited in SEQ ID NO 64574
atgtgtgtagaggcgataatggtgagggctagcgtcttaaacgattgtctcaagagcatgagtaatgcagagaaacaagggaaacgccaagtcatgataagaccatcttccaaagtgatcattaagtttctcactgtgatgcaaaagcatggttacattgcagagtttgaatatgtggatgatcacagatccgggaagattgtggttgagcttaatggaaggcttaacaactgcggtgttattagtcctcgatatgaccttggcgtcaaggaaattgaaggttggactgctaaattgctcccttcaagacagtttgggtacattgtcctgacaacatcagctggaatcatggaccatgaagaggctaggaagaaaaatgttgggggcaaagtgcttggttttttctactag

SEQ ID NO: 70443 - protein, 136 aa, Arabidopsis thaliana
  peptide (1)..(136): Ceres Seq. ID no. 2707491
MCVEAIMVRASVLNDCLKSMSNAEKQGKRQVMIRPSSKVIIKFLTVMQKHGYIAEFEYVDDHRSGKIVVELNGRLNNCGVISPRYDLGVKEIEGWTAKLLPSRQFGYIVLTTSAGIMDHEEARKKNVGGKVLGFFY

SEQ ID NO: 70444 - protein, 130 aa, Arabidopsis thaliana
  peptide (1)..(130): Ceres Seq. ID no. 2707492
MVRASVLNDCLKSMSNAEKQGKRQVMIRPSSKVIIKFLTVMQKHGYIAEFEYVDDHRSGKIVVELNGRLNNCGVISPRYDLGVKEIEGWTAKLLPSRQFGYIVLTTSAGIMDHEEARKKNVGGKVLGFFY

SEQ ID NO: 70445 - protein, 117 aa, Arabidopsis thaliana
  peptide (1)..(117): Ceres Seq. ID no. 2707493
MSNAEKQGKRQVMIRPSSKVIIKFLTVMQKHGYIAEFEYVDDHRSGKIVVELNGRLNNCGVISPRYDLGVKEIEGWTAKLLPSRQFGYIVLTTSAGIMDHEEARKKNVGGKVLGFFY

SEQ ID NO: 70446 - DNA, 1284 bp, Arabidopsis thaliana
  misc_feature (1)..(1284): Ceres Seq. ID no. 2708135
  misc_feature (1)..(1284): Ortholog of  Ceres SEQ ID NO 13597334 as cited in SEQ ID NO 64244
atgatgcttaatcagacagtgatcttcttccttctttgggtgatcatagcacttgtagtcgaaattactttggccggaaagatcacagtttctgatatccatgagcagaaaatcgaacaacggttgaaccaactcaacaaacccgccgttaaatctatccatgtattcgcaacgacttttaattacccgtggtttgctattcccactattttcttgagtccagatggagatataatcgattgtgtatggatctatcaccaaccagcttttgatcatcctttactcaaaaaccacaccattcagatgaggccgaaaagtgactcgacaagggacaaaactggaggtaacaagacagacattatccatcaattgtggcgcacgaaaggtgaatgtcctaagaacactattcccatcagaagaagaacaagagatgatcttctaagatcagattccatcaaaactcatggaagaaagaacccaccaaccatttctccaactacttatcacctccccgatgatcagacagaagttcatgagcatgcgagtgtgtacctggactatggtgaataccatggcagcaagagccgtataagtatatggagaccagacgttaatatgaccgagtttagtttggctcaaacatgggtcgtcggtggagattgggacactgttttgaacactgtggagtctggttggcagatcctacattctatgtacggtgacaataatacaagacttttcgccttttggacgagcgattcatatggagacaacagctgctacaatcttgactgtccaggctttgttcaagtgaataaagatattgcccttggtgcagccctcaacactatctcgacctacaatggtaaccaatatgatttccttctaactattgagaaggaacaagataccggactttggtggcttaagtttgatactcatctagtcggatactggccaagctttctagtcccgaagctagcagactcagcacggatgatcgcttggggaggtgaaattgtgtatgatgctagtggccaaaatgaacatacgcttacgcaaatggggagtggccatttcgcggaagaagggtttaagaaggcggcttatatcaataacatagagtacatcgataaatctaatcatccgatcaaaccctttcctcaaaatcttgaagcttctgttactcggcctgaatgctataacctcaaggttggctctagccgaagatggggaacttacattttctatggtggacctggacgtaaccctcaatgcctatga

SEQ ID NO: 70447 - protein, 427 aa, Arabidopsis thaliana
  peptide (1)..(427): Ceres Seq. ID no. 2708136
MMLNQTVIFFLLWVIIALVVEITLAGKITVSDIHEQKIEQRLNQLNKPAVKSIHVFATTFNYPWFAIPTIFLSPDGDIIDCVWIYHQPAFDHPLLKNHTIQMRPKSDSTRDKTGGNKTDIIHQLWRTKGECPKNTIPIRRRTRDDLLRSDSIKTHGRKNPPTISPTTYHLPDDQTEVHEHASVYLDYGEYHGSKSRISIWRPDVNMTEFSLAQTWVVGGDWDTVLNTVESGWQILHSMYGDNNTRLFAFWTSDSYGDNSCYNLDCPGFVQVNKDIALGAALNTISTYNGNQYDFLLTIEKEQDTGLWWLKFDTHLVGYWPSFLVPKLADSARMIAWGGEIVYDASGQNEHTLTQMGSGHFAEEGFKKAAYINNIEYIDKSNHPIKPFPQNLEASVTRPECYNLKVGSSRRWGTYIFYGGPGRNPQCL

SEQ ID NO: 70448 - protein, 426 aa, Arabidopsis thaliana
  peptide (1)..(426): Ceres Seq. ID no. 2708137
MLNQTVIFFLLWVIIALVVEITLAGKITVSDIHEQKIEQRLNQLNKPAVKSIHVFATTFNYPWFAIPTIFLSPDGDIIDCVWIYHQPAFDHPLLKNHTIQMRPKSDSTRDKTGGNKTDIIHQLWRTKGECPKNTIPIRRRTRDDLLRSDSIKTHGRKNPPTISPTTYHLPDDQTEVHEHASVYLDYGEYHGSKSRISIWRPDVNMTEFSLAQTWVVGGDWDTVLNTVESGWQILHSMYGDNNTRLFAFWTSDSYGDNSCYNLDCPGFVQVNKDIALGAALNTISTYNGNQYDFLLTIEKEQDTGLWWLKFDTHLVGYWPSFLVPKLADSARMIAWGGEIVYDASGQNEHTLTQMGSGHFAEEGFKKAAYINNIEYIDKSNHPIKPFPQNLEASVTRPECYNLKVGSSRRWGTYIFYGGPGRNPQCL

SEQ ID NO: 70449 - protein, 326 aa, Arabidopsis thaliana
  peptide (1)..(326): Ceres Seq. ID no. 2708138
MRPKSDSTRDKTGGNKTDIIHQLWRTKGECPKNTIPIRRRTRDDLLRSDSIKTHGRKNPPTISPTTYHLPDDQTEVHEHASVYLDYGEYHGSKSRISIWRPDVNMTEFSLAQTWVVGGDWDTVLNTVESGWQILHSMYGDNNTRLFAFWTSDSYGDNSCYNLDCPGFVQVNKDIALGAALNTISTYNGNQYDFLLTIEKEQDTGLWWLKFDTHLVGYWPSFLVPKLADSARMIAWGGEIVYDASGQNEHTLTQMGSGHFAEEGFKKAAYINNIEYIDKSNHPIKPFPQNLEASVTRPECYNLKVGSSRRWGTYIFYGGPGRNPQCL

SEQ ID NO: 70450 - DNA, 807 bp, Arabidopsis thaliana
  misc_feature (1)..(807): Ceres Seq. ID no. 2708158
  misc_feature (1)..(807): Ortholog of  Ceres SEQ ID NO 15170458 as cited in SEQ ID NO 52842
  misc_feature (1)..(807): Ortholog of  Ceres SEQ ID NO 14304224 as cited in SEQ ID NO 56350
  misc_feature (1)..(807): Ortholog of  Ceres SEQ ID NO 13597679 as cited in SEQ ID NO 65073
atggctaaagcagaagaaaacttgagagacaaatgtagatggagccttggaggcatgaccgctctcgttaccggtggctccaaaggcctcggggaagctgtggtggaggaactagccatgttaggagcaagagtccacacatgtgctagaaacgaaactcagcttcaagaatgcgtacgtgaatggcaagctaaagggtttgaggtcaccacttctgtatgcgacgtttcttctcgtgaccaacgagagaaactcatggaaaacgttgcctctatcttccaaggaaaactcaacatccttgtaaacaatgcgggaacgggtataacaaagccgaccacagagtatacagcacaagattactcatttctgatggctacaaatctcgactcagcttttcatctctcacagctcgcgcatcctttgttgaaagcatctggttcagggagcatcgtgctcatgtcctctactgcaggggttgtacatatcaatgttggttccatctatggagcaactaaaggagctatgaatcagctagcaaaaaacttagcatgcgagtgggcaagggataacataagggttaattctgtctgtccatggttcatagcaactcctttatatctcaatgatgaagagttaaagaaagaagtggagcgtaagacaccaatgggacgtgttggaaacgcaaatgaagtatcatcgcttgtcgcatttctctgctttccggctgcttcgtatataacaggtcagacaatctgcgtcgacggaggtttcacggtcaactgcttttctttcaagccagtgctttaa

SEQ ID NO: 70451 - protein, 268 aa, Arabidopsis thaliana
  peptide (1)..(268): Ceres Seq. ID no. 2708159
MAKAEENLRDKCRWSLGGMTALVTGGSKGLGEAVVEELAMLGARVHTCARNETQLQECVREWQAKGFEVTTSVCDVSSRDQREKLMENVASIFQGKLNILVNNAGTGITKPTTEYTAQDYSFLMATNLDSAFHLSQLAHPLLKASGSGSIVLMSSTAGVVHINVGSIYGATKGAMNQLAKNLACEWARDNIRVNSVCPWFIATPLYLNDEELKKEVERKTPMGRVGNANEVSSLVAFLCFPAASYITGQTICVDGGFTVNCFSFKPVL

SEQ ID NO: 70452 - protein, 250 aa, Arabidopsis thaliana
  peptide (1)..(250): Ceres Seq. ID no. 2708160
MTALVTGGSKGLGEAVVEELAMLGARVHTCARNETQLQECVREWQAKGFEVTTSVCDVSSRDQREKLMENVASIFQGKLNILVNNAGTGITKPTTEYTAQDYSFLMATNLDSAFHLSQLAHPLLKASGSGSIVLMSSTAGVVHINVGSIYGATKGAMNQLAKNLACEWARDNIRVNSVCPWFIATPLYLNDEELKKEVERKTPMGRVGNANEVSSLVAFLCFPAASYITGQTICVDGGFTVNCFSFKPVL

SEQ ID NO: 70453 - protein, 229 aa, Arabidopsis thaliana
  peptide (1)..(229): Ceres Seq. ID no. 2708161
MLGARVHTCARNETQLQECVREWQAKGFEVTTSVCDVSSRDQREKLMENVASIFQGKLNILVNNAGTGITKPTTEYTAQDYSFLMATNLDSAFHLSQLAHPLLKASGSGSIVLMSSTAGVVHINVGSIYGATKGAMNQLAKNLACEWARDNIRVNSVCPWFIATPLYLNDEELKKEVERKTPMGRVGNANEVSSLVAFLCFPAASYITGQTICVDGGFTVNCFSFKPVL

SEQ ID NO: 70454 - DNA, 1158 bp, Arabidopsis thaliana
  misc_feature (1)..(1158): Ceres Seq. ID no. 2708181
  misc_feature (1)..(1158): Ortholog of  Ceres SEQ ID NO 13655988 as cited in SEQ ID NO 65557
atgaaagtttgtgtaacgtataaacagcttatggaattggagcaaatctgcattttgaaacccgatgatgaggaagaaatggagtcaccatcaccatcgaaaacagaggaaaatttaggcgtggttcctctgtcttgcgcgtttacgagacaagaacattgcgtttccgagacgaaagaacgcgaagaatcgactagaagactaagcagccttatttttctttacctcatcgttatgtccgtacagattgtgggaggttttaaggcgaatagtcttgcggttatgacagatgctgcgcatttgttgtcggatgtggcgggtttgtgtgtctctttgttggcgatcaaggtctcgagctgggaagctaatccgcgaaactcgttcgggtttaaacggcttgaagttttagcggcgttcttgtctgttcagctcatatggcttgtctctggagtgataatccatgaagccattcaaagactacttagcagaagcagagaggttaatggagaaatcatgtttgggatttcggctttcgggtttttcatgaacttggttatggtcctttggttaggacataaccatagccaccaccaccacgaccatcatcaccatcatcataatcataaacatcaacatcaacatcatcacaaggaggtggtggcagaagaggaggaggaggaaatgaatcctttaaaaggtgagaaatcgtcttcaaaggagatgaacattaacatacaaggagcttatcttcacgcaatggctgatatgattcagtcactaggtgttatgattggtggaggtatcatttgggtaaaaccaaaatgggttttggttgatttgatttgcactcttgttttctctgcttttgctcttgctgctactctaccaattctcaagaacatatttggaatactgatggaacgcgtaccgcgtgatatggacatagagaagctcgaaagaggacttaagcgaatcgatggagttaagattgtttatgatctccatgtatgggagataacagtagggagaatcgtattgtcctgtcatatcttaccagagcctggagctagtcctaaagagatcattactggtgttagaaatttctgtaggaagtcttatgggatttatcatgcaactgttcaggttgaatcagagtag

SEQ ID NO: 70455 - protein, 385 aa, Arabidopsis thaliana
  peptide (1)..(385): Ceres Seq. ID no. 2708182
MKVCVTYKQLMELEQICILKPDDEEEMESPSPSKTEENLGVVPLSCAFTRQEHCVSETKEREESTRRLSSLIFLYLIVMSVQIVGGFKANSLAVMTDAAHLLSDVAGLCVSLLAIKVSSWEANPRNSFGFKRLEVLAAFLSVQLIWLVSGVIIHEAIQRLLSRSREVNGEIMFGISAFGFFMNLVMVLWLGHNHSHHHHDHHHHHHNHKHQHQHHHKEVVAEEEEEEMNPLKGEKSSSKEMNINIQGAYLHAMADMIQSLGVMIGGGIIWVKPKWVLVDLICTLVFSAFALAATLPILKNIFGILMERVPRDMDIEKLERGLKRIDGVKIVYDLHVWEITVGRIVLSCHILPEPGASPKEIITGVRNFCRKSYGIYHATVQVESE

SEQ ID NO: 70456 - protein, 375 aa, Arabidopsis thaliana
  peptide (1)..(375): Ceres Seq. ID no. 2708183
MELEQICILKPDDEEEMESPSPSKTEENLGVVPLSCAFTRQEHCVSETKEREESTRRLSSLIFLYLIVMSVQIVGGFKANSLAVMTDAAHLLSDVAGLCVSLLAIKVSSWEANPRNSFGFKRLEVLAAFLSVQLIWLVSGVIIHEAIQRLLSRSREVNGEIMFGISAFGFFMNLVMVLWLGHNHSHHHHDHHHHHHNHKHQHQHHHKEVVAEEEEEEMNPLKGEKSSSKEMNINIQGAYLHAMADMIQSLGVMIGGGIIWVKPKWVLVDLICTLVFSAFALAATLPILKNIFGILMERVPRDMDIEKLERGLKRIDGVKIVYDLHVWEITVGRIVLSCHILPEPGASPKEIITGVRNFCRKSYGIYHATVQVESE

SEQ ID NO: 70457 - protein, 359 aa, Arabidopsis thaliana; identical to SEQ ID NO: 44655
  peptide (1)..(359): Ceres Seq. ID no. 2708184

SEQ ID NO: 70458 - DNA, 2907 bp, Arabidopsis thaliana
  misc_feature (1)..(2907): Ceres Seq. ID no. 2708201
  misc_feature (1)..(2907): Ortholog of  Ceres SEQ ID NO 12589728 as cited in SEQ ID NO 0
  misc_feature (1)..(2907): Ortholog of  Ceres SEQ ID NO 14302164 as cited in SEQ ID NO 0
atgataccggaactagggagaagaccgatgcatagaggtaacgaagattcatcttttggggatgattatgagaaagagattggagtattgcttggtgagcagcagagaaggcaagtagaagctgatgagcttgagagagagcttaacttgtttagaagtggctctgctccaccgactgttgatggttctgttagtgctgccggagggctttttagcggcggaggtggggctccttttttggagtttggtggtgttaataagggtaatgggtttggtggtgatgatgaggagtttaggaaagatccggcttacttgtcttattactatgctaatatgaagttgaatccgaggttgccaccgcctttgatgtctagggaggatttgagggttgctcagaggcttaaagggagtaataatgtgttaggtggtgttggggataggagaaaagttaatgataatcgatctttgttctctatgccaccgggttttgaaggtgagaaaactggtgcttctgcttctgaatgggatgctaatggattgattggtttaccgggtttgggacttggaggcaagcagaagagttttgctgatatctttcaggctgatatggggcatggacatcctgtcgcacaacagccctcacgtcctgcaagtcgtaatacctttgatgaaaatgttgactctaataataatctgtctccgtctgcatcacaaggcattggtgcaccatctccatacagctatgcagctgttctaggctcttctttgtctagaaatggaactccagatccacaggccattgctagggtgcctagtccctgtcttactcccattgggagtggaagaatgagttcaaatgataagaggaacacaagtaaccagagcccattcaatggtgttacctctggtctcaacgagtcttctgatcttgtcaatgctttatctggcttgaacctgtcatgcagtgttgggttagatgatcggagtcaggctgagcaagatgtcgaaaaggtcaggaactatatgtttggactgcaaggtgggcataacgaagtcaatcaacatgagttcccaaacaaatctgatcaagcccataaggcaactggctcgttgaggaattcacaattgagagggccacacggatctgcctataatggtggagttggattagctaatccttaccagcaacttgatagcccaaattattgtctcaacaattacgcattaaatccagctgtagcctctatgatggctaaccaacttgggaacaataactttgctccaatgtatgataatgtatccgctttgggattttctggaatggactctagacatcatggacgaggctttgtatcttctggtcaaaacctctctgaatcacgtaatcttggcagattcagtaatcgaatgatgggaggaggtgctggtctccagtcacatatggtagacccaatgtataatcagtatgctgattcacttgatcttctcaatgatccttccatggataggaactttatgggtggttcatcatacatggatatgcttgaactccagagggcttatcttggagctcagaaatcacagtatggtgtcccttacaaatccgggagccctaacagccatagctattatgggagtccaacatttgggtctaatatgtcatatcctggcagcccattggctcatcatggtatgccaaactctcttatgtcaccttatagccctatgagacgggatgaagttaatatgcgatttccttctgcaacaagaaattattcgggagggttaatgggttcttggcacatggatgctagttttgatgaaggctttggatcttcaatgcttgaagagttcaaaagtaacaaaacaagaggatttgaactttctgaaatagctggccatgttgtggagttcagttcggatcaatatggaagccgctttattcagcagaaactcgagacagcaacaactgatgagaaaaacatggtctatgaggagatcatgccacaagctcttgtcctgatgactgacgtttttggaaactatgtgattcagaagttctttgagcatggactcccgccacagaggagagaattggcagagaaactctttgaccatgttttgcctcttagcttacagatgtatggttgccgtgtcatccagaaggcaattgaggtggttgatctagaccagaaaattaaaatggtgaaagaacttgatggacatgtaatgcgatgtgtacgtgatcagaatgggaaccatgtggttcaaaagtgtattgaatgtgtgcctgaagaaaacatcgagtttattatttcaactttctttggccatgtggtgaccctctccactcacccatatgggtgccgtgttattcagagagtattggaacactgccatgaccctgatacacagagtaaggttatggaagaaatcctgtccactgttagtatgctggcccaagatcagtatggaaactatgttgttcagcatgtgctggagcatggaaagcctgatgagcgcactgtgataatcaaagaattggcggggaagattgttcagatgagccagcagaagttcgcatcaaacgttgttgagaaatgtttgacttttggaggtcctgaggaacgagaattgcttgtgaatgagatgctgggaacaactgatgaaaacgagcctcttcaggcgatgatgaaggatcagttcgcaaactatgtagtgcagaaagttttggagacctgtgatgaccaacaacgtgagctgatacttactcgcatcaaagtgcatcttactgctttaaaaaagtacacttatggaaagcatgtcgttgcgcgtattgaaaaactcgttgctgctggagagaggagaatggctttgcagtccctaacccagccccagatggcttaa

SEQ ID NO: 70459 - protein, 968 aa, Arabidopsis thaliana
  peptide (1)..(968): Ceres Seq. ID no. 2708202
MIPELGRRPMHRGNEDSSFGDDYEKEIGVLLGEQQRRQVEADELERELNLFRSGSAPPTVDGSVSAAGGLFSGGGGAPFLEFGGVNKGNGFGGDDEEFRKDPAYLSYYYANMKLNPRLPPPLMSREDLRVAQRLKGSNNVLGGVGDRRKVNDNRSLFSMPPGFEGEKTGASASEWDANGLIGLPGLGLGGKQKSFADIFQADMGHGHPVAQQPSRPASRNTFDENVDSNNNLSPSASQGIGAPSPYSYAAVLGSSLSRNGTPDPQAIARVPSPCLTPIGSGRMSSNDKRNTSNQSPFNGVTSGLNESSDLVNALSGLNLSCSVGLDDRSQAEQDVEKVRNYMFGLQGGHNEVNQHEFPNKSDQAHKATGSLRNSQLRGPHGSAYNGGVGLANPYQQLDSPNYCLNNYALNPAVASMMANQLGNNNFAPMYDNVSALGFSGMDSRHHGRGFVSSGQNLSESRNLGRFSNRMMGGGAGLQSHMVDPMYNQYADSLDLLNDPSMDRNFMGGSSYMDMLELQRAYLGAQKSQYGVPYKSGSPNSHSYYGSPTFGSNMSYPGSPLAHHGMPNSLMSPYSPMRRDEVNMRFPSATRNYSGGLMGSWHMDASFDEGFGSSMLEEFKSNKTRGFELSEIAGHVVEFSSDQYGSRFIQQKLETATTDEKNMVYEEIMPQALVLMTDVFGNYVIQKFFEHGLPPQRRELAEKLFDHVLPLSLQMYGCRVIQKAIEVVDLDQKIKMVKELDGHVMRCVRDQNGNHVVQKCIECVPEENIEFIISTFFGHVVTLSTHPYGCRVIQRVLEHCHDPDTQSKVMEEILSTVSMLAQDQYGNYVVQHVLEHGKPDERTVIIKELAGKIVQMSQQKFASNVVEKCLTFGGPEERELLVNEMLGTTDENEPLQAMMKDQFANYVVQKVLETCDDQQRELILTRIKVHLTALKKYTYGKHVVARIEKLVAAGERRMALQSLTQPQMA

SEQ ID NO: 70460 - protein, 959 aa, Arabidopsis thaliana
  peptide (1)..(959): Ceres Seq. ID no. 2708203
MHRGNEDSSFGDDYEKEIGVLLGEQQRRQVEADELERELNLFRSGSAPPTVDGSVSAAGGLFSGGGGAPFLEFGGVNKGNGFGGDDEEFRKDPAYLSYYYANMKLNPRLPPPLMSREDLRVAQRLKGSNNVLGGVGDRRKVNDNRSLFSMPPGFEGEKTGASASEWDANGLIGLPGLGLGGKQKSFADIFQADMGHGHPVAQQPSRPASRNTFDENVDSNNNLSPSASQGIGAPSPYSYAAVLGSSLSRNGTPDPQAIARVPSPCLTPIGSGRMSSNDKRNTSNQSPFNGVTSGLNESSDLVNALSGLNLSCSVGLDDRSQAEQDVEKVRNYMFGLQGGHNEVNQHEFPNKSDQAHKATGSLRNSQLRGPHGSAYNGGVGLANPYQQLDSPNYCLNNYALNPAVASMMANQLGNNNFAPMYDNVSALGFSGMDSRHHGRGFVSSGQNLSESRNLGRFSNRMMGGGAGLQSHMVDPMYNQYADSLDLLNDPSMDRNFMGGSSYMDMLELQRAYLGAQKSQYGVPYKSGSPNSHSYYGSPTFGSNMSYPGSPLAHHGMPNSLMSPYSPMRRDEVNMRFPSATRNYSGGLMGSWHMDASFDEGFGSSMLEEFKSNKTRGFELSEIAGHVVEFSSDQYGSRFIQQKLETATTDEKNMVYEEIMPQALVLMTDVFGNYVIQKFFEHGLPPQRRELAEKLFDHVLPLSLQMYGCRVIQKAIEVVDLDQKIKMVKELDGHVMRCVRDQNGNHVVQKCIECVPEENIEFIISTFFGHVVTLSTHPYGCRVIQRVLEHCHDPDTQSKVMEEILSTVSMLAQDQYGNYVVQHVLEHGKPDERTVIIKELAGKIVQMSQQKFASNVVEKCLTFGGPEERELLVNEMLGTTDENEPLQAMMKDQFANYVVQKVLETCDDQQRELILTRIKVHLTALKKYTYGKHVVARIEKLVAAGERRMALQSLTQPQMA

SEQ ID NO: 70461 - protein, 857 aa, Arabidopsis thaliana
  peptide (1)..(857): Ceres Seq. ID no. 2708204
MKLNPRLPPPLMSREDLRVAQRLKGSNNVLGGVGDRRKVNDNRSLFSMPPGFEGEKTGASASEWDANGLIGLPGLGLGGKQKSFADIFQADMGHGHPVAQQPSRPASRNTFDENVDSNNNLSPSASQGIGAPSPYSYAAVLGSSLSRNGTPDPQAIARVPSPCLTPIGSGRMSSNDKRNTSNQSPFNGVTSGLNESSDLVNALSGLNLSCSVGLDDRSQAEQDVEKVRNYMFGLQGGHNEVNQHEFPNKSDQAHKATGSLRNSQLRGPHGSAYNGGVGLANPYQQLDSPNYCLNNYALNPAVASMMANQLGNNNFAPMYDNVSALGFSGMDSRHHGRGFVSSGQNLSESRNLGRFSNRMMGGGAGLQSHMVDPMYNQYADSLDLLNDPSMDRNFMGGSSYMDMLELQRAYLGAQKSQYGVPYKSGSPNSHSYYGSPTFGSNMSYPGSPLAHHGMPNSLMSPYSPMRRDEVNMRFPSATRNYSGGLMGSWHMDASFDEGFGSSMLEEFKSNKTRGFELSEIAGHVVEFSSDQYGSRFIQQKLETATTDEKNMVYEEIMPQALVLMTDVFGNYVIQKFFEHGLPPQRRELAEKLFDHVLPLSLQMYGCRVIQKAIEVVDLDQKIKMVKELDGHVMRCVRDQNGNHVVQKCIECVPEENIEFIISTFFGHVVTLSTHPYGCRVIQRVLEHCHDPDTQSKVMEEILSTVSMLAQDQYGNYVVQHVLEHGKPDERTVIIKELAGKIVQMSQQKFASNVVEKCLTFGGPEERELLVNEMLGTTDENEPLQAMMKDQFANYVVQKVLETCDDQQRELILTRIKVHLTALKKYTYGKHVVARIEKLVAAGERRMALQSLTQPQMA

SEQ ID NO: 70462 - DNA, 1077 bp, Arabidopsis thaliana
  misc_feature (1)..(1077): Ceres Seq. ID no. 2708379
  misc_feature (1)..(1077): Ortholog of  Ceres SEQ ID NO 12578315 as cited in SEQ ID NO 62451
  misc_feature (1)..(1077): Ortholog of  Ceres SEQ ID NO 12615466 as cited in SEQ ID NO 62761
  misc_feature (1)..(1077): Ortholog of  Ceres SEQ ID NO 13597295 as cited in SEQ ID NO 63743
  misc_feature (1)..(1077): Ortholog of  Ceres SEQ ID NO 12617090 as cited in SEQ ID NO 64005
  misc_feature (1)..(1077): Ortholog of  Ceres SEQ ID NO 13597439 as cited in SEQ ID NO 64081
  misc_feature (1)..(1077): Ortholog of  Ceres SEQ ID NO 13597233 as cited in SEQ ID NO 64370
  misc_feature (1)..(1077): Ortholog of  Ceres SEQ ID NO 13584577 as cited in SEQ ID NO 65298
  misc_feature (1)..(1077): Ortholog of  Ceres SEQ ID NO 13598327 as cited in SEQ ID NO 68040
atggcgggcaactatgatcgtgctggtgaggtaaaagcattcgaccagatgaagatcggcgtgaagggtcttgtcgacgccggaatcacaaaagttcctcgcattttccatcaccaagatgtggccgttacaaaccctaaaccttcctcaacgttagaaattccaacaatcgatgttggaggtggcgtgttcgagtccacggtcacgcgaaagagcgtgatcgcgaaagtgagagctgcggttgagaagttcgggttctttcaggtgattaaccatgggattccactcgaggtgatggagagtatgaaagatgggattcgtgggtttcatgagcaggactcagaagttaagaaaacgttctatagtcgtgacatcactaaaaaggttaagtataacactaatttcgatctctatagctctcaagctgcgaattggagagatactttaactatggttatggctcctgatgttccacaagcaggggacttacccgtgatttgtcgagaaatcatgttggagtactccaagcgaatgatgaagttaggggagctaatctttgagcttttatcagaagctcttggtttaaaacctaaccaccttaaagagctaaattgcgcaaagagtttgtcgttgctctcccattactacccgccttgtccagagcctgaccgaacctttggtatcagttcacatacagatatctcttttatcactattcttcttcaagaccacattggaggacttcaagttctccatgatggttactggatcgatgttcctcctaatcccgaagctctaatcgttaaccttggagatcttttacagcttataacaaacgataagtttgtaagtgtggagcacagggttttggcaaatagaggcgaagaacctcgcatttcaagcgcatctttcttcatgcacaccataccaaatgagcaagtatatggacctatgaaagagcttctatctaaacaaaaccctcccaagtacagaaacacaaccacgaccgagatggcgaggcattacttggctagaggactcgatgggacctcaccgttgctccatttcaggatctga

SEQ ID NO: 70463 - protein, 358 aa, Arabidopsis thaliana
  peptide (1)..(358): Ceres Seq. ID no. 2708380
MAGNYDRAGEVKAFDQMKIGVKGLVDAGITKVPRIFHHQDVAVTNPKPSSTLEIPTIDVGGGVFESTVTRKSVIAKVRAAVEKFGFFQVINHGIPLEVMESMKDGIRGFHEQDSEVKKTFYSRDITKKVKYNTNFDLYSSQAANWRDTLTMVMAPDVPQAGDLPVICREIMLEYSKRMMKLGELIFELLSEALGLKPNHLKELNCAKSLSLLSHYYPPCPEPDRTFGISSHTDISFITILLQDHIGGLQVLHDGYWIDVPPNPEALIVNLGDLLQLITNDKFVSVEHRVLANRGEEPRISSASFFMHTIPNEQVYGPMKELLSKQNPPKYRNTTTTEMARHYLARGLDGTSPLLHFRI

SEQ ID NO: 70464 - protein, 342 aa, Arabidopsis thaliana
  peptide (1)..(342): Ceres Seq. ID no. 2708381
MKIGVKGLVDAGITKVPRIFHHQDVAVTNPKPSSTLEIPTIDVGGGVFESTVTRKSVIAKVRAAVEKFGFFQVINHGIPLEVMESMKDGIRGFHEQDSEVKKTFYSRDITKKVKYNTNFDLYSSQAANWRDTLTMVMAPDVPQAGDLPVICREIMLEYSKRMMKLGELIFELLSEALGLKPNHLKELNCAKSLSLLSHYYPPCPEPDRTFGISSHTDISFITILLQDHIGGLQVLHDGYWIDVPPNPEALIVNLGDLLQLITNDKFVSVEHRVLANRGEEPRISSASFFMHTIPNEQVYGPMKELLSKQNPPKYRNTTTTEMARHYLARGLDGTSPLLHFRI

SEQ ID NO: 70465 - protein, 260 aa, Arabidopsis thaliana
  peptide (1)..(260): Ceres Seq. ID no. 2708382
MESMKDGIRGFHEQDSEVKKTFYSRDITKKVKYNTNFDLYSSQAANWRDTLTMVMAPDVPQAGDLPVICREIMLEYSKRMMKLGELIFELLSEALGLKPNHLKELNCAKSLSLLSHYYPPCPEPDRTFGISSHTDISFITILLQDHIGGLQVLHDGYWIDVPPNPEALIVNLGDLLQLITNDKFVSVEHRVLANRGEEPRISSASFFMHTIPNEQVYGPMKELLSKQNPPKYRNTTTTEMARHYLARGLDGTSPLLHFRI

SEQ ID NO: 70466 - DNA, 672 bp, Arabidopsis thaliana
  misc_feature (1)..(672): Ceres Seq. ID no. 2708879
  misc_feature (1)..(672): Ortholog of  Ceres SEQ ID NO 12609339 as cited in SEQ ID NO 51780
atgtcttatgttaccgatttttatcaggcgaagttgaagctctactcttactggagaagctcatgtgctcatcgcgtccgtatcgccctcactttaaaagggcttgattatgaatatataccggttaatttgctcaaaggggatcaatccgattcagatttcaagaagatcaatccaatgggcactgtaccagcgcttgttgatggtgatgttgtgattaatgactctttcgcaataataatgtacctggatgataagtatccggagccaccgctgttaccaagtgactaccataaacgggcggtaaattaccaggcgacgagtattgtcatgtctggtatacagcctcatcaaaatatggctctttttaggtatctcgaggacaagataaatgctgaggagaaaactgcttggattactaatgctatcacaaaaggattcacagctctcgagaaactgttggtgagttgcgctggaaaatacgcgactggtgatgaagtttacttggctgatcttttcctagcaccacagatccacgcagcattcaacagattccatattaacatggaaccattcccgactcttgcaaggttttacgagtcatacaacgaactgcctgcatttcaaaatgcagtcccggagaagcaaccagatactccttccaccatctga

SEQ ID NO: 70467 - protein, 223 aa, Arabidopsis thaliana
  peptide (1)..(223): Ceres Seq. ID no. 2708880
MSYVTDFYQAKLKLYSYWRSSCAHRVRIALTLKGLDYEYIPVNLLKGDQSDSDFKKINPMGTVPALVDGDVVINDSFAIIMYLDDKYPEPPLLPSDYHKRAVNYQATSIVMSGIQPHQNMALFRYLEDKINAEEKTAWITNAITKGFTALEKLLVSCAGKYATGDEVYLADLFLAPQIHAAFNRFHINMEPFPTLARFYESYNELPAFQNAVPEKQPDTPSTI

SEQ ID NO: 70468 - protein, 164 aa, Arabidopsis thaliana
  peptide (1)..(164): Ceres Seq. ID no. 2708881
MGTVPALVDGDVVINDSFAIIMYLDDKYPEPPLLPSDYHKRAVNYQATSIVMSGIQPHQNMALFRYLEDKINAEEKTAWITNAITKGFTALEKLLVSCAGKYATGDEVYLADLFLAPQIHAAFNRFHINMEPFPTLARFYESYNELPAFQNAVPEKQPDTPSTI

SEQ ID NO: 70469 - protein, 143 aa, Arabidopsis thaliana
  peptide (1)..(143): Ceres Seq. ID no. 2708882
MYLDDKYPEPPLLPSDYHKRAVNYQATSIVMSGIQPHQNMALFRYLEDKINAEEKTAWITNAITKGFTALEKLLVSCAGKYATGDEVYLADLFLAPQIHAAFNRFHINMEPFPTLARFYESYNELPAFQNAVPEKQPDTPSTI

SEQ ID NO: 70470 - DNA, 2640 bp, Arabidopsis thaliana
  misc_feature (1)..(2640): Ceres Seq. ID no. 2708977
  misc_feature (1)..(2640): Ortholog of  Ceres SEQ ID NO 13654989 as cited in SEQ ID NO 63117
  misc_feature (1)..(2640): Ortholog of  Ceres SEQ ID NO 13584744 as cited in SEQ ID NO 69137
atggaaggtcgtcgtcaacgtttactggtgttcatctttggggctttggccattacacatcttgttcaagctcagccgcctgatcaacgaggattcatcagtttggattgcggtttacccgttaatgagtctccttataccgacccacgaaccggattaacattctcatctgatgctgattttattttaagtggtttacgtggtgaagctggggatgataacacatatatctacaggcagtacaaggatttgagatattttcccgatggaatacgaaactgctataatctgaaagtagagcaaggcatcaactatttgataagagcagggttcggatatggaaattatgatggtcttaatgtatatcccaaatttgatttacatgttgggcctaacatgtggattgcggttgatttggaattcggaaaagatcgtgagatcatttacatgacaacgtcgaacttattgcagatttgtcttgtcaaaacaggatcaactataccaatgatatcaaccttggaactacggccactaagaaatgattcatatttgactcaattcggtcccttagacctcatctaccggcgggcctatagtagcaattctaccggttttatacggtatcctgatgatatttttgatcgcaaatgggaccgatataatgaatttgaaacggatgtgaacaccaccctcaacgtgagatcctcgagtccctttcaagtaccagaagctgtaagtaggatgggaatcacgcccgaaaatgccagcttgccattgagattttacgtgtctctagatgacgacagtgacaaggttaacgtgtactttcactttgccgaaatccaagctttgaggggcaatgagactagagaattcgacattgaattggaagaagatattattcagtcagcatatagtcctacgatgttacaatcagataccaaatataacctatcacctcacaaatgtagctccgggttgtgctacttgaaactcgttagaactccaaggtcaactcttccaccgctgattagtgctattgaggctttcaaggttgtggactttccatacgctgaaacaaatccaaatgacgtcgctgctatgaaggatatcgaagcattttatggattgaagatgattagttggcaaggagatccttgtgtccctgaactattaaagtgggaagatctaaaatgcagctacacaaataagtctactcctccaagaattatttctttagatttgtcatcacgagggttaaaaggggtcattgcgcctgccttccaaaatttgaccgagcttcgaaaactagacttgtcaaataatagttttactggaggagtgcccgagtttctagccagcatgaagtcattatcgatcataaatttaaattggaatgaccttacgggtcctcttcctaaattgcttcttgatagagaaaagaatgggcttaagctaacgatccaaggaaacccaaagttgtgtaacgatgcgtcatgcaaaaataataacaatcaaacgtacattgtaccagttgttgcgtcagtagcttctgtgctcatcattatagccgtactgattctcattcttgttttcaaaaagagaaggccaacgcaagttgattcattacctacagtgcaacatgggttaccaaatagaccgtctatatttactcaaacgaaaaggttcacttattcagaggtagaagcattaacagataattttgaaagagttcttggagaaggagggtttggggtagtgtatcatggtattttaaatggtacgcaaccaatagctgttaaactactctctcaatcatcagtacaaggctataaggaattcaaagctgaggttgaacttcttttgagagtgcaccacgtcaatttggttagtttggttggatattgtgatgaagaaagcaacttggccctgctttatgagtatgcaccgaacggagacttaaaacaacatctatcagaacggggtggctctccattgaagtggtcaagtagactaaaaattgtcgtcgaaactgcgcaaggattagaatacttgcatacgggttgcaaacctccaatggtacatcgtgatgtaaaaacaacaaatatacttttagacgaacacttccaagcaaaactcgccgattttggcctttcaagatcatttccagttggaggtgaaactcatgtttcaacagctgttgctggaactcctggatatttggatcccgaatattatcgaacaaataggttgaacgaaaagagtgatgtatatagctttgggattgtattattggagatcatcacaagtcgacctgtgattcagcaaacccgagagaagccgcacatagcagcatgggtgggatacatgcttactaagggagatattgagaacgttgtggatccaagactcaatagagattatgagcctacttctgtttggaaggctcttgagatagcaatgtcttgcgtgaatccttcttcggagaaaagaccaaccatgtctcaagttactaatgaactaaagcaatgtctaacattagaaaactcaaagcgaggagtgagagaagacatgggatcaagaagttctgttgaaatgagcacaagctttacaaccgaaattaacccaaaagcacgataa

SEQ ID NO: 70471 - protein, 879 aa, Arabidopsis thaliana
  peptide (1)..(879): Ceres Seq. ID no. 2708978
MEGRRQRLLVFIFGALAITHLVQAQPPDQRGFISLDCGLPVNESPYTDPRTGLTFSSDADFILSGLRGEAGDDNTYIYRQYKDLRYFPDGIRNCYNLKVEQGINYLIRAGFGYGNYDGLNVYPKFDLHVGPNMWIAVDLEFGKDREIIYMTTSNLLQICLVKTGSTIPMISTLELRPLRNDSYLTQFGPLDLIYRRAYSSNSTGFIRYPDDIFDRKWDRYNEFETDVNTTLNVRSSSPFQVPEAVSRMGITPENASLPLRFYVSLDDDSDKVNVYFHFAEIQALRGNETREFDIELEEDIIQSAYSPTMLQSDTKYNLSPHKCSSGLCYLKLVRTPRSTLPPLISAIEAFKVVDFPYAETNPNDVAAMKDIEAFYGLKMISWQGDPCVPELLKWEDLKCSYTNKSTPPRIISLDLSSRGLKGVIAPAFQNLTELRKLDLSNNSFTGGVPEFLASMKSLSIINLNWNDLTGPLPKLLLDREKNGLKLTIQGNPKLCNDASCKNNNNQTYIVPVVASVASVLIIIAVLILILVFKKRRPTQVDSLPTVQHGLPNRPSIFTQTKRFTYSEVEALTDNFERVLGEGGFGVVYHGILNGTQPIAVKLLSQSSVQGYKEFKAEVELLLRVHHVNLVSLVGYCDEESNLALLYEYAPNGDLKQHLSERGGSPLKWSSRLKIVVETAQGLEYLHTGCKPPMVHRDVKTTNILLDEHFQAKLADFGLSRSFPVGGETHVSTAVAGTPGYLDPEYYRTNRLNEKSDVYSFGIVLLEIITSRPVIQQTREKPHIAAWVGYMLTKGDIENVVDPRLNRDYEPTSVWKALEIAMSCVNPSSEKRPTMSQVTNELKQCLTLENSKRGVREDMGSRSSVEMSTSFTTEINPKAR

SEQ ID NO: 70472 - protein, 747 aa, Arabidopsis thaliana
  peptide (1)..(747): Ceres Seq. ID no. 2708979
MWIAVDLEFGKDREIIYMTTSNLLQICLVKTGSTIPMISTLELRPLRNDSYLTQFGPLDLIYRRAYSSNSTGFIRYPDDIFDRKWDRYNEFETDVNTTLNVRSSSPFQVPEAVSRMGITPENASLPLRFYVSLDDDSDKVNVYFHFAEIQALRGNETREFDIELEEDIIQSAYSPTMLQSDTKYNLSPHKCSSGLCYLKLVRTPRSTLPPLISAIEAFKVVDFPYAETNPNDVAAMKDIEAFYGLKMISWQGDPCVPELLKWEDLKCSYTNKSTPPRIISLDLSSRGLKGVIAPAFQNLTELRKLDLSNNSFTGGVPEFLASMKSLSIINLNWNDLTGPLPKLLLDREKNGLKLTIQGNPKLCNDASCKNNNNQTYIVPVVASVASVLIIIAVLILILVFKKRRPTQVDSLPTVQHGLPNRPSIFTQTKRFTYSEVEALTDNFERVLGEGGFGVVYHGILNGTQPIAVKLLSQSSVQGYKEFKAEVELLLRVHHVNLVSLVGYCDEESNLALLYEYAPNGDLKQHLSERGGSPLKWSSRLKIVVETAQGLEYLHTGCKPPMVHRDVKTTNILLDEHFQAKLADFGLSRSFPVGGETHVSTAVAGTPGYLDPEYYRTNRLNEKSDVYSFGIVLLEIITSRPVIQQTREKPHIAAWVGYMLTKGDIENVVDPRLNRDYEPTSVWKALEIAMSCVNPSSEKRPTMSQVTNELKQCLTLENSKRGVREDMGSRSSVEMSTSFTTEINPKAR

SEQ ID NO: 70473 - protein, 730 aa, Arabidopsis thaliana
  peptide (1)..(730): Ceres Seq. ID no. 2708980
MTTSNLLQICLVKTGSTIPMISTLELRPLRNDSYLTQFGPLDLIYRRAYSSNSTGFIRYPDDIFDRKWDRYNEFETDVNTTLNVRSSSPFQVPEAVSRMGITPENASLPLRFYVSLDDDSDKVNVYFHFAEIQALRGNETREFDIELEEDIIQSAYSPTMLQSDTKYNLSPHKCSSGLCYLKLVRTPRSTLPPLISAIEAFKVVDFPYAETNPNDVAAMKDIEAFYGLKMISWQGDPCVPELLKWEDLKCSYTNKSTPPRIISLDLSSRGLKGVIAPAFQNLTELRKLDLSNNSFTGGVPEFLASMKSLSIINLNWNDLTGPLPKLLLDREKNGLKLTIQGNPKLCNDASCKNNNNQTYIVPVVASVASVLIIIAVLILILVFKKRRPTQVDSLPTVQHGLPNRPSIFTQTKRFTYSEVEALTDNFERVLGEGGFGVVYHGILNGTQPIAVKLLSQSSVQGYKEFKAEVELLLRVHHVNLVSLVGYCDEESNLALLYEYAPNGDLKQHLSERGGSPLKWSSRLKIVVETAQGLEYLHTGCKPPMVHRDVKTTNILLDEHFQAKLADFGLSRSFPVGGETHVSTAVAGTPGYLDPEYYRTNRLNEKSDVYSFGIVLLEIITSRPVIQQTREKPHIAAWVGYMLTKGDIENVVDPRLNRDYEPTSVWKALEIAMSCVNPSSEKRPTMSQVTNELKQCLTLENSKRGVREDMGSRSSVEMSTSFTTEINPKAR

SEQ ID NO: 70474 - DNA, 1134 bp, Arabidopsis thaliana
  misc_feature (1)..(1134): Ceres Seq. ID no. 2709140
  misc_feature (1)..(1134): Ortholog of  Ceres SEQ ID NO 14304004 as cited in SEQ ID NO 52969
  misc_feature (1)..(1134): Ortholog of  Ceres SEQ ID NO 14313875 as cited in SEQ ID NO 54872
atggaagacgacaagaagaagaagagaaacaagaaaaagaagaataagcagaataataaacgtgttgacgacgctttagcttctggtgcaacgacctccgtcgatgaaaatcatatcggagatggtgacgttcctcaaattagcggaggtccagatgccgatgagtcgcaatcatctcatcagatcgatgtcgtcgcaactgaagatgattctggtgttgagaacaagtctcagggaagtgaggtgctgttggaagaaacaattaaacagttacgtgaggaaaatggttcctaccttcagaaagaggaaaagttggaggaaagacttgtgcagtataaaaacaagaacgacatgcttcttcgtgaaatgtctagcacagaagcccagatgagacaattgctagatgaaagatctaccttcactcagaaagaggcgagtctagaaaagaaagttcaacaacttcaacacgatgaagaatccttggtggctgaggagaagtcatccagagaaatgatatctagccttaacaatgaaattgcaaggctgcgagcacaggttacggagttggaaaaatctaagagtaatcttctagagcagaatcagagtcttaaggaaactatatccaatcttcaagtccagcatgaaaaccatgatagtaacgcaaagggtgcttctgaggaagaattaaactcacagattgaagcagcttgtactctagttgaaaagcttatcactgaaaatgctgatctagttgaaaaggtgaacgaattgtgtattaagctaaaccaatcacagcatgcttcccctgagagcctagcaattgaagtagagaaatctgaatccttagaagaaatacccatacacgacgagttgattagaattgataactctagggacatggatactgcatcaataaagagaaacttttcagaaggtgaaatagaagaaacggtgccgctctctctgaacgcgaatggggaagtagacgtggaatcacaggttgcagtagctggagaagacgaaataaatgctggtgtgcctctggcggacgctccacttatcggtgctccattcaggctcgtctcgtttgtagcaagatacgtgagtggtgcagatttggcggcaaagaaatag

SEQ ID NO: 70475 - protein, 377 aa, Arabidopsis thaliana
  peptide (1)..(377): Ceres Seq. ID no. 2709141
MEDDKKKKRNKKKKNKQNNKRVDDALASGATTSVDENHIGDGDVPQISGGPDADESQSSHQIDVVATEDDSGVENKSQGSEVLLEETIKQLREENGSYLQKEEKLEERLVQYKNKNDMLLREMSSTEAQMRQLLDERSTFTQKEASLEKKVQQLQHDEESLVAEEKSSREMISSLNNEIARLRAQVTELEKSKSNLLEQNQSLKETISNLQVQHENHDSNAKGASEEELNSQIEAACTLVEKLITENADLVEKVNELCIKLNQSQHASPESLAIEVEKSESLEEIPIHDELIRIDNSRDMDTASIKRNFSEGEIEETVPLSLNANGEVDVESQVAVAGEDEINAGVPLADAPLIGAPFRLVSFVARYVSGADLAAKK

SEQ ID NO: 70476 - protein, 260 aa, Arabidopsis thaliana
  peptide (1)..(260): Ceres Seq. ID no. 2709142
MLLREMSSTEAQMRQLLDERSTFTQKEASLEKKVQQLQHDEESLVAEEKSSREMISSLNNEIARLRAQVTELEKSKSNLLEQNQSLKETISNLQVQHENHDSNAKGASEEELNSQIEAACTLVEKLITENADLVEKVNELCIKLNQSQHASPESLAIEVEKSESLEEIPIHDELIRIDNSRDMDTASIKRNFSEGEIEETVPLSLNANGEVDVESQVAVAGEDEINAGVPLADAPLIGAPFRLVSFVARYVSGADLAAKK

SEQ ID NO: 70477 - protein, 255 aa, Arabidopsis thaliana
  peptide (1)..(255): Ceres Seq. ID no. 2709143
MSSTEAQMRQLLDERSTFTQKEASLEKKVQQLQHDEESLVAEEKSSREMISSLNNEIARLRAQVTELEKSKSNLLEQNQSLKETISNLQVQHENHDSNAKGASEEELNSQIEAACTLVEKLITENADLVEKVNELCIKLNQSQHASPESLAIEVEKSESLEEIPIHDELIRIDNSRDMDTASIKRNFSEGEIEETVPLSLNANGEVDVESQVAVAGEDEINAGVPLADAPLIGAPFRLVSFVARYVSGADLAAKK

SEQ ID NO: 70478 - DNA, 1764 bp, Arabidopsis thaliana
  misc_feature (1)..(1764): Ceres Seq. ID no. 2709167
  misc_feature (1)..(1764): Ortholog of  Ceres SEQ ID NO 15169092 as cited in SEQ ID NO 60430
atgtctccgtcttcaaccactacttgcacttcccttcttgaagagttgcagatgatatgggatgagattggtgaaagttacaatgaaagagataagatgctgctagaacttgagcaggaatgtctggatatatacaataagaaggttgagaaaactcgtaagttcagagctgagttacagcgatcattagctcaagctgaagctgagattgccagcctcatgtctgcgcttggtgaaaaagtttcgtttgccaagaagaaagaaggctctttgaaggagcagatttccagtgtaaagcctgtactggaagatctactgatgaaaaaggatcgaagaaggaaagagctctctgagacactgaatcaaatagcagagatcacgtctaacatagcagggaatgattatactgttagttctggttcagaagttgatgaaagtgacttgacacaaagaaagttggatgaacttagagcagatctgcaggatcttcgaaatgaaaaggctgttcgactgcagaaagtaaactcttatatcagtgctgtccatgagctgtcagagattctgtcttttgatttctccaaggccctgaatagtgtccatagcagcttgactgagttttcaaagactcattcgaaaagcattagtaatgatactcttgctaggttcacagaacttgtaaagtctctgaaggcggagaaacatgagaggctgcttaagctacaaggtttgggaagaagcatgcaagagctgtggaacctaatggaaacacctatggatgagaggagaagatttgaccattgcagcagcttactttctagtctacctgatgatgccttgaaaaaaggatgcctcagcctagacattatccgagaggccgaagatgaagtgagaagactgaattccctgaagtccagcaaaatgaaggaattggtgtttaagaggcagtgtgaactagaagagatctgcagagggaatcatatggatatcaatagtgatgctgcaagaaagagtcttgtcgaactcattgaatctggtgatggtgatctgtctgatattcttgcaagcatagatggtcagatcgagaaggcaagagaagaagctttaagcagaaaggaaatattggacaaagttgataagtggagacacgcaaaggaggaagaaacatggcttgatgattatgaaaaggatgaaaatcgcttcagtgctgtgagaggagcacacaaaaatctaaaacgggcagaaaaagctaggagccttatcagcaaaattcctgtttttaagcagttcaacaagaaattttgggctcttcttttttcgcctaaacagttgttcaaattctctaactcgatcattgattactgcgaaaactcgaccactcattcaatggtggatgttctgaccacgaaagtgaaggcctgggagaaagaaagaggggtccccttcttatgcgataagcaaccgttattacaaacactagaagatgacattgttatccgtgctcaaagagaagaggaaaagcgtcaattccgagagcagaaacgactacaaggtcagcttgctacagagaaagaagcaaagtatggttccaagtctgcaaagaagaagccattgggacagagtcttaacacagacaatgtgactaaaactcccattggtcggcgcattggaaatacacctggacgttctgttacttctggtggcaaagattatagaggcaatgcggtgataccattgaactatgttgctcttcagaaagacgattga

SEQ ID NO: 70479 - protein, 587 aa, Arabidopsis thaliana
  peptide (1)..(587): Ceres Seq. ID no. 2709168
MSPSSTTTCTSLLEELQMIWDEIGESYNERDKMLLELEQECLDIYNKKVEKTRKFRAELQRSLAQAEAEIASLMSALGEKVSFAKKKEGSLKEQISSVKPVLEDLLMKKDRRRKELSETLNQIAEITSNIAGNDYTVSSGSEVDESDLTQRKLDELRADLQDLRNEKAVRLQKVNSYISAVHELSEILSFDFSKALNSVHSSLTEFSKTHSKSISNDTLARFTELVKSLKAEKHERLLKLQGLGRSMQELWNLMETPMDERRRFDHCSSLLSSLPDDALKKGCLSLDIIREAEDEVRRLNSLKSSKMKELVFKRQCELEEICRGNHMDINSDAARKSLVELIESGDGDLSDILASIDGQIEKAREEALSRKEILDKVDKWRHAKEEETWLDDYEKDENRFSAVRGAHKNLKRAEKARSLISKIPVFKQFNKKFWALLFSPKQLFKFSNSIIDYCENSTTHSMVDVLTTKVKAWEKERGVPFLCDKQPLLQTLEDDIVIRAQREEEKRQFREQKRLQGQLATEKEAKYGSKSAKKKPLGQSLNTDNVTKTPIGRRIGNTPGRSVTSGGKDYRGNAVIPLNYVALQKDD

SEQ ID NO: 70480 - protein, 570 aa, Arabidopsis thaliana
  peptide (1)..(570): Ceres Seq. ID no. 2709169
MIWDEIGESYNERDKMLLELEQECLDIYNKKVEKTRKFRAELQRSLAQAEAEIASLMSALGEKVSFAKKKEGSLKEQISSVKPVLEDLLMKKDRRRKELSETLNQIAEITSNIAGNDYTVSSGSEVDESDLTQRKLDELRADLQDLRNEKAVRLQKVNSYISAVHELSEILSFDFSKALNSVHSSLTEFSKTHSKSISNDTLARFTELVKSLKAEKHERLLKLQGLGRSMQELWNLMETPMDERRRFDHCSSLLSSLPDDALKKGCLSLDIIREAEDEVRRLNSLKSSKMKELVFKRQCELEEICRGNHMDINSDAARKSLVELIESGDGDLSDILASIDGQIEKAREEALSRKEILDKVDKWRHAKEEETWLDDYEKDENRFSAVRGAHKNLKRAEKARSLISKIPVFKQFNKKFWALLFSPKQLFKFSNSIIDYCENSTTHSMVDVLTTKVKAWEKERGVPFLCDKQPLLQTLEDDIVIRAQREEEKRQFREQKRLQGQLATEKEAKYGSKSAKKKPLGQSLNTDNVTKTPIGRRIGNTPGRSVTSGGKDYRGNAVIPLNYVALQKDD

SEQ ID NO: 70481 - protein, 555 aa, Arabidopsis thaliana
  peptide (1)..(555): Ceres Seq. ID no. 2709170
MLLELEQECLDIYNKKVEKTRKFRAELQRSLAQAEAEIASLMSALGEKVSFAKKKEGSLKEQISSVKPVLEDLLMKKDRRRKELSETLNQIAEITSNIAGNDYTVSSGSEVDESDLTQRKLDELRADLQDLRNEKAVRLQKVNSYISAVHELSEILSFDFSKALNSVHSSLTEFSKTHSKSISNDTLARFTELVKSLKAEKHERLLKLQGLGRSMQELWNLMETPMDERRRFDHCSSLLSSLPDDALKKGCLSLDIIREAEDEVRRLNSLKSSKMKELVFKRQCELEEICRGNHMDINSDAARKSLVELIESGDGDLSDILASIDGQIEKAREEALSRKEILDKVDKWRHAKEEETWLDDYEKDENRFSAVRGAHKNLKRAEKARSLISKIPVFKQFNKKFWALLFSPKQLFKFSNSIIDYCENSTTHSMVDVLTTKVKAWEKERGVPFLCDKQPLLQTLEDDIVIRAQREEEKRQFREQKRLQGQLATEKEAKYGSKSAKKKPLGQSLNTDNVTKTPIGRRIGNTPGRSVTSGGKDYRGNAVIPLNYVALQKDD

SEQ ID NO: 70482 - DNA, 1389 bp, Arabidopsis thaliana
  misc_feature (1)..(1389): Ceres Seq. ID no. 2709449
  misc_feature (1)..(1389): Ortholog of  Ceres SEQ ID NO 13654989 as cited in SEQ ID NO 63117
  misc_feature (1)..(1389): Ortholog of  Ceres SEQ ID NO 13584744 as cited in SEQ ID NO 69137
atgaagtgttttcacttcaccaatggcgacaagagaacaacaacaacaatcgaagaaggagtaggaggaggagacagtgttgtttcaagagcttcaagactctcatgggctcgttctctaagcgtagcatcatccaccacttcagacccaactcgccggtccgagtttgactcagactggagtttctcaccggaaagacttacttttcccaagccattaagtcaacgttggatcggtggacttgttcctgagaatgatctaaaggtgtttactttcaaagagctgaaaatagctactaaaggtttcaatagaggtcttttgattggcgaaggagggtttggttgcgtttatagaggtgttgttgatgtttcagactctaatggttttgattcgaagattaatgttgctgttaaacagcttaatcgtcaaggtttacaggggcataaggaatggatcaatgaggtgaattttctaggagtagtgaatcatccaaatcttgtgaagttagttgggtattgtgctgatgatgatgaaagagggatgcaaaggcttctagtctatgaacttatgtgtaataagagcttggaggatcatctcgtaggccgagttgtgtcggtatctctaccgtggatgatgaggttgaagattgcgcaagatgctgctcaaggcttagcttatcttcatgaagaaatggattttcagttgatatttcgagatttcaagtcttcaaacatcttgcttgatgagagattcggtgcaaagctctcggattttggattagctaggcaaggacctcctgaaggacttggtcatgtctcaacttcagttgtaggtacggttggttacgcagctcctgagtatgtacaaaccgggaaattgacggcaaagagtgatgtatggagctttggggtagtgttgtatgaactgatcacgggaagacgagcagtggatagaaatcgacctcgaggtgaacagaagcttttagaatgggtgaagccttatgtatcagactcgaagaagttccatctgattgtcgatccacggctcgaaggccagtactactgtatgaagtctgttcaaagagtagctgctttagcaaacaaatgtctaatgaagcaaccgaaatctcggcctaaaatgagcgaagtcgtatcactacttggacgcatcatcgatgaagaagcggaaaacgttcctccgccagttgctgatgaaacagaagagataatcaaagctgagctcaatggagagagtgagcctgagctaaagaagcaaggtagtagttatcgtaagaaggttcttgatcttagggataagatgaacttaaacaagtcgctttcgaagctagactggcgaaactggacaccaggactggtcagaacatggtag

SEQ ID NO: 70483 - protein, 462 aa, Arabidopsis thaliana
  peptide (1)..(462): Ceres Seq. ID no. 2709450
MKCFHFTNGDKRTTTTIEEGVGGGDSVVSRASRLSWARSLSVASSTTSDPTRRSEFDSDWSFSPERLTFPKPLSQRWIGGLVPENDLKVFTFKELKIATKGFNRGLLIGEGGFGCVYRGVVDVSDSNGFDSKINVAVKQLNRQGLQGHKEWINEVNFLGVVNHPNLVKLVGYCADDDERGMQRLLVYELMCNKSLEDHLVGRVVSVSLPWMMRLKIAQDAAQGLAYLHEEMDFQLIFRDFKSSNILLDERFGAKLSDFGLARQGPPEGLGHVSTSVVGTVGYAAPEYVQTGKLTAKSDVWSFGVVLYELITGRRAVDRNRPRGEQKLLEWVKPYVSDSKKFHLIVDPRLEGQYYCMKSVQRVAALANKCLMKQPKSRPKMSEVVSLLGRIIDEEAENVPPPVADETEEIIKAELNGESEPELKKQGSSYRKKVLDLRDKMNLNKSLSKLDWRNWTPGLVRTW

SEQ ID NO: 70484 - protein, 282 aa, Arabidopsis thaliana
  peptide (1)..(282): Ceres Seq. ID no. 2709451
MQRLLVYELMCNKSLEDHLVGRVVSVSLPWMMRLKIAQDAAQGLAYLHEEMDFQLIFRDFKSSNILLDERFGAKLSDFGLARQGPPEGLGHVSTSVVGTVGYAAPEYVQTGKLTAKSDVWSFGVVLYELITGRRAVDRNRPRGEQKLLEWVKPYVSDSKKFHLIVDPRLEGQYYCMKSVQRVAALANKCLMKQPKSRPKMSEVVSLLGRIIDEEAENVPPPVADETEEIIKAELNGESEPELKKQGSSYRKKVLDLRDKMNLNKSLSKLDWRNWTPGLVRTW

SEQ ID NO: 70485 - protein, 273 aa, Arabidopsis thaliana
  peptide (1)..(273): Ceres Seq. ID no. 2709452
MCNKSLEDHLVGRVVSVSLPWMMRLKIAQDAAQGLAYLHEEMDFQLIFRDFKSSNILLDERFGAKLSDFGLARQGPPEGLGHVSTSVVGTVGYAAPEYVQTGKLTAKSDVWSFGVVLYELITGRRAVDRNRPRGEQKLLEWVKPYVSDSKKFHLIVDPRLEGQYYCMKSVQRVAALANKCLMKQPKSRPKMSEVVSLLGRIIDEEAENVPPPVADETEEIIKAELNGESEPELKKQGSSYRKKVLDLRDKMNLNKSLSKLDWRNWTPGLVRTW

SEQ ID NO: 70486 - DNA, 981 bp, Arabidopsis thaliana
  misc_feature (1)..(981): Ceres Seq. ID no. 2709504
  misc_feature (1)..(981): Ortholog of  Ceres SEQ ID NO 14311229 as cited in SEQ ID NO 53262
atggagcaccaccaccagcatcaccgtcaccaccaacgcgacgacggagaagacgatcgtcaatcctttggagtaccaccgccacacgtcgatgctccgccacaacctcatggtctttaccagtcacagcctcattttgatccttacgcgcctactcctcaagctccggcgccttaccgatcagaaactcaattcgaaccccacgcgcctccgccttaccgatcagagccttactttgaaactccggcaccaccgccttcatttggtcatgtgagtcatgttggtcaccaatcacccaacgaatcttacccaccggaacaccaccgttacggaggttatcaacagccgtctaattccttactggaaagtcatggagatcacagtggagtcacgcacgtggctcaccatagctcaaatcagccccaatcgtcttctggtgtctaccacaagcctgatgagaatcgtctacctgataatcttgctggactcgccggaagagcaacggtgaaggtgtattccaaggcggagcctaactataatttgacgatcagagatggtaaggttattctcgccccagcggatccatctgatgaagcacagcattggtacaaagacgagaagtatagtactaaagtgaaggacgcagacggtcatccttgttttgctcttgtaaacaaagctactggtgaagcaatgaagcattctgtgggagctactcatcccgtgcatctgattcgatatgtgcctgataagcttgacgagtcagtactatggacagagagcaaggattttggcgatggatatcgcacaataagaatggtaaacaatacgaggctaaacgtggatgcatatcatggtgacagcaaatctggtggtgtacgtgatggcacgactatcgtcctctgggactggaacaaaggcgacaaccagctctggaagatctttcctttctgtaagcttttctttaccgtttctgcttag

SEQ ID NO: 70487 - protein, 326 aa, Arabidopsis thaliana
  peptide (1)..(326): Ceres Seq. ID no. 2709505
MEHHHQHHRHHQRDDGEDDRQSFGVPPPHVDAPPQPHGLYQSQPHFDPYAPTPQAPAPYRSETQFEPHAPPPYRSEPYFETPAPPPSFGHVSHVGHQSPNESYPPEHHRYGGYQQPSNSLLESHGDHSGVTHVAHHSSNQPQSSSGVYHKPDENRLPDNLAGLAGRATVKVYSKAEPNYNLTIRDGKVILAPADPSDEAQHWYKDEKYSTKVKDADGHPCFALVNKATGEAMKHSVGATHPVHLIRYVPDKLDESVLWTESKDFGDGYRTIRMVNNTRLNVDAYHGDSKSGGVRDGTTIVLWDWNKGDNQLWKIFPFCKLFFTVSA

SEQ ID NO: 70488 - DNA, 1425 bp, Arabidopsis thaliana
  misc_feature (1)..(1425): Ceres Seq. ID no. 2709603
  misc_feature (1)..(1425): Ortholog of  Ceres SEQ ID NO 13654989 as cited in SEQ ID NO 63117
  misc_feature (1)..(1425): Ortholog of  Ceres SEQ ID NO 13657138 as cited in SEQ ID NO 65923
  misc_feature (1)..(1425): Ortholog of  Ceres SEQ ID NO 13584744 as cited in SEQ ID NO 69137
atgggtttatttcttcttgcagctcaaaagataagttcaagaccaagttctgaactctctgaaggattttcagacaaagatcttgcgaaaacaacgggtcaagagaagagaaagatatcaggaagatctctatctcttccatcggtagaggtagtagaccagacaccaggttggccattactaagaacatccactttagctactccaatggttcaacatcagactaggaaaatatcagttgtcaattgggtcatgagcttgcctgaaagatttccacatcatccgaatcagacttgtcaacagagcttttgtgataaacaacttaaagacatactcaaggacataaacagatggtttagctatgatgttctcaagacagcaacatcagatttctctttagagaatctgatcggaaaaggaggatgtaatgaagtttacaaagggtttcttgaagatggtaaaggcgtggcagtgaagatcttgaaaccatctgtaaaagaagcagtgaaggagtttgttcatgaagtgagcatagtctcttctttgagtcactcaaacatctctcctttgattggtgtatgcgttcattacaacgacctaatctctgtttacaatctctcttccaaagggagtttggaggagactcttcaggtttctgtaggtaagcatgtcttgagatgggaagagagactcaagatagcaatagggttaggggaagctcttgattatctacataaccaatgttctaatcctgtgatccacagagatgtcaaatcttccaatgttcttctctcagatgagttcgaacctcagctttcggatttcggtctttcgatgtggggatcgaagtcttgtcgatacacgatacaaagagatgtggtgggtacatttggatatctagctcctgagtactttatgtatggaaaagttagcgataaagtcgatgtatatgcctttggagtagttttgcttgaactcatttcaggaagaacttctatttcatctgatagcccaagagggcaagagagtttggtcatgtgggcaaaaccaatgatcgaaaaaggcaatgcaaaagagctcttggatccgaatattgctggtactttcgacgaggatcagtttcataagatggttcttgctgctacacattgtctcacaagagcagccacttatcgtcccaatatcaaggagatattgaagctgctaagaggcgaagatgatgtctcgaaatgggtgaagatagaagaagatgacgaagatggtttcgacgacgaggtttacccaaattcgaacacagaattacacttgagcctcgcgatggttgacgtggaggataatgactctgtgtcaaacagtagcttggagagaagtaacaacagccttttttcttcttcttcttcttcctctcaggagcttcagtcttaa

SEQ ID NO: 70489 - protein, 474 aa, Arabidopsis thaliana
  peptide (1)..(474): Ceres Seq. ID no. 2709604
MGLFLLAAQKISSRPSSELSEGFSDKDLAKTTGQEKRKISGRSLSLPSVEVVDQTPGWPLLRTSTLATPMVQHQTRKISVVNWVMSLPERFPHHPNQTCQQSFCDKQLKDILKDINRWFSYDVLKTATSDFSLENLIGKGGCNEVYKGFLEDGKGVAVKILKPSVKEAVKEFVHEVSIVSSLSHSNISPLIGVCVHYNDLISVYNLSSKGSLEETLQVSVGKHVLRWEERLKIAIGLGEALDYLHNQCSNPVIHRDVKSSNVLLSDEFEPQLSDFGLSMWGSKSCRYTIQRDVVGTFGYLAPEYFMYGKVSDKVDVYAFGVVLLELISGRTSISSDSPRGQESLVMWAKPMIEKGNAKELLDPNIAGTFDEDQFHKMVLAATHCLTRAATYRPNIKEILKLLRGEDDVSKWVKIEEDDEDGFDDEVYPNSNTELHLSLAMVDVEDNDSVSNSSLERSNNSLFSSSSSSSQELQS

SEQ ID NO: 70490 - protein, 405 aa, Arabidopsis thaliana
  peptide (1)..(405): Ceres Seq. ID no. 2709605
MVQHQTRKISVVNWVMSLPERFPHHPNQTCQQSFCDKQLKDILKDINRWFSYDVLKTATSDFSLENLIGKGGCNEVYKGFLEDGKGVAVKILKPSVKEAVKEFVHEVSIVSSLSHSNISPLIGVCVHYNDLISVYNLSSKGSLEETLQVSVGKHVLRWEERLKIAIGLGEALDYLHNQCSNPVIHRDVKSSNVLLSDEFEPQLSDFGLSMWGSKSCRYTIQRDVVGTFGYLAPEYFMYGKVSDKVDVYAFGVVLLELISGRTSISSDSPRGQESLVMWAKPMIEKGNAKELLDPNIAGTFDEDQFHKMVLAATHCLTRAATYRPNIKEILKLLRGEDDVSKWVKIEEDDEDGFDDEVYPNSNTELHLSLAMVDVEDNDSVSNSSLERSNNSLFSSSSSSSQELQS

SEQ ID NO: 70491 - protein, 390 aa, Arabidopsis thaliana
  peptide (1)..(390): Ceres Seq. ID no. 2709606
MSLPERFPHHPNQTCQQSFCDKQLKDILKDINRWFSYDVLKTATSDFSLENLIGKGGCNEVYKGFLEDGKGVAVKILKPSVKEAVKEFVHEVSIVSSLSHSNISPLIGVCVHYNDLISVYNLSSKGSLEETLQVSVGKHVLRWEERLKIAIGLGEALDYLHNQCSNPVIHRDVKSSNVLLSDEFEPQLSDFGLSMWGSKSCRYTIQRDVVGTFGYLAPEYFMYGKVSDKVDVYAFGVVLLELISGRTSISSDSPRGQESLVMWAKPMIEKGNAKELLDPNIAGTFDEDQFHKMVLAATHCLTRAATYRPNIKEILKLLRGEDDVSKWVKIEEDDEDGFDDEVYPNSNTELHLSLAMVDVEDNDSVSNSSLERSNNSLFSSSSSSSQELQS

SEQ ID NO: 70492 - DNA, 996 bp, Arabidopsis thaliana
  misc_feature (1)..(996): Ceres Seq. ID no. 2709963
  misc_feature (1)..(996): Ortholog of  Ceres SEQ ID NO 13596465 as cited in SEQ ID NO 62133
atggaccgagaagcagtaaaggatcaatacgacatccttatcgacctggaaggatcagtagggactcaaagcgacattgttctgaggtggactcagaccagattatctctttacttcaggcttcttcaacggatgagcttaacgctgtcttctccaggatcgtcaccaccatcctcgccgacagcaccccgagtggcggcccgacgatattggcagcgaatggcgtttggatcgaaaagactctctctgtggaaccttctttcaaggatctctttgaataaagaggtgaattcatgggttgaagagcagacaaatggactcatcactgatcttcttccaccaaactctgcttctcctttgactgatctcatatttgctaatgccttgtttttcaacggaagatgggatagtcaattcaatccatcgctaacaaaagaatccgactttcaccttcttgatggaaccaaagtacgtgtgcccttcatgaccggtgcccacgaagacagtcttgatgtttacgaagctttcaaagtcctcaatctaccgtatagagaaggacgcgaagacagtcgtggtttctctatgcaaatctatctccctgatgagaaagatgggttgccttcaatgctggagagcttagcttctactcgtggattcttgaaggacaacaaggttcttcctagccagaaggcgggtgtcaaggaactcaagattccaaggtttaaatttgcttttgatttcgaagcctcgaaagctctcaagggtttgggtttgaaggtgccattgtctacgatcatccacaagtcttgcatcgaggtcgatgaagtgggatcgaaagctgcagctgctgccgcattaagatcatgtggaggttgttattttccgccaaagaagtatgacttcgtggctgatcatccttttctcttcatcgtcaaagagtacataagcggactagttttgtttcttggtcatgtcatggatccttctaagcactaa

SEQ ID NO: 70493 - protein, 331 aa, Arabidopsis thaliana
  peptide (1)..(331): Ceres Seq. ID no. 2709964
MDREAVKDQYDILIDLEGSVGTQSDIVLRWTQTRLSLYFRLLQRMSLTLSSPGSSPPSSPTAPRVAARRYWQRMAFGSKRLSLWNLLSRISLNKEVNSWVEEQTNGLITDLLPPNSASPLTDLIFANALFFNGRWDSQFNPSLTKESDFHLLDGTKVRVPFMTGAHEDSLDVYEAFKVLNLPYREGREDSRGFSMQIYLPDEKDGLPSMLESLASTRGFLKDNKVLPSQKAGVKELKIPRFKFAFDFEASKALKGLGLKVPLSTIIHKSCIEVDEVGSKAAAAAALRSCGGCYFPPKKYDFVADHPFLFIVKEYISGLVLFLGHVMDPSKH

SEQ ID NO: 70494 - protein, 287 aa, Arabidopsis thaliana
  peptide (1)..(287): Ceres Seq. ID no. 2709965
MSLTLSSPGSSPPSSPTAPRVAARRYWQRMAFGSKRLSLWNLLSRISLNKEVNSWVEEQTNGLITDLLPPNSASPLTDLIFANALFFNGRWDSQFNPSLTKESDFHLLDGTKVRVPFMTGAHEDSLDVYEAFKVLNLPYREGREDSRGFSMQIYLPDEKDGLPSMLESLASTRGFLKDNKVLPSQKAGVKELKIPRFKFAFDFEASKALKGLGLKVPLSTIIHKSCIEVDEVGSKAAAAAALRSCGGCYFPPKKYDFVADHPFLFIVKEYISGLVLFLGHVMDPSKH

SEQ ID NO: 70495 - protein, 258 aa, Arabidopsis thaliana
  peptide (1)..(258): Ceres Seq. ID no. 2709966
MAFGSKRLSLWNLLSRISLNKEVNSWVEEQTNGLITDLLPPNSASPLTDLIFANALFFNGRWDSQFNPSLTKESDFHLLDGTKVRVPFMTGAHEDSLDVYEAFKVLNLPYREGREDSRGFSMQIYLPDEKDGLPSMLESLASTRGFLKDNKVLPSQKAGVKELKIPRFKFAFDFEASKALKGLGLKVPLSTIIHKSCIEVDEVGSKAAAAAALRSCGGCYFPPKKYDFVADHPFLFIVKEYISGLVLFLGHVMDPSKH

SEQ ID NO: 70496 - DNA, 1275 bp, Arabidopsis thaliana
  misc_feature (1)..(1275): Ceres Seq. ID no. 2710402
  misc_feature (1)..(1275): Ortholog of  Ceres SEQ ID NO 12581709 as cited in SEQ ID NO 54052
  misc_feature (1)..(1275): Ortholog of  Ceres SEQ ID NO 13662854 as cited in SEQ ID NO 64786
atgatttcatcgtcagagatgatggcgacggagaaggctccggaatttgtaacagccatggcaactgaaactgaacggatagggaattcgagggaagtagatgaggagaaaataagccgcaagaagaatcctgaagaagaagctcttgaagctaaatgtcttcccggaatcatcagtgcttatctcaagttaaatagttactttccttgtgcttggaaattcttacagttatcccaaggctgcggaagaaaatctgaaaaaatgcgaaagatcatatcagaagctgtctcctgcgcacaaggcattggtaacccatttccctatgaagttgcagagattaagaaggcttttgagccccctatagacttgagtaaacacatgcgcgagccaataacaggagcactgtctatggaggtaccattttcatctcatgattggttggattcttcgttacaggcgcatgttcctctggttgatgtaaataaggttcgttgggtaataaggaatatagttcgagactggggagcagagggtcagagagaacgagatgaatgctacaagcctatccttgaagagcttgattccttgtttcctgatcgtcacaaggagagcactcgtccagcctgtttagtccctggtgctggacttgggcggctggcccttgaaatttcttgtctaggcatgcaaagccaaggcaatgaagtttcatactacatgatgttatgctcaagttttattcttaattatacacaattgcctggtgagtggacaatatacccctggatacacactaactgcaattcactctcggatgatgatcaactacgccctatttctattcctgatattcatcctgcaagtgcaggagtaacagaaagtttctcaatgtgtcgtggtgattttgttgaagtattcaatgaatcaagtcaagcaggaatgtgggatgcagttgtgacttgctttttcattgacacggctcataacatcatcgagtacatcgaaaccatatccaagattttaaaggatggaggagttttgataaatctaggacctctgttgtatcactttgcagacgagcagggccttgaaaatgaaatgtcgattgagctaagtttggaggatgtaaagagagttgcttcacattatgggtttgagatggagaaagaaaaaacaatagaaacaacgtactctacaaacccccggtctatgatgaagaaccgatactatcctgtcttctggacaatgaggaagaagtgtgctataacaacaacttaa

SEQ ID NO: 70497 - protein, 424 aa, Arabidopsis thaliana
  peptide (1)..(424): Ceres Seq. ID no. 2710403
MISSSEMMATEKAPEFVTAMATETERIGNSREVDEEKISRKKNPEEEALEAKCLPGIISAYLKLNSYFPCAWKFLQLSQGCGRKSEKMRKIISEAVSCAQGIGNPFPYEVAEIKKAFEPPIDLSKHMREPITGALSMEVPFSSHDWLDSSLQAHVPLVDVNKVRWVIRNIVRDWGAEGQRERDECYKPILEELDSLFPDRHKESTRPACLVPGAGLGRLALEISCLGMQSQGNEVSYYMMLCSSFILNYTQLPGEWTIYPWIHTNCNSLSDDDQLRPISIPDIHPASAGVTESFSMCRGDFVEVFNESSQAGMWDAVVTCFFIDTAHNIIEYIETISKILKDGGVLINLGPLLYHFADEQGLENEMSIELSLEDVKRVASHYGFEMEKEKTIETTYSTNPRSMMKNRYYPVFWTMRKKCAITTT

SEQ ID NO: 70498 - protein, 418 aa, Arabidopsis thaliana
  peptide (1)..(418): Ceres Seq. ID no. 2710404
MMATEKAPEFVTAMATETERIGNSREVDEEKISRKKNPEEEALEAKCLPGIISAYLKLNSYFPCAWKFLQLSQGCGRKSEKMRKIISEAVSCAQGIGNPFPYEVAEIKKAFEPPIDLSKHMREPITGALSMEVPFSSHDWLDSSLQAHVPLVDVNKVRWVIRNIVRDWGAEGQRERDECYKPILEELDSLFPDRHKESTRPACLVPGAGLGRLALEISCLGMQSQGNEVSYYMMLCSSFILNYTQLPGEWTIYPWIHTNCNSLSDDDQLRPISIPDIHPASAGVTESFSMCRGDFVEVFNESSQAGMWDAVVTCFFIDTAHNIIEYIETISKILKDGGVLINLGPLLYHFADEQGLENEMSIELSLEDVKRVASHYGFEMEKEKTIETTYSTNPRSMMKNRYYPVFWTMRKKCAITTT

SEQ ID NO: 70499 - protein, 417 aa, Arabidopsis thaliana
  peptide (1)..(417): Ceres Seq. ID no. 2710405
MATEKAPEFVTAMATETERIGNSREVDEEKISRKKNPEEEALEAKCLPGIISAYLKLNSYFPCAWKFLQLSQGCGRKSEKMRKIISEAVSCAQGIGNPFPYEVAEIKKAFEPPIDLSKHMREPITGALSMEVPFSSHDWLDSSLQAHVPLVDVNKVRWVIRNIVRDWGAEGQRERDECYKPILEELDSLFPDRHKESTRPACLVPGAGLGRLALEISCLGMQSQGNEVSYYMMLCSSFILNYTQLPGEWTIYPWIHTNCNSLSDDDQLRPISIPDIHPASAGVTESFSMCRGDFVEVFNESSQAGMWDAVVTCFFIDTAHNIIEYIETISKILKDGGVLINLGPLLYHFADEQGLENEMSIELSLEDVKRVASHYGFEMEKEKTIETTYSTNPRSMMKNRYYPVFWTMRKKCAITTT

SEQ ID NO: 70500 - DNA, 1383 bp, Arabidopsis thaliana
  misc_feature (1)..(1383): Ceres Seq. ID no. 2710600
  misc_feature (1)..(1383): Ortholog of  Ceres SEQ ID NO 13597574 as cited in SEQ ID NO 64677
  misc_feature (1)..(1383): Ortholog of  Ceres SEQ ID NO 13597843 as cited in SEQ ID NO 64850
  misc_feature (1)..(1383): Ortholog of  Ceres SEQ ID NO 13597678 as cited in SEQ ID NO 65375
  misc_feature (1)..(1383): Ortholog of  Ceres SEQ ID NO 13662880 as cited in SEQ ID NO 65422
  misc_feature (1)..(1383): Ortholog of  Ceres SEQ ID NO 13596180 as cited in SEQ ID NO 67941
  misc_feature (1)..(1383): Ortholog of  Ceres SEQ ID NO 13591190 as cited in SEQ ID NO 68044
  misc_feature (1)..(1383): Ortholog of  Ceres SEQ ID NO 13595961 as cited in SEQ ID NO 68223
  misc_feature (1)..(1383): Ortholog of  Ceres SEQ ID NO 14313563 as cited in SEQ ID NO 68700
atggccaagcttttcgctagaagaggagccaaatcaactctcctcacaaccccaataaatgctaagatcttggagaaacccattgaagcattcaaagttcaaaatcctgatctcgaaatcggaatcaagatcctcaatttcccttgtgtagagcttggattgccagaaggatgcgagaaccgtgacttcattaactcataccaaaaatctgactcatttgacttgttcttgaagtttcttttctctaccaagtatatgaaacagcagttggagagtttcattgaaacaaccaaaccgagtgctcttgtagccgatatgttcttcccttgggcaacagaatccgcggagaagatcggtgttccaagacttgtgttccacggcacatcatcctttgccttgtgttgttcgtataacatgaggattcataagccacacaagaaagtcgcttcgagttctactccatttgtaatccctggtctccctggagacatagttattacagaagaccaagccaatgtcaccaacgaagaaactccattcggaaagttttggaaagaagtcagggaatcagagaccagtagctttggtgttttggtgaatagcttctacgagctggaatcatcttatgctgatttttaccgtagttttgtggcgaaaaaagcgtggcatataggtccactttcactatccaacagagggattgcagagaaagccggaagagggaaaaaggcaaacattgatgagcaagaatgcctcaaatggcttgactctaagacacctggctcagtagtttacttgtcctttggtagcggaaccggcttacccaacgaacagctgttagagattgctttcggccttgaaggctctggacaaaatttcatttgggtggttagcaaaaatgaaaaccaagttgggacaggtgaaaatgaagattggttgcctaaagggtttgaagagaggaataaaggaaaagggctgataatacgcggatgggccccgcaagtgctgatacttgaccacaaagcaatcggaggatttgtgacgcattgcggatggaactcgactttggagggcattgccgcagggctgcctatggtgacttggccgatgggggcagaacagttctacaacgagaagttattgacaaaagtgttgagaataggagtgaacgttggagctaccgagttggtgaaaaaaggaaagttgattagtagagcacaagtggagaaggcagtaagggaagtgattggtggtgagaaggcagaggaaaggcggctaagggctaaggagctgggcgagatggctaaagccgctgtggaagaaggagggtcttcttataatgatgtgaacaagtttatggaagagctgaatggtagaaagtag

SEQ ID NO: 70501 - protein, 460 aa, Arabidopsis thaliana
  peptide (1)..(460): Ceres Seq. ID no. 2710601
MAKLFARRGAKSTLLTTPINAKILEKPIEAFKVQNPDLEIGIKILNFPCVELGLPEGCENRDFINSYQKSDSFDLFLKFLFSTKYMKQQLESFIETTKPSALVADMFFPWATESAEKIGVPRLVFHGTSSFALCCSYNMRIHKPHKKVASSSTPFVIPGLPGDIVITEDQANVTNEETPFGKFWKEVRESETSSFGVLVNSFYELESSYADFYRSFVAKKAWHIGPLSLSNRGIAEKAGRGKKANIDEQECLKWLDSKTPGSVVYLSFGSGTGLPNEQLLEIAFGLEGSGQNFIWVVSKNENQVGTGENEDWLPKGFEERNKGKGLIIRGWAPQVLILDHKAIGGFVTHCGWNSTLEGIAAGLPMVTWPMGAEQFYNEKLLTKVLRIGVNVGATELVKKGKLISRAQVEKAVREVIGGEKAEERRLRAKELGEMAKAAVEEGGSSYNDVNKFMEELNGRK

SEQ ID NO: 70502 - protein, 375 aa, Arabidopsis thaliana
  peptide (1)..(375): Ceres Seq. ID no. 2710602
MKQQLESFIETTKPSALVADMFFPWATESAEKIGVPRLVFHGTSSFALCCSYNMRIHKPHKKVASSSTPFVIPGLPGDIVITEDQANVTNEETPFGKFWKEVRESETSSFGVLVNSFYELESSYADFYRSFVAKKAWHIGPLSLSNRGIAEKAGRGKKANIDEQECLKWLDSKTPGSVVYLSFGSGTGLPNEQLLEIAFGLEGSGQNFIWVVSKNENQVGTGENEDWLPKGFEERNKGKGLIIRGWAPQVLILDHKAIGGFVTHCGWNSTLEGIAAGLPMVTWPMGAEQFYNEKLLTKVLRIGVNVGATELVKKGKLISRAQVEKAVREVIGGEKAEERRLRAKELGEMAKAAVEEGGSSYNDVNKFMEELNGRK

SEQ ID NO: 70503 - protein, 355 aa, Arabidopsis thaliana
  peptide (1)..(355): Ceres Seq. ID no. 2710603
MFFPWATESAEKIGVPRLVFHGTSSFALCCSYNMRIHKPHKKVASSSTPFVIPGLPGDIVITEDQANVTNEETPFGKFWKEVRESETSSFGVLVNSFYELESSYADFYRSFVAKKAWHIGPLSLSNRGIAEKAGRGKKANIDEQECLKWLDSKTPGSVVYLSFGSGTGLPNEQLLEIAFGLEGSGQNFIWVVSKNENQVGTGENEDWLPKGFEERNKGKGLIIRGWAPQVLILDHKAIGGFVTHCGWNSTLEGIAAGLPMVTWPMGAEQFYNEKLLTKVLRIGVNVGATELVKKGKLISRAQVEKAVREVIGGEKAEERRLRAKELGEMAKAAVEEGGSSYNDVNKFMEELNGRK

SEQ ID NO: 70504 - DNA, 1557 bp, Arabidopsis thaliana
  misc_feature (1)..(1557): Ceres Seq. ID no. 2710864
  misc_feature (1)..(1557): Ortholog of  Ceres SEQ ID NO 15176777 as cited in SEQ ID NO 58368
atggctttacttgagaaactgcaggttatatctgttgtgaagctttcctccattcgaaaatttcaggttgaaaaagatagtatagtctggaaggaaagggagataaatataaaaaatgaactaggtgatgtttctcgaaagacgtctgctgttactgattctagaatggcttctttggattcggagatacagaaacaactggatgaaaaaatgcgaatcaagactaggctgggaaatatatcaagagagcgaggtagaaaagaaatctttgcagatatgaaggcattaatttcttcgttccccgaggaaatgagttccatgcgtagtcaattaaacaattataaagagactgctggaggtattcattctctgcgggctgatgtccagtccctctctggggttctatgtaggaagacaaaagagtatgaagcattgcaattgagatcagctgattatgcttctcagttaggtgacctgaatgctacggtttgtgatttgaagaacagtcatgaggagttaaagttgtttctggacatgtataaacgtgagtccactgatgcgagggacatagctgaagccaaggaacaggagtacagggcttgggctcatgttcagagtttgaaatcatcccttgatgagcaaaatctggagttgcgcgttaaggcagcaaatgaagctgaagccgtttcccaacaaatgttggctgctgcggaagcagagattgctgatttaaggcagaaaatggatgattgtaaaagggatgtcgccaagcattctgatatcttgaaatctaaacatgaagaacatggaacatatctttctgaaatacagacaattggaagtgcctatgaggacattgtaccgcaaaaccaacagcttttgcttcaagttacagagagggatgactataacatcaagcttttcttggaaggcataacttctaggcagatgcaagatactctgcttatcgataaatacatcatggataaggatatacagcaaggcagtgcatatgccagtttcctatccaagaaatcatcaagaattgaagatcagttgaggttctgcacagatcagtttcagaaactagcggaagataaatatcaaaagtctgtttctcttgaaaatctgcaaaagaaacgtgcagacatcgggaatggcttggaacaagctaggtcaaggctggaggagtcccattctaaagttgagcaaagtcggctggattatggggcattagaactggaactggagattgaaaggttcaataggagaaggatagaggaggaaatggaaatagccaaaaagaaagtttctcgtcttcggtctctcatagaaggatcatcggccattcaaaagctccgacaagaactcagtgaatttaaagaaattctgaagtgtaaggcctgcaacgatcgcccaaaagaggtggtgattacgaagtgctaccatttgttctgcaacccatgtgtgcaaaagctcacaggaactcgacaaaagaagtgtccaacatgctcagcaagttttggaccaaatgatattaaacctatctacatatga

SEQ ID NO: 70505 - protein, 518 aa, Arabidopsis thaliana
  peptide (1)..(518): Ceres Seq. ID no. 2710865
MALLEKLQVISVVKLSSIRKFQVEKDSIVWKEREINIKNELGDVSRKTSAVTDSRMASLDSEIQKQLDEKMRIKTRLGNISRERGRKEIFADMKALISSFPEEMSSMRSQLNNYKETAGGIHSLRADVQSLSGVLCRKTKEYEALQLRSADYASQLGDLNATVCDLKNSHEELKLFLDMYKRESTDARDIAEAKEQEYRAWAHVQSLKSSLDEQNLELRVKAANEAEAVSQQMLAAAEAEIADLRQKMDDCKRDVAKHSDILKSKHEEHGTYLSEIQTIGSAYEDIVPQNQQLLLQVTERDDYNIKLFLEGITSRQMQDTLLIDKYIMDKDIQQGSAYASFLSKKSSRIEDQLRFCTDQFQKLAEDKYQKSVSLENLQKKRADIGNGLEQARSRLEESHSKVEQSRLDYGALELELEIERFNRRRIEEEMEIAKKKVSRLRSLIEGSSAIQKLRQELSEFKEILKCKACNDRPKEVVITKCYHLFCNPCVQKLTGTRQKKCPTCSASFGPNDIKPIYI

SEQ ID NO: 70506 - protein, 463 aa, Arabidopsis thaliana
  peptide (1)..(463): Ceres Seq. ID no. 2710866
MASLDSEIQKQLDEKMRIKTRLGNISRERGRKEIFADMKALISSFPEEMSSMRSQLNNYKETAGGIHSLRADVQSLSGVLCRKTKEYEALQLRSADYASQLGDLNATVCDLKNSHEELKLFLDMYKRESTDARDIAEAKEQEYRAWAHVQSLKSSLDEQNLELRVKAANEAEAVSQQMLAAAEAEIADLRQKMDDCKRDVAKHSDILKSKHEEHGTYLSEIQTIGSAYEDIVPQNQQLLLQVTERDDYNIKLFLEGITSRQMQDTLLIDKYIMDKDIQQGSAYASFLSKKSSRIEDQLRFCTDQFQKLAEDKYQKSVSLENLQKKRADIGNGLEQARSRLEESHSKVEQSRLDYGALELELEIERFNRRRIEEEMEIAKKKVSRLRSLIEGSSAIQKLRQELSEFKEILKCKACNDRPKEVVITKCYHLFCNPCVQKLTGTRQKKCPTCSASFGPNDIKPIYI

SEQ ID NO: 70507 - protein, 448 aa, Arabidopsis thaliana
  peptide (1)..(448): Ceres Seq. ID no. 2710867
MRIKTRLGNISRERGRKEIFADMKALISSFPEEMSSMRSQLNNYKETAGGIHSLRADVQSLSGVLCRKTKEYEALQLRSADYASQLGDLNATVCDLKNSHEELKLFLDMYKRESTDARDIAEAKEQEYRAWAHVQSLKSSLDEQNLELRVKAANEAEAVSQQMLAAAEAEIADLRQKMDDCKRDVAKHSDILKSKHEEHGTYLSEIQTIGSAYEDIVPQNQQLLLQVTERDDYNIKLFLEGITSRQMQDTLLIDKYIMDKDIQQGSAYASFLSKKSSRIEDQLRFCTDQFQKLAEDKYQKSVSLENLQKKRADIGNGLEQARSRLEESHSKVEQSRLDYGALELELEIERFNRRRIEEEMEIAKKKVSRLRSLIEGSSAIQKLRQELSEFKEILKCKACNDRPKEVVITKCYHLFCNPCVQKLTGTRQKKCPTCSASFGPNDIKPIYI

SEQ ID NO: 70508 - DNA, 1191 bp, Arabidopsis thaliana
  misc_feature (1)..(1191): Ceres Seq. ID no. 2710940
  misc_feature (1)..(1191): Ortholog of  Ceres SEQ ID NO 13597334 as cited in SEQ ID NO 64244
atgatgattgctcgttttgtgctcagcattctaatcgtagcggcgatagtttctggtagtgagttttctgatactcgtgatgcaaaagtagaaaaaatcttaaagaaactcaacaaacctgctcttaaatctatcaagagtccagatggagatataatagactgcgttcatatgaataatcatccaatttatgatcatcctttattcaaaaactacacgattcagatgaaaccaagttcttaccctaaaggtaaaaataatgaatcttcagacaaagagaaacaaagtgttgtgactcaactatggacagttaacgggaaatgccccaaaaacagtattccgatcagaagaacgagaagaaaagaaattttgcgaaccgaatatatgcaaagatatgacaaaaagaatccaaacataataaatcatcctaaagcatcaactagtaactccatacatgagtacgcgcaaatccaagcgaaaggaaagtttcatggagcccatgcggatataaatgtttggaaaccttttgtacaaacaccaaaagagtttagcctagcacaaatgtgggttatggctggtccgttttctgaagttaatagcgttgaagctggttggcaggtgtatcaagatcgttatggcgatgacaacccaagatactttattttttggactgcggatgggtaccactcaggctgttacaatcttgattgccaaggatttgttcctgtcagccaaaaatttgcccttggtgcagccgttagcaatgtttccaccttcgatggtcaacaataccatatttccacaactatatggaaggatccaaattcagggaattggtggttaaaatttggtgatgaatttgtcggatattggccttccatattgttcaaccatctaaaagatggtgcgacagaaattcagtggggaggtgaaataataaattttaaagatggtgcactacacaccacgacgagaatggggagtggacattttgcagagtctggatatcaaaaagcaagttatttcaaggatgttgagataattgatgaacgtgatattcatagtagtcctaaagaaggttattcttatatgacgcaagagagttgttataacatcaggtctggctatgctaaagtatggggagtttatttttattatggtggcccaggtcgaaatctgaattgtaaataa

SEQ ID NO: 70509 - protein, 396 aa, Arabidopsis thaliana
  peptide (1)..(396): Ceres Seq. ID no. 2710941
MMIARFVLSILIVAAIVSGSEFSDTRDAKVEKILKKLNKPALKSIKSPDGDIIDCVHMNNHPIYDHPLFKNYTIQMKPSSYPKGKNNESSDKEKQSVVTQLWTVNGKCPKNSIPIRRTRRKEILRTEYMQRYDKKNPNIINHPKASTSNSIHEYAQIQAKGKFHGAHADINVWKPFVQTPKEFSLAQMWVMAGPFSEVNSVEAGWQVYQDRYGDDNPRYFIFWTADGYHSGCYNLDCQGFVPVSQKFALGAAVSNVSTFDGQQYHISTTIWKDPNSGNWWLKFGDEFVGYWPSILFNHLKDGATEIQWGGEIINFKDGALHTTTRMGSGHFAESGYQKASYFKDVEIIDERDIHSSPKEGYSYMTQESCYNIRSGYAKVWGVYFYYGGPGRNLNCK

SEQ ID NO: 70510 - protein, 395 aa, Arabidopsis thaliana
  peptide (1)..(395): Ceres Seq. ID no. 2710942
MIARFVLSILIVAAIVSGSEFSDTRDAKVEKILKKLNKPALKSIKSPDGDIIDCVHMNNHPIYDHPLFKNYTIQMKPSSYPKGKNNESSDKEKQSVVTQLWTVNGKCPKNSIPIRRTRRKEILRTEYMQRYDKKNPNIINHPKASTSNSIHEYAQIQAKGKFHGAHADINVWKPFVQTPKEFSLAQMWVMAGPFSEVNSVEAGWQVYQDRYGDDNPRYFIFWTADGYHSGCYNLDCQGFVPVSQKFALGAAVSNVSTFDGQQYHISTTIWKDPNSGNWWLKFGDEFVGYWPSILFNHLKDGATEIQWGGEIINFKDGALHTTTRMGSGHFAESGYQKASYFKDVEIIDERDIHSSPKEGYSYMTQESCYNIRSGYAKVWGVYFYYGGPGRNLNCK

SEQ ID NO: 70511 - protein, 339 aa, Arabidopsis thaliana
  peptide (1)..(339): Ceres Seq. ID no. 2710943
MNNHPIYDHPLFKNYTIQMKPSSYPKGKNNESSDKEKQSVVTQLWTVNGKCPKNSIPIRRTRRKEILRTEYMQRYDKKNPNIINHPKASTSNSIHEYAQIQAKGKFHGAHADINVWKPFVQTPKEFSLAQMWVMAGPFSEVNSVEAGWQVYQDRYGDDNPRYFIFWTADGYHSGCYNLDCQGFVPVSQKFALGAAVSNVSTFDGQQYHISTTIWKDPNSGNWWLKFGDEFVGYWPSILFNHLKDGATEIQWGGEIINFKDGALHTTTRMGSGHFAESGYQKASYFKDVEIIDERDIHSSPKEGYSYMTQESCYNIRSGYAKVWGVYFYYGGPGRNLNCK

SEQ ID NO: 70512 - DNA, 1551 bp, Arabidopsis thaliana
  misc_feature (1)..(1551): Ceres Seq. ID no. 2711040
  misc_feature (1)..(1551): Ortholog of  Ceres SEQ ID NO 13663328 as cited in SEQ ID NO 66678
  misc_feature (1)..(1551): Ortholog of  Ceres SEQ ID NO 13624495 as cited in SEQ ID NO 0
atgttctctcaggctcagagcaagaagcagtttaagaggtctatgactaagaaatcacattcatggtggtgggatagtcacaattgtcccaagaactcaaaatggcttgcagagaatctagaaaagatggatgatcgagtgaaccacatgttaaaactgattgaagaagacgcagactcttttgcaaagaaagctcagatgtattttcagaaacgtcccgagttaatccagcttgtcgaggaattctaccgcatgtatcgcgcattggctgagcgttatgatcaagctagtggtgaacttcagaagaaccatacatctgagatccagtcacagagctctcttgagatatcatctcctaccaaagagaagttgagtcgccgtcaatctagccataaagaagaggaagattcatcgtctttgacagattctggttctgattctgatcattcctctgccaatgatgaagacggtgacgaggcattgatccgtagaatggctgaacttgagcttgagcttcaagagacgaaacagaagctccttctccagcaggaaagtgttgatggtgacaacaatgttgatctccttcacaaaattactacatatgagggagagcttaaagaagctaatgagaagatgcgaatgcacgaagacgagattgctaatctgaagaatcagcttcagagcttcatgtcttttgacacagaggatcatcttggtgctgaacaaaagagtgttgatttggataaagaggacactaaagaagatgcagtagctacaaaagtgctagccttggaggaagagctgagtatcgcgaaagagaagcttcagcactttgagaaagagacttattctctgaaaaatgagctcgagatcggcaaagccgctgaggagaagctgaagagcttacaacatgagctcgagttggctcagagagacgctgatacctacataaacaagctcaacgcagagaagaaagaagtcttgaagttgcaggagagattggcaatggtgaaaactagtttacaggatagagataacgagataagggcattgaaaactgcggtttcagacgctgaacagaagatattccccgaaaaagcacagatcaagggagaaatgtcgaagatgcttgaagaacgaagccaacttggagagcaactgagagagctggaatcacatataaggctgatcaaggaagagaaagctgaaacagaggagaagcttagaggaggaactgagaaaatcagcggaatgagagacgagagcaatgtgctaagagaagagattgggaagagagaagagaagataaaggaaacggaaaagcatatggaggagcttcacatggagcaagtgaggctgagaagacggtcaagtgagcttacggaagaagtggaaaggacgagagtgtctgcatcggaaatggctgagcagaaaagagaagctataagacagctttgtatgtctcttgaccattacagagatgggtacgacagactttggagagttgttgcaggacataagagtaagagagtagtggtcttatcaacttga

SEQ ID NO: 70513 - protein, 516 aa, Arabidopsis thaliana
  peptide (1)..(516): Ceres Seq. ID no. 2711041
MFSQAQSKKQFKRSMTKKSHSWWWDSHNCPKNSKWLAENLEKMDDRVNHMLKLIEEDADSFAKKAQMYFQKRPELIQLVEEFYRMYRALAERYDQASGELQKNHTSEIQSQSSLEISSPTKEKLSRRQSSHKEEEDSSSLTDSGSDSDHSSANDEDGDEALIRRMAELELELQETKQKLLLQQESVDGDNNVDLLHKITTYEGELKEANEKMRMHEDEIANLKNQLQSFMSFDTEDHLGAEQKSVDLDKEDTKEDAVATKVLALEEELSIAKEKLQHFEKETYSLKNELEIGKAAEEKLKSLQHELELAQRDADTYINKLNAEKKEVLKLQERLAMVKTSLQDRDNEIRALKTAVSDAEQKIFPEKAQIKGEMSKMLEERSQLGEQLRELESHIRLIKEEKAETEEKLRGGTEKISGMRDESNVLREEIGKREEKIKETEKHMEELHMEQVRLRRRSSELTEEVERTRVSASEMAEQKREAIRQLCMSLDHYRDGYDRLWRVVAGHKSKRVVVLST

SEQ ID NO: 70514 - protein, 502 aa, Arabidopsis thaliana
  peptide (1)..(502): Ceres Seq. ID no. 2711042
MTKKSHSWWWDSHNCPKNSKWLAENLEKMDDRVNHMLKLIEEDADSFAKKAQMYFQKRPELIQLVEEFYRMYRALAERYDQASGELQKNHTSEIQSQSSLEISSPTKEKLSRRQSSHKEEEDSSSLTDSGSDSDHSSANDEDGDEALIRRMAELELELQETKQKLLLQQESVDGDNNVDLLHKITTYEGELKEANEKMRMHEDEIANLKNQLQSFMSFDTEDHLGAEQKSVDLDKEDTKEDAVATKVLALEEELSIAKEKLQHFEKETYSLKNELEIGKAAEEKLKSLQHELELAQRDADTYINKLNAEKKEVLKLQERLAMVKTSLQDRDNEIRALKTAVSDAEQKIFPEKAQIKGEMSKMLEERSQLGEQLRELESHIRLIKEEKAETEEKLRGGTEKISGMRDESNVLREEIGKREEKIKETEKHMEELHMEQVRLRRRSSELTEEVERTRVSASEMAEQKREAIRQLCMSLDHYRDGYDRLWRVVAGHKSKRVVVLST

SEQ ID NO: 70515 - protein, 474 aa, Arabidopsis thaliana
  peptide (1)..(474): Ceres Seq. ID no. 2711043
MDDRVNHMLKLIEEDADSFAKKAQMYFQKRPELIQLVEEFYRMYRALAERYDQASGELQKNHTSEIQSQSSLEISSPTKEKLSRRQSSHKEEEDSSSLTDSGSDSDHSSANDEDGDEALIRRMAELELELQETKQKLLLQQESVDGDNNVDLLHKITTYEGELKEANEKMRMHEDEIANLKNQLQSFMSFDTEDHLGAEQKSVDLDKEDTKEDAVATKVLALEEELSIAKEKLQHFEKETYSLKNELEIGKAAEEKLKSLQHELELAQRDADTYINKLNAEKKEVLKLQERLAMVKTSLQDRDNEIRALKTAVSDAEQKIFPEKAQIKGEMSKMLEERSQLGEQLRELESHIRLIKEEKAETEEKLRGGTEKISGMRDESNVLREEIGKREEKIKETEKHMEELHMEQVRLRRRSSELTEEVERTRVSASEMAEQKREAIRQLCMSLDHYRDGYDRLWRVVAGHKSKRVVVLST

SEQ ID NO: 70516 - DNA, 1512 bp, Arabidopsis thaliana
  misc_feature (1)..(1512): Ceres Seq. ID no. 2711130
  misc_feature (1)..(1512): Ortholog of  Ceres SEQ ID NO 12607856 as cited in SEQ ID NO 55419
atgaaatgtcatcgaatggacccgtttccttcttcttatgtttctctgaaactcatgaaatttgaggaactactcatggaagattcatcacagctacatagtaacaagagacatgacttagaggaaggattttctgagctcatacaagaactagccatcgtggaggcagagattctctgtctagaccgaaaaatcgaggagctaaagcttaaactgtattccgaacagagacaaacgcaagagatacaattgcagatgaccgagcagaagaggacattggcaagacagagccatgtgagacagagtactctgccactaagacatgatcttcatcaacgatctttgtctcattgttaccaacgttctacactagacactgcctcaactactcattcaagactctcattctcttacgctcctgatttcttggatgccacttcttcaggtggcttcacagacgaatttgatggagtcacgaggatgcagatgggtagagtaagaaaagggcttcgacttgttgaagcaaagaccaaagacgacccaaacgaagtatcagaacaactcatcaactgtcttataggcatttacttggaactcaatcatgtttcatcaaagaccaaaggggatgtctcgctctcaagaaggccatcttcttgtagccggaaatcaaacacatatagttattatcaaaatgcaatgaatcttgatccttatcacgtattgccagactcgagcggaggagtcaccagagacattggcccttacaagaacttcatccacatttcaagaagttccatcgatgtgacacatttcacccattattgttcaccggctgttccacgcttgagcgttttgatggagaaattatcggaggtagatttgagttttttgacctacaagcaaaaactagccttctggatcaatatctacaacgcatgtatcatgcatgcatttcttgagtatgggttaccatcgtcacacaatagactacttaccttgatgaacaaggcttcactcaacgtaggtggcatagtcctcaacgctttggcgattgaacatttcgtcttgcggcatccttgtgaaccagaagataaggactcgcttgacgagaaagaaacgctccttcgtcacacttacggtttaggatattcagagcccaatgtgacatttgcactttgccgtggaagttggtcttcaccagcactaagagtctatacagcagatgaagtggtgaatgatttaggaagagcaagagtggaatatctagaagcttctgtgggtgtttcaagcaagaaaaagattgtggttccacagcttctgcaatggcacatgaaagattttgcagatgatattgaatctcttttggaatggatctatagccagttgcctcgatcagggaacctaaagggcatgattatggaatgtctaaagagaaaagcaaaagttcctttagctaaaattgtagagattcaaacatatggacacgaatttcgttacttgttgtcattgtaa

SEQ ID NO: 70517 - protein, 503 aa, Arabidopsis thaliana
  peptide (1)..(503): Ceres Seq. ID no. 2711131
MKCHRMDPFPSSYVSLKLMKFEELLMEDSSQLHSNKRHDLEEGFSELIQELAIVEAEILCLDRKIEELKLKLYSEQRQTQEIQLQMTEQKRTLARQSHVRQSTLPLRHDLHQRSLSHCYQRSTLDTASTTHSRLSFSYAPDFLDATSSGGFTDEFDGVTRMQMGRVRKGLRLVEAKTKDDPNEVSEQLINCLIGIYLELNHVSSKTKGDVSLSRRPSSCSRKSNTYSYYQNAMNLDPYHVLPDSSGGVTRDIGPYKNFIHISRSSIDVTHFTHYCSPAVPRLSVLMEKLSEVDLSFLTYKQKLAFWINIYNACIMHAFLEYGLPSSHNRLLTLMNKASLNVGGIVLNALAIEHFVLRHPCEPEDKDSLDEKETLLRHTYGLGYSEPNVTFALCRGSWSSPALRVYTADEVVNDLGRARVEYLEASVGVSSKKKIVVPQLLQWHMKDFADDIESLLEWIYSQLPRSGNLKGMIMECLKRKAKVPLAKIVEIQTYGHEFRYLLSL

SEQ ID NO: 70518 - protein, 498 aa, Arabidopsis thaliana
  peptide (1)..(498): Ceres Seq. ID no. 2711132
MDPFPSSYVSLKLMKFEELLMEDSSQLHSNKRHDLEEGFSELIQELAIVEAEILCLDRKIEELKLKLYSEQRQTQEIQLQMTEQKRTLARQSHVRQSTLPLRHDLHQRSLSHCYQRSTLDTASTTHSRLSFSYAPDFLDATSSGGFTDEFDGVTRMQMGRVRKGLRLVEAKTKDDPNEVSEQLINCLIGIYLELNHVSSKTKGDVSLSRRPSSCSRKSNTYSYYQNAMNLDPYHVLPDSSGGVTRDIGPYKNFIHISRSSIDVTHFTHYCSPAVPRLSVLMEKLSEVDLSFLTYKQKLAFWINIYNACIMHAFLEYGLPSSHNRLLTLMNKASLNVGGIVLNALAIEHFVLRHPCEPEDKDSLDEKETLLRHTYGLGYSEPNVTFALCRGSWSSPALRVYTADEVVNDLGRARVEYLEASVGVSSKKKIVVPQLLQWHMKDFADDIESLLEWIYSQLPRSGNLKGMIMECLKRKAKVPLAKIVEIQTYGHEFRYLLSL

SEQ ID NO: 70519 - protein, 485 aa, Arabidopsis thaliana
  peptide (1)..(485): Ceres Seq. ID no. 2711133
MKFEELLMEDSSQLHSNKRHDLEEGFSELIQELAIVEAEILCLDRKIEELKLKLYSEQRQTQEIQLQMTEQKRTLARQSHVRQSTLPLRHDLHQRSLSHCYQRSTLDTASTTHSRLSFSYAPDFLDATSSGGFTDEFDGVTRMQMGRVRKGLRLVEAKTKDDPNEVSEQLINCLIGIYLELNHVSSKTKGDVSLSRRPSSCSRKSNTYSYYQNAMNLDPYHVLPDSSGGVTRDIGPYKNFIHISRSSIDVTHFTHYCSPAVPRLSVLMEKLSEVDLSFLTYKQKLAFWINIYNACIMHAFLEYGLPSSHNRLLTLMNKASLNVGGIVLNALAIEHFVLRHPCEPEDKDSLDEKETLLRHTYGLGYSEPNVTFALCRGSWSSPALRVYTADEVVNDLGRARVEYLEASVGVSSKKKIVVPQLLQWHMKDFADDIESLLEWIYSQLPRSGNLKGMIMECLKRKAKVPLAKIVEIQTYGHEFRYLLSL

SEQ ID NO: 70520 - DNA, 6906 bp, Arabidopsis thaliana
  misc_feature (1)..(6906): Ceres Seq. ID no. 2711345
  misc_feature (1)..(6906): Ortholog of  Ceres SEQ ID NO 13599765 as cited in SEQ ID NO 549
  misc_feature (1)..(6906): Ortholog of  Ceres SEQ ID NO 13597411 as cited in SEQ ID NO 64125
atggagttcgcaaacacgaaatgggtggctgcagcggcgagcatatggatacaaagcttcagcggagcaagctacacttttggaatttattcttctgttcttaaatcatctcaatcttatgaccaatctactcttgacaccgtctctgtctacaaagacatcggagcaaacgtaggcatcctctccggcctcttctataccgcggttgcaagccgaaaaagcggtaatggtggcttctttagtgggccatggttggttatatttgtggggctactccaatggttcgtcggatatggattcatatggatggcgacgtcaggagtgatcccacggcctcccgtggctatgatgtgtttgttcatgttcttcgctggtcattgtcagcctttctttaataccgcgattgtggtcaccgccgttcgtaacttctccgactatggtgggaccgccgttggcattatgaagggttatcttggactaagtggagcaattctggttcaaatgtaccacatcttctgtggaggtgacccaaggaattacattcttctcttggccgtggtaccatcacttctcatcttgacgttgatgcccttcgttagaacgtacgacacagtcatcgcaggcgacaagaaacacttgaacggtctctctgccatttctttgatcatcgtcacctatcttatggtcgtcatattggtcgaaaacattatcggaatgtcaatgcctatgaagatatgttcctttacctttctacttctcttgctcgcctctcctctcttagtggcggttagagcacaacgtgaagaggaacatagattcttgtctttggattttcctgttaccgagagaaccacattgcttgactctcctaagctcaattcttcttccgatgttaaagatgtcatgaccaatgacatgaacgttctcgaagcaatatgcacaacgaatttctggcttctatttgtagcaatgatatgtggaatgggttcaggacttgcgacaataaacaacatcagacagatgggcgagtcacttcgctactctacggttcaactcaattctctagtgtctctgtggagcatatggaactttctaggccggtttgggtcgggttacatctcagacacctatttacacagtcatggctggccaagaccggtattcatggccataacccttggccttatggctataggtcacattgtcatggcctccggtttactaggaagcctatatatcggatccttgttggtcggtttagcgtacggctcccaatggtcactcatgccaacaataacctctgaaatattcggggttcttcatatgggaactatattctatacaatttcgatagctagtccggttggttcgtactttttctcagtgaaggtaataggctacttgtatgacaaggtagcttctgaagatgatcattcttgttatggaaatcactgttttaggacttcgtttttgataatggcggccatggctctgcttggttctcttgtcgctcttgtgttgctcctccgcacaaagaagttttatgcgacgcttgtggctaagaggatcttgaaaaatttgataatttgtgtgcgaaaattgactagtggtctcgccgcttgccagttgccacaagtcaaaagtttcgaaattttggttgttaaaattgttttcaagattttgaatggaaatggcgatttagcggcagataaagagcgatgcggttctgataataacgaatatactattgaaaaccaaaccgtatcgctgtttcgtctcgttcaaagatttagtaataattcatatttatatgattatattaaactaaaattgaaagcattggagacaatggagagaataaacacgaaatgggtagcagcagcagcgagtatatggattcaaagctttagcggagctacatacacattcgctatctactcttcaatcctcaaatcatctcaatcttatgaccagtctactcttgatttcgtctctgtcttcaaagacatcggtggtacctttggtatcatctccggtttcctttacacggctatgacttctaagtcacgcggttttggtgggccttgggttgttgttttcgttgggttggttcagtggtttgttggattcttttttatttgggcttcggtggttgggttgattgctccgccgcctgtgccgttgatgtgcttgttcgtgttcttggctggtcactccttgccgtttttcaatacggctaatgttgtgacggctgctcggaacttttctcaatatggtgggactgctgttggtattatgcagggatttttaggactaagtggagcaattctgattcagttgtaccatgcggtctgcggtggtgaaggtaaccccgctactttcattcttctcctggccatagtaccaacgcttgtcatgttcttggctatgccttttgtaagagtttatgaaacggtgaccattagtgacaagaaacacttggatggtctctctgcgatctctatgatcattgccgcctatcttatggtcgttataacggttgaaaacgttctcggtttatcacgctcaatgcagattttctccttcatccttgtccttttgttgcttgcctctcccctcttggttgctgtaagagccctacgagaaaaaaggcagacactttcttctctggatggtcctgttctcgacacatctgccttgctcgaccctcctagttcaaacatttttcccgatggagatcatttggttgctgaagattcaaacatactggaagcaatgagcacagtgaacttttggctactcttcttggcaatgctatgcgggatgggttctggattcgcgactgtaaacaacatgagacagataggcgagtctcttcgctactcttctgttcaactcaattctctagtctctctctggagcatatggaactttctgggccggttcggggctggttatgtctcagacacattcttacacaaacacagctggccaagaccgatcttcatggccataactctaggtgttatggctataggccatatcatagttgcctctggtgtacaaggcagtctctatgccggttcagttttgatcggtatggcttacggttcgcaatggtcgctgatgccaacaatcacatcagagatatttgggatccggcatatgggaacgatttacttcacgatttcgattgcaggtcccatcgggtcgtacatcctctctgtgaaagtgataggttacttctacgacaaagtggcttctgaagatgacaattcttgctttggaagtcaatgtttcaggacatcttttatgatcatggcttctgtggctctctttggctctttggttgcttctgtattgttcttccgcacacacaagttttacaaaaaccttgtagcaaagaggaacttgaagtcgctagacagcctcttttcagcacatgctgaaccacctgtagatgtcgtccagccacatattgtcatcctttcccttgtgttccctaaagtctcagcaggagtactgaagagggatgggttggctttgcgtctcgtcctcaatgttctgcgtctgaaatcagccacgcctgagtgcttgatttcgggattgaagtgtttggttcaccttctcacaacggttgagtccattatggtgaacgaaggctctgattcctacaacatcttactgaattttgtaactcattcagacggaaaggtaagaaagctagcaagctcctgtctccgtgatgtcctgcagaaatcccatggaacaaaggcctggcaatcagtcagtggagctattacagaaatgttccagaactatttagacctcgcccataaatcggaagtgggttctaccgaaggagccagaggggcaaagcaagtgctttacattcttagcactctaaaagaatgcttggccttgatgtcaaaaaagcacattgctactctgattgagggatttaaggtgctgatgattcttcgcgatccatacattacaaggccagtgatagactctttaaatgcagtttgtctcaatccaacctccgaggttccggttgaggcgctgctcgaagtgttatctcttgcggctggactgttctcgggacatgaaacatctgctgatgccatgacctttacagcacgtttactgaaagttgggatgactaggagttttaccctaaacagagatctttgtgtggttaaacttcctagtgtgttcaatggtctgaatgatattattgcatctgaacacgaggaggctatctttgcagcaactgatgcgttgaagagtttgatattttcatgtattgacgaaagcttgatcagagaaggtgtcaatgaaatccggaattcaaacttgaatgtaaggaagcctagtccaacagtcatcgaaaagctgtgtgcaacagttgagagcttgcttgattacaagtaccatgcagtctgggatatggcttttcaagtagtttcagcaatgtttgataaattaggtgaacattctgcatattttatgaggaacaccctccagggtttatctgatatgcaagatttacctgatgaaggatttccttaccggaagcagttgcatgagtgtgtaggatcagcccttggtgctatgggacctgaaacatttttaagcattgtgcgtttaaaccttgaagctaatgatctgtctgaggtaaaagtttggctcttcccaatcttgaagcagtacacagttggaggacgcctaagtttcttcacagaggctatttttagcatggtcgaaacaatgagccacaaagctcaaaagctcaagctacaaggtcttcctgtagcatccaggagtgtggattctctcgtatattcattatgggctttgttaccttcattctgtaattatcccgtggatactgtggagagttttgccgatctggggcgaatattatgtggagttcttcaaacacaggctgagacccatggaattatatgtgccagtttgaatattctgattcaacaaaataaggaagttgttgaggggaaagaagtacctactaatgatgctagtcctgctatgcaacgagctactgctcgttatgattcacagcatgcggcagctaatttaaaagttctgcggttatgtgctcctaaattattggatgttttgtcaaggatatttcatgaatgtagcaaagatgatggcggttctcttcagtctgcgataggtaacttagcttccatagcggagaaaaagactgtttcaaagctacttttcaagactctgcaagagcttttagaggctaccaaaactgccattgcacaagatgaaagtcctgttagtgggatggatgtggataacaccgcagacaaaaattcttcttccaacttaagggcaaggttgtttgatctgttagtttcactcttaccgggtttggatggtcaagaagtagataccatattcagttctctgaagcctgcaatgcaggattccaagggcctaattcaaaagaaagcgtacaaagttctttcggtcattttgaagagttctgatggatttgtttcaaagaacctcgaggagttgcttgtgctgatgcacaatatatgccatgtctctgccaaacgccataaacttgattgtttatacttcctgttagctcatgcatcaaggactgatgatttaaaggagagaaaagacattgtttcttcttttctacccgaagttatacttgctttaaaggaggtaaataaaaaaacaagaaacagagcctatgacgtgcttgttcagattggtcatgcatacgcagatgaggagaatggtggagacaacgagaagttgcatgggtacttcgatatggtggttggttgcttggctggcgaaaaacctcaaatgattagtgctgctgtcaagggtgtagctcgtttgacatatgagttctccgatctcatatctagtgcttacaatttacttccttcaacatttcttctcctccagaggaaaaataaagaaattacaaaagtgaggcttctgttggagatgctcatcaagaaatgtggcacggaggctgtcaagtctgtgatgcctgaggaacatatgaaactcctgacaaacatccgaaagatcaaggaacgtaaagagaaaaaatatgcagctggctctgacatcagtaaatcgcagcattcaaaagatacttcatcaaaggttagcaggtggaatgataccaagatattttctgatgtatacgcggacagtgaggacagtgacggagacgacatggatgcggagtctcatggccgcagcaaggcttcctctttgttaaaatccaaggcatccgctttgagatccaagaaaagtcggaaccagagtcatcttgaagtggatgagtcagatgatgaaccgcttgacttaatggatcagcacaaaacaagattagctcttcggtcaagtgaacttcgcaaacggaaagctgactcggatgaagaagcagagtttgatgtggaagggcggctagttattcgtgaaggagagaggtctaaaaggaaggaactatctgatgcagattcagatgccaaaagtagcaaaggcagccgtttctctggaaactcatccaagaagaaccaaaagcggatgaagacatcagagtctggatacgcttacacaggcaaagagtatgcaagcaaaaaggcaagtggcgatcttaagaagaaagataaacttgaaccatatgcctattggccactcgatcgcaagatgatgagccgtagaccagagcaacgggcagttgcagtgagagggatgtcaagtgtggtcaagatggcaaagaaaatggaaggcaagagcgctgcagaagcacttgccaccaccaagttcaaaaaattcaagaggagtggtcagaagaaatcagctgggaagaagaaaaacaagtaa

SEQ ID NO: 70521 - protein, 2301 aa, Arabidopsis thaliana
  peptide (1)..(2301): Ceres Seq. ID no. 2711346
MEFANTKWVAAAASIWIQSFSGASYTFGIYSSVLKSSQSYDQSTLDTVSVYKDIGANVGILSGLFYTAVASRKSGNGGFFSGPWLVIFVGLLQWFVGYGFIWMATSGVIPRPPVAMMCLFMFFAGHCQPFFNTAIVVTAVRNFSDYGGTAVGIMKGYLGLSGAILVQMYHIFCGGDPRNYILLLAVVPSLLILTLMPFVRTYDTVIAGDKKHLNGLSAISLIIVTYLMVVILVENIIGMSMPMKICSFTFLLLLLASPLLVAVRAQREEEHRFLSLDFPVTERTTLLDSPKLNSSSDVKDVMTNDMNVLEAICTTNFWLLFVAMICGMGSGLATINNIRQMGESLRYSTVQLNSLVSLWSIWNFLGRFGSGYISDTYLHSHGWPRPVFMAITLGLMAIGHIVMASGLLGSLYIGSLLVGLAYGSQWSLMPTITSEIFGVLHMGTIFYTISIASPVGSYFFSVKVIGYLYDKVASEDDHSCYGNHCFRTSFLIMAAMALLGSLVALVLLLRTKKFYATLVAKRILKNLIICVRKLTSGLAACQLPQVKSFEILVVKIVFKILNGNGDLAADKERCGSDNNEYTIENQTVSLFRLVQRFSNNSYLYDYIKLKLKALETMERINTKWVAAAASIWIQSFSGATYTFAIYSSILKSSQSYDQSTLDFVSVFKDIGGTFGIISGFLYTAMTSKSRGFGGPWVVVFVGLVQWFVGFFFIWASVVGLIAPPPVPLMCLFVFLAGHSLPFFNTANVVTAARNFSQYGGTAVGIMQGFLGLSGAILIQLYHAVCGGEGNPATFILLLAIVPTLVMFLAMPFVRVYETVTISDKKHLDGLSAISMIIAAYLMVVITVENVLGLSRSMQIFSFILVLLLLASPLLVAVRALREKRQTLSSLDGPVLDTSALLDPPSSNIFPDGDHLVAEDSNILEAMSTVNFWLLFLAMLCGMGSGFATVNNMRQIGESLRYSSVQLNSLVSLWSIWNFLGRFGAGYVSDTFLHKHSWPRPIFMAITLGVMAIGHIIVASGVQGSLYAGSVLIGMAYGSQWSLMPTITSEIFGIRHMGTIYFTISIAGPIGSYILSVKVIGYFYDKVASEDDNSCFGSQCFRTSFMIMASVALFGSLVASVLFFRTHKFYKNLVAKRNLKSLDSLFSAHAEPPVDVVQPHIVILSLVFPKVSAGVLKRDGLALRLVLNVLRLKSATPECLISGLKCLVHLLTTVESIMVNEGSDSYNILLNFVTHSDGKVRKLASSCLRDVLQKSHGTKAWQSVSGAITEMFQNYLDLAHKSEVGSTEGARGAKQVLYILSTLKECLALMSKKHIATLIEGFKVLMILRDPYITRPVIDSLNAVCLNPTSEVPVEALLEVLSLAAGLFSGHETSADAMTFTARLLKVGMTRSFTLNRDLCVVKLPSVFNGLNDIIASEHEEAIFAATDALKSLIFSCIDESLIREGVNEIRNSNLNVRKPSPTVIEKLCATVESLLDYKYHAVWDMAFQVVSAMFDKLGEHSAYFMRNTLQGLSDMQDLPDEGFPYRKQLHECVGSALGAMGPETFLSIVRLNLEANDLSEVKVWLFPILKQYTVGGRLSFFTEAIFSMVETMSHKAQKLKLQGLPVASRSVDSLVYSLWALLPSFCNYPVDTVESFADLGRILCGVLQTQAETHGIICASLNILIQQNKEVVEGKEVPTNDASPAMQRATARYDSQHAAANLKVLRLCAPKLLDVLSRIFHECSKDDGGSLQSAIGNLASIAEKKTVSKLLFKTLQELLEATKTAIAQDESPVSGMDVDNTADKNSSSNLRARLFDLLVSLLPGLDGQEVDTIFSSLKPAMQDSKGLIQKKAYKVLSVILKSSDGFVSKNLEELLVLMHNICHVSAKRHKLDCLYFLLAHASRTDDLKERKDIVSSFLPEVILALKEVNKKTRNRAYDVLVQIGHAYADEENGGDNEKLHGYFDMVVGCLAGEKPQMISAAVKGVARLTYEFSDLISSAYNLLPSTFLLLQRKNKEITKVRLLLEMLIKKCGTEAVKSVMPEEHMKLLTNIRKIKERKEKKYAAGSDISKSQHSKDTSSKVSRWNDTKIFSDVYADSEDSDGDDMDAESHGRSKASSLLKSKASALRSKKSRNQSHLEVDESDDEPLDLMDQHKTRLALRSSELRKRKADSDEEAEFDVEGRLVIREGERSKRKELSDADSDAKSSKGSRFSGNSSKKNQKRMKTSESGYAYTGKEYASKKASGDLKKKDKLEPYAYWPLDRKMMSRRPEQRAVAVRGMSSVVKMAKKMEGKSAAEALATTKFKKFKRSGQKKSAGKKKNK

SEQ ID NO: 70522 - protein, 2199 aa, Arabidopsis thaliana
  peptide (1)..(2199): Ceres Seq. ID no. 2711347
MATSGVIPRPPVAMMCLFMFFAGHCQPFFNTAIVVTAVRNFSDYGGTAVGIMKGYLGLSGAILVQMYHIFCGGDPRNYILLLAVVPSLLILTLMPFVRTYDTVIAGDKKHLNGLSAISLIIVTYLMVVILVENIIGMSMPMKICSFTFLLLLLASPLLVAVRAQREEEHRFLSLDFPVTERTTLLDSPKLNSSSDVKDVMTNDMNVLEAICTTNFWLLFVAMICGMGSGLATINNIRQMGESLRYSTVQLNSLVSLWSIWNFLGRFGSGYISDTYLHSHGWPRPVFMAITLGLMAIGHIVMASGLLGSLYIGSLLVGLAYGSQWSLMPTITSEIFGVLHMGTIFYTISIASPVGSYFFSVKVIGYLYDKVASEDDHSCYGNHCFRTSFLIMAAMALLGSLVALVLLLRTKKFYATLVAKRILKNLIICVRKLTSGLAACQLPQVKSFEILVVKIVFKILNGNGDLAADKERCGSDNNEYTIENQTVSLFRLVQRFSNNSYLYDYIKLKLKALETMERINTKWVAAAASIWIQSFSGATYTFAIYSSILKSSQSYDQSTLDFVSVFKDIGGTFGIISGFLYTAMTSKSRGFGGPWVVVFVGLVQWFVGFFFIWASVVGLIAPPPVPLMCLFVFLAGHSLPFFNTANVVTAARNFSQYGGTAVGIMQGFLGLSGAILIQLYHAVCGGEGNPATFILLLAIVPTLVMFLAMPFVRVYETVTISDKKHLDGLSAISMIIAAYLMVVITVENVLGLSRSMQIFSFILVLLLLASPLLVAVRALREKRQTLSSLDGPVLDTSALLDPPSSNIFPDGDHLVAEDSNILEAMSTVNFWLLFLAMLCGMGSGFATVNNMRQIGESLRYSSVQLNSLVSLWSIWNFLGRFGAGYVSDTFLHKHSWPRPIFMAITLGVMAIGHIIVASGVQGSLYAGSVLIGMAYGSQWSLMPTITSEIFGIRHMGTIYFTISIAGPIGSYILSVKVIGYFYDKVASEDDNSCFGSQCFRTSFMIMASVALFGSLVASVLFFRTHKFYKNLVAKRNLKSLDSLFSAHAEPPVDVVQPHIVILSLVFPKVSAGVLKRDGLALRLVLNVLRLKSATPECLISGLKCLVHLLTTVESIMVNEGSDSYNILLNFVTHSDGKVRKLASSCLRDVLQKSHGTKAWQSVSGAITEMFQNYLDLAHKSEVGSTEGARGAKQVLYILSTLKECLALMSKKHIATLIEGFKVLMILRDPYITRPVIDSLNAVCLNPTSEVPVEALLEVLSLAAGLFSGHETSADAMTFTARLLKVGMTRSFTLNRDLCVVKLPSVFNGLNDIIASEHEEAIFAATDALKSLIFSCIDESLIREGVNEIRNSNLNVRKPSPTVIEKLCATVESLLDYKYHAVWDMAFQVVSAMFDKLGEHSAYFMRNTLQGLSDMQDLPDEGFPYRKQLHECVGSALGAMGPETFLSIVRLNLEANDLSEVKVWLFPILKQYTVGGRLSFFTEAIFSMVETMSHKAQKLKLQGLPVASRSVDSLVYSLWALLPSFCNYPVDTVESFADLGRILCGVLQTQAETHGIICASLNILIQQNKEVVEGKEVPTNDASPAMQRATARYDSQHAAANLKVLRLCAPKLLDVLSRIFHECSKDDGGSLQSAIGNLASIAEKKTVSKLLFKTLQELLEATKTAIAQDESPVSGMDVDNTADKNSSSNLRARLFDLLVSLLPGLDGQEVDTIFSSLKPAMQDSKGLIQKKAYKVLSVILKSSDGFVSKNLEELLVLMHNICHVSAKRHKLDCLYFLLAHASRTDDLKERKDIVSSFLPEVILALKEVNKKTRNRAYDVLVQIGHAYADEENGGDNEKLHGYFDMVVGCLAGEKPQMISAAVKGVARLTYEFSDLISSAYNLLPSTFLLLQRKNKEITKVRLLLEMLIKKCGTEAVKSVMPEEHMKLLTNIRKIKERKEKKYAAGSDISKSQHSKDTSSKVSRWNDTKIFSDVYADSEDSDGDDMDAESHGRSKASSLLKSKASALRSKKSRNQSHLEVDESDDEPLDLMDQHKTRLALRSSELRKRKADSDEEAEFDVEGRLVIREGERSKRKELSDADSDAKSSKGSRFSGNSSKKNQKRMKTSESGYAYTGKEYASKKASGDLKKKDKLEPYAYWPLDRKMMSRRPEQRAVAVRGMSSVVKMAKKMEGKSAAEALATTKFKKFKRSGQKKSAGKKKNK

SEQ ID NO: 70523 - protein, 2186 aa, Arabidopsis thaliana
  peptide (1)..(2186): Ceres Seq. ID no. 2711348
MMCLFMFFAGHCQPFFNTAIVVTAVRNFSDYGGTAVGIMKGYLGLSGAILVQMYHIFCGGDPRNYILLLAVVPSLLILTLMPFVRTYDTVIAGDKKHLNGLSAISLIIVTYLMVVILVENIIGMSMPMKICSFTFLLLLLASPLLVAVRAQREEEHRFLSLDFPVTERTTLLDSPKLNSSSDVKDVMTNDMNVLEAICTTNFWLLFVAMICGMGSGLATINNIRQMGESLRYSTVQLNSLVSLWSIWNFLGRFGSGYISDTYLHSHGWPRPVFMAITLGLMAIGHIVMASGLLGSLYIGSLLVGLAYGSQWSLMPTITSEIFGVLHMGTIFYTISIASPVGSYFFSVKVIGYLYDKVASEDDHSCYGNHCFRTSFLIMAAMALLGSLVALVLLLRTKKFYATLVAKRILKNLIICVRKLTSGLAACQLPQVKSFEILVVKIVFKILNGNGDLAADKERCGSDNNEYTIENQTVSLFRLVQRFSNNSYLYDYIKLKLKALETMERINTKWVAAAASIWIQSFSGATYTFAIYSSILKSSQSYDQSTLDFVSVFKDIGGTFGIISGFLYTAMTSKSRGFGGPWVVVFVGLVQWFVGFFFIWASVVGLIAPPPVPLMCLFVFLAGHSLPFFNTANVVTAARNFSQYGGTAVGIMQGFLGLSGAILIQLYHAVCGGEGNPATFILLLAIVPTLVMFLAMPFVRVYETVTISDKKHLDGLSAISMIIAAYLMVVITVENVLGLSRSMQIFSFILVLLLLASPLLVAVRALREKRQTLSSLDGPVLDTSALLDPPSSNIFPDGDHLVAEDSNILEAMSTVNFWLLFLAMLCGMGSGFATVNNMRQIGESLRYSSVQLNSLVSLWSIWNFLGRFGAGYVSDTFLHKHSWPRPIFMAITLGVMAIGHIIVASGVQGSLYAGSVLIGMAYGSQWSLMPTITSEIFGIRHMGTIYFTISIAGPIGSYILSVKVIGYFYDKVASEDDNSCFGSQCFRTSFMIMASVALFGSLVASVLFFRTHKFYKNLVAKRNLKSLDSLFSAHAEPPVDVVQPHIVILSLVFPKVSAGVLKRDGLALRLVLNVLRLKSATPECLISGLKCLVHLLTTVESIMVNEGSDSYNILLNFVTHSDGKVRKLASSCLRDVLQKSHGTKAWQSVSGAITEMFQNYLDLAHKSEVGSTEGARGAKQVLYILSTLKECLALMSKKHIATLIEGFKVLMILRDPYITRPVIDSLNAVCLNPTSEVPVEALLEVLSLAAGLFSGHETSADAMTFTARLLKVGMTRSFTLNRDLCVVKLPSVFNGLNDIIASEHEEAIFAATDALKSLIFSCIDESLIREGVNEIRNSNLNVRKPSPTVIEKLCATVESLLDYKYHAVWDMAFQVVSAMFDKLGEHSAYFMRNTLQGLSDMQDLPDEGFPYRKQLHECVGSALGAMGPETFLSIVRLNLEANDLSEVKVWLFPILKQYTVGGRLSFFTEAIFSMVETMSHKAQKLKLQGLPVASRSVDSLVYSLWALLPSFCNYPVDTVESFADLGRILCGVLQTQAETHGIICASLNILIQQNKEVVEGKEVPTNDASPAMQRATARYDSQHAAANLKVLRLCAPKLLDVLSRIFHECSKDDGGSLQSAIGNLASIAEKKTVSKLLFKTLQELLEATKTAIAQDESPVSGMDVDNTADKNSSSNLRARLFDLLVSLLPGLDGQEVDTIFSSLKPAMQDSKGLIQKKAYKVLSVILKSSDGFVSKNLEELLVLMHNICHVSAKRHKLDCLYFLLAHASRTDDLKERKDIVSSFLPEVILALKEVNKKTRNRAYDVLVQIGHAYADEENGGDNEKLHGYFDMVVGCLAGEKPQMISAAVKGVARLTYEFSDLISSAYNLLPSTFLLLQRKNKEITKVRLLLEMLIKKCGTEAVKSVMPEEHMKLLTNIRKIKERKEKKYAAGSDISKSQHSKDTSSKVSRWNDTKIFSDVYADSEDSDGDDMDAESHGRSKASSLLKSKASALRSKKSRNQSHLEVDESDDEPLDLMDQHKTRLALRSSELRKRKADSDEEAEFDVEGRLVIREGERSKRKELSDADSDAKSSKGSRFSGNSSKKNQKRMKTSESGYAYTGKEYASKKASGDLKKKDKLEPYAYWPLDRKMMSRRPEQRAVAVRGMSSVVKMAKKMEGKSAAEALATTKFKKFKRSGQKKSAGKKKNK

SEQ ID NO: 70524 - DNA, 1425 bp, Arabidopsis thaliana
  misc_feature (1)..(1425): Ceres Seq. ID no. 2711390
  misc_feature (1)..(1425): Ortholog of  Ceres SEQ ID NO 15168908 as cited in SEQ ID NO 20765
atggtgtttttccgcagcgtatcggcctttactaggctgaggtctcgcgtccagggccaacaatcttcactcagcaattctgtcagatggattcagatgcagagctctaccgacctggacctgaagtcgcagctgcaagagttaattccggaacagcaggaccgtctgaagaaactgaagtcagaacatgggaaggtccaactgggaaacatcactgttgatatggttattggtggaatgagagggatgactggattgctttgggaaacctcattgcttgacccggaagagggtattcgctttaggggattgtcgattcctgagtgccagaaagtattacctactgcccagtctggagctgaaccattaccggagggtcttttgtggcttctcttaactggaaaggtacctagcaaagagcaagttgaagcactgtcgaaagacttggcgaaccgtgctgctgtgccagattatgtgtacaatgccatcgatgctctgccttccacagctcatccaatgactcaatttgctagcggtgttatggccctccaggtgcaaagtgagtttcaaaaggcatatgagaatggaattcataagtcaaagttctgggagccaacatatgaggattgcctcaacctgattgctcgtgttcctgttgtagctgcatatgtttatcgaaggatgtataagaatggtgattccattccctcagataaatctttggattatggtgcaaatttttcccacatgttgggatttgatgatgaaaaggtgaaagagctcatgaggctttacatcaccatccacagtgatcatgaaggtggaaatgttagtgctcacactggtcacctggttggtagtgcactttcagacccatatctgtcatttgcagctgcattaaatggtttagctgggccactccatggtttggctaatcaggaagttttgctttggatcaaatcagtcgtagaggaatgtggagaagatatatcaaaagaacagttgaaagaatatgtttggaaaacattaaacagtggcaaggttattccgggatatggtcacggtgttctgcgcaatactgatccaagatatgtatgccaaagagaatttgccttgaagcatctacctgacgaccctcttttccagctggtgtcaaagctttatgaagttgtgcctcctgttctcactgagcttggaaaggtgaagaacccgtggccaaatgttgatgctcacagtggggtcttgctgaaccactatggtctaaccgaagcaaggtactacaccgtgctctttggtgtttcaaggagtcttggcatctgctctcagcttatatgggaccgagctcttggacttgcacttgagaggccaaagagtgttaccatggactggcttgaagcccattgtaagaaagcttcatctgcttaa

SEQ ID NO: 70525 - protein, 474 aa, Arabidopsis thaliana
  peptide (1)..(474): Ceres Seq. ID no. 2711391
MVFFRSVSAFTRLRSRVQGQQSSLSNSVRWIQMQSSTDLDLKSQLQELIPEQQDRLKKLKSEHGKVQLGNITVDMVIGGMRGMTGLLWETSLLDPEEGIRFRGLSIPECQKVLPTAQSGAEPLPEGLLWLLLTGKVPSKEQVEALSKDLANRAAVPDYVYNAIDALPSTAHPMTQFASGVMALQVQSEFQKAYENGIHKSKFWEPTYEDCLNLIARVPVVAAYVYRRMYKNGDSIPSDKSLDYGANFSHMLGFDDEKVKELMRLYITIHSDHEGGNVSAHTGHLVGSALSDPYLSFAAALNGLAGPLHGLANQEVLLWIKSVVEECGEDISKEQLKEYVWKTLNSGKVIPGYGHGVLRNTDPRYVCQREFALKHLPDDPLFQLVSKLYEVVPPVLTELGKVKNPWPNVDAHSGVLLNHYGLTEARYYTVLFGVSRSLGICSQLIWDRALGLALERPKSVTMDWLEAHCKKASSA

SEQ ID NO: 70526 - protein, 442 aa, Arabidopsis thaliana; identical to SEQ ID NO: 30073
  peptide (1)..(442): Ceres Seq. ID no. 2711392

SEQ ID NO: 70527 - protein, 400 aa, Arabidopsis thaliana; identical to SEQ ID NO: 30074
  peptide (1)..(400): Ceres Seq. ID no. 2711393

SEQ ID NO: 70528 - DNA, 1242 bp, Arabidopsis thaliana
  misc_feature (1)..(1242): Ceres Seq. ID no. 2711459
  misc_feature (1)..(1242): Ortholog of  Ceres SEQ ID NO 12608463 as cited in SEQ ID NO 60238
atgagttctcacgtggttgatgatcaaaggcaacctaataactcaatctcgagtttaagttctaaactaaccaagccatggatcacaaccacaatcttcatctttgtcttcttcttcttcatcatcctcgttggagcttctctcaggtggatggacatgtttttaatcggtggaggtagaatcaaagtgacaccaatatttacaagaaacaccaacgcaactatccccaaggaaaaactcactacaccactgaacttcacattgcaatgctcactagaccagaacatagcaacccagacgtgtcctgcaagcaacccggagaaatcacaacctagtaaggacgagccagagacttgtccagactacttcaggtggatccacaaggatcttgaagcatggcgtgagactggaatcactcgagagacgttagagagagcaagtgataaagctcacttccggctgataataaaaggaggaagagtgtatgtgcatcaatacaagaaatcttttcagacaagagatgttttcactatatggggaatagtacagctgctaaggatgtatcctggtcaagtccctgatcttgagcttctcttcatgtgccatgactcacctgaaatctggagaagagactataggccaagaccaggagtcaatgtgacgtggccacctcctccactcttccactattgtggacattccggtgctttcgacattgtcttccctgactggagcttttggggctggccggagattaacataaaggagtggaataaacagtcggagttgataagtgaagggataaagaaggtgaagtgggaagagagagagccttacgcatattggaaggggaatcctggagttgccatggccagagctatagggagaaatggaagtgggtatgtgcgaaagaatctaaagatgaagtatgtgtatgattacatgttgcatctactgcaaagctatgggaagttgatgaagatgaatgtagaagtgcctcaaggagccaaggaagtgtgtccggagacaatggcttgtccaatcaatggaggccgaatgagacaatctatggatgactcattggttatgtctccgagcgttaaggctacttgtgagatgcctccaccttttgaagaagatgagctcaaaaagtttcttgagaagaaagaaagtgttgagaaagaagttgagaagtggactaatgagtattggcaggaacagaagaagattcttaaacattga

SEQ ID NO: 70529 - protein, 413 aa, Arabidopsis thaliana
  peptide (1)..(413): Ceres Seq. ID no. 2711460
MSSHVVDDQRQPNNSISSLSSKLTKPWITTTIFIFVFFFFIILVGASLRWMDMFLIGGGRIKVTPIFTRNTNATIPKEKLTTPLNFTLQCSLDQNIATQTCPASNPEKSQPSKDEPETCPDYFRWIHKDLEAWRETGITRETLERASDKAHFRLIIKGGRVYVHQYKKSFQTRDVFTIWGIVQLLRMYPGQVPDLELLFMCHDSPEIWRRDYRPRPGVNVTWPPPPLFHYCGHSGAFDIVFPDWSFWGWPEINIKEWNKQSELISEGIKKVKWEEREPYAYWKGNPGVAMARAIGRNGSGYVRKNLKMKYVYDYMLHLLQSYGKLMKMNVEVPQGAKEVCPETMACPINGGRMRQSMDDSLVMSPSVKATCEMPPPFEEDELKKFLEKKESVEKEVEKWTNEYWQEQKKILKH

SEQ ID NO: 70530 - protein, 363 aa, Arabidopsis thaliana
  peptide (1)..(363): Ceres Seq. ID no. 2711461
MDMFLIGGGRIKVTPIFTRNTNATIPKEKLTTPLNFTLQCSLDQNIATQTCPASNPEKSQPSKDEPETCPDYFRWIHKDLEAWRETGITRETLERASDKAHFRLIIKGGRVYVHQYKKSFQTRDVFTIWGIVQLLRMYPGQVPDLELLFMCHDSPEIWRRDYRPRPGVNVTWPPPPLFHYCGHSGAFDIVFPDWSFWGWPEINIKEWNKQSELISEGIKKVKWEEREPYAYWKGNPGVAMARAIGRNGSGYVRKNLKMKYVYDYMLHLLQSYGKLMKMNVEVPQGAKEVCPETMACPINGGRMRQSMDDSLVMSPSVKATCEMPPPFEEDELKKFLEKKESVEKEVEKWTNEYWQEQKKILKH

SEQ ID NO: 70531 - protein, 361 aa, Arabidopsis thaliana
  peptide (1)..(361): Ceres Seq. ID no. 2711462
MFLIGGGRIKVTPIFTRNTNATIPKEKLTTPLNFTLQCSLDQNIATQTCPASNPEKSQPSKDEPETCPDYFRWIHKDLEAWRETGITRETLERASDKAHFRLIIKGGRVYVHQYKKSFQTRDVFTIWGIVQLLRMYPGQVPDLELLFMCHDSPEIWRRDYRPRPGVNVTWPPPPLFHYCGHSGAFDIVFPDWSFWGWPEINIKEWNKQSELISEGIKKVKWEEREPYAYWKGNPGVAMARAIGRNGSGYVRKNLKMKYVYDYMLHLLQSYGKLMKMNVEVPQGAKEVCPETMACPINGGRMRQSMDDSLVMSPSVKATCEMPPPFEEDELKKFLEKKESVEKEVEKWTNEYWQEQKKILKH

SEQ ID NO: 70532 - DNA, 2283 bp, Arabidopsis thaliana
  misc_feature (1)..(2283): Ceres Seq. ID no. 2711511
  misc_feature (1)..(2283): Ortholog of  Ceres SEQ ID NO 15170666 as cited in SEQ ID NO 63386
atgtacgccgccacacccgaaactcctttcggttccgcgagatcacaaccggttattacccgatctgtctcacaacgatataaccatccaggtcaaagtaatcaccatcatctcctccacagtctctcatttaaccaccagaacgtactagccttaccggcagcagcaagggagccgcctgtggatgtcaagattaacgatatcgctgggaattcgattgccgggatattgtacaaatgggtgaactatgggaaaggatggagaccaagatggtttgttttgcaagatggagtgctttcatattataaaatcaagggacctgataagatcgttgttatccatgagactgagaaaggatcaagagtgatcggagaggagtccacacgtatgatctctaggaataagcgtcacgccgccactaacaacaccaaccaccagctccgccgcaagccattcggcgaagttcatctcaaggtttcatcgattcgggagagtagatcagatgataagagattttcaatattcaccggcaccaagaggcttcacctacgtgcagagacaagagaggacagagaagcttggatagaggctttacaagctgtcaaagatatgtttccaagaatgtcaaactgcgagttgatggcaccgaccaacaacttagacatctcgatagagaagcttaggctgcgattggttgaggaaggagtgagtgagtcagccattcaagactgcgaacaaatcacgaggtctgagttctcggcaattcagagccagcttttgcttcttaaacaaaagcaatggcttctcattgatacactcagacaattagagacagagaaagtagatttggaaaacacggttgtagatgagactcaacgacaagctggcaacggagactcagaagaaacaattagtgaatctgatgatgataatgaacaatttgatgaggctgaggaggaaatggatacatgtgactctctttcttcaagttcattcaaaagtattggatccgtttttcgcacatcatcattctcttcagatgatgatggacttactaatggttttgagtcagagaatgatgatgttgatccttctatcaagactattggatttaactatccacatgtcaaaagacgaaagaagttacctgatccggttgaaaaagagaaaagtgttagcctttggtcaatgatcaaagacaacattggcaaggatctcacaaaagtttgtcttcctgtctacttcaatgagcctttatcttctctacaaaaatgctttgaagatttggagtattcatatcttcttgatcaagcttctgaatggggaaagaggggcaataacctcatgaggattctgaatgtagctgcatttgccgtatctggttatgcatcaactgaaggaagaatttgcaaaccttttaatccaatgttaggtgaaacatatgaggctgactatcccgataaaggccttcgatttttctcggaaaaggtgagtcatcatcctatgattgtggcatgtcattgtgatggcaccggatggaaattttggggagatagcaacttaaaaagcaaattttggggtcgatcaattcaacttgatcctattggtttgttgactttgcaatttgatgatggtgaaattgtgcaatggagtaaggtgactacatcaatatacaatctcatacttggtaaattgtattgtgatcactacgggacaatgaagattgaaggcaacggtgaatattcatgtaaacttaaattcaaggaacagtcgatgatcgatagaaatccgcatcaagttcaaggtatagtagaagacaagaatggaaaaacagtggctaggttgtttggaaaatgggatgagagtatacactatgtgatggttgatcaaggaaaggtgaatgaatcccatcttctgtggaaacgaaacaaacagcccgaaaacccgacaaagtataatctaacacggtttgggatcacattaaacgagctcacgcctggtttaaaggagaagttgccaccaacagattcaagacttagaccggaccagaggtatttagagaagggagagtatgaaatgggaaacgcagagaagttgaggttggaacaaagacaaagacaggcgagagagatgcaagagagaggttggaaaccaaagtggtttagaaaagagaaaggaagtgagacttatagatacattggaggttattgggaagctcgagattctggtagttgggatgattgtcctgacatctttggtcaagttcaccaatccatcaagtaa

SEQ ID NO: 70533 - protein, 760 aa, Arabidopsis thaliana
  peptide (1)..(760): Ceres Seq. ID no. 2711512
MYAATPETPFGSARSQPVITRSVSQRYNHPGQSNHHHLLHSLSFNHQNVLALPAAAREPPVDVKINDIAGNSIAGILYKWVNYGKGWRPRWFVLQDGVLSYYKIKGPDKIVVIHETEKGSRVIGEESTRMISRNKRHAATNNTNHQLRRKPFGEVHLKVSSIRESRSDDKRFSIFTGTKRLHLRAETREDREAWIEALQAVKDMFPRMSNCELMAPTNNLDISIEKLRLRLVEEGVSESAIQDCEQITRSEFSAIQSQLLLLKQKQWLLIDTLRQLETEKVDLENTVVDETQRQAGNGDSEETISESDDDNEQFDEAEEEMDTCDSLSSSSFKSIGSVFRTSSFSSDDDGLTNGFESENDDVDPSIKTIGFNYPHVKRRKKLPDPVEKEKSVSLWSMIKDNIGKDLTKVCLPVYFNEPLSSLQKCFEDLEYSYLLDQASEWGKRGNNLMRILNVAAFAVSGYASTEGRICKPFNPMLGETYEADYPDKGLRFFSEKVSHHPMIVACHCDGTGWKFWGDSNLKSKFWGRSIQLDPIGLLTLQFDDGEIVQWSKVTTSIYNLILGKLYCDHYGTMKIEGNGEYSCKLKFKEQSMIDRNPHQVQGIVEDKNGKTVARLFGKWDESIHYVMVDQGKVNESHLLWKRNKQPENPTKYNLTRFGITLNELTPGLKEKLPPTDSRLRPDQRYLEKGEYEMGNAEKLRLEQRQRQAREMQERGWKPKWFRKEKGSETYRYIGGYWEARDSGSWDDCPDIFGQVHQSIK

SEQ ID NO: 70534 - protein, 631 aa, Arabidopsis thaliana
  peptide (1)..(631): Ceres Seq. ID no. 2711513
MISRNKRHAATNNTNHQLRRKPFGEVHLKVSSIRESRSDDKRFSIFTGTKRLHLRAETREDREAWIEALQAVKDMFPRMSNCELMAPTNNLDISIEKLRLRLVEEGVSESAIQDCEQITRSEFSAIQSQLLLLKQKQWLLIDTLRQLETEKVDLENTVVDETQRQAGNGDSEETISESDDDNEQFDEAEEEMDTCDSLSSSSFKSIGSVFRTSSFSSDDDGLTNGFESENDDVDPSIKTIGFNYPHVKRRKKLPDPVEKEKSVSLWSMIKDNIGKDLTKVCLPVYFNEPLSSLQKCFEDLEYSYLLDQASEWGKRGNNLMRILNVAAFAVSGYASTEGRICKPFNPMLGETYEADYPDKGLRFFSEKVSHHPMIVACHCDGTGWKFWGDSNLKSKFWGRSIQLDPIGLLTLQFDDGEIVQWSKVTTSIYNLILGKLYCDHYGTMKIEGNGEYSCKLKFKEQSMIDRNPHQVQGIVEDKNGKTVARLFGKWDESIHYVMVDQGKVNESHLLWKRNKQPENPTKYNLTRFGITLNELTPGLKEKLPPTDSRLRPDQRYLEKGEYEMGNAEKLRLEQRQRQAREMQERGWKPKWFRKEKGSETYRYIGGYWEARDSGSWDDCPDIFGQVHQSIK

SEQ ID NO: 70535 - protein, 557 aa, Arabidopsis thaliana
  peptide (1)..(557): Ceres Seq. ID no. 2711514
MFPRMSNCELMAPTNNLDISIEKLRLRLVEEGVSESAIQDCEQITRSEFSAIQSQLLLLKQKQWLLIDTLRQLETEKVDLENTVVDETQRQAGNGDSEETISESDDDNEQFDEAEEEMDTCDSLSSSSFKSIGSVFRTSSFSSDDDGLTNGFESENDDVDPSIKTIGFNYPHVKRRKKLPDPVEKEKSVSLWSMIKDNIGKDLTKVCLPVYFNEPLSSLQKCFEDLEYSYLLDQASEWGKRGNNLMRILNVAAFAVSGYASTEGRICKPFNPMLGETYEADYPDKGLRFFSEKVSHHPMIVACHCDGTGWKFWGDSNLKSKFWGRSIQLDPIGLLTLQFDDGEIVQWSKVTTSIYNLILGKLYCDHYGTMKIEGNGEYSCKLKFKEQSMIDRNPHQVQGIVEDKNGKTVARLFGKWDESIHYVMVDQGKVNESHLLWKRNKQPENPTKYNLTRFGITLNELTPGLKEKLPPTDSRLRPDQRYLEKGEYEMGNAEKLRLEQRQRQAREMQERGWKPKWFRKEKGSETYRYIGGYWEARDSGSWDDCPDIFGQVHQSIK

SEQ ID NO: 70536 - DNA, 2247 bp, Arabidopsis thaliana
  misc_feature (1)..(2247): Ceres Seq. ID no. 2711549
  misc_feature (1)..(2247): Ortholog of  Ceres SEQ ID NO 13658778 as cited in SEQ ID NO 66511
atggcggattcaagcttttctcttcctcctctttgtgaaaggatctcatacacgaactattttctaagagctgtatatctcacggttctaggccttttcttttctcttctcttgcaccgaatccgacatacgagcgaatacgacaacgtttggctcgtggctttcttttgtgaatcttgtttcttcttggtatgtctgcttattacttgcctaaaatggagtcctgctgatactaaaccctttcctgatagacttgatgaaagggttcatgaccttccttcggtggatatgttcgtgcccacagcagatccggttcgagagccaccgattatggttgtggacaccgtgctttcgctgttagctgtaaattatccggcaaataaactagcttgttatgtgtcggacgatggatgctcacctctcacttatttctctctcaaggaagcttctaagttcgccaagatttgggtaccgttctgcaaaaagtacaacactagagttagagctccttctagatattttctgaaacctataagcgtcgcaacagaggattatgaattcaatagagactgggaaaagacgaagagggagtacgagaagttgaggcggaaagtggaagatgccaccggagattctcatatgttggatgtagaagatgattttgaagcattctcaaacacaaaaccaaatgatcattcaactctagttaaggtggtatgggagaacaagggaggtgtaggagacgagaaagagatccctcatatcatatacatatcaagagagaaaagaccaaattatgttcataatcaaaaatgtggagccatgaactttctggcaagagtgtcagggttgatgacaaacgcaccatacatcttgaacgtggattgcgacatgtatgccaatgatgcagatgtagtccgacaagcaatgtgtatacttctgcaagaatcattaaatatgaaacattgtgcttttgttcaattccgtcaagaattctatgattcaagcaccgagctaatagtcgtcctacaatcacatttgggacgaggaatcgcgggaatccaaggaccgatatatataggatcaggatgcgtccacacgagaagagttatgtatggtttatctccagacgatttcgaagttgatggaagtctttcttcagttgctacaagggagtttttggttaaggatagtttagcgagaagatttggtaattctaaagagatgatgaaatcagtggttgatgcaatacaaagaaatccaaatccacaaaatatacttacaaactccatagaagcggctcgagaagtgggacattttatgcagatcggctggttatatgattcagtggcggaagatttaaacacgagtatcggaatacattcgagaggttggactagctcatacatttctccggatacacctgcatttcttggatctatgccggcaggagtacccgaggcgttactccagcagcgtcgatgggcgacaggatggatcgaaatccttttcaacaagcaaagtccgttgcgaggattgtttagcaagaaaataagattccgacaacgattagcttatctttgcattatcacctgtctaaggtcaatccctgagcttatttattgtctccttcctgcttattgcctactccacaactctaccttattccccaagggactttatttaggcataactgtcacacttgttgggatacattgtctctatactctatgggaatttatgagccttggttattccgtacaatcgtggctagtctcccaatcagtttggagaatagtagccactagtagttggttatttagcatctttgatatcacactcaagcttcttggcatctcggaaacggtgttcataatcactaaaaagactgtggctgggaccaagtcagcattagggtctggaccctctcaaggagaagacgttggtccaaactcagacttgtttaaatttgaatttgatggctcactttgtttcttgcctggcacatttattgtgttggtgaatatagccgctctagctgttttttctgtgggtctacaacggtcgagttacagccatgaaggaggtggttcgggtctggcagaggcttgcggatgtgttttggtaatgatgttgttccttccatttctaatgggtttgtttaagaaaggaaaatatggaaccccattgtctactctctctatagctggctttttagcagttttatttgttgttttctctgtttga

SEQ ID NO: 70537 - protein, 748 aa, Arabidopsis thaliana
  peptide (1)..(748): Ceres Seq. ID no. 2711550
MADSSFSLPPLCERISYTNYFLRAVYLTVLGLFFSLLLHRIRHTSEYDNVWLVAFFCESCFFLVCLLITCLKWSPADTKPFPDRLDERVHDLPSVDMFVPTADPVREPPIMVVDTVLSLLAVNYPANKLACYVSDDGCSPLTYFSLKEASKFAKIWVPFCKKYNTRVRAPSRYFLKPISVATEDYEFNRDWEKTKREYEKLRRKVEDATGDSHMLDVEDDFEAFSNTKPNDHSTLVKVVWENKGGVGDEKEIPHIIYISREKRPNYVHNQKCGAMNFLARVSGLMTNAPYILNVDCDMYANDADVVRQAMCILLQESLNMKHCAFVQFRQEFYDSSTELIVVLQSHLGRGIAGIQGPIYIGSGCVHTRRVMYGLSPDDFEVDGSLSSVATREFLVKDSLARRFGNSKEMMKSVVDAIQRNPNPQNILTNSIEAAREVGHFMQIGWLYDSVAEDLNTSIGIHSRGWTSSYISPDTPAFLGSMPAGVPEALLQQRRWATGWIEILFNKQSPLRGLFSKKIRFRQRLAYLCIITCLRSIPELIYCLLPAYCLLHNSTLFPKGLYLGITVTLVGIHCLYTLWEFMSLGYSVQSWLVSQSVWRIVATSSWLFSIFDITLKLLGISETVFIITKKTVAGTKSALGSGPSQGEDVGPNSDLFKFEFDGSLCFLPGTFIVLVNIAALAVFSVGLQRSSYSHEGGGSGLAEACGCVLVMMLFLPFLMGLFKKGKYGTPLSTLSIAGFLAVLFVVFSV

SEQ ID NO: 70538 - protein, 652 aa, Arabidopsis thaliana
  peptide (1)..(652): Ceres Seq. ID no. 2711551
MFVPTADPVREPPIMVVDTVLSLLAVNYPANKLACYVSDDGCSPLTYFSLKEASKFAKIWVPFCKKYNTRVRAPSRYFLKPISVATEDYEFNRDWEKTKREYEKLRRKVEDATGDSHMLDVEDDFEAFSNTKPNDHSTLVKVVWENKGGVGDEKEIPHIIYISREKRPNYVHNQKCGAMNFLARVSGLMTNAPYILNVDCDMYANDADVVRQAMCILLQESLNMKHCAFVQFRQEFYDSSTELIVVLQSHLGRGIAGIQGPIYIGSGCVHTRRVMYGLSPDDFEVDGSLSSVATREFLVKDSLARRFGNSKEMMKSVVDAIQRNPNPQNILTNSIEAAREVGHFMQIGWLYDSVAEDLNTSIGIHSRGWTSSYISPDTPAFLGSMPAGVPEALLQQRRWATGWIEILFNKQSPLRGLFSKKIRFRQRLAYLCIITCLRSIPELIYCLLPAYCLLHNSTLFPKGLYLGITVTLVGIHCLYTLWEFMSLGYSVQSWLVSQSVWRIVATSSWLFSIFDITLKLLGISETVFIITKKTVAGTKSALGSGPSQGEDVGPNSDLFKFEFDGSLCFLPGTFIVLVNIAALAVFSVGLQRSSYSHEGGGSGLAEACGCVLVMMLFLPFLMGLFKKGKYGTPLSTLSIAGFLAVLFVVFSV

SEQ ID NO: 70539 - protein, 638 aa, Arabidopsis thaliana
  peptide (1)..(638): Ceres Seq. ID no. 2711552
MVVDTVLSLLAVNYPANKLACYVSDDGCSPLTYFSLKEASKFAKIWVPFCKKYNTRVRAPSRYFLKPISVATEDYEFNRDWEKTKREYEKLRRKVEDATGDSHMLDVEDDFEAFSNTKPNDHSTLVKVVWENKGGVGDEKEIPHIIYISREKRPNYVHNQKCGAMNFLARVSGLMTNAPYILNVDCDMYANDADVVRQAMCILLQESLNMKHCAFVQFRQEFYDSSTELIVVLQSHLGRGIAGIQGPIYIGSGCVHTRRVMYGLSPDDFEVDGSLSSVATREFLVKDSLARRFGNSKEMMKSVVDAIQRNPNPQNILTNSIEAAREVGHFMQIGWLYDSVAEDLNTSIGIHSRGWTSSYISPDTPAFLGSMPAGVPEALLQQRRWATGWIEILFNKQSPLRGLFSKKIRFRQRLAYLCIITCLRSIPELIYCLLPAYCLLHNSTLFPKGLYLGITVTLVGIHCLYTLWEFMSLGYSVQSWLVSQSVWRIVATSSWLFSIFDITLKLLGISETVFIITKKTVAGTKSALGSGPSQGEDVGPNSDLFKFEFDGSLCFLPGTFIVLVNIAALAVFSVGLQRSSYSHEGGGSGLAEACGCVLVMMLFLPFLMGLFKKGKYGTPLSTLSIAGFLAVLFVVFSV

SEQ ID NO: 70540 - DNA, 2115 bp, Arabidopsis thaliana
  misc_feature (1)..(2115): Ceres Seq. ID no. 2711553
  misc_feature (1)..(2115): Ortholog of  Ceres SEQ ID NO 12611435 as cited in SEQ ID NO 56451
atggatgaatccttaactccaaaccctaagcaaaagccagcttcaacgacgactcgaatccaggctccgacgagtcccttcttcttgggatctaacgatgacagattggaacgggaacaagctcgagccgcaagagccgctgctagccgtcgtaggtctgtcattttcgctcgtgggtctcagcctgagacggagtctgatccttgtttcgacaaacagcaaattctcgagttgtttcagaactgtatcaaattagccagtgaaaacaaaatcaatcaaaagaatacatgggagttgaatttgatcgaccatctttgtgagattatcaaagttgaagatgagaacaatacagaaacaaattttcaaaaggcaagttgcactcttgaagctggagttaagatttactcaatgcgggtagactctgttcattcagaggcatacaaggtcttgggtggaattacccgagctggccatgatgacggtggagatcacgaggatgctgctggtgccgtagaaaatgcaactaaccaaaagaagcagccagagaaaaagatatcgcctttatcaacactggaaccttcctttgatgcccttaacgtgaagaaatttgatgtggcatttgcagtggatcccctttatcatcagacttcagcacagtttgatgaaggtggagcaaagggcctgctgctaaacaatttaggagtctatggagggtgtcaagttctatttgattcacaagaaatccctggaaagcttgtttcgtctgcaaataagcatgacaaatcagaaacaattgatctatcctttgttaaaggtctggctttactggctgatatgcctcgctctaccattgtacatgttttattgcattatgctttctctgatgttgtggttaaatttgtagaatgtgtggagcaaatggtgctaaacatgcgaaagaaggatgagattgtaccatctcttcgggctataatcaatcaatttgatgaagagaaccaaagaccatctgacacgttttcttgtggtcagcagacgaccgagtcatttgatatttcacatggtaatgatgctagctatgccgacgatgatgaaggatatgagaactttggaacttcttttgattatgagggtcaatccggtgatgttgatgaaaactttggccccaatgaagcagaaccaatatattcaaattttcatgaggaagttgaaccagcctccctgcaagacatggattcagatgacagactggagaatgttgatgactatctctttttgtcgttgggaatttcatctaagcaaaattcttgggcaggtcctgatcactggaagtatcgaaaaacaaaaggtccagatgttcaacctgcttcagaaattaaatcctctccaccagcgaagaaaaccaggaaaaagaagcaagcagagcctgaactagattttgcaaaagctttggaggaagaaatgcctgatatttttgcccctccaaaaaacccaaagactttacttctcccagcaagtagaaccccttgtcaaacgaagcttccagaggattgccattatcaacctgagaatctaataaagctatttctactaccgaatgtgatggtatggcttgccaaacacagaccaagtgaaacttcaagacagcagcctgatgattatgaacatggggaatcctggggaaatgataatgtttatgatgatgatgatggcccattcgatgataatgaaaatgatcaaagtgatgcagaggataccaacacattaatctctcagccacgccaggtcaacaaaattgatgtccaatacgataaagcttcaaaacaagttgatgtgcaagtgctaaaggaaactctttgggagtgtcttcaggaatctcatcaacctccaattcagaatctgattgtgcaggatgaggaacatcaacaagaaccacctgaaagtagatctttcaaagtgctattggctagcttcccagatgattgccaagcagccgagagaacccaagacatctcaccacatctatgtttcatctgcttgctgcatttggcgaacgagcacaatctcagcctcattggttctcaaaacttggatgatctaacaatacaccttgcctga

SEQ ID NO: 70541 - protein, 704 aa, Arabidopsis thaliana
  peptide (1)..(704): Ceres Seq. ID no. 2711554
MDESLTPNPKQKPASTTTRIQAPTSPFFLGSNDDRLEREQARAARAAASRRRSVIFARGSQPETESDPCFDKQQILELFQNCIKLASENKINQKNTWELNLIDHLCEIIKVEDENNTETNFQKASCTLEAGVKIYSMRVDSVHSEAYKVLGGITRAGHDDGGDHEDAAGAVENATNQKKQPEKKISPLSTLEPSFDALNVKKFDVAFAVDPLYHQTSAQFDEGGAKGLLLNNLGVYGGCQVLFDSQEIPGKLVSSANKHDKSETIDLSFVKGLALLADMPRSTIVHVLLHYAFSDVVVKFVECVEQMVLNMRKKDEIVPSLRAIINQFDEENQRPSDTFSCGQQTTESFDISHGNDASYADDDEGYENFGTSFDYEGQSGDVDENFGPNEAEPIYSNFHEEVEPASLQDMDSDDRLENVDDYLFLSLGISSKQNSWAGPDHWKYRKTKGPDVQPASEIKSSPPAKKTRKKKQAEPELDFAKALEEEMPDIFAPPKNPKTLLLPASRTPCQTKLPEDCHYQPENLIKLFLLPNVMVWLAKHRPSETSRQQPDDYEHGESWGNDNVYDDDDGPFDDNENDQSDAEDTNTLISQPRQVNKIDVQYDKASKQVDVQVLKETLWECLQESHQPPIQNLIVQDEEHQQEPPESRSFKVLLASFPDDCQAAERTQDISPHLCFICLLHLANEHNLSLIGSQNLDDLTIHLA

SEQ ID NO: 70542 - protein, 568 aa, Arabidopsis thaliana
  peptide (1)..(568): Ceres Seq. ID no. 2711555
MRVDSVHSEAYKVLGGITRAGHDDGGDHEDAAGAVENATNQKKQPEKKISPLSTLEPSFDALNVKKFDVAFAVDPLYHQTSAQFDEGGAKGLLLNNLGVYGGCQVLFDSQEIPGKLVSSANKHDKSETIDLSFVKGLALLADMPRSTIVHVLLHYAFSDVVVKFVECVEQMVLNMRKKDEIVPSLRAIINQFDEENQRPSDTFSCGQQTTESFDISHGNDASYADDDEGYENFGTSFDYEGQSGDVDENFGPNEAEPIYSNFHEEVEPASLQDMDSDDRLENVDDYLFLSLGISSKQNSWAGPDHWKYRKTKGPDVQPASEIKSSPPAKKTRKKKQAEPELDFAKALEEEMPDIFAPPKNPKTLLLPASRTPCQTKLPEDCHYQPENLIKLFLLPNVMVWLAKHRPSETSRQQPDDYEHGESWGNDNVYDDDDGPFDDNENDQSDAEDTNTLISQPRQVNKIDVQYDKASKQVDVQVLKETLWECLQESHQPPIQNLIVQDEEHQQEPPESRSFKVLLASFPDDCQAAERTQDISPHLCFICLLHLANEHNLSLIGSQNLDDLTIHLA

SEQ ID NO: 70543 - protein, 426 aa, Arabidopsis thaliana
  peptide (1)..(426): Ceres Seq. ID no. 2711556
MPRSTIVHVLLHYAFSDVVVKFVECVEQMVLNMRKKDEIVPSLRAIINQFDEENQRPSDTFSCGQQTTESFDISHGNDASYADDDEGYENFGTSFDYEGQSGDVDENFGPNEAEPIYSNFHEEVEPASLQDMDSDDRLENVDDYLFLSLGISSKQNSWAGPDHWKYRKTKGPDVQPASEIKSSPPAKKTRKKKQAEPELDFAKALEEEMPDIFAPPKNPKTLLLPASRTPCQTKLPEDCHYQPENLIKLFLLPNVMVWLAKHRPSETSRQQPDDYEHGESWGNDNVYDDDDGPFDDNENDQSDAEDTNTLISQPRQVNKIDVQYDKASKQVDVQVLKETLWECLQESHQPPIQNLIVQDEEHQQEPPESRSFKVLLASFPDDCQAAERTQDISPHLCFICLLHLANEHNLSLIGSQNLDDLTIHLA

SEQ ID NO: 70544 - DNA, 1449 bp, Arabidopsis thaliana
  misc_feature (1)..(1449): Ceres Seq. ID no. 2711589
  misc_feature (1)..(1449): Ortholog of  Ceres SEQ ID NO 12625899 as cited in SEQ ID NO 69079
  misc_feature (1)..(1449): Ortholog of  Ceres SEQ ID NO 15180366 as cited in SEQ ID NO 0
atggtgcagattgtgccccacgtagcaaatgcacacatggtcaaaacttctagaaaaggactcttagcgcttgtcgtagttggagtagaagagtgttgcccgacgcgtcgatgtgatttgagagatccaaatttagtggtggattctaattgcttgctgtcaagatctacacatcaaagctcactcgttgaagattcaatcatcatcaatcatttccggatcttgaacttcaacaacagagcaagcatctttctttgtttgagaattggtgttatctgtagcactcaatctaagatgtatggtggaaaaagttacatactcaaagggagtgtatcactttccttgatcatcctcattcttttggtgacaacactcctggtttccgcaaaaaaccagcctcgcatttctctgattgaagtaaaaacttgtaacttggcaaagggggaatgggttgaagacaagaagcggccattgtattctggttttgaatgtaaacaatggttatcaaacatattttcctgcagggtaatgggcagacccgacttctcatttgagggttaccggtggcagccagaaggttgcaacataccagagtttaacagagtcaacttcttgagaagaatgcagaacaagactatagcatttataggagactccttgggaagggaacaatttcaatccctgatgtgtatggccactggaggtaaagagagtccggaggttcaaaacgtgggatcggagtatggtcttgtgatacctaaaggagctcctcgtcctggtggttgggcttataggtttccgaccacaaacacaacggttttgtcttattggtcagctagtttaacagatttggtaccgatgaacaatacagatccacctcatcttattgcaatgcatcttgaccgtccaccagcattcataagaaactaccttcaccgtttccatgtattggttctaaacaccggtcaccattggagcagagataagatagaaaaaaatcattgggtgatgcacgtaaatggaacacgtgtcgaaggcggatatttcaagaacgttgaaaacgctaaaatttttacaatacacagcctggtgaagtggcttgatgcacaacttccattgcatccacggttgaaagctttctttacgacgatttcccctaggcatgaaaagtgtaacaatactatccctttgtctagaggaagcaaaatcacaggcgaaggtggatcgctcgatacaatagttgagagtgctgtgaatgggacaagggtcaagattcttgacataactgcactttctaaactaagagatgaagctcatatcgcagggtgtaaactcaaaccgaaaaaggcgagtaacgtgacttcagctccaacgttcaacgattgcttgcattggtgcttacccgggatcccggatacttggaatgaacttctcatagcacagctttga

SEQ ID NO: 70545 - protein, 482 aa, Arabidopsis thaliana
  peptide (1)..(482): Ceres Seq. ID no. 2711590
MVQIVPHVANAHMVKTSRKGLLALVVVGVEECCPTRRCDLRDPNLVVDSNCLLSRSTHQSSLVEDSIIINHFRILNFNNRASIFLCLRIGVICSTQSKMYGGKSYILKGSVSLSLIILILLVTTLLVSAKNQPRISLIEVKTCNLAKGEWVEDKKRPLYSGFECKQWLSNIFSCRVMGRPDFSFEGYRWQPEGCNIPEFNRVNFLRRMQNKTIAFIGDSLGREQFQSLMCMATGGKESPEVQNVGSEYGLVIPKGAPRPGGWAYRFPTTNTTVLSYWSASLTDLVPMNNTDPPHLIAMHLDRPPAFIRNYLHRFHVLVLNTGHHWSRDKIEKNHWVMHVNGTRVEGGYFKNVENAKIFTIHSLVKWLDAQLPLHPRLKAFFTTISPRHEKCNNTIPLSRGSKITGEGGSLDTIVESAVNGTRVKILDITALSKLRDEAHIAGCKLKPKKASNVTSAPTFNDCLHWCLPGIPDTWNELLIAQL

SEQ ID NO: 70546 - protein, 470 aa, Arabidopsis thaliana
  peptide (1)..(470): Ceres Seq. ID no. 2711591
MVKTSRKGLLALVVVGVEECCPTRRCDLRDPNLVVDSNCLLSRSTHQSSLVEDSIIINHFRILNFNNRASIFLCLRIGVICSTQSKMYGGKSYILKGSVSLSLIILILLVTTLLVSAKNQPRISLIEVKTCNLAKGEWVEDKKRPLYSGFECKQWLSNIFSCRVMGRPDFSFEGYRWQPEGCNIPEFNRVNFLRRMQNKTIAFIGDSLGREQFQSLMCMATGGKESPEVQNVGSEYGLVIPKGAPRPGGWAYRFPTTNTTVLSYWSASLTDLVPMNNTDPPHLIAMHLDRPPAFIRNYLHRFHVLVLNTGHHWSRDKIEKNHWVMHVNGTRVEGGYFKNVENAKIFTIHSLVKWLDAQLPLHPRLKAFFTTISPRHEKCNNTIPLSRGSKITGEGGSLDTIVESAVNGTRVKILDITALSKLRDEAHIAGCKLKPKKASNVTSAPTFNDCLHWCLPGIPDTWNELLIAQL

SEQ ID NO: 70547 - protein, 384 aa, Arabidopsis thaliana
  peptide (1)..(384): Ceres Seq. ID no. 2711592
MYGGKSYILKGSVSLSLIILILLVTTLLVSAKNQPRISLIEVKTCNLAKGEWVEDKKRPLYSGFECKQWLSNIFSCRVMGRPDFSFEGYRWQPEGCNIPEFNRVNFLRRMQNKTIAFIGDSLGREQFQSLMCMATGGKESPEVQNVGSEYGLVIPKGAPRPGGWAYRFPTTNTTVLSYWSASLTDLVPMNNTDPPHLIAMHLDRPPAFIRNYLHRFHVLVLNTGHHWSRDKIEKNHWVMHVNGTRVEGGYFKNVENAKIFTIHSLVKWLDAQLPLHPRLKAFFTTISPRHEKCNNTIPLSRGSKITGEGGSLDTIVESAVNGTRVKILDITALSKLRDEAHIAGCKLKPKKASNVTSAPTFNDCLHWCLPGIPDTWNELLIAQL

SEQ ID NO: 70548 - DNA, 942 bp, Arabidopsis thaliana
  misc_feature (1)..(942): Ceres Seq. ID no. 2711597
  misc_feature (1)..(942): Ortholog of  Ceres SEQ ID NO 13661548 as cited in SEQ ID NO 61474
atgccggtgagagttgttgagagcaacacgcctgctcaagcattttctggtacgcaaaatgtctctaatcaacagaaggaggaagcttggagagtcaacgtccagatacagggtattgaccttgaacatggttatctttgtggcaccatggaagctctaaacgttcccatggcagacactcctgtcataacattctgggaaggggaaatcgttgatggaaagaattataccttttacaccggaaaatgggaagcaacgagggaagatgatatgagacattggtcaaagttcccgtctttttcgcctcttcagagatggaaagagcaatactttgtaaacgttggcacagattgtggactaacaatagctggattttactacgtatgcttctcctgcagcgatggttccatcagcggtttctattatgatccaaacagcagtttccatcacatgatcataagtagtagtaaaaatgtgttgaaaatggaagaagttgaggtgagcaagaagaggaaatttcagacagatcaatctgatgagttatcgttattacctctgtcaaaacacacttgttttgccaatgttgcttgttcagagaatacaaatggtaactcggagattgatacagagtattcaatgtcttcttatgtgaactcaacaacttctatggagtgtaacaatgatatagagatgaaagaggaatcatctggatcatgcggtgaagacaagatgatctctttcgaaagccatctagattacatctatgggactcagaacttagaggatttttcagagaaagtcattgaaaacattctctatctcgatgaacaagaagaagaagaggaagatgctaaaggatgtagtagtaatgctgctaagtttgttctgtcctctggaagatggactgttaaccaaggtaaagaaaaccggattttggtttga

SEQ ID NO: 70549 - protein, 313 aa, Arabidopsis thaliana
  peptide (1)..(313): Ceres Seq. ID no. 2711598
MPVRVVESNTPAQAFSGTQNVSNQQKEEAWRVNVQIQGIDLEHGYLCGTMEALNVPMADTPVITFWEGEIVDGKNYTFYTGKWEATREDDMRHWSKFPSFSPLQRWKEQYFVNVGTDCGLTIAGFYYVCFSCSDGSISGFYYDPNSSFHHMIISSSKNVLKMEEVEVSKKRKFQTDQSDELSLLPLSKHTCFANVACSENTNGNSEIDTEYSMSSYVNSTTSMECNNDIEMKEESSGSCGEDKMISFESHLDYIYGTQNLEDFSEKVIENILYLDEQEEEEEDAKGCSSNAAKFVLSSGRWTVNQGKENRILV

SEQ ID NO: 70550 - protein, 264 aa, Arabidopsis thaliana
  peptide (1)..(264): Ceres Seq. ID no. 2711599
MEALNVPMADTPVITFWEGEIVDGKNYTFYTGKWEATREDDMRHWSKFPSFSPLQRWKEQYFVNVGTDCGLTIAGFYYVCFSCSDGSISGFYYDPNSSFHHMIISSSKNVLKMEEVEVSKKRKFQTDQSDELSLLPLSKHTCFANVACSENTNGNSEIDTEYSMSSYVNSTTSMECNNDIEMKEESSGSCGEDKMISFESHLDYIYGTQNLEDFSEKVIENILYLDEQEEEEEDAKGCSSNAAKFVLSSGRWTVNQGKENRILV

SEQ ID NO: 70551 - protein, 257 aa, Arabidopsis thaliana
  peptide (1)..(257): Ceres Seq. ID no. 2711600
MADTPVITFWEGEIVDGKNYTFYTGKWEATREDDMRHWSKFPSFSPLQRWKEQYFVNVGTDCGLTIAGFYYVCFSCSDGSISGFYYDPNSSFHHMIISSSKNVLKMEEVEVSKKRKFQTDQSDELSLLPLSKHTCFANVACSENTNGNSEIDTEYSMSSYVNSTTSMECNNDIEMKEESSGSCGEDKMISFESHLDYIYGTQNLEDFSEKVIENILYLDEQEEEEEDAKGCSSNAAKFVLSSGRWTVNQGKENRILV

SEQ ID NO: 70552 - DNA, 2331 bp, Arabidopsis thaliana
  misc_feature (1)..(2331): Ceres Seq. ID no. 2711644
  misc_feature (1)..(2331): Ortholog of  Ceres SEQ ID NO 13654989 as cited in SEQ ID NO 63117
  misc_feature (1)..(2331): Ortholog of  Ceres SEQ ID NO 13584744 as cited in SEQ ID NO 69137
atgcaacccaattctcacatcttcgtcatcatcaccatttcatcactcatcattacagtttctgcgtatggctcaacaggcacaatcgcagcagctttcggcgaaaacggattcttctgcgccattgacgcaagtgggaagcaagaagtcatctgttgggatagaggaaacactaaccgatcattaaaccgacccccaggtgaaatctccggttattctcctccaatgacttctctttccggtggtgaaggttttctctgcgccattacgtcgaacacttcgcgtgcgttttgttggaaccttgaagatccttctgagaatctcgttcctcgagcttttcagtataattcttacttacagattgcttctggtaacaatcatgtttgtgctattagtggattgtattactcaggtcctgattatggtcctgttcattgttgggagtatagtgataacactaatttcacttctggtcttctttggaattcttcttttcataatccttatatagatagtctcatgtttcgtaagattgtttctggagatgggttttcttgtggtgttactaaagatggagacttggtttgttggggaccaaaatcaaaccttttgaatttctccaataatgaagaattcgaggttttagcttctgggaggaactctgtttgtggtgtctctaaagattcaggtcaacttcattgctttggagatgaaacagagtttggttcgttaccaaaccggcctcggtttattgctctttcagctggtgctaatcattattgtggtatacgtgaggatgatcatggagttgagtgttggggaaggaacttgaattcttcttcatcatcttcagctcctaatacttcagggtttgtggcgatttcgtcttcggattcaacaacttgtggagttagagagcttgatttagttcttgattgttggagagttcatgattcttcgaaagcggattatagtcctcctttggagttatgtagccccgggatgtgttcgcctcgcggtaattgtggtgatggttggtttgctttcaatgcaagtatcttgaaagaatctgagcttactagcttgtgctcgtttcataacctcaacatttgtttacgttgtggaatcagttgcttggaagggtatttcccttccagcacttgtaatccaaacgcggaccgggtctgtactccttgttcgctatgtcagaatagttcttgttacggtatctgtaagattcgggctacgaaatcgaaggagcatgagcagaaagagcagagagaggtacggagattggtgatcatcatagggtgctctgttttagggttcttggtgatgttgattggtttgtctttcattccaaagatgacaaaaggtagtaaacgagatgatgaagagaggagtaagatgacttgttgcttctgtttcgataagaattctgtagaagctgatcctgatcctgtccctcatcagtcggttcttctaccaaccgctgtatctctcggggaaaccaagatcttccgtctatcagaacttaaagacgcgactcacgggttcaaagaattcaacgagctcgggagaggtagcttcgggtttgtctataaagctgttttatctgatgggatacatgttgcggtcaaaagagcgaatgctgcaacgatcattcactctaataaccgaggtttcgagtccgagctagagattctttgcaaaatcagacacaacaatattgtgaatttgttaggatactgctcagagatgggggaaaggcttttggtttatgagtacatgccgcacggtacgcttcatgatcatctccatggagatctttcacaactggactggagcatgagactgaagatcatgttgcaggctgcaagaggacttgattacttacacaacgaagtagatcctccgataattcacagagatgtgaaaacgtccaacatcttgttagacggtgaaatgtgcgcaagaattgcggatttcggattggtaagctcgaatgaaagggattcaagcaatagtgatagagaaggtgatgtgtatgactttggtattgttctacttgagatactaagcgggcgaaaagctatcgatagagagtctgatcctgcggggattgcggaatgggcggttcctttgatcaggaaaggaaaagcagcggcgataatcgataggaacatttgtttgccaagaaatgtagagcctttgcttaaattggctgagttagctgagcttgctgtgagggaaaattcgaatgaacgaccaaatatcagaaatattctgtgttttcttgatctcatcgtcaagtctggcctcactttttaa

SEQ ID NO: 70553 - protein, 776 aa, Arabidopsis thaliana
  peptide (1)..(776): Ceres Seq. ID no. 2711645
MQPNSHIFVIITISSLIITVSAYGSTGTIAAAFGENGFFCAIDASGKQEVICWDRGNTNRSLNRPPGEISGYSPPMTSLSGGEGFLCAITSNTSRAFCWNLEDPSENLVPRAFQYNSYLQIASGNNHVCAISGLYYSGPDYGPVHCWEYSDNTNFTSGLLWNSSFHNPYIDSLMFRKIVSGDGFSCGVTKDGDLVCWGPKSNLLNFSNNEEFEVLASGRNSVCGVSKDSGQLHCFGDETEFGSLPNRPRFIALSAGANHYCGIREDDHGVECWGRNLNSSSSSSAPNTSGFVAISSSDSTTCGVRELDLVLDCWRVHDSSKADYSPPLELCSPGMCSPRGNCGDGWFAFNASILKESELTSLCSFHNLNICLRCGISCLEGYFPSSTCNPNADRVCTPCSLCQNSSCYGICKIRATKSKEHEQKEQREVRRLVIIIGCSVLGFLVMLIGLSFIPKMTKGSKRDDEERSKMTCCFCFDKNSVEADPDPVPHQSVLLPTAVSLGETKIFRLSELKDATHGFKEFNELGRGSFGFVYKAVLSDGIHVAVKRANAATIIHSNNRGFESELEILCKIRHNNIVNLLGYCSEMGERLLVYEYMPHGTLHDHLHGDLSQLDWSMRLKIMLQAARGLDYLHNEVDPPIIHRDVKTSNILLDGEMCARIADFGLVSSNERDSSNSDREGDVYDFGIVLLEILSGRKAIDRESDPAGIAEWAVPLIRKGKAAAIIDRNICLPRNVEPLLKLAELAELAVRENSNERPNIRNILCFLDLIVKSGLTF

SEQ ID NO: 70554 - protein, 701 aa, Arabidopsis thaliana
  peptide (1)..(701): Ceres Seq. ID no. 2711646
MTSLSGGEGFLCAITSNTSRAFCWNLEDPSENLVPRAFQYNSYLQIASGNNHVCAISGLYYSGPDYGPVHCWEYSDNTNFTSGLLWNSSFHNPYIDSLMFRKIVSGDGFSCGVTKDGDLVCWGPKSNLLNFSNNEEFEVLASGRNSVCGVSKDSGQLHCFGDETEFGSLPNRPRFIALSAGANHYCGIREDDHGVECWGRNLNSSSSSSAPNTSGFVAISSSDSTTCGVRELDLVLDCWRVHDSSKADYSPPLELCSPGMCSPRGNCGDGWFAFNASILKESELTSLCSFHNLNICLRCGISCLEGYFPSSTCNPNADRVCTPCSLCQNSSCYGICKIRATKSKEHEQKEQREVRRLVIIIGCSVLGFLVMLIGLSFIPKMTKGSKRDDEERSKMTCCFCFDKNSVEADPDPVPHQSVLLPTAVSLGETKIFRLSELKDATHGFKEFNELGRGSFGFVYKAVLSDGIHVAVKRANAATIIHSNNRGFESELEILCKIRHNNIVNLLGYCSEMGERLLVYEYMPHGTLHDHLHGDLSQLDWSMRLKIMLQAARGLDYLHNEVDPPIIHRDVKTSNILLDGEMCARIADFGLVSSNERDSSNSDREGDVYDFGIVLLEILSGRKAIDRESDPAGIAEWAVPLIRKGKAAAIIDRNICLPRNVEPLLKLAELAELAVRENSNERPNIRNILCFLDLIVKSGLTF

SEQ ID NO: 70555 - protein, 603 aa, Arabidopsis thaliana
  peptide (1)..(603): Ceres Seq. ID no. 2711647
MFRKIVSGDGFSCGVTKDGDLVCWGPKSNLLNFSNNEEFEVLASGRNSVCGVSKDSGQLHCFGDETEFGSLPNRPRFIALSAGANHYCGIREDDHGVECWGRNLNSSSSSSAPNTSGFVAISSSDSTTCGVRELDLVLDCWRVHDSSKADYSPPLELCSPGMCSPRGNCGDGWFAFNASILKESELTSLCSFHNLNICLRCGISCLEGYFPSSTCNPNADRVCTPCSLCQNSSCYGICKIRATKSKEHEQKEQREVRRLVIIIGCSVLGFLVMLIGLSFIPKMTKGSKRDDEERSKMTCCFCFDKNSVEADPDPVPHQSVLLPTAVSLGETKIFRLSELKDATHGFKEFNELGRGSFGFVYKAVLSDGIHVAVKRANAATIIHSNNRGFESELEILCKIRHNNIVNLLGYCSEMGERLLVYEYMPHGTLHDHLHGDLSQLDWSMRLKIMLQAARGLDYLHNEVDPPIIHRDVKTSNILLDGEMCARIADFGLVSSNERDSSNSDREGDVYDFGIVLLEILSGRKAIDRESDPAGIAEWAVPLIRKGKAAAIIDRNICLPRNVEPLLKLAELAELAVRENSNERPNIRNILCFLDLIVKSGLTF

SEQ ID NO: 70556 - DNA, 1041 bp, Arabidopsis thaliana
  misc_feature (1)..(1041): Ceres Seq. ID no. 2711763
  misc_feature (1)..(1041): Ortholog of  Ceres SEQ ID NO 15177870 as cited in SEQ ID NO 52373
  misc_feature (1)..(1041): Ortholog of  Ceres SEQ ID NO 13582380 as cited in SEQ ID NO 56782
atgcttctatacttgctcatcacttgtctctctttcttcttcttttccaaatctttatcctttcctcaatgggcatctaaaaccaaaaatttgctctccttctacttctccaagtatttgtttacaaacagtctacaccagatcacacccgatctagcctctccggtgctcggaaaaatgtcaattcttgacctccctgaccttccactcgactgcattcttgaacttcttccaccctctgaactatgtaccatggctagggtctgtagctcgttaagagagagatgtgtaagtgatcatttatgggagaaacacttgaagactaaatggggaaaaatccttggaccttctgctcacaaagaatggcaatgctatctatcttctccatatcatctcgattctcctcatcacaaaactagtcatcttggtttggccaaaatcatatctcttatgcgatcgctttcatccatttttcgagatgatgatcataggaggagatatccatcttcaatccctcttgactctaccatgaacttctacctatccctcgaaacaggtcgcttttggtttccagctcaagtttacaaccgtgagaatggacatgtagggttcatgttgtcatgctatgatgctgagctcagctatgacactgacactaatacttttcaagctaggtatccaccacatggtaaaagagcaattgcggttgaaaaagacgtgacatgggagaggataagagcagctcccgttgatgcatcaccccataatctctatgtgtcagattctctaaatgagttaaaacccggagaccacatagagatccagtggagaaggaacaaagagtttccttatgagatgatggtgttggaatttaaccagtacacagtcggatcaaggtggagaaaaacgatgattaacaggagagatcatagagagaaaggtaacgaggaagacgggttctatggaggaattcgaaaaataaattgtaaagaagatattgaaatgtggaagcgtctttggccatcctccatcttggagtag

SEQ ID NO: 70557 - protein, 346 aa, Arabidopsis thaliana
  peptide (1)..(346): Ceres Seq. ID no. 2711764
MLLYLLITCLSFFFFSKSLSFPQWASKTKNLLSFYFSKYLFTNSLHQITPDLASPVLGKMSILDLPDLPLDCILELLPPSELCTMARVCSSLRERCVSDHLWEKHLKTKWGKILGPSAHKEWQCYLSSPYHLDSPHHKTSHLGLAKIISLMRSLSSIFRDDDHRRRYPSSIPLDSTMNFYLSLETGRFWFPAQVYNRENGHVGFMLSCYDAELSYDTDTNTFQARYPPHGKRAIAVEKDVTWERIRAAPVDASPHNLYVSDSLNELKPGDHIEIQWRRNKEFPYEMMVLEFNQYTVGSRWRKTMINRRDHREKGNEEDGFYGGIRKINCKEDIEMWKRLWPSSILE

SEQ ID NO: 70558 - protein, 287 aa, Arabidopsis thaliana
  peptide (1)..(287): Ceres Seq. ID no. 2711765
MSILDLPDLPLDCILELLPPSELCTMARVCSSLRERCVSDHLWEKHLKTKWGKILGPSAHKEWQCYLSSPYHLDSPHHKTSHLGLAKIISLMRSLSSIFRDDDHRRRYPSSIPLDSTMNFYLSLETGRFWFPAQVYNRENGHVGFMLSCYDAELSYDTDTNTFQARYPPHGKRAIAVEKDVTWERIRAAPVDASPHNLYVSDSLNELKPGDHIEIQWRRNKEFPYEMMVLEFNQYTVGSRWRKTMINRRDHREKGNEEDGFYGGIRKINCKEDIEMWKRLWPSSILE

SEQ ID NO: 70559 - protein, 262 aa, Arabidopsis thaliana
  peptide (1)..(262): Ceres Seq. ID no. 2711766
MARVCSSLRERCVSDHLWEKHLKTKWGKILGPSAHKEWQCYLSSPYHLDSPHHKTSHLGLAKIISLMRSLSSIFRDDDHRRRYPSSIPLDSTMNFYLSLETGRFWFPAQVYNRENGHVGFMLSCYDAELSYDTDTNTFQARYPPHGKRAIAVEKDVTWERIRAAPVDASPHNLYVSDSLNELKPGDHIEIQWRRNKEFPYEMMVLEFNQYTVGSRWRKTMINRRDHREKGNEEDGFYGGIRKINCKEDIEMWKRLWPSSILE

SEQ ID NO: 70560 - DNA, 1392 bp, Arabidopsis thaliana
  misc_feature (1)..(1392): Ceres Seq. ID no. 2711771
  misc_feature (1)..(1392): Ortholog of  Ceres SEQ ID NO 13596030 as cited in SEQ ID NO 62043
atgtcagagccaatcaaaaacatagttctggtaggccgtactggtaatggaaaaagcagcacagggaacacccttcttggtacaaagcagttcaaatctaaaaaccaggcaaaaggcgttaccatgatatgtgaaatgtacagagctgcaatacaagatggtccaataatcaatgtcattgacactcctggtttgtgcgactcgttcgtgcccggagacgacataagtaacgaaataatcaattgcttaacaatggcggaagaaggtatacatgctgtgttgcttgttctatctgctaggggtcgcatttcaaaggaggaggagtctacagttaataccttgcagtgcatattcggcagccaaattcttgactattgcattgttgtgttcactggcggtgacgatttggaagaagacgatcagacattagacgattatttcagagctggttgccctgaattcttgacgaaagttctcagactctgtggtggacggaaggtgctatttgataacaaaagtaaagatgaaaagaagaaggttgagcaagttaagcagcttctagcccgtgtggaaaatgtaggagagcaaactggtggaataccgtatacttatcagttgcaccgtaagataaaggaagaaaatgatgaaaggctaagggaagaagaaagggtgattgaatctaaaaaccgtgctgaagcagaactagcagagatgcaacagaatttactaatggaaaaggagaagttacaaatggaggaggcgaaaaacaaacagttgattgcacaagcggaagcaaatgaaaagcttatggaacaagaaagggccaaaaaccgtgctgaaaccgaactagctgcagtaatggtggagaagttacaaatggaagaggagaaaaacaagcagttgattgcacaggcgaatcgcatgatctgcgcaagggatcttaacatcgaatggtctcatagcgaagagcattggaaatgggtaaatctggatcacaacatatcaagcaatacattcgtcgaagttgctgagcttctaggagtttattggtttgacgtaagtggaagtttggacacgacggaaatggcaccatggacacattacgaggttctgttcgttgttaatttaaaagactcagcttttaaatggaatgcagcggtgaaaatgaacctgttttacatcaacagtaggccaggaggtccaggaacgcaagagcgagctgttgacatgaggcagcatattgggaaaggatgggtaactatacacgccggtgaattcattacgacaccggagaatgtcggactgattgggttccgcatgtctgaggtcgactccggcgataacaggggagggctcattgtcaaaggtgttttaattcgtcctataaactaa

SEQ ID NO: 70561 - protein, 463 aa, Arabidopsis thaliana
  peptide (1)..(463): Ceres Seq. ID no. 2711772
MSEPIKNIVLVGRTGNGKSSTGNTLLGTKQFKSKNQAKGVTMICEMYRAAIQDGPIINVIDTPGLCDSFVPGDDISNEIINCLTMAEEGIHAVLLVLSARGRISKEEESTVNTLQCIFGSQILDYCIVVFTGGDDLEEDDQTLDDYFRAGCPEFLTKVLRLCGGRKVLFDNKSKDEKKKVEQVKQLLARVENVGEQTGGIPYTYQLHRKIKEENDERLREEERVIESKNRAEAELAEMQQNLLMEKEKLQMEEAKNKQLIAQAEANEKLMEQERAKNRAETELAAVMVEKLQMEEEKNKQLIAQANRMICARDLNIEWSHSEEHWKWVNLDHNISSNTFVEVAELLGVYWFDVSGSLDTTEMAPWTHYEVLFVVNLKDSAFKWNAAVKMNLFYINSRPGGPGTQERAVDMRQHIGKGWVTIHAGEFITTPENVGLIGFRMSEVDSGDNRGGLIVKGVLIRPIN

SEQ ID NO: 70562 - protein, 422 aa, Arabidopsis thaliana
  peptide (1)..(422): Ceres Seq. ID no. 2711773
MICEMYRAAIQDGPIINVIDTPGLCDSFVPGDDISNEIINCLTMAEEGIHAVLLVLSARGRISKEEESTVNTLQCIFGSQILDYCIVVFTGGDDLEEDDQTLDDYFRAGCPEFLTKVLRLCGGRKVLFDNKSKDEKKKVEQVKQLLARVENVGEQTGGIPYTYQLHRKIKEENDERLREEERVIESKNRAEAELAEMQQNLLMEKEKLQMEEAKNKQLIAQAEANEKLMEQERAKNRAETELAAVMVEKLQMEEEKNKQLIAQANRMICARDLNIEWSHSEEHWKWVNLDHNISSNTFVEVAELLGVYWFDVSGSLDTTEMAPWTHYEVLFVVNLKDSAFKWNAAVKMNLFYINSRPGGPGTQERAVDMRQHIGKGWVTIHAGEFITTPENVGLIGFRMSEVDSGDNRGGLIVKGVLIRPIN

SEQ ID NO: 70563 - protein, 418 aa, Arabidopsis thaliana
  peptide (1)..(418): Ceres Seq. ID no. 2711774
MYRAAIQDGPIINVIDTPGLCDSFVPGDDISNEIINCLTMAEEGIHAVLLVLSARGRISKEEESTVNTLQCIFGSQILDYCIVVFTGGDDLEEDDQTLDDYFRAGCPEFLTKVLRLCGGRKVLFDNKSKDEKKKVEQVKQLLARVENVGEQTGGIPYTYQLHRKIKEENDERLREEERVIESKNRAEAELAEMQQNLLMEKEKLQMEEAKNKQLIAQAEANEKLMEQERAKNRAETELAAVMVEKLQMEEEKNKQLIAQANRMICARDLNIEWSHSEEHWKWVNLDHNISSNTFVEVAELLGVYWFDVSGSLDTTEMAPWTHYEVLFVVNLKDSAFKWNAAVKMNLFYINSRPGGPGTQERAVDMRQHIGKGWVTIHAGEFITTPENVGLIGFRMSEVDSGDNRGGLIVKGVLIRPIN

SEQ ID NO: 70564 - DNA, 1068 bp, Arabidopsis thaliana
  misc_feature (1)..(1068): Ceres Seq. ID no. 2711945
  misc_feature (1)..(1068): Ortholog of  Ceres SEQ ID NO 13598368 as cited in SEQ ID NO 62140
atggtaggagacatcgccacgagatggaaagaattgagcggtagtagcaagtggaaagacctgcttgatcctcttgacttggatctacgccgttatatcctacactatggtgatatggctgaggagatagctgctacaccaaagaagagctctttgctcgaaccggttacctcaaagccaaccctttcagacgaaggcaagaagttgttagggaggaggggcattgttgttgcatggcgagggaccattcagctgtacgagtgggctaacgatttcgatttcccacttgaatcagctgttatggttttccctggagctaacccgaatgacgagcctcgcgtagcaaatggttggctatccctttatacatccactgatccacgatcacgttttgacaagaccagtgcacaagaacaggttcaagaagagctcaaaaggttactagaattgtacaaaaacgaagacgttaccatcaccttaacaggccatagcttgggcgcagttatgtcgattctatccgccgcagactttctccataacgaatggcctaagatcacaccaagtctacaacacagcctatgtgtcacagtatttgctttcgggagtccccaaatcggtgaccgaagcttcaaaagactcgtagagtctctcgaacacctccacatcctaagagtaacaaacgtcccggacctcattccccgttaccccgtattcaggttcacagatataggcgaggagcttcaaatcaacacattaaaatcagagtacctaaaacgatctctaaacctgggacatttccataacctggaggcttacttacacggcgtggcagggacacaacacaaccaaggagaattcaaactagagattaaccgagatatagcactggtaaacaaaggtttagatgctcttgaagataagtacttagtaccaggacattggtgggttcttgagaacaaaggaatggttcaaagtgatgatgggacatggaaactaaatggtgacaggtcaaagaagaaacaagaagaagaagacgaaaaagaagaaaacaattgcaaattcccatga

SEQ ID NO: 70565 - protein, 355 aa, Arabidopsis thaliana
  peptide (1)..(355): Ceres Seq. ID no. 2711946
MVGDIATRWKELSGSSKWKDLLDPLDLDLRRYILHYGDMAEEIAATPKKSSLLEPVTSKPTLSDEGKKLLGRRGIVVAWRGTIQLYEWANDFDFPLESAVMVFPGANPNDEPRVANGWLSLYTSTDPRSRFDKTSAQEQVQEELKRLLELYKNEDVTITLTGHSLGAVMSILSAADFLHNEWPKITPSLQHSLCVTVFAFGSPQIGDRSFKRLVESLEHLHILRVTNVPDLIPRYPVFRFTDIGEELQINTLKSEYLKRSLNLGHFHNLEAYLHGVAGTQHNQGEFKLEINRDIALVNKGLDALEDKYLVPGHWWVLENKGMVQSDDGTWKLNGDRSKKKQEEEDEKEENNCKFP

SEQ ID NO: 70566 - protein, 317 aa, Arabidopsis thaliana
  peptide (1)..(317): Ceres Seq. ID no. 2711947
MAEEIAATPKKSSLLEPVTSKPTLSDEGKKLLGRRGIVVAWRGTIQLYEWANDFDFPLESAVMVFPGANPNDEPRVANGWLSLYTSTDPRSRFDKTSAQEQVQEELKRLLELYKNEDVTITLTGHSLGAVMSILSAADFLHNEWPKITPSLQHSLCVTVFAFGSPQIGDRSFKRLVESLEHLHILRVTNVPDLIPRYPVFRFTDIGEELQINTLKSEYLKRSLNLGHFHNLEAYLHGVAGTQHNQGEFKLEINRDIALVNKGLDALEDKYLVPGHWWVLENKGMVQSDDGTWKLNGDRSKKKQEEEDEKEENNCKFP

SEQ ID NO: 70567 - protein, 255 aa, Arabidopsis thaliana
  peptide (1)..(255): Ceres Seq. ID no. 2711948
MVFPGANPNDEPRVANGWLSLYTSTDPRSRFDKTSAQEQVQEELKRLLELYKNEDVTITLTGHSLGAVMSILSAADFLHNEWPKITPSLQHSLCVTVFAFGSPQIGDRSFKRLVESLEHLHILRVTNVPDLIPRYPVFRFTDIGEELQINTLKSEYLKRSLNLGHFHNLEAYLHGVAGTQHNQGEFKLEINRDIALVNKGLDALEDKYLVPGHWWVLENKGMVQSDDGTWKLNGDRSKKKQEEEDEKEENNCKFP

SEQ ID NO: 70568 - DNA, 2655 bp, Arabidopsis thaliana
  misc_feature (1)..(2655): Ceres Seq. ID no. 2712086
  misc_feature (1)..(2655): Ortholog of  Ceres SEQ ID NO 15226720 as cited in SEQ ID NO 58707
  misc_feature (1)..(2655): Ortholog of  Ceres SEQ ID NO 13654989 as cited in SEQ ID NO 63117
  misc_feature (1)..(2655): Ortholog of  Ceres SEQ ID NO 13584744 as cited in SEQ ID NO 69137
atgaagattcaccttttgttggccatgattggaacctttgtcgttataattggagcccaggatcaagaaggtttcatcagtttagattgtggattacctagtgacgaatctccttacgatgattcgtttaacggattaacattcacatcggattccactttcatccaaacaggaaaaattgatagtgtcgataaagatcttaacataaacttatcaaaacaatatttgactcttagatacttcccagaaggaaaacgtaattgttatagtcttgatgtcaagcgtggcacaacttatctcatcgtggttagctttgtatatggaaattatgatggtcttaaccgtgatccaaacttcgatatccatcttggtcccaataagtggaaaagaatagatttggatggagagaaagaaggtacaagagaagagatcatacacaaagccaggtcaaactctttggatatttgtcttgttaagacaggagaaactttgccaataatttcagccatagaaatacggccactaaggaataatacgtatgttacacaatctggttcgctgatgatgtctttccgggtttatcttagcaattcagatgcatctataaggtatgctgatgacgtccatgatcgtatttggtctccattcaacggatcttcacatacacatataacaactgatctcaatataaacaactcaaatgcatatgagattccaaaaaatatactccaaactgctgccataccaagaaacgccagtgcgccgctgattattacgtgggatccactacccattaatgcggaggtatacttgtacatgcactttgcggagattcaaacccttgaagccaacgagacgaggcagtttgacgttatcttgagaggaaactttaatcattcaggatttagtccaaccaagttaaaggtatttacattatacacagaagaaccaatgaaatgtggttcagaaggttgttatttacagctagtaaaaacaccgaactcaactctgccacctctgatcaacgctattgaggcatacagtgttatcgagttctcacaattggaaacaagtcttagtgatgtggacgctatcaagaacatcaaaaatacttataagctgaataaaatcacttggcaaggagatccatgtctccctcaagatttgtcgtgggaaagtattagatgcacctacgtagatggctccacttcaccaacaatcatttccttagatttgtcgaaaagtggattaaatgggagtataccccaaattttacaaaatttcacgcaattacaagaactggacttatcaaataatagcttgactggaccggtgcctatcttccttgccaacatgaaaacgttatctttaataaacttaagtgggaacaatctcagtggttcagttcctcaagctcttcttgacaaagaaaaagaaggacttgtgttaaaacttgaaggaaatccagatttgtgcaaatccagtttttgcaataccgaaaagaaaaataaattcttgctcccggttattgcatcagctgcctctttggttattgtagttgtggttgtggctcttttttttgtcttccgaaagaagaaggccagcccttcaaatctacatgctccaccaagtatgcctgtatcgaatcccgggcacaatagtcaatcagaatcatcattcacatcgaaaaaaattaggtttacttactctgaggttcaagaaatgacaaataacttcgataaagctctcggtgaaggaggatttggagtcgtgtatcatggttttgttaatgttattgaacaagtagcagttaaattgctatcacaatcatcttctcaaggctataagcatttcaaggcagaggtggaactccttatgagagttcaccatataaatttggtgagtcttgttgggtattgtgatgaaggagaacacttggctcttatttatgaatacatgccaaatggagacttaaagcaacatttgtcaggaaagcatggcggattcgtcctgagctgggaaagtagactaaaaatagttttggatgcagcactaggattggagtatttacatactggatgtgtaccaccaatggttcacagagatatcaaaactacgaatatacttctagatcaacatctccaagctaaattagctgattttgggctttcaagatcttttcccatcggaaatgagaaaaatgtgtcaactgttgttgctggtactcctggatatcttgatcctgagtattatcaaacaaattggttgacagaaaagagtgatatatacagtttcggaattgtactgttagagataatttcaaaccgtcctataatccagcaatcccgtgaaaagcctcacatagtggaatgggtcagttttatgataacaaaaggagatcttagaagtattatggatccaaacctccaccaagattatgatattggttctgtctggaaggccattgaattagcaatgtcatgtgtgagtctttcttctgcaagacgaccaaacatgtctcgagttgtgaatgaattaaaagaatgtcttatatccgaaacctctaggataggtgagggacgagacatggaatcaaaaggttcaatggaattcagcagagacatttataatgaggtaatacctcaagctcgctag

SEQ ID NO: 70569 - protein, 884 aa, Arabidopsis thaliana
  peptide (1)..(884): Ceres Seq. ID no. 2712087
MKIHLLLAMIGTFVVIIGAQDQEGFISLDCGLPSDESPYDDSFNGLTFTSDSTFIQTGKIDSVDKDLNINLSKQYLTLRYFPEGKRNCYSLDVKRGTTYLIVVSFVYGNYDGLNRDPNFDIHLGPNKWKRIDLDGEKEGTREEIIHKARSNSLDICLVKTGETLPIISAIEIRPLRNNTYVTQSGSLMMSFRVYLSNSDASIRYADDVHDRIWSPFNGSSHTHITTDLNINNSNAYEIPKNILQTAAIPRNASAPLIITWDPLPINAEVYLYMHFAEIQTLEANETRQFDVILRGNFNHSGFSPTKLKVFTLYTEEPMKCGSEGCYLQLVKTPNSTLPPLINAIEAYSVIEFSQLETSLSDVDAIKNIKNTYKLNKITWQGDPCLPQDLSWESIRCTYVDGSTSPTIISLDLSKSGLNGSIPQILQNFTQLQELDLSNNSLTGPVPIFLANMKTLSLINLSGNNLSGSVPQALLDKEKEGLVLKLEGNPDLCKSSFCNTEKKNKFLLPVIASAASLVIVVVVVALFFVFRKKKASPSNLHAPPSMPVSNPGHNSQSESSFTSKKIRFTYSEVQEMTNNFDKALGEGGFGVVYHGFVNVIEQVAVKLLSQSSSQGYKHFKAEVELLMRVHHINLVSLVGYCDEGEHLALIYEYMPNGDLKQHLSGKHGGFVLSWESRLKIVLDAALGLEYLHTGCVPPMVHRDIKTTNILLDQHLQAKLADFGLSRSFPIGNEKNVSTVVAGTPGYLDPEYYQTNWLTEKSDIYSFGIVLLEIISNRPIIQQSREKPHIVEWVSFMITKGDLRSIMDPNLHQDYDIGSVWKAIELAMSCVSLSSARRPNMSRVVNELKECLISETSRIGEGRDMESKGSMEFSRDIYNEVIPQAR

SEQ ID NO: 70570 - protein, 876 aa, Arabidopsis thaliana
  peptide (1)..(876): Ceres Seq. ID no. 2712088
MIGTFVVIIGAQDQEGFISLDCGLPSDESPYDDSFNGLTFTSDSTFIQTGKIDSVDKDLNINLSKQYLTLRYFPEGKRNCYSLDVKRGTTYLIVVSFVYGNYDGLNRDPNFDIHLGPNKWKRIDLDGEKEGTREEIIHKARSNSLDICLVKTGETLPIISAIEIRPLRNNTYVTQSGSLMMSFRVYLSNSDASIRYADDVHDRIWSPFNGSSHTHITTDLNINNSNAYEIPKNILQTAAIPRNASAPLIITWDPLPINAEVYLYMHFAEIQTLEANETRQFDVILRGNFNHSGFSPTKLKVFTLYTEEPMKCGSEGCYLQLVKTPNSTLPPLINAIEAYSVIEFSQLETSLSDVDAIKNIKNTYKLNKITWQGDPCLPQDLSWESIRCTYVDGSTSPTIISLDLSKSGLNGSIPQILQNFTQLQELDLSNNSLTGPVPIFLANMKTLSLINLSGNNLSGSVPQALLDKEKEGLVLKLEGNPDLCKSSFCNTEKKNKFLLPVIASAASLVIVVVVVALFFVFRKKKASPSNLHAPPSMPVSNPGHNSQSESSFTSKKIRFTYSEVQEMTNNFDKALGEGGFGVVYHGFVNVIEQVAVKLLSQSSSQGYKHFKAEVELLMRVHHINLVSLVGYCDEGEHLALIYEYMPNGDLKQHLSGKHGGFVLSWESRLKIVLDAALGLEYLHTGCVPPMVHRDIKTTNILLDQHLQAKLADFGLSRSFPIGNEKNVSTVVAGTPGYLDPEYYQTNWLTEKSDIYSFGIVLLEIISNRPIIQQSREKPHIVEWVSFMITKGDLRSIMDPNLHQDYDIGSVWKAIELAMSCVSLSSARRPNMSRVVNELKECLISETSRIGEGRDMESKGSMEFSRDIYNEVIPQAR

SEQ ID NO: 70571 - protein, 697 aa, Arabidopsis thaliana
  peptide (1)..(697): Ceres Seq. ID no. 2712089
MMSFRVYLSNSDASIRYADDVHDRIWSPFNGSSHTHITTDLNINNSNAYEIPKNILQTAAIPRNASAPLIITWDPLPINAEVYLYMHFAEIQTLEANETRQFDVILRGNFNHSGFSPTKLKVFTLYTEEPMKCGSEGCYLQLVKTPNSTLPPLINAIEAYSVIEFSQLETSLSDVDAIKNIKNTYKLNKITWQGDPCLPQDLSWESIRCTYVDGSTSPTIISLDLSKSGLNGSIPQILQNFTQLQELDLSNNSLTGPVPIFLANMKTLSLINLSGNNLSGSVPQALLDKEKEGLVLKLEGNPDLCKSSFCNTEKKNKFLLPVIASAASLVIVVVVVALFFVFRKKKASPSNLHAPPSMPVSNPGHNSQSESSFTSKKIRFTYSEVQEMTNNFDKALGEGGFGVVYHGFVNVIEQVAVKLLSQSSSQGYKHFKAEVELLMRVHHINLVSLVGYCDEGEHLALIYEYMPNGDLKQHLSGKHGGFVLSWESRLKIVLDAALGLEYLHTGCVPPMVHRDIKTTNILLDQHLQAKLADFGLSRSFPIGNEKNVSTVVAGTPGYLDPEYYQTNWLTEKSDIYSFGIVLLEIISNRPIIQQSREKPHIVEWVSFMITKGDLRSIMDPNLHQDYDIGSVWKAIELAMSCVSLSSARRPNMSRVVNELKECLISETSRIGEGRDMESKGSMEFSRDIYNEVIPQAR

SEQ ID NO: 70572 - DNA, 849 bp, Arabidopsis thaliana
  misc_feature (1)..(849): Ceres Seq. ID no. 2712102
  misc_feature (1)..(849): Ortholog of  Ceres SEQ ID NO 13599900 as cited in SEQ ID NO 531
  misc_feature (1)..(849): Ortholog of  Ceres SEQ ID NO 14310498 as cited in SEQ ID NO 55066
  misc_feature (1)..(849): Ortholog of  Ceres SEQ ID NO 15176759 as cited in SEQ ID NO 59678
  misc_feature (1)..(849): Ortholog of  Ceres SEQ ID NO 15172875 as cited in SEQ ID NO 60423
  misc_feature (1)..(849): Ortholog of  Ceres SEQ ID NO 13596509 as cited in SEQ ID NO 62004
  misc_feature (1)..(849): Ortholog of  Ceres SEQ ID NO 13659971 as cited in SEQ ID NO 67565
  misc_feature (1)..(849): Ortholog of  Ceres SEQ ID NO 13500385 as cited in SEQ ID NO 67583
atgttgtatcaggcggcttcagaggctgcacaaaagagatggactacaagcgatttcgatatcggaaagccacttggtagaggaaagtttggccatgtttatctagcaagagagaaacggagcgatcacattgtggctttaaaggttctttttaaggctcagcttcaacaatctcaagttgaacaccagttacgaagggaagtagagattcaatctcatcttcggcatcccaatattctgcggctctacggttacttctatgatcagaaaagagtttatttgattttggagtatgctgtaaggggtgagctttataaagagcttcagaagtgcaagtacttcagcgaacgtcgagcagcaacttatgttgcgtcattggctagagccctcatctattgccatggaaagcatgtaattcacagagatataaaacctgaaaatctgttgattggtgctcagggtgagctcaagattgcagattttggatggtcagtacacacattcaaccgtagaaggactatgtgtggcactttggattaccttccacctgagatggtggaaagcgttgaacatgatgcgagtgtcgatatatggagtctaggaattctctgctacgaatttctttatggtgttcctccttttgaggccagggagcattcagagacatacaaaaggattgttcaagtggatctcaagttccctcccaaacccattgtgtcatcatctgcaaaggacctgattagccagatgttggttaaggagtctacgcaacgtttggccttgcacaagcttcttgaacacccgtggattgtgcaaaacgcagacccatcaggcctttacagaggatga

SEQ ID NO: 70573 - protein, 282 aa, Arabidopsis thaliana
  peptide (1)..(282): Ceres Seq. ID no. 2712103
MLYQAASEAAQKRWTTSDFDIGKPLGRGKFGHVYLAREKRSDHIVALKVLFKAQLQQSQVEHQLRREVEIQSHLRHPNILRLYGYFYDQKRVYLILEYAVRGELYKELQKCKYFSERRAATYVASLARALIYCHGKHVIHRDIKPENLLIGAQGELKIADFGWSVHTFNRRRTMCGTLDYLPPEMVESVEHDASVDIWSLGILCYEFLYGVPPFEAREHSETYKRIVQVDLKFPPKPIVSSSAKDLISQMLVKESTQRLALHKLLEHPWIVQNADPSGLYRG

SEQ ID NO: 70574 - DNA, 1347 bp, Arabidopsis thaliana
  misc_feature (1)..(1347): Ceres Seq. ID no. 2712578
  misc_feature (1)..(1347): Ortholog of  Ceres SEQ ID NO 13662164 as cited in SEQ ID NO 67158
atgacaacacataaacatagaagaacagagaaaaatctctgttttaagcaatactacaaatggatcctctgttttatcctcactctctatttttttgcttccttctttgtcgaccatgatcaagatcatagatcttctacttccatatcaaagcatcttcttactaaccataaacctaagcttttcgcttctcgtgccatgtttgaatctaaaatccatgatcacaaacttgggtttacctctcaacaacctaacatcaaaacagacgtattcaacaatttgaaaatctacgtctatgacttaccttcaaagttcaacaaagactggttagccaatgatagatgcaccaaccacctctttgccgcggaagtggctctccataaggcgtttctcagcctcgaaggagatgtaaggacggaagatccgtatgaagccgatttcttctttgtccctgtctatgtctcttgcaacttcagcaccattaatggctttccagcgattggccatgcacgatcactcatcaatgacgcgataaagctcgtctcgactcaataccctttttggaaccgaaccagtggctctgatcatgtcttcacggccacacacgactttggctcttgcttccacaccatggaggatagagctattgctgatggagtaccaatttttttgagaaactctataattttgcaaacatttggtgttacttttaaccatccatgccaagaggtagagaacgtggtgataccaccgtacatctcaccggaaagtttacacaagactcaaaagaatattccggtaactaaagaacgagacatttgggtttttttccgtggcaagatggaacttcatcccaaaaacatcagtggacgcttctatagcaagcgtgtaaggacgaatatatggcggagttacggtggtgaccggaggttttatctccaacggcaaagatttgccggttaccagtcagaaatagctcgttctgttttctgtttatgtcctctcgggtgggcaccgtggagcccaagacttgttgaatcggtggctcttggctgtgttccggtgattatagccgacgggattcgtttgccgttcccttccaccgtacgttggccggatatttcgctcacggtggcggagagagacgttggaaagctaggggatattttggaacacgtggcggctactaatttgtcagtcatacagagaaacttggaggatccgtctgttaggcgggcccttatgtttaatgttccttcaagagagggagatgccacgtggcaagttttggaggctttgtcaaagaaattgaataggtctgttagaaggtcaaactctttcttgtaa

SEQ ID NO: 70575 - protein, 448 aa, Arabidopsis thaliana
  peptide (1)..(448): Ceres Seq. ID no. 2712579
MTTHKHRRTEKNLCFKQYYKWILCFILTLYFFASFFVDHDQDHRSSTSISKHLLTNHKPKLFASRAMFESKIHDHKLGFTSQQPNIKTDVFNNLKIYVYDLPSKFNKDWLANDRCTNHLFAAEVALHKAFLSLEGDVRTEDPYEADFFFVPVYVSCNFSTINGFPAIGHARSLINDAIKLVSTQYPFWNRTSGSDHVFTATHDFGSCFHTMEDRAIADGVPIFLRNSIILQTFGVTFNHPCQEVENVVIPPYISPESLHKTQKNIPVTKERDIWVFFRGKMELHPKNISGRFYSKRVRTNIWRSYGGDRRFYLQRQRFAGYQSEIARSVFCLCPLGWAPWSPRLVESVALGCVPVIIADGIRLPFPSTVRWPDISLTVAERDVGKLGDILEHVAATNLSVIQRNLEDPSVRRALMFNVPSREGDATWQVLEALSKKLNRSVRRSNSFL

SEQ ID NO: 70576 - protein, 382 aa, Arabidopsis thaliana
  peptide (1)..(382): Ceres Seq. ID no. 2712580
MFESKIHDHKLGFTSQQPNIKTDVFNNLKIYVYDLPSKFNKDWLANDRCTNHLFAAEVALHKAFLSLEGDVRTEDPYEADFFFVPVYVSCNFSTINGFPAIGHARSLINDAIKLVSTQYPFWNRTSGSDHVFTATHDFGSCFHTMEDRAIADGVPIFLRNSIILQTFGVTFNHPCQEVENVVIPPYISPESLHKTQKNIPVTKERDIWVFFRGKMELHPKNISGRFYSKRVRTNIWRSYGGDRRFYLQRQRFAGYQSEIARSVFCLCPLGWAPWSPRLVESVALGCVPVIIADGIRLPFPSTVRWPDISLTVAERDVGKLGDILEHVAATNLSVIQRNLEDPSVRRALMFNVPSREGDATWQVLEALSKKLNRSVRRSNSFL

SEQ ID NO: 70577 - protein, 238 aa, Arabidopsis thaliana
  peptide (1)..(238): Ceres Seq. ID no. 2712581
MEDRAIADGVPIFLRNSIILQTFGVTFNHPCQEVENVVIPPYISPESLHKTQKNIPVTKERDIWVFFRGKMELHPKNISGRFYSKRVRTNIWRSYGGDRRFYLQRQRFAGYQSEIARSVFCLCPLGWAPWSPRLVESVALGCVPVIIADGIRLPFPSTVRWPDISLTVAERDVGKLGDILEHVAATNLSVIQRNLEDPSVRRALMFNVPSREGDATWQVLEALSKKLNRSVRRSNSFL

SEQ ID NO: 70578 - DNA, 1503 bp, Arabidopsis thaliana
  misc_feature (1)..(1503): Ceres Seq. ID no. 2712611
  misc_feature (1)..(1503): Ortholog of  Ceres SEQ ID NO 12586556 as cited in SEQ ID NO 64667
  misc_feature (1)..(1503): Ortholog of  Ceres SEQ ID NO 13660894 as cited in SEQ ID NO 67475
atgtcttgtctgagaaattattattgtcgagctttcggttataaacagtctcgatcttgctacagtcgatcactgaatcgtgaaatagctaacgagtcatctgaagttgagagacgagctcgttctctgagagttttggatatcatatcttcgaaatctggtggagtttcgaatcgtcaggaccattttggtttcgttcaggaatttcgacaaacagattcgtggcgattcagaggtcaggcaatttccgaggattttgatctctcaagaaccaaaaatggagtttcaagcgtgctcgaagaagttatgctggaggattcttcaagctctgtcaagcgagatggatggagtttcgatgcttatggtttatcatccgccgtgagatcttgtgggttgaatcgagactttagaaccggttctgggtttcattgtttagcgttgaaaggtgggtttatctcagatgtctacttaggaagttctctggtcgttttgtacagagattctggtgaagtagagaatgcatataaagtgtttgaagaaatgcctgagaggaatgtggtttcatggacggctatgatttcagggtttgcgcaagaatggcgagttgatatctgcttgaagctttattcaaagatgagaaagtcaacctctgatccgaatgattacacattcacggctctcttgagcgcttgcacgggaagcggagccctagggcaaggaagaagtgttcattgtcagacactccacatgggattgaagtcgtatctacatatctcaaactctctcatctcgatgtactgcaaatgcggtgatttgaaggatgcttttcgtatctttgaccagttttcaaacaaagacgttgtttcttggaactctatgattgctggttacgcgcagcacggccttgcaatgcaagcaatcgagctctttgaattaatgatgcctaaaagcggaacaaagccagatgcaatcacatatctaggagttttgtcatcgtgtagacacgcaggtcttgtaaaagaaggaagaaagttcttcaatttgatggcggaacacggcctgaaaccagaactcaaccattactcttgtctagtcgatcttctcgggagatttggtctgttgcaagaagccctggaactgatcgagaacatgccaatgaaaccaaactcagtcatatggggatctctgctattctcttgccgtgttcacggcgatgtctggaccggaatcagagctgcagaggaacgactaatgcttgaacctgattgcgcagccacgcatgtccagctggcaaatctttacgccagtgtagggtactggaaagaagcggcgacagtgaggaagctgatgaaagataaaggactgaagacgaatccgggttgcagttggatcgagatcaataactatgttttcatgtttaaagctgaagatggtagcaactgtagaatgctagagattgttcatgttcttcattgtctcattgatcacatggagttcctctaa

SEQ ID NO: 70579 - protein, 500 aa, Arabidopsis thaliana
  peptide (1)..(500): Ceres Seq. ID no. 2712612
MSCLRNYYCRAFGYKQSRSCYSRSLNREIANESSEVERRARSLRVLDIISSKSGGVSNRQDHFGFVQEFRQTDSWRFRGQAISEDFDLSRTKNGVSSVLEEVMLEDSSSSVKRDGWSFDAYGLSSAVRSCGLNRDFRTGSGFHCLALKGGFISDVYLGSSLVVLYRDSGEVENAYKVFEEMPERNVVSWTAMISGFAQEWRVDICLKLYSKMRKSTSDPNDYTFTALLSACTGSGALGQGRSVHCQTLHMGLKSYLHISNSLISMYCKCGDLKDAFRIFDQFSNKDVVSWNSMIAGYAQHGLAMQAIELFELMMPKSGTKPDAITYLGVLSSCRHAGLVKEGRKFFNLMAEHGLKPELNHYSCLVDLLGRFGLLQEALELIENMPMKPNSVIWGSLLFSCRVHGDVWTGIRAAEERLMLEPDCAATHVQLANLYASVGYWKEAATVRKLMKDKGLKTNPGCSWIEINNYVFMFKAEDGSNCRMLEIVHVLHCLIDHMEFL

SEQ ID NO: 70580 - protein, 398 aa, Arabidopsis thaliana
  peptide (1)..(398): Ceres Seq. ID no. 2712613
MLEDSSSSVKRDGWSFDAYGLSSAVRSCGLNRDFRTGSGFHCLALKGGFISDVYLGSSLVVLYRDSGEVENAYKVFEEMPERNVVSWTAMISGFAQEWRVDICLKLYSKMRKSTSDPNDYTFTALLSACTGSGALGQGRSVHCQTLHMGLKSYLHISNSLISMYCKCGDLKDAFRIFDQFSNKDVVSWNSMIAGYAQHGLAMQAIELFELMMPKSGTKPDAITYLGVLSSCRHAGLVKEGRKFFNLMAEHGLKPELNHYSCLVDLLGRFGLLQEALELIENMPMKPNSVIWGSLLFSCRVHGDVWTGIRAAEERLMLEPDCAATHVQLANLYASVGYWKEAATVRKLMKDKGLKTNPGCSWIEINNYVFMFKAEDGSNCRMLEIVHVLHCLIDHMEFL

SEQ ID NO: 70581 - protein, 320 aa, Arabidopsis thaliana
  peptide (1)..(320): Ceres Seq. ID no. 2712614
MPERNVVSWTAMISGFAQEWRVDICLKLYSKMRKSTSDPNDYTFTALLSACTGSGALGQGRSVHCQTLHMGLKSYLHISNSLISMYCKCGDLKDAFRIFDQFSNKDVVSWNSMIAGYAQHGLAMQAIELFELMMPKSGTKPDAITYLGVLSSCRHAGLVKEGRKFFNLMAEHGLKPELNHYSCLVDLLGRFGLLQEALELIENMPMKPNSVIWGSLLFSCRVHGDVWTGIRAAEERLMLEPDCAATHVQLANLYASVGYWKEAATVRKLMKDKGLKTNPGCSWIEINNYVFMFKAEDGSNCRMLEIVHVLHCLIDHMEFL

SEQ ID NO: 70582 - DNA, 1059 bp, Arabidopsis thaliana
  misc_feature (1)..(1059): Ceres Seq. ID no. 2712716
  misc_feature (1)..(1059): Ortholog of  Ceres SEQ ID NO 14307069 as cited in SEQ ID NO 54322
atgacttctttgagtaggcgttgcgaaaagagaaactttgatgagcttgagggagctccaagcagtaaaaacacatatattgatggcatggcagttgacactttctcggtggtttttaatgggtttacaaatggtgaaagacaatatctagaactaaatgacggtgagtctaacggttctcaggatgtaactagtcgcctgaatgatgtagcagatagctccatgtgggtttcaagggctcctggtggcactgatgaattaaatgatggttttgaagacatcaaatatgatttgacattagactgtcaaaaggattgtgtggttggagcagagatatctctgagatatgattgtgttgggatatcaaatcctcacatcagtgattctctctcaagtggtagtgtgttcctatgtcatggaagcataagaagaaaccaaacagggttgctactgactcaagaactcagttcttgtagtcaggatcagagtagtggcgctaagtcccatgacgttggtccttttgaaatattgaagcctcaacagttaaaagaaaagttatcttggttgacattatcgatacatgaagaggattgtcgttatattctacaaaaggaggatgaagttgcgaatttgcgacaacaaactttcaagcttacattacctgatttagtgacctttccagattttcttgtgaaaagaagccggtatgaaggagcgatacagaggaaatggacttgcagggacaagtgtaaggtttggtggagaaacaaaggcgaagaagatggtcgttggtgggaaggaggaattctagctgtgaaacccaaatcaactcattttcttgatagtccatgggagaggttcccagttcctttgtctcttgaggtaataagatcaaggattgagaacaactattaccggagtatggaagcgttaaggcacgatgtatcagttatgctatccaatgcagagactttctttgatctaaacaaatgtgtaggtgtagcagtcaaaatttcagatctttctcaatggttcgaccgcacgttgtcttctttgtag

SEQ ID NO: 70583 - protein, 352 aa, Arabidopsis thaliana
  peptide (1)..(352): Ceres Seq. ID no. 2712717
MTSLSRRCEKRNFDELEGAPSSKNTYIDGMAVDTFSVVFNGFTNGERQYLELNDGESNGSQDVTSRLNDVADSSMWVSRAPGGTDELNDGFEDIKYDLTLDCQKDCVVGAEISLRYDCVGISNPHISDSLSSGSVFLCHGSIRRNQTGLLLTQELSSCSQDQSSGAKSHDVGPFEILKPQQLKEKLSWLTLSIHEEDCRYILQKEDEVANLRQQTFKLTLPDLVTFPDFLVKRSRYEGAIQRKWTCRDKCKVWWRNKGEEDGRWWEGGILAVKPKSTHFLDSPWERFPVPLSLEVIRSRIENNYYRSMEALRHDVSVMLSNAETFFDLNKCVGVAVKISDLSQWFDRTLSSL

SEQ ID NO: 70584 - protein, 323 aa, Arabidopsis thaliana
  peptide (1)..(323): Ceres Seq. ID no. 2712718
MAVDTFSVVFNGFTNGERQYLELNDGESNGSQDVTSRLNDVADSSMWVSRAPGGTDELNDGFEDIKYDLTLDCQKDCVVGAEISLRYDCVGISNPHISDSLSSGSVFLCHGSIRRNQTGLLLTQELSSCSQDQSSGAKSHDVGPFEILKPQQLKEKLSWLTLSIHEEDCRYILQKEDEVANLRQQTFKLTLPDLVTFPDFLVKRSRYEGAIQRKWTCRDKCKVWWRNKGEEDGRWWEGGILAVKPKSTHFLDSPWERFPVPLSLEVIRSRIENNYYRSMEALRHDVSVMLSNAETFFDLNKCVGVAVKISDLSQWFDRTLSSL

SEQ ID NO: 70585 - protein, 278 aa, Arabidopsis thaliana
  peptide (1)..(278): Ceres Seq. ID no. 2712719
MWVSRAPGGTDELNDGFEDIKYDLTLDCQKDCVVGAEISLRYDCVGISNPHISDSLSSGSVFLCHGSIRRNQTGLLLTQELSSCSQDQSSGAKSHDVGPFEILKPQQLKEKLSWLTLSIHEEDCRYILQKEDEVANLRQQTFKLTLPDLVTFPDFLVKRSRYEGAIQRKWTCRDKCKVWWRNKGEEDGRWWEGGILAVKPKSTHFLDSPWERFPVPLSLEVIRSRIENNYYRSMEALRHDVSVMLSNAETFFDLNKCVGVAVKISDLSQWFDRTLSSL

SEQ ID NO: 70586 - DNA, 1704 bp, Arabidopsis thaliana
  misc_feature (1)..(1704): Ceres Seq. ID no. 2712856
  misc_feature (1)..(1704): Ortholog of  Ceres SEQ ID NO 15178310 as cited in SEQ ID NO 1089
  misc_feature (1)..(1704): Ortholog of  Ceres SEQ ID NO 14303173 as cited in SEQ ID NO 66550
atgatcaccatttactccgcccagattgctgaagggattaaatcctttttttctccaggtgaggcgcttttgagttttagaaatggagttttggcttctgatggtgttattggtctgtggagaccagaggatcctgatccatgtaactggaaaggagtgacctgtgatgcaaaaacaaaaagagttatagccttgagtcttacttatcacaaattaaggggacctttaccccctgagcttggaaagctggatcagttaaggcttttaatgcttcacaacaatgcgttatatcaatcaatacctgcctcattgggaaattgcacggcattagagggaatatacttgcagaataattacatcactgggacaatcccaagtgaaataggaaacctgtccgggctgaaaaacctggacctctcaaacaacaatctcaatggagctatccctgcttcacttgggcagttgaaaaggcttactaaattcaatgtctcaaacaatttcctggtgggaaaaataccttctgacggcctactcgctagactctcgagggactccttcaacggaaatcgtaacttgtgtggaaaacaaatcgatattgtgtgcaatgacagtggaaattctacagcttctgggtctccaacaggccaaggaggtaataaccctaaaaggctgcttataagtgcttcagctactgtgggtgggctgctcctagtggcgctcatgtgtttctggggatgctttctctataaaaagcttggtagagttgagagtaaaagccttgtgatagatgtcggtggagatttgccctacgcttccaaagacattatcaagaaactggaatctcttaatgaagagcacataataggctgtggaggctttggcacagtgtacaagctgtctatggacgatggcaatgtttttgcgctgaaaagaattgttaagttaaatgaaggttttgatcggttttttgaaagggagcttgagattcttgggagcatcaaacatcgttaccttgtgaatctacgtggatactgcaattcacccacatcaaagcttctgctatatgattaccttcctggtggtagccttgatgaagctctacataagagaggcgagcagctggattgggattcgcgagttaatatcataataggagcggcaaaagggttggcatacttgcatcatgattgttctcctaggattatacaccgtgatataaaatcaagcaacatcttactggatggaaatctggaggctcgggtatcagactttgggcttgccaagttgttagaggacgaagaatctcatattacaaccattgttgcaggcacattcggttacttggctccagagtatatgcaaagcggtagagcgactgagaaaaccgatgtttacagcttcggggttttggttcttgaagtcttgagtggtaaacttcccacggatgcctcattcatcgagaaaggctttaacattgttggttggctaaacttcttaatcagcgaaaaccgggcaaaggagattgttgatctaagctgtgaaggagtggagagagagagtctcgacgcacttctatcaatagcaacaaagtgtgtgtcgtcaagtccagatgagcggccaacaatgcacagagtcgtccagttacttgaatccgaagttatgactccttgccccagcgacttctacgactccagctccgattga

SEQ ID NO: 70587 - protein, 567 aa, Arabidopsis thaliana
  peptide (1)..(567): Ceres Seq. ID no. 2712857
MITIYSAQIAEGIKSFFSPGEALLSFRNGVLASDGVIGLWRPEDPDPCNWKGVTCDAKTKRVIALSLTYHKLRGPLPPELGKLDQLRLLMLHNNALYQSIPASLGNCTALEGIYLQNNYITGTIPSEIGNLSGLKNLDLSNNNLNGAIPASLGQLKRLTKFNVSNNFLVGKIPSDGLLARLSRDSFNGNRNLCGKQIDIVCNDSGNSTASGSPTGQGGNNPKRLLISASATVGGLLLVALMCFWGCFLYKKLGRVESKSLVIDVGGDLPYASKDIIKKLESLNEEHIIGCGGFGTVYKLSMDDGNVFALKRIVKLNEGFDRFFERELEILGSIKHRYLVNLRGYCNSPTSKLLLYDYLPGGSLDEALHKRGEQLDWDSRVNIIIGAAKGLAYLHHDCSPRIIHRDIKSSNILLDGNLEARVSDFGLAKLLEDEESHITTIVAGTFGYLAPEYMQSGRATEKTDVYSFGVLVLEVLSGKLPTDASFIEKGFNIVGWLNFLISENRAKEIVDLSCEGVERESLDALLSIATKCVSSSPDERPTMHRVVQLLESEVMTPCPSDFYDSSSD

SEQ ID NO: 70588 - protein, 478 aa, Arabidopsis thaliana
  peptide (1)..(478): Ceres Seq. ID no. 2712858
MLHNNALYQSIPASLGNCTALEGIYLQNNYITGTIPSEIGNLSGLKNLDLSNNNLNGAIPASLGQLKRLTKFNVSNNFLVGKIPSDGLLARLSRDSFNGNRNLCGKQIDIVCNDSGNSTASGSPTGQGGNNPKRLLISASATVGGLLLVALMCFWGCFLYKKLGRVESKSLVIDVGGDLPYASKDIIKKLESLNEEHIIGCGGFGTVYKLSMDDGNVFALKRIVKLNEGFDRFFERELEILGSIKHRYLVNLRGYCNSPTSKLLLYDYLPGGSLDEALHKRGEQLDWDSRVNIIIGAAKGLAYLHHDCSPRIIHRDIKSSNILLDGNLEARVSDFGLAKLLEDEESHITTIVAGTFGYLAPEYMQSGRATEKTDVYSFGVLVLEVLSGKLPTDASFIEKGFNIVGWLNFLISENRAKEIVDLSCEGVERESLDALLSIATKCVSSSPDERPTMHRVVQLLESEVMTPCPSDFYDSSSD

SEQ ID NO: 70589 - protein, 327 aa, Arabidopsis thaliana
  peptide (1)..(327): Ceres Seq. ID no. 2712859
MCFWGCFLYKKLGRVESKSLVIDVGGDLPYASKDIIKKLESLNEEHIIGCGGFGTVYKLSMDDGNVFALKRIVKLNEGFDRFFERELEILGSIKHRYLVNLRGYCNSPTSKLLLYDYLPGGSLDEALHKRGEQLDWDSRVNIIIGAAKGLAYLHHDCSPRIIHRDIKSSNILLDGNLEARVSDFGLAKLLEDEESHITTIVAGTFGYLAPEYMQSGRATEKTDVYSFGVLVLEVLSGKLPTDASFIEKGFNIVGWLNFLISENRAKEIVDLSCEGVERESLDALLSIATKCVSSSPDERPTMHRVVQLLESEVMTPCPSDFYDSSSD

SEQ ID NO: 70590 - DNA, 747 bp, Arabidopsis thaliana
  misc_feature (1)..(747): Ceres Seq. ID no. 2712953
  misc_feature (1)..(747): Ortholog of  Ceres SEQ ID NO 12617391 as cited in SEQ ID NO 64114
  misc_feature (1)..(747): Ortholog of  Ceres SEQ ID NO 13595922 as cited in SEQ ID NO 69293
  misc_feature (1)..(747): Ortholog of  Ceres SEQ ID NO 12635496 as cited in SEQ ID NO 0
atggatgaatatgtagaggatgaacacgaattcagctacgaatggaaccaagagaacgggccagcgaaatggggaaagctaagaccggaatggaaaatgtgcggaaaaggagaaatgcaatcgcctattgatcttatgaacaaaagagttagacttgttactcatcttaaaaagcttactagacactacaaaccttgtaacgccactctcaaaaatagaggccatgatatgatgctgaaatttggagaagaagggtcagggagtattacggtcaatggaactgagtataaactcttacagcttcattggcattctccctctgaacatactatgaatggaagaaggtttgctctcgagctacacatggttcacgaaaacattaacggaagtttggctgtagtcacagtcctctacaaaatcggaaggccagattcttttctcggattgctggaaaataaattgtcggcaattacagatcaaaatgaggcggagaaatatgtagatgtgattgacccaagggatattaagattgggagcagaaaattttatagatacattggatcacttactactcctccttgtacgcaaaatgttatttggaccgtcgttaaaaaggtaaggactgtgacgaaaaaccaagtgaagctactcagagtggcggttcacgataattcagacacaaatgcgagaccagttcaacctacaaataagcgcgtggtaaagttatacaaaccaaaatcactatga

SEQ ID NO: 70591 - protein, 248 aa, Arabidopsis thaliana
  peptide (1)..(248): Ceres Seq. ID no. 2712954
MDEYVEDEHEFSYEWNQENGPAKWGKLRPEWKMCGKGEMQSPIDLMNKRVRLVTHLKKLTRHYKPCNATLKNRGHDMMLKFGEEGSGSITVNGTEYKLLQLHWHSPSEHTMNGRRFALELHMVHENINGSLAVVTVLYKIGRPDSFLGLLENKLSAITDQNEAEKYVDVIDPRDIKIGSRKFYRYIGSLTTPPCTQNVIWTVVKKVRTVTKNQVKLLRVAVHDNSDTNARPVQPTNKRVVKLYKPKSL

SEQ ID NO: 70592 - protein, 216 aa, Arabidopsis thaliana
  peptide (1)..(216): Ceres Seq. ID no. 2712955
MCGKGEMQSPIDLMNKRVRLVTHLKKLTRHYKPCNATLKNRGHDMMLKFGEEGSGSITVNGTEYKLLQLHWHSPSEHTMNGRRFALELHMVHENINGSLAVVTVLYKIGRPDSFLGLLENKLSAITDQNEAEKYVDVIDPRDIKIGSRKFYRYIGSLTTPPCTQNVIWTVVKKVRTVTKNQVKLLRVAVHDNSDTNARPVQPTNKRVVKLYKPKSL

SEQ ID NO: 70593 - protein, 210 aa, Arabidopsis thaliana
  peptide (1)..(210): Ceres Seq. ID no. 2712956
MQSPIDLMNKRVRLVTHLKKLTRHYKPCNATLKNRGHDMMLKFGEEGSGSITVNGTEYKLLQLHWHSPSEHTMNGRRFALELHMVHENINGSLAVVTVLYKIGRPDSFLGLLENKLSAITDQNEAEKYVDVIDPRDIKIGSRKFYRYIGSLTTPPCTQNVIWTVVKKVRTVTKNQVKLLRVAVHDNSDTNARPVQPTNKRVVKLYKPKSL

SEQ ID NO: 70594 - DNA, 642 bp, Arabidopsis thaliana
  misc_feature (1)..(642): Ceres Seq. ID no. 2713101
  misc_feature (1)..(642): Ortholog of  Ceres SEQ ID NO 15226870 as cited in SEQ ID NO 58831
  misc_feature (1)..(642): Ortholog of  Ceres SEQ ID NO 15224334 as cited in SEQ ID NO 0
atgggcgacgaacactctctcatcccaaagcaaattggtgttgtccctagtgctggattcttgaatgttgaagtgtttgagagaccttgtcctgagcctaacattcaaccttgggacattccttatgttcactatcctaaacctaagacctatagcagctcgaacggggagatcttttcggttaaagataggagggctaatgtgtcgaccatttttgagacgttggacaaagtatataatttagattggttgagtagtgcttctaagaacgagtgtacatctgctgttggtttgaaatggatgcttaatcaggctgagatattggcgcgctacaaaccattgatcaacacgagtcttttgatacctgatctgaagcaggttcaagagatgacttcaaaagcacttgcttactttaacaccacgcggcatatcttcctctactacgaagatgttgtcaagaaccgcaccaaactagacgatgtacaagagtttctgaaggtcccgaaactagatttaaagagtaggcaagtgaagattcatcatggtccgttgtcacaacacgtacaaaattgggaagaggtgcaaaagacactgaaagggaccggtttcgaaaactttctacttgaagattaccgcaggtga

SEQ ID NO: 70595 - protein, 213 aa, Arabidopsis thaliana
  peptide (1)..(213): Ceres Seq. ID no. 2713102
MGDEHSLIPKQIGVVPSAGFLNVEVFERPCPEPNIQPWDIPYVHYPKPKTYSSSNGEIFSVKDRRANVSTIFETLDKVYNLDWLSSASKNECTSAVGLKWMLNQAEILARYKPLINTSLLIPDLKQVQEMTSKALAYFNTTRHIFLYYEDVVKNRTKLDDVQEFLKVPKLDLKSRQVKIHHGPLSQHVQNWEEVQKTLKGTGFENFLLEDYRR

SEQ ID NO: 70596 - protein, 113 aa, Arabidopsis thaliana
  peptide (1)..(113): Ceres Seq. ID no. 2713103
MLNQAEILARYKPLINTSLLIPDLKQVQEMTSKALAYFNTTRHIFLYYEDVVKNRTKLDDVQEFLKVPKLDLKSRQVKIHHGPLSQHVQNWEEVQKTLKGTGFENFLLEDYRR

SEQ ID NO: 70597 - DNA, 1215 bp, Arabidopsis thaliana
  misc_feature (1)..(1215): Ceres Seq. ID no. 2713290
  misc_feature (1)..(1215): Ortholog of  Ceres SEQ ID NO 12372734 as cited in SEQ ID NO 1206
  misc_feature (1)..(1215): Ortholog of  Ceres SEQ ID NO 13584160 as cited in SEQ ID NO 63677
atggactctgaaagcgtcgtagctgctgacggtgcggattgtgctattgcaaatggtgaagtgacaatggaaggagacagtagtaatggaaatggtggtacttcagagaatttggaatgttgttctactcagcatcctatggaggcatctgagggcacacagaatgaacaagtggatgattcaaaacagatgagaggacaaaaggtgcaaggaagggtcaagcatgagaagacctctggaggcaagaatattccatcagtcttggtgaagaagaaaaaagatgggaaagtggtggcatcaaatggttctgttgctccaaacgtaaagcctgtaaagtctcctaagagcaaatcgctcaatggtagagaggctcatgtcacgaagcatgggaaccatgactctctaccagctgaagggaccagggacaagccaaaactgagggaaacaaggaaacaagtcaatgatacatctgaagatgatacacagtatagtccaaaagaagatgatggcaaacctcgtcgagctagtgcacttccaaattatggattcagttttagatgtgaccaacgagctgaaaaaagaagagagttctattcaaagcttgaggaaaagatccatgcgaaagaagaagaaaagaataccgtacaagctaagtccaaggaaactcaagaagctgagcttaagatgctaaggaagagtctgaacttcaaagccacacctatgcctaccttctatcaagaacctcagctacctaaaacagagttaaagaagatagcgataacaagaccaaaatctccaaaactcgggcggaagaagaccaattctcgagcagattctgaagaagccattactattcaaacccctcgctttggtaggttgagcttagatgagaaaactcctaaagataacccggttgttgaaggaagtgtacccggtgagaccaagaagccaccagtgcgcaagtcacttcccaggttgccttcagaaaagacaaatctgtccaacgggaaggtggctccagcaaaagctgtaacagcctcaacaaaggcaaagtcggaaagaaagaaaccagataaagatgtggatgacctaagccagtcaagtcctgtagacgacaatgctgacccagaagattcacaagaacaagctccaagagtgaatgaagacagaaacgaatctcacatggtagtggaagtggttgcggttgagccttaa

SEQ ID NO: 70598 - protein, 404 aa, Arabidopsis thaliana
  peptide (1)..(404): Ceres Seq. ID no. 2713291
MDSESVVAADGADCAIANGEVTMEGDSSNGNGGTSENLECCSTQHPMEASEGTQNEQVDDSKQMRGQKVQGRVKHEKTSGGKNIPSVLVKKKKDGKVVASNGSVAPNVKPVKSPKSKSLNGREAHVTKHGNHDSLPAEGTRDKPKLRETRKQVNDTSEDDTQYSPKEDDGKPRRASALPNYGFSFRCDQRAEKRREFYSKLEEKIHAKEEEKNTVQAKSKETQEAELKMLRKSLNFKATPMPTFYQEPQLPKTELKKIAITRPKSPKLGRKKTNSRADSEEAITIQTPRFGRLSLDEKTPKDNPVVEGSVPGETKKPPVRKSLPRLPSEKTNLSNGKVAPAKAVTASTKAKSERKKPDKDVDDLSQSSPVDDNADPEDSQEQAPRVNEDRNESHMVVEVVAVEP

SEQ ID NO: 70599 - protein, 382 aa, Arabidopsis thaliana
  peptide (1)..(382): Ceres Seq. ID no. 2713292
MEGDSSNGNGGTSENLECCSTQHPMEASEGTQNEQVDDSKQMRGQKVQGRVKHEKTSGGKNIPSVLVKKKKDGKVVASNGSVAPNVKPVKSPKSKSLNGREAHVTKHGNHDSLPAEGTRDKPKLRETRKQVNDTSEDDTQYSPKEDDGKPRRASALPNYGFSFRCDQRAEKRREFYSKLEEKIHAKEEEKNTVQAKSKETQEAELKMLRKSLNFKATPMPTFYQEPQLPKTELKKIAITRPKSPKLGRKKTNSRADSEEAITIQTPRFGRLSLDEKTPKDNPVVEGSVPGETKKPPVRKSLPRLPSEKTNLSNGKVAPAKAVTASTKAKSERKKPDKDVDDLSQSSPVDDNADPEDSQEQAPRVNEDRNESHMVVEVVAVEP

SEQ ID NO: 70600 - protein, 358 aa, Arabidopsis thaliana
  peptide (1)..(358): Ceres Seq. ID no. 2713293
MEASEGTQNEQVDDSKQMRGQKVQGRVKHEKTSGGKNIPSVLVKKKKDGKVVASNGSVAPNVKPVKSPKSKSLNGREAHVTKHGNHDSLPAEGTRDKPKLRETRKQVNDTSEDDTQYSPKEDDGKPRRASALPNYGFSFRCDQRAEKRREFYSKLEEKIHAKEEEKNTVQAKSKETQEAELKMLRKSLNFKATPMPTFYQEPQLPKTELKKIAITRPKSPKLGRKKTNSRADSEEAITIQTPRFGRLSLDEKTPKDNPVVEGSVPGETKKPPVRKSLPRLPSEKTNLSNGKVAPAKAVTASTKAKSERKKPDKDVDDLSQSSPVDDNADPEDSQEQAPRVNEDRNESHMVVEVVAVEP

SEQ ID NO: 70601 - DNA, 2451 bp, Arabidopsis thaliana
  misc_feature (1)..(2451): Ceres Seq. ID no. 2713369
  misc_feature (1)..(2451): Ortholog of  Ceres SEQ ID NO 13654989 as cited in SEQ ID NO 63117
  misc_feature (1)..(2451): Ortholog of  Ceres SEQ ID NO 13584744 as cited in SEQ ID NO 69137
atgtggatgccgaaaaacaataacgtgggagtcaaggaaggagggtctagcggagttgtagctgttgcaatagacaaagacaaaagcagccaacacgctcttaaatgggctgttgataatttgttgcagcgaggccaatccgtcattcttgtccacgtcaagcttcgaccttctccattgaataatagcgcttctcttcatgcttcctctgcaaagctgagccaagattcttcattggtatgcagagatccagaaggcatttccaaagaaatatttcttcctttccgttgcttctgcacacgcaaagacattcaatgccaagatgtgttgcttgaggagtccgatgttgccaaagcattggtcgaatacgtaaaccaagcggccattgaggttttagtagttggttcctccagcaaaggtggttttctcaggttcaacaaacctacagatattccaggcagcataacaaaaaacgctcctgatttctgcacggtttatatcatttccaaaggaaagattcaaacaatgagatcagcttctcgttctgcacccatgactgctcctctacgcagttcagttcaaccacctagcttaaagcctcctcaacctatgccttctacttccgctaacagtctgcgagccgatagacggtcttttgagtctaaccaacgaaggtctgtagaagatcaacaacgcaggtctatggaggatcaacaacgcaggtcaatagacgatcaatcagagtccttcagatctccttttacaagaagaggcaatggtagatcatacggagatttaactgttccagaatcagacatatcctttatcagttccggaagaccaagcattgaccgtatcttcccttctctatatgacaacaatgatccaagccgaactcctcctaggctttcaaatttctcagacatggactatagttctagccttgatcagtcttccaactatggaaggagatcagtggatatgaactcacccactgatttcgagagcgaaagattttcatccgcctctcaatcaatagatgatgtagaggctgagatgaggaggcttaaactggagttgaagcagactatggaaatgtatagtacagcttgcaaagaagcactcacagcaaaacaaaaggcgactgagcttcaacgttggaagttagaagaagagagaaaactagaagaagcgagaaatgcagaggaagcagcattagccattgcagagaaagagaaagcaaagtcaaaagcagctatggaggcagctgaagcagctcaaaggattgctgaattagaggctaagaagagagtcaacgcggaaatgaaagctttaaaagagtcagaggagaaaacaaaggctcttaccgctttagcaaactcagatgtcaggtataggaagtactccattgaagatattgagcttgcaacagagtttttcgctgagaaatataagattggagaaggtggttatggacctgtctacaaatgttatcttgatcatacaccagtggctgttaaagttcttcgtcccgatgcagctcaaggaagatcgcaatttcaacaagaggtcgaggtattgagctgcattaggcatccgaacatggttctacttcttggggcttgtccggaatgcggatgtttagtctacgagttcatggctaatgggagcttagaagatcgtcttttcagactaggaaacagtccacctctctcgtggcagatgagatttagaatcgctgcagagataggcactggattgttgttcttgcaccaagctaaacctgagcctcttgttcaccgtgatctcaaaccaggaaacatcttgctagaccgtaacttcgtcagcaagatatctgatgttggtttagctagattggtccctccaacagttgcagacacagtgacacaataccgcatgacttcaaccgctggcacattctgttatatcgacccagagtatcaacaaacaggaatgttgggtgtgaaatcagacatttactcacttggaattatgtttctacagttgataacagcaaaaccaccaatgggtctaactcattatgtcgagagagcactagagaaaggaactttggttgatttactcgatccagttgtttctgattggccaatggaagacactgaagagtttgctaaattagctcttaaatgtgcagagctaaggagaaaagatagacctgatcttgctaaagttattttgcctgagctaaatagattaagaacacttgctgatgaatcatcacattctgtagtagtcggcaatagccctctaccatctccaactggtagccaaagttctttgaaactggtgagaaccactaaaagcgaaaatcgaaactcgaatatattactatactcacctactgatttcttctttactaaccatttgcaggaacatatgagtggtgcttctatctcagtgcctcagtaa

SEQ ID NO: 70602 - protein, 816 aa, Arabidopsis thaliana
  peptide (1)..(816): Ceres Seq. ID no. 2713370
MWMPKNNNVGVKEGGSSGVVAVAIDKDKSSQHALKWAVDNLLQRGQSVILVHVKLRPSPLNNSASLHASSAKLSQDSSLVCRDPEGISKEIFLPFRCFCTRKDIQCQDVLLEESDVAKALVEYVNQAAIEVLVVGSSSKGGFLRFNKPTDIPGSITKNAPDFCTVYIISKGKIQTMRSASRSAPMTAPLRSSVQPPSLKPPQPMPSTSANSLRADRRSFESNQRRSVEDQQRRSMEDQQRRSIDDQSESFRSPFTRRGNGRSYGDLTVPESDISFISSGRPSIDRIFPSLYDNNDPSRTPPRLSNFSDMDYSSSLDQSSNYGRRSVDMNSPTDFESERFSSASQSIDDVEAEMRRLKLELKQTMEMYSTACKEALTAKQKATELQRWKLEEERKLEEARNAEEAALAIAEKEKAKSKAAMEAAEAAQRIAELEAKKRVNAEMKALKESEEKTKALTALANSDVRYRKYSIEDIELATEFFAEKYKIGEGGYGPVYKCYLDHTPVAVKVLRPDAAQGRSQFQQEVEVLSCIRHPNMVLLLGACPECGCLVYEFMANGSLEDRLFRLGNSPPLSWQMRFRIAAEIGTGLLFLHQAKPEPLVHRDLKPGNILLDRNFVSKISDVGLARLVPPTVADTVTQYRMTSTAGTFCYIDPEYQQTGMLGVKSDIYSLGIMFLQLITAKPPMGLTHYVERALEKGTLVDLLDPVVSDWPMEDTEEFAKLALKCAELRRKDRPDLAKVILPELNRLRTLADESSHSVVVGNSPLPSPTGSQSSLKLVRTTKSENRNSNILLYSPTDFFFTNHLQEHMSGASISVPQ

SEQ ID NO: 70603 - protein, 814 aa, Arabidopsis thaliana
  peptide (1)..(814): Ceres Seq. ID no. 2713371
MPKNNNVGVKEGGSSGVVAVAIDKDKSSQHALKWAVDNLLQRGQSVILVHVKLRPSPLNNSASLHASSAKLSQDSSLVCRDPEGISKEIFLPFRCFCTRKDIQCQDVLLEESDVAKALVEYVNQAAIEVLVVGSSSKGGFLRFNKPTDIPGSITKNAPDFCTVYIISKGKIQTMRSASRSAPMTAPLRSSVQPPSLKPPQPMPSTSANSLRADRRSFESNQRRSVEDQQRRSMEDQQRRSIDDQSESFRSPFTRRGNGRSYGDLTVPESDISFISSGRPSIDRIFPSLYDNNDPSRTPPRLSNFSDMDYSSSLDQSSNYGRRSVDMNSPTDFESERFSSASQSIDDVEAEMRRLKLELKQTMEMYSTACKEALTAKQKATELQRWKLEEERKLEEARNAEEAALAIAEKEKAKSKAAMEAAEAAQRIAELEAKKRVNAEMKALKESEEKTKALTALANSDVRYRKYSIEDIELATEFFAEKYKIGEGGYGPVYKCYLDHTPVAVKVLRPDAAQGRSQFQQEVEVLSCIRHPNMVLLLGACPECGCLVYEFMANGSLEDRLFRLGNSPPLSWQMRFRIAAEIGTGLLFLHQAKPEPLVHRDLKPGNILLDRNFVSKISDVGLARLVPPTVADTVTQYRMTSTAGTFCYIDPEYQQTGMLGVKSDIYSLGIMFLQLITAKPPMGLTHYVERALEKGTLVDLLDPVVSDWPMEDTEEFAKLALKCAELRRKDRPDLAKVILPELNRLRTLADESSHSVVVGNSPLPSPTGSQSSLKLVRTTKSENRNSNILLYSPTDFFFTNHLQEHMSGASISVPQ

SEQ ID NO: 70604 - protein, 641 aa, Arabidopsis thaliana
  peptide (1)..(641): Ceres Seq. ID no. 2713372
MRSASRSAPMTAPLRSSVQPPSLKPPQPMPSTSANSLRADRRSFESNQRRSVEDQQRRSMEDQQRRSIDDQSESFRSPFTRRGNGRSYGDLTVPESDISFISSGRPSIDRIFPSLYDNNDPSRTPPRLSNFSDMDYSSSLDQSSNYGRRSVDMNSPTDFESERFSSASQSIDDVEAEMRRLKLELKQTMEMYSTACKEALTAKQKATELQRWKLEEERKLEEARNAEEAALAIAEKEKAKSKAAMEAAEAAQRIAELEAKKRVNAEMKALKESEEKTKALTALANSDVRYRKYSIEDIELATEFFAEKYKIGEGGYGPVYKCYLDHTPVAVKVLRPDAAQGRSQFQQEVEVLSCIRHPNMVLLLGACPECGCLVYEFMANGSLEDRLFRLGNSPPLSWQMRFRIAAEIGTGLLFLHQAKPEPLVHRDLKPGNILLDRNFVSKISDVGLARLVPPTVADTVTQYRMTSTAGTFCYIDPEYQQTGMLGVKSDIYSLGIMFLQLITAKPPMGLTHYVERALEKGTLVDLLDPVVSDWPMEDTEEFAKLALKCAELRRKDRPDLAKVILPELNRLRTLADESSHSVVVGNSPLPSPTGSQSSLKLVRTTKSENRNSNILLYSPTDFFFTNHLQEHMSGASISVPQ

SEQ ID NO: 70605 - DNA, 951 bp, Arabidopsis thaliana
  misc_feature (1)..(951): Ceres Seq. ID no. 2713385
  misc_feature (1)..(951): Ortholog of  Ceres SEQ ID NO 13596090 as cited in SEQ ID NO 68377
atgggtaatgtgacgtcaaacatggctgcaaagttcgctttcttcccaccgccaccaacatacgacgtgggtaaagacgaggagaccggaaagcttatgttcaccgggataacaccagaaaaaagcatggatgttcatcagcttaccaccaaatctggcaacaaggtcattgccacgttttggaaacaccctttctctagattcactcttctttattcacatggcaatgccgcggatctcggccaaatggttgatctcttcatcgagcttcgagctcatctccgcgtcaacattatgagctatgattattcaggctatggagcttcaacaggcaagccaactgagctcaatacgtactatgatatcgaggctgtgtacaattgcttgaggaccgagtacgggatcatgcaagaggaaatgattctatatggtcaatccgttggaagcggaccaacattgcacttagcatctcgagtaaagagactaagagggattgttcttcatagcgcaattctctccggcctcagagttctgtatcctgtcaaaatgacattctggttcgatatgtacaaagtaagcttgatctctcttgtctctggttattactatcgggtcagtctctcaaactctggaattttgcagaacattgacaagatacgccatgtaacatgccctgttcttgtcatacatggaacaaaagatgatattgtgaatatgtcacatgggaagcgattgtgggaactagcaaaggacaagtatgatccattgtgggtaaaaggaggagggcattgcaacttggaaacataccccgagtacatcaagcatatgcgaaagttcatgaacgccatggagaaactcgctctcaacaatccaccaaacaaacaacaaaacgacgagccaagcatcaaggaaactaaacaaaatcggtgcttgagattcagcaaaagatag

SEQ ID NO: 70606 - protein, 316 aa, Arabidopsis thaliana
  peptide (1)..(316): Ceres Seq. ID no. 2713386
MGNVTSNMAAKFAFFPPPPTYDVGKDEETGKLMFTGITPEKSMDVHQLTTKSGNKVIATFWKHPFSRFTLLYSHGNAADLGQMVDLFIELRAHLRVNIMSYDYSGYGASTGKPTELNTYYDIEAVYNCLRTEYGIMQEEMILYGQSVGSGPTLHLASRVKRLRGIVLHSAILSGLRVLYPVKMTFWFDMYKVSLISLVSGYYYRVSLSNSGILQNIDKIRHVTCPVLVIHGTKDDIVNMSHGKRLWELAKDKYDPLWVKGGGHCNLETYPEYIKHMRKFMNAMEKLALNNPPNKQQNDEPSIKETKQNRCLRFSKR

SEQ ID NO: 70607 - protein, 309 aa, Arabidopsis thaliana
  peptide (1)..(309): Ceres Seq. ID no. 2713387
MAAKFAFFPPPPTYDVGKDEETGKLMFTGITPEKSMDVHQLTTKSGNKVIATFWKHPFSRFTLLYSHGNAADLGQMVDLFIELRAHLRVNIMSYDYSGYGASTGKPTELNTYYDIEAVYNCLRTEYGIMQEEMILYGQSVGSGPTLHLASRVKRLRGIVLHSAILSGLRVLYPVKMTFWFDMYKVSLISLVSGYYYRVSLSNSGILQNIDKIRHVTCPVLVIHGTKDDIVNMSHGKRLWELAKDKYDPLWVKGGGHCNLETYPEYIKHMRKFMNAMEKLALNNPPNKQQNDEPSIKETKQNRCLRFSKR

SEQ ID NO: 70608 - protein, 284 aa, Arabidopsis thaliana
  peptide (1)..(284): Ceres Seq. ID no. 2713388
MFTGITPEKSMDVHQLTTKSGNKVIATFWKHPFSRFTLLYSHGNAADLGQMVDLFIELRAHLRVNIMSYDYSGYGASTGKPTELNTYYDIEAVYNCLRTEYGIMQEEMILYGQSVGSGPTLHLASRVKRLRGIVLHSAILSGLRVLYPVKMTFWFDMYKVSLISLVSGYYYRVSLSNSGILQNIDKIRHVTCPVLVIHGTKDDIVNMSHGKRLWELAKDKYDPLWVKGGGHCNLETYPEYIKHMRKFMNAMEKLALNNPPNKQQNDEPSIKETKQNRCLRFSKR

SEQ ID NO: 70609 - DNA, 720 bp, Arabidopsis thaliana
  misc_feature (1)..(720): Ceres Seq. ID no. 2714342
  misc_feature (1)..(720): Ortholog of  Ceres SEQ ID NO 13581804 as cited in SEQ ID NO 51424
  misc_feature (1)..(720): Ortholog of  Ceres SEQ ID NO 15169703 as cited in SEQ ID NO 59628
  misc_feature (1)..(720): Ortholog of  Ceres SEQ ID NO 13663874 as cited in SEQ ID NO 67003
atgggaaggggcaagatcgcgattaagaggatcaataactctacgagccgtcaggttacgttctcgaagcgaaggaatggattgttgaagaaagctaaggagcttgcgattctctgcgatgctgaggttggtgtcatcatcttctccagcaccggtaggctctacgatttctccagctccagcatgaaatcggtcatagagagatacagcgatgccaaaggagaaaccagttcagaaaatgatcccgcttcagaaattcaggaaatgtatatagtaactctggaaaagtatgcatattcagaagagcttgtacttgacaggcaaatgatgggggaggagctctctggactaagtgtagaagctttacagaatttggaaaatcagcttgaattgagccttcgtggcgttcgaatgaaaaaggatcaaatgttaatcgaagaaatacaagtacttaaccgagaggggaatctcgttcaccaagagaatttagacctccacaagaaagtaaacctaatgcaccaacagaacatggaactacatgaaaaggtttcagaggtcgagggtgtgaaaatcgcaaacaagaattctcttctcacaaatggtctagacatgagagatacctcgaacgaacatgtccatcttcagctcagccaaccgcagcatgatcatgagacgcattcaaaagctatccaactcaactatttttccttcattgcataa

SEQ ID NO: 70610 - protein, 239 aa, Arabidopsis thaliana
  peptide (1)..(239): Ceres Seq. ID no. 2714343
MGRGKIAIKRINNSTSRQVTFSKRRNGLLKKAKELAILCDAEVGVIIFSSTGRLYDFSSSSMKSVIERYSDAKGETSSENDPASEIQEMYIVTLEKYAYSEELVLDRQMMGEELSGLSVEALQNLENQLELSLRGVRMKKDQMLIEEIQVLNREGNLVHQENLDLHKKVNLMHQQNMELHEKVSEVEGVKIANKNSLLTNGLDMRDTSNEHVHLQLSQPQHDHETHSKAIQLNYFSFIA

SEQ ID NO: 70611 - protein, 178 aa, Arabidopsis thaliana
  peptide (1)..(178): Ceres Seq. ID no. 2714344
MKSVIERYSDAKGETSSENDPASEIQEMYIVTLEKYAYSEELVLDRQMMGEELSGLSVEALQNLENQLELSLRGVRMKKDQMLIEEIQVLNREGNLVHQENLDLHKKVNLMHQQNMELHEKVSEVEGVKIANKNSLLTNGLDMRDTSNEHVHLQLSQPQHDHETHSKAIQLNYFSFIA

SEQ ID NO: 70612 - protein, 151 aa, Arabidopsis thaliana
  peptide (1)..(151): Ceres Seq. ID no. 2714345
MYIVTLEKYAYSEELVLDRQMMGEELSGLSVEALQNLENQLELSLRGVRMKKDQMLIEEIQVLNREGNLVHQENLDLHKKVNLMHQQNMELHEKVSEVEGVKIANKNSLLTNGLDMRDTSNEHVHLQLSQPQHDHETHSKAIQLNYFSFIA

SEQ ID NO: 70613 - DNA, 1914 bp, Arabidopsis thaliana
  misc_feature (1)..(1914): Ceres Seq. ID no. 2714503
  misc_feature (1)..(1914): Ortholog of  Ceres SEQ ID NO 13594536 as cited in SEQ ID NO 51382
  misc_feature (1)..(1914): Ortholog of  Ceres SEQ ID NO 15172549 as cited in SEQ ID NO 57185
atggtgcttccgctcttccggcgcgctgcgatcgcccggacttcctcgcttctcagagctcgtcttttcgctcctgcctccgaattccattctcgcttttctaatggactataccacttggacgacaaaattagtagcagtaatggtgtgaggtctgcctctatagacttgattacaagaatggatgatagttctccaaagcccattctgcgatttggcgtgcaaaacttttcatctacaggacccatatcacagacggttcttgcaatgccagccttgtctcctactatgagtcatggaaatgttgtaaaatggatgaagaaagaaggtgacaaggtagaggtgggtgatgtactatgtgagatagagacagacaaagccactgtagaatttgagagtcaagaggaaggatttctggccaagattttagtcactgaaggatcaaaggatatccctgttaatgaaccgattgcaataatggttgaggaggaagacgacattaaaaacgttcctgctaccatagagggtggacgagatggtaaagaggaaacatcagctcatcaagtgatgaaacctgacgaaagcacacaacaaaaaagttccattcagcccgatgcatcagatcttcccccacatgtcgtcttagaaatgccagcactttctcctacaatgaaccaaggtaatattgccaaatggtggaaaaaagagggtgacaagattgaagtgggtgatgtcataggtgagatcgagactgacaaagccactctggaatttgaaagccttgaagaggggtacttagctaagattctaattcctgaaggttccaaggatgtggcggtgggaaagccgattgccctaatagttgaagatgctgaaagtattgaagccatcaagtcttcttccgcaggtagttctgaggttgatacagttaaagaagtccctgacagtgttgtagataaacctacagagaggaaagcaggcttcacaaagatcagtcctgctgcaaagctattgattttagaacatggattggaggcatcatcaattgaggcatcgggtccctatggtacattattgaaatcagacgttgtggccgcaattgcttctggaaaagcttctaaatcatctgcgtctacgaagaagaagcaaccatcaaaggagaccccgtctaaatcctcctccacatcgaagccttctgtgacacagtcagataataattatgaagattttccaaatagtcaaattcgcaagattatagcaaaacgtttattggaatcaaaacagaagataccccatttgtatttacaatcagatgttgtattggatcctcttcttgcatttagaaaagaacttcaagaaaaccatggcgttaaagtgtctgtcaatgacatagttattaaagcagtggcagtcgcactgaggaatgtacgacaagctaatgctttctgggatgctgagaaaggagatatcgttatgtgtgacagtgttgacatatcaattgcagttgcaactgagaagggcttaatgactccaattatcaagaatgcagaccagaaatctatttctgctatttccttagaggttaaggagctggcacaaaaggctcgatctggaaagcttgctcctcatgagtttcaaggagggacattcagcatatcaaatctaggaatgtatcctgtggataatttctgcgcaatcattaacccccctcaggctgggattctagcagttggtagaggaaacaaagtggttgagccagttattggactagatggaattgagaagccttctgttgtgacaaaaatgaatgtaacgttatccgctgatcatcggatctttgatggacaagttggagcttcgtttatgtctgaattgcgttcaaactttgaggatgttcgaagacttcttctgtga

SEQ ID NO: 70614 - protein, 637 aa, Arabidopsis thaliana; identical to SEQ ID NO: 39890
  peptide (1)..(637): Ceres Seq. ID no. 2714504

SEQ ID NO: 70615 - protein, 577 aa, Arabidopsis thaliana; identical to SEQ ID NO: 39891
  peptide (1)..(577): Ceres Seq. ID no. 2714505

SEQ ID NO: 70616 - protein, 548 aa, Arabidopsis thaliana
  peptide (1)..(548): Ceres Seq. ID no. 2714506
MPALSPTMSHGNVVKWMKKEGDKVEVGDVLCEIETDKATVEFESQEEGFLAKILVTEGSKDIPVNEPIAIMVEEEDDIKNVPATIEGGRDGKEETSAHQVMKPDESTQQKSSIQPDASDLPPHVVLEMPALSPTMNQGNIAKWWKKEGDKIEVGDVIGEIETDKATLEFESLEEGYLAKILIPEGSKDVAVGKPIALIVEDAESIEAIKSSSAGSSEVDTVKEVPDSVVDKPTERKAGFTKISPAAKLLILEHGLEASSIEASGPYGTLLKSDVVAAIASGKASKSSASTKKKQPSKETPSKSSSTSKPSVTQSDNNYEDFPNSQIRKIIAKRLLESKQKIPHLYLQSDVVLDPLLAFRKELQENHGVKVSVNDIVIKAVAVALRNVRQANAFWDAEKGDIVMCDSVDISIAVATEKGLMTPIIKNADQKSISAISLEVKELAQKARSGKLAPHEFQGGTFSISNLGMYPVDNFCAIINPPQAGILAVGRGNKVVEPVIGLDGIEKPSVVTKMNVTLSADHRIFDGQVGASFMSELRSNFEDVRRLLL

SEQ ID NO: 70617 - DNA, 1344 bp, Arabidopsis thaliana
  misc_feature (1)..(1344): Ceres Seq. ID no. 2715781
  misc_feature (1)..(1344): Ortholog of  Ceres SEQ ID NO 14303294 as cited in SEQ ID NO 64194
atggatgagatttgggaaagagctgtagaagcggctctagatggtcaaacagataggttagctacacgaacgctaacacttgatggtgctgtgaaatgcgttcagggacgtttaccaccacctagtgttctcgagaagtttcagaatcttcagcatctttctgtagctaacatcggtgtttcttctctggaacagtttcctagacttggtaatttacagaagctaatcttatctgataatcggatcactgttggtttagagtttcttgttgaagctgggcttgattcgttctgtgatttggatttatctaataaccggatccagtttgttgaggatctagctcctttggcggagttgaagcttgtgtctcttgatctgtatgagtgtcctgtgactaggcttaaggattatcgatctagggtttttgggttgattaaaactttgaagtatttagataagactgatgctgaagggaatgagaggcctgagtctgatgatgaagatgatgaggaagatgaagaggatgaagaagaagaagaggaaggtgatgaggaggatcctggaagtggggagattgatggagatgaaagagcagaggctcctcggatgagtaatggccatagtgaaagggtagatggtgttgttgatgttgatgaggatgaagagagtgatgctgaggatgatgagtcagagcaggctactggagtgaacgggacgagttatcgggctaatggattccgtcttgaagctgttaatggggaagaagtaagggaagatgatggggatgatagtgagtctggtgaggaggaagtaggggaagataatgatgtggttgaggttcatgagattgaagatagtgagaatgaggaagatggggttgatgatgaagaagatgatgaagaggatgaggaggaagaggaagttgataatgctgatcgtggtcttggtgggtcagggagcacaagcaggttgatgaacgcaggagagattgatgggcatgaacaaggagatgacgatgaagatggtgatggcgagactggggaagatgaccaaggggttgaggatgatggagagtttgcggatgaagatgatgatgttgaagaggaggatgaagaatctggtgaagggtaccttgttcagccagtttctcaagtggaagatcatgatgctgtgggtaatgacatcgagccgatcaatgaggacaatgatccagatgaagaagaagaagtcgaagatgacctgccaattcctgaccagtccttggcttcatcatctcgcccaaagagaaaacgagatgacgatgatgacggtgaggatgatgacgatgatgatgaggaacgttga

SEQ ID NO: 70618 - protein, 447 aa, Arabidopsis thaliana
  peptide (1)..(447): Ceres Seq. ID no. 2715782
MDEIWERAVEAALDGQTDRLATRTLTLDGAVKCVQGRLPPPSVLEKFQNLQHLSVANIGVSSLEQFPRLGNLQKLILSDNRITVGLEFLVEAGLDSFCDLDLSNNRIQFVEDLAPLAELKLVSLDLYECPVTRLKDYRSRVFGLIKTLKYLDKTDAEGNERPESDDEDDEEDEEDEEEEEEGDEEDPGSGEIDGDERAEAPRMSNGHSERVDGVVDVDEDEESDAEDDESEQATGVNGTSYRANGFRLEAVNGEEVREDDGDDSESGEEEVGEDNDVVEVHEIEDSENEEDGVDDEEDDEEDEEEEEVDNADRGLGGSGSTSRLMNAGEIDGHEQGDDDEDGDGETGEDDQGVEDDGEFADEDDDVEEEDEESGEGYLVQPVSQVEDHDAVGNDIEPINEDNDPDEEEEVEDDLPIPDQSLASSSRPKRKRDDDDDGEDDDDDDEER

SEQ ID NO: 70619 - protein, 245 aa, Arabidopsis thaliana
  peptide (1)..(245): Ceres Seq. ID no. 2715783
MSNGHSERVDGVVDVDEDEESDAEDDESEQATGVNGTSYRANGFRLEAVNGEEVREDDGDDSESGEEEVGEDNDVVEVHEIEDSENEEDGVDDEEDDEEDEEEEEVDNADRGLGGSGSTSRLMNAGEIDGHEQGDDDEDGDGETGEDDQGVEDDGEFADEDDDVEEEDEESGEGYLVQPVSQVEDHDAVGNDIEPINEDNDPDEEEEVEDDLPIPDQSLASSSRPKRKRDDDDDGEDDDDDDEER

SEQ ID NO: 70620 - DNA, 990 bp, Arabidopsis thaliana
  misc_feature (1)..(990): Ceres Seq. ID no. 2715797
  misc_feature (1)..(990): Ortholog of  Ceres SEQ ID NO 13595351 as cited in SEQ ID NO 55934
atggtggtggttcaaatagctacggcagggttaaacatatttttcaagctagcaatggaagatggtatgaacccaagtgtactcgtggcctatcgtctcttgtttgctacacttttcatgattcctatatgcttcatctttcaaagtgtggtgataccaagtatcctaaccattacgggtctagctctaacgtcagcaacattcacctctgctgctggcgttctcactccattggtcactttcatcttcgctgcacttcttaggatggagagtgtacggcttggatcgagcgtagggctggctaaggtttttggaacattgtttggtgttggtggagctcttgtctttatattctatagaggaatagagatccgactatggtcaactcacgttaacctagtgaaccaaccacgtgactcctcacgtgatgctaccactcaccatatttccatccttggggctcttctagtttttgggggaaacatttccatctcactttggtttttattgcaggttaagataagcaaacaatttggagggccttattggaacgcgactctaatgaacatgatgggaggcgtagtggctatgcttgtcgctctttgctgggaacacgatttagatgaatggagattaggatggaatatcagactattaaccattgcttatgcggcaattctgatttccgggatggtggtagcagtcaacgcatggtgcattgagtctagaggaccgttatttgtatcggtatttagccctgtaggacttgtgatcgtagctcttgttggatcatttttgctagatgaaacacttcatttggggagcataattggtacagtgattatcgttggagcattatacattgtgctatgggctaaaaacaaggaaatgaagagtatgcttacgacatcggatcataatgaaacaaataagactagcaaagatatcacagtcaacaatctcccaacattaagtacaaatgtcccttga

SEQ ID NO: 70621 - protein, 329 aa, Arabidopsis thaliana
  peptide (1)..(329): Ceres Seq. ID no. 2715798
MVVVQIATAGLNIFFKLAMEDGMNPSVLVAYRLLFATLFMIPICFIFQSVVIPSILTITGLALTSATFTSAAGVLTPLVTFIFAALLRMESVRLGSSVGLAKVFGTLFGVGGALVFIFYRGIEIRLWSTHVNLVNQPRDSSRDATTHHISILGALLVFGGNISISLWFLLQVKISKQFGGPYWNATLMNMMGGVVAMLVALCWEHDLDEWRLGWNIRLLTIAYAAILISGMVVAVNAWCIESRGPLFVSVFSPVGLVIVALVGSFLLDETLHLGSIIGTVIIVGALYIVLWAKNKEMKSMLTTSDHNETNKTSKDITVNNLPTLSTNVP

SEQ ID NO: 70622 - protein, 311 aa, Arabidopsis thaliana
  peptide (1)..(311): Ceres Seq. ID no. 2715799
MEDGMNPSVLVAYRLLFATLFMIPICFIFQSVVIPSILTITGLALTSATFTSAAGVLTPLVTFIFAALLRMESVRLGSSVGLAKVFGTLFGVGGALVFIFYRGIEIRLWSTHVNLVNQPRDSSRDATTHHISILGALLVFGGNISISLWFLLQVKISKQFGGPYWNATLMNMMGGVVAMLVALCWEHDLDEWRLGWNIRLLTIAYAAILISGMVVAVNAWCIESRGPLFVSVFSPVGLVIVALVGSFLLDETLHLGSIIGTVIIVGALYIVLWAKNKEMKSMLTTSDHNETNKTSKDITVNNLPTLSTNVP

SEQ ID NO: 70623 - protein, 307 aa, Arabidopsis thaliana
  peptide (1)..(307): Ceres Seq. ID no. 2715800
MNPSVLVAYRLLFATLFMIPICFIFQSVVIPSILTITGLALTSATFTSAAGVLTPLVTFIFAALLRMESVRLGSSVGLAKVFGTLFGVGGALVFIFYRGIEIRLWSTHVNLVNQPRDSSRDATTHHISILGALLVFGGNISISLWFLLQVKISKQFGGPYWNATLMNMMGGVVAMLVALCWEHDLDEWRLGWNIRLLTIAYAAILISGMVVAVNAWCIESRGPLFVSVFSPVGLVIVALVGSFLLDETLHLGSIIGTVIIVGALYIVLWAKNKEMKSMLTTSDHNETNKTSKDITVNNLPTLSTNVP

SEQ ID NO: 70624 - DNA, 1665 bp, Arabidopsis thaliana
  misc_feature (1)..(1665): Ceres Seq. ID no. 2715851
  misc_feature (1)..(1665): Ortholog of  Ceres SEQ ID NO 15226175 as cited in SEQ ID NO 0
atgaaagctttgagacggattcaaacgacgtcttcgtcttctaatccttcatcgccattatcgtctcctccttcttcttcatcatcatcctcgtggatccaaatacgttctgctctcttcgttgttgcttcttcatctcctgcttcttgttctgatcggcctcgtcttaaatcaccatggtctcggaggaaaaggaaaaggccacttagacctcagcaatggaagaggttttttactcctgacggtagattgcggaatggaggagtggatttgttgaagaaagttcgaagtagaggtattgagccaagcattcggctagaggtgtggccattccttcttggattgtatggttttaatagttctaaagaagagagagttactataagaaaccggaggagctcttttttcgattctttagctcatcggttttgttacaaatgcagaaaggagtatgagagactacgtaggcagtgcaaacggcttcaaaaacacaataacgggactcgtaagttatacaacggcagtgaaactatccaagatgagtatgattggcctcgagttcaagacactgacagttcatgttctgatgaagttgttagtgcccgtgagtctctctctagtgacgaagacattactgaagatattgggtatatgagtgaggtttcatgtacagttgagagagacgacggtagtagttcaagacgaatcaccaatgctactatctctacacttaattccgagtcatcagattcagattcttcagatgagagtgaagtggtacaggtctttcaatcttctgctactccggatgtgaatagtacttatccagccagttcatctattccccggacagaagaggattttgtgacgtggcagcgtattatccgtctagacgccgtgcgtgctgactcagagtggacctcctattctccatcccaggcagttatatcggaggatagagcatgtcgtgccgctgaggcggttgggttgaaagattacaatcacctggaaccgtacaaaatctttcaagctgcacggctagttgctgttcttgaagcttatgctttgtatgaccctgacattggatattgccaaggaatgagtgatcttctctctcctatactctctgtaatccctgatgaccatgaagtcttttggtgtttcgtcgggttcatgaagaaagctcgtcacaatttcagacttgacgaggttggaatcagaagacaactcaacatagtctcaaagataatcaaatctaaagactctcagctttataggcaccttgagaaactccaagctgaagactgtttctttgtatacagaatggttgttgtgatgttcagacgagagctgacacttgatcagacattgtgtctatgggaagtaatgtgggcagatcaagccgcaatcagagccgggatgggaaaatccgcgtggagtaggataaggcaacgtgcacctcccactgatgatttggtgctctatgcaatagcggcctcggtgttgcaaagaaggaaacgtattatagaaaggtataacagcatggatgagattttaagggagtgccaaagtatggcagggcagttagatgtgtggaagctccttgatgatgcacatgacctcgttgttactctacacaccaagattgaacattcattctcataa

SEQ ID NO: 70625 - protein, 554 aa, Arabidopsis thaliana
  peptide (1)..(554): Ceres Seq. ID no. 2715852
MKALRRIQTTSSSSNPSSPLSSPPSSSSSSSWIQIRSALFVVASSSPASCSDRPRLKSPWSRRKRKRPLRPQQWKRFFTPDGRLRNGGVDLLKKVRSRGIEPSIRLEVWPFLLGLYGFNSSKEERVTIRNRRSSFFDSLAHRFCYKCRKEYERLRRQCKRLQKHNNGTRKLYNGSETIQDEYDWPRVQDTDSSCSDEVVSARESLSSDEDITEDIGYMSEVSCTVERDDGSSSRRITNATISTLNSESSDSDSSDESEVVQVFQSSATPDVNSTYPASSSIPRTEEDFVTWQRIIRLDAVRADSEWTSYSPSQAVISEDRACRAAEAVGLKDYNHLEPYKIFQAARLVAVLEAYALYDPDIGYCQGMSDLLSPILSVIPDDHEVFWCFVGFMKKARHNFRLDEVGIRRQLNIVSKIIKSKDSQLYRHLEKLQAEDCFFVYRMVVVMFRRELTLDQTLCLWEVMWADQAAIRAGMGKSAWSRIRQRAPPTDDLVLYAIAASVLQRRKRIIERYNSMDEILRECQSMAGQLDVWKLLDDAHDLVVTLHTKIEHSFS

SEQ ID NO: 70626 - protein, 337 aa, Arabidopsis thaliana
  peptide (1)..(337): Ceres Seq. ID no. 2715853
MSEVSCTVERDDGSSSRRITNATISTLNSESSDSDSSDESEVVQVFQSSATPDVNSTYPASSSIPRTEEDFVTWQRIIRLDAVRADSEWTSYSPSQAVISEDRACRAAEAVGLKDYNHLEPYKIFQAARLVAVLEAYALYDPDIGYCQGMSDLLSPILSVIPDDHEVFWCFVGFMKKARHNFRLDEVGIRRQLNIVSKIIKSKDSQLYRHLEKLQAEDCFFVYRMVVVMFRRELTLDQTLCLWEVMWADQAAIRAGMGKSAWSRIRQRAPPTDDLVLYAIAASVLQRRKRIIERYNSMDEILRECQSMAGQLDVWKLLDDAHDLVVTLHTKIEHSFS

SEQ ID NO: 70627 - DNA, 1542 bp, Arabidopsis thaliana
  misc_feature (1)..(1542): Ceres Seq. ID no. 2716118
  misc_feature (1)..(1542): Ortholog of  Ceres SEQ ID NO 13639120 as cited in SEQ ID NO 56708
atgtttcaggatgggtcaagatcctcaggaagtggcagaggactgtcgacaacggctgtatcaaatggtggatggagaacccgtgggtttttgcgcggttggcagatccagaataccttatttaacaacatcaagttcatgattctctgctgcttcgtgaccattctcatcctacttggcacaatccgtgttgggaaccttggaagctccaacgccgactctgttaatcagagtttcatcaaggaaaccattccgattctcgcggagatcccctctgattcgcattcgacggacttggctgagcctcctaaagctgatgttagtcccaatgcaacgtatactctagagccaagaatcgcggagatcccatctgatgtgcattcaacggacttggttgagctgcctaaagctgatattagtcccaatgcaacgtatactctaggccccagaatcgcggagatcccatctgattcgcatttgacagacttgcttgagccgcctaaagctgatattagtcccaatgcgacatatactctagggcccaaaatcaccaactgggatagtcaacgcaaggtatggctgaatcagaaccctgagtttcctaatattgtcaatggcaaagctcgaatattgcttctcacagggtcttcccccggaccctgtgataaaccaattggaaactattatctattgaaagctgtgaagaacaagattgattactgtagactccacgggatagagattgtgtataacatggcgaatttggatgaggaactctcagggtattggacgaaattacctatgattaggacattaatgctgtctcatccagaagtagaatggatttggtggatggatagtgatgctttgttcactgatatactgtttgagatcccgttgcctcggtacgaaaatcataatctggtgatacacggttatccagacttgctgttcaaccaaaaatcatgggttgcattgaacacgggtatctttctgttgagaaattgtcagtggtcattggatttattagatgcttgggccccaatgggaccaaaagggaagatccgtgacgaaactgggaagatactgacagcttatctgaaaggcaggccagcatttgaggccgatgatcaatcggcgttgatatatctcttgctttcgcagaaggaaaaatggatagagaaggtttatgtggagaatcaatactacttgcacgggttttgggaaggtttggttgacaggtatgaagagatgatagagaagtatcatccaggattgggcgatgagagatggccctttgtgacacattttgtagggtgcaaaccgtgtggcagctatgctgattacgcagtcgatagatgcttcaagagcatggagagggcttttaattttgcagataatcaagtgctgaagctgtatgggtttagccacaggggactgttgagtcccaagattaaaaggatcagaaatgagacagtctctcctctggagtcagtagacaagtttgatattcgaagaatgcacatggaaaccaaaccatag

SEQ ID NO: 70628 - protein, 513 aa, Arabidopsis thaliana
  peptide (1)..(513): Ceres Seq. ID no. 2716119
MFQDGSRSSGSGRGLSTTAVSNGGWRTRGFLRGWQIQNTLFNNIKFMILCCFVTILILLGTIRVGNLGSSNADSVNQSFIKETIPILAEIPSDSHSTDLAEPPKADVSPNATYTLEPRIAEIPSDVHSTDLVELPKADISPNATYTLGPRIAEIPSDSHLTDLLEPPKADISPNATYTLGPKITNWDSQRKVWLNQNPEFPNIVNGKARILLLTGSSPGPCDKPIGNYYLLKAVKNKIDYCRLHGIEIVYNMANLDEELSGYWTKLPMIRTLMLSHPEVEWIWWMDSDALFTDILFEIPLPRYENHNLVIHGYPDLLFNQKSWVALNTGIFLLRNCQWSLDLLDAWAPMGPKGKIRDETGKILTAYLKGRPAFEADDQSALIYLLLSQKEKWIEKVYVENQYYLHGFWEGLVDRYEEMIEKYHPGLGDERWPFVTHFVGCKPCGSYADYAVDRCFKSMERAFNFADNQVLKLYGFSHRGLLSPKIKRIRNETVSPLESVDKFDIRRMHMETKP

SEQ ID NO: 70629 - protein, 467 aa, Arabidopsis thaliana
  peptide (1)..(467): Ceres Seq. ID no. 2716120
MILCCFVTILILLGTIRVGNLGSSNADSVNQSFIKETIPILAEIPSDSHSTDLAEPPKADVSPNATYTLEPRIAEIPSDVHSTDLVELPKADISPNATYTLGPRIAEIPSDSHLTDLLEPPKADISPNATYTLGPKITNWDSQRKVWLNQNPEFPNIVNGKARILLLTGSSPGPCDKPIGNYYLLKAVKNKIDYCRLHGIEIVYNMANLDEELSGYWTKLPMIRTLMLSHPEVEWIWWMDSDALFTDILFEIPLPRYENHNLVIHGYPDLLFNQKSWVALNTGIFLLRNCQWSLDLLDAWAPMGPKGKIRDETGKILTAYLKGRPAFEADDQSALIYLLLSQKEKWIEKVYVENQYYLHGFWEGLVDRYEEMIEKYHPGLGDERWPFVTHFVGCKPCGSYADYAVDRCFKSMERAFNFADNQVLKLYGFSHRGLLSPKIKRIRNETVSPLESVDKFDIRRMHMETKP

SEQ ID NO: 70630 - protein, 262 aa, Arabidopsis thaliana
  peptide (1)..(262): Ceres Seq. ID no. 2716121
MANLDEELSGYWTKLPMIRTLMLSHPEVEWIWWMDSDALFTDILFEIPLPRYENHNLVIHGYPDLLFNQKSWVALNTGIFLLRNCQWSLDLLDAWAPMGPKGKIRDETGKILTAYLKGRPAFEADDQSALIYLLLSQKEKWIEKVYVENQYYLHGFWEGLVDRYEEMIEKYHPGLGDERWPFVTHFVGCKPCGSYADYAVDRCFKSMERAFNFADNQVLKLYGFSHRGLLSPKIKRIRNETVSPLESVDKFDIRRMHMETKP

SEQ ID NO: 70631 - DNA, 1416 bp, Arabidopsis thaliana
  misc_feature (1)..(1416): Ceres Seq. ID no. 2716166
  misc_feature (1)..(1416): Ortholog of  Ceres SEQ ID NO 13585587 as cited in SEQ ID NO 65515
atggatgaggctaaagaggaaaatcgaagactaaagtcatcattgagtaaaatcaagaaagattttgacatccttcaaacacaatacaaccaattaatggccaaacataacgaaccaaccaagttccaatcaaaagggcatcatcaagacaaaggcgaagatgaagacagagaaaaagttaacgaacgtgaagaacttgtctcgttgagcctaggcagacggttaaattcagaggttccaagtggttcgaataaagaagaaaaaaataaagatgttgaagaagcggaaggtgacagaaattatgatgataatgaaaaaagcagtattcaagggttgagtatggggattgaatacaaggctttgagtaatcctaatgagaagttagagattgatcataatcaagaaaccatgtcgttggagattagtaacaataataagatcagatcacaaaatagttttgggtttaagaatgatggagatgatcatgaagatgaagatgagattttgcctcaaaaccttgttaagaaaactagggtttcgatgaacgacggatgtcaatggaggaaatatggccagaaaatagctaaaggcaatccatgtccccgagcttactatcgttgcaccattgcagcttcttgtccagtaagaaaacaggtgcaaagatgttcagaagatatgtctatacttatctcaacgtacgaaggaacacataaccatccacttcccatgtcagcaactgccatggcctctgccacttccgctgccgcctccatgcttctctccggcgcctcctcctcctcatccgccgcagctgatcttcatggccttaacttctctctttccggcaacaacatcactccaaaacctaaaactcatttcctccaatccccttcttcttctggccatccgaccgtcactctcgacctcacaacctcctcctcgtcgcagcaaccgttcttatcaatgctcaatagattcagctctcctccaagtaatgtctcacgatctaatagttatccttcaaccaatctcaacttttcaaacaacaccaacacattgatgaattggggtggtggtggtaatcccagtgatcaataccgtgcagcttacggcaacattaacacccatcagcaatcaccttaccacaaaatcattcaaacccgaaccgccgggtcatctttcgatccgtttggaagatcatcttcatcacattctccacaaataaatcttgatcatatcggaatcaagaacatcatcagtcaccaagtgccatctttaccggctgaaacaatcaaggcaatcacgacagatccaagtttccaatcggctttggcgacagctctatcttccatcatgggcggcgatttaaagattgatcacaatgtgactagaaatgaagctgagaagagcccttaa

SEQ ID NO: 70632 - protein, 471 aa, Arabidopsis thaliana
  peptide (1)..(471): Ceres Seq. ID no. 2716167
MDEAKEENRRLKSSLSKIKKDFDILQTQYNQLMAKHNEPTKFQSKGHHQDKGEDEDREKVNEREELVSLSLGRRLNSEVPSGSNKEEKNKDVEEAEGDRNYDDNEKSSIQGLSMGIEYKALSNPNEKLEIDHNQETMSLEISNNNKIRSQNSFGFKNDGDDHEDEDEILPQNLVKKTRVSMNDGCQWRKYGQKIAKGNPCPRAYYRCTIAASCPVRKQVQRCSEDMSILISTYEGTHNHPLPMSATAMASATSAAASMLLSGASSSSSAAADLHGLNFSLSGNNITPKPKTHFLQSPSSSGHPTVTLDLTTSSSSQQPFLSMLNRFSSPPSNVSRSNSYPSTNLNFSNNTNTLMNWGGGGNPSDQYRAAYGNINTHQQSPYHKIIQTRTAGSSFDPFGRSSSSHSPQINLDHIGIKNIISHQVPSLPAETIKAITTDPSFQSALATALSSIMGGDLKIDHNVTRNEAEKSP

SEQ ID NO: 70633 - protein, 439 aa, Arabidopsis thaliana
  peptide (1)..(439): Ceres Seq. ID no. 2716168
MAKHNEPTKFQSKGHHQDKGEDEDREKVNEREELVSLSLGRRLNSEVPSGSNKEEKNKDVEEAEGDRNYDDNEKSSIQGLSMGIEYKALSNPNEKLEIDHNQETMSLEISNNNKIRSQNSFGFKNDGDDHEDEDEILPQNLVKKTRVSMNDGCQWRKYGQKIAKGNPCPRAYYRCTIAASCPVRKQVQRCSEDMSILISTYEGTHNHPLPMSATAMASATSAAASMLLSGASSSSSAAADLHGLNFSLSGNNITPKPKTHFLQSPSSSGHPTVTLDLTTSSSSQQPFLSMLNRFSSPPSNVSRSNSYPSTNLNFSNNTNTLMNWGGGGNPSDQYRAAYGNINTHQQSPYHKIIQTRTAGSSFDPFGRSSSSHSPQINLDHIGIKNIISHQVPSLPAETIKAITTDPSFQSALATALSSIMGGDLKIDHNVTRNEAEKSP

SEQ ID NO: 70634 - protein, 358 aa, Arabidopsis thaliana
  peptide (1)..(358): Ceres Seq. ID no. 2716169
MGIEYKALSNPNEKLEIDHNQETMSLEISNNNKIRSQNSFGFKNDGDDHEDEDEILPQNLVKKTRVSMNDGCQWRKYGQKIAKGNPCPRAYYRCTIAASCPVRKQVQRCSEDMSILISTYEGTHNHPLPMSATAMASATSAAASMLLSGASSSSSAAADLHGLNFSLSGNNITPKPKTHFLQSPSSSGHPTVTLDLTTSSSSQQPFLSMLNRFSSPPSNVSRSNSYPSTNLNFSNNTNTLMNWGGGGNPSDQYRAAYGNINTHQQSPYHKIIQTRTAGSSFDPFGRSSSSHSPQINLDHIGIKNIISHQVPSLPAETIKAITTDPSFQSALATALSSIMGGDLKIDHNVTRNEAEKSP

SEQ ID NO: 70635 - DNA, 1461 bp, Arabidopsis thaliana
  misc_feature (1)..(1461): Ceres Seq. ID no. 2716470
  misc_feature (1)..(1461): Ortholog of  Ceres SEQ ID NO 12586556 as cited in SEQ ID NO 64667
  misc_feature (1)..(1461): Ortholog of  Ceres SEQ ID NO 13660894 as cited in SEQ ID NO 67475
atggcgatttctgaatccaaccctgactcaaatcttagcattcaagctggagatgaatggcaaaagcttcctctattcgccaattcgtcacatccagattcatcgtccccggaacggtcttcttcgcgttttggtgattctagctacaccgtttcgatataccgcagcattggcaagctttactgcgcaaatcccgtctttaaggcttatttggtctcgtcttctccgaaacaagcgttggggttttacttcgatatactaagatttggttttgttcctgattcatacaccttcgtttcgttgattagttgtattgagaagacttgttgcgttgattctggtaaaatgtgtcatgggcaagccattaagcatggatgcgatcaagttttgcctgttcaaaattcgttaatgcatatgtatacttgttgtggtgctttggatcttgcaaagaagctgtttgttgaaattcctaagagagatattgtgtcctggaactctataatagctgggatggtgaggaatggtgatgttttggctgcacacaagttgttcgatgaaatgcctgacaaaaacattatttcttggaatatcatgattagtgcttatttgggtgcgaataatcctggagtttccattagtttgttccgtgagatggtcagagcagggttccaaggaaatgagagtacgttggttttgttgttgaatgcttgtggtagatcagctagattgaaggaagctcttattgacatgtatggaaagtgcaaggaagtaggtttagcacgtaggatattcgatagtctatctattagaaacaaagttacttggaatgtgatgatattggcacattgtcttcacgggcgtcctgaaggtgggctcgagttatttgaagccatgatcaatggtatgcttagacccgatgaagtgacatttgttggtgttctctgcggttgtgctagagctgggcttgtttctcaaggacaaagttactattctctgatggttgatgagttccagatcaaacccaactttggacaccaatggtgcatggctaatctttactccagcgccgggttccctgaagaagcagaggaagctctgaagaatctgccagatgaagatgtgacaccagaatctacaaagtgggcaaacttgctcagctcgtcgcgttttacaggaaacccgactctaggggagagcattgccaagtccctgatagagacagatcctttgaactacaagtattaccatttgctgatgaatatttacagtgttacgggacggtgggaggatgttaatagagtgagagagatggtgaaggagaggaaaataggacgaatacccgggtgtggccttgtggacttgaaggagatagtccatggccttagactaggatgcaaagaagcagaaaaggtgttcactgagactagtttagaaaaatgctacagtgattcaccgtcataa

SEQ ID NO: 70636 - protein, 486 aa, Arabidopsis thaliana
  peptide (1)..(486): Ceres Seq. ID no. 2716471
MAISESNPDSNLSIQAGDEWQKLPLFANSSHPDSSSPERSSSRFGDSSYTVSIYRSIGKLYCANPVFKAYLVSSSPKQALGFYFDILRFGFVPDSYTFVSLISCIEKTCCVDSGKMCHGQAIKHGCDQVLPVQNSLMHMYTCCGALDLAKKLFVEIPKRDIVSWNSIIAGMVRNGDVLAAHKLFDEMPDKNIISWNIMISAYLGANNPGVSISLFREMVRAGFQGNESTLVLLLNACGRSARLKEALIDMYGKCKEVGLARRIFDSLSIRNKVTWNVMILAHCLHGRPEGGLELFEAMINGMLRPDEVTFVGVLCGCARAGLVSQGQSYYSLMVDEFQIKPNFGHQWCMANLYSSAGFPEEAEEALKNLPDEDVTPESTKWANLLSSSRFTGNPTLGESIAKSLIETDPLNYKYYHLLMNIYSVTGRWEDVNRVREMVKERKIGRIPGCGLVDLKEIVHGLRLGCKEAEKVFTETSLEKCYSDSPS

SEQ ID NO: 70637 - protein, 371 aa, Arabidopsis thaliana
  peptide (1)..(371): Ceres Seq. ID no. 2716472
MCHGQAIKHGCDQVLPVQNSLMHMYTCCGALDLAKKLFVEIPKRDIVSWNSIIAGMVRNGDVLAAHKLFDEMPDKNIISWNIMISAYLGANNPGVSISLFREMVRAGFQGNESTLVLLLNACGRSARLKEALIDMYGKCKEVGLARRIFDSLSIRNKVTWNVMILAHCLHGRPEGGLELFEAMINGMLRPDEVTFVGVLCGCARAGLVSQGQSYYSLMVDEFQIKPNFGHQWCMANLYSSAGFPEEAEEALKNLPDEDVTPESTKWANLLSSSRFTGNPTLGESIAKSLIETDPLNYKYYHLLMNIYSVTGRWEDVNRVREMVKERKIGRIPGCGLVDLKEIVHGLRLGCKEAEKVFTETSLEKCYSDSPS

SEQ ID NO: 70638 - protein, 350 aa, Arabidopsis thaliana
  peptide (1)..(350): Ceres Seq. ID no. 2716473
MHMYTCCGALDLAKKLFVEIPKRDIVSWNSIIAGMVRNGDVLAAHKLFDEMPDKNIISWNIMISAYLGANNPGVSISLFREMVRAGFQGNESTLVLLLNACGRSARLKEALIDMYGKCKEVGLARRIFDSLSIRNKVTWNVMILAHCLHGRPEGGLELFEAMINGMLRPDEVTFVGVLCGCARAGLVSQGQSYYSLMVDEFQIKPNFGHQWCMANLYSSAGFPEEAEEALKNLPDEDVTPESTKWANLLSSSRFTGNPTLGESIAKSLIETDPLNYKYYHLLMNIYSVTGRWEDVNRVREMVKERKIGRIPGCGLVDLKEIVHGLRLGCKEAEKVFTETSLEKCYSDSPS

SEQ ID NO: 70639 - DNA, 636 bp, Arabidopsis thaliana
  misc_feature (1)..(636): Ceres Seq. ID no. 2716663
  misc_feature (1)..(636): Ortholog of  Ceres SEQ ID NO 13656286 as cited in SEQ ID NO 69168
  misc_feature (1)..(636): Ortholog of  Ceres SEQ ID NO 15174351 as cited in SEQ ID NO 0
atggcggcgtttacagggacaacagacaaatgcaaggcgtgtgacaagacggtatacgttatggacttgatgactttggaaggaatgccttatcacaagtcatgcttcaggtgcagccattgcaatggcactctcgtgatatgtaactactcatccatggatggagttttgtattgcaagacccattttgaacagctcttcaaagaatctggaaatttcagcaagaatttccaaacagctggaaagaccgagaaatcgaatgatgcggctccaaacaggttatcatccttctttagcggcacacaagacaaatgtgcagcttgtaagaaaacagtttatcctctagagaagatgacaatggaaggagaatcttaccacaagacttgcttcagatgtgcacatagtggttgtccattaacacattcttcatatgctgctctcgatggcgtcctttactgtaaggtccacttcagccagcttttccttgagaaaggtaattacaatcatgtcctccaagccgcggctaaccaccgtcgctcgacggctgaggaagacaaaaccgaacccaaagaagatgaagcaaaccctacagaagaagaaacttctgatgcagcagctgaagaacatgaatcctaa

SEQ ID NO: 70640 - protein, 211 aa, Arabidopsis thaliana
  peptide (1)..(211): Ceres Seq. ID no. 2716664
MAAFTGTTDKCKACDKTVYVMDLMTLEGMPYHKSCFRCSHCNGTLVICNYSSMDGVLYCKTHFEQLFKESGNFSKNFQTAGKTEKSNDAAPNRLSSFFSGTQDKCAACKKTVYPLEKMTMEGESYHKTCFRCAHSGCPLTHSSYAALDGVLYCKVHFSQLFLEKGNYNHVLQAAANHRRSTAEEDKTEPKEDEANPTEEETSDAAAEEHES

SEQ ID NO: 70641 - protein, 191 aa, Arabidopsis thaliana
  peptide (1)..(191): Ceres Seq. ID no. 2716665
MDLMTLEGMPYHKSCFRCSHCNGTLVICNYSSMDGVLYCKTHFEQLFKESGNFSKNFQTAGKTEKSNDAAPNRLSSFFSGTQDKCAACKKTVYPLEKMTMEGESYHKTCFRCAHSGCPLTHSSYAALDGVLYCKVHFSQLFLEKGNYNHVLQAAANHRRSTAEEDKTEPKEDEANPTEEETSDAAAEEHES

SEQ ID NO: 70642 - protein, 188 aa, Arabidopsis thaliana
  peptide (1)..(188): Ceres Seq. ID no. 2716666
MTLEGMPYHKSCFRCSHCNGTLVICNYSSMDGVLYCKTHFEQLFKESGNFSKNFQTAGKTEKSNDAAPNRLSSFFSGTQDKCAACKKTVYPLEKMTMEGESYHKTCFRCAHSGCPLTHSSYAALDGVLYCKVHFSQLFLEKGNYNHVLQAAANHRRSTAEEDKTEPKEDEANPTEEETSDAAAEEHES

SEQ ID NO: 70643 - DNA, 1326 bp, Arabidopsis thaliana
  misc_feature (1)..(1326): Ceres Seq. ID no. 2716839
  misc_feature (1)..(1326): Ortholog of  Ceres SEQ ID NO 13663419 as cited in SEQ ID NO 66561
atggcaaacaacaacgtttactctgttctgaagtcgctgcttctgcttcttcaccttgtattcttgagtaagcaacatgttgactctgcctcaatcgtcaaattccttcctggttttgaaggccctcttccctttgagctcgaaaccgggtatattggtgttggtgaggaagaggaggtgcaactgttctactacttcatcaagtctgagaggaacccaaaagaagaccctcttcttctctggctaactggaggacctggctgctctgccatctctggccttctttatcagaatgggcctctggctatgaagctcgatgtttacaatggaactctcccttctttggtctctactacatattcttggacaaagacttcgagcatgatattcttggaccagcccgttggaactggcttctcctattcaagaacgcaactttttaataaacctagtgatacaggagaagccaaacggatccatgagtttcttcaaaagtggctaggcaagcatcaagagttttcctccaaccctttctatgttggcggagattcctattccggtctggttgttccagctaccgttcaagaaatttcaaaaggaaattgtcaatgctgcaatcgtccaataaatcttcagggctatgtgctcggtaacccgttaacagactgtgtatatgattgtaactaccgcgttccatttgctcataaaatggcactgatctctgatgaactctacgagtcgttgaagagaacctgcagaggagaatatgtaaatgttcatccacatgacacagaatgcttgaaattcgttgaagaatttaacaagttaacaaacagagtatgcgaacgacatatattacattcatgttgcgaaactgaaactccaagttgctattcttataggtttatgctaactacctactgggccaatgacgaaaccgtacgcaaagctcttcaaatcaataaggagagtataggggaatggacacgatgttatcgcggtattccttacaatcatgacattaaaagtagcgtaccttaccatatgaataacagcatcgatggttatcgttctctcatctacagtggtgatcatgatatccaagtacctttccttgggactcaagcttggataagatcgctcaactattctatcattgatgactggaggccatggatgatcaaagatcaaatcgctggatacacaacgagttatgtcaataaaatgacatttgctactgtcacaggaggtgggcacacagcagagtttacaccaaaggaaacctttatgatgttccaaaggtggatcaatggccaacctctgtga

SEQ ID NO: 70644 - protein, 441 aa, Arabidopsis thaliana
  peptide (1)..(441): Ceres Seq. ID no. 2716840
MANNNVYSVLKSLLLLLHLVFLSKQHVDSASIVKFLPGFEGPLPFELETGYIGVGEEEEVQLFYYFIKSERNPKEDPLLLWLTGGPGCSAISGLLYQNGPLAMKLDVYNGTLPSLVSTTYSWTKTSSMIFLDQPVGTGFSYSRTQLFNKPSDTGEAKRIHEFLQKWLGKHQEFSSNPFYVGGDSYSGLVVPATVQEISKGNCQCCNRPINLQGYVLGNPLTDCVYDCNYRVPFAHKMALISDELYESLKRTCRGEYVNVHPHDTECLKFVEEFNKLTNRVCERHILHSCCETETPSCYSYRFMLTTYWANDETVRKALQINKESIGEWTRCYRGIPYNHDIKSSVPYHMNNSIDGYRSLIYSGDHDIQVPFLGTQAWIRSLNYSIIDDWRPWMIKDQIAGYTTSYVNKMTFATVTGGGHTAEFTPKETFMMFQRWINGQPL

SEQ ID NO: 70645 - protein, 339 aa, Arabidopsis thaliana
  peptide (1)..(339): Ceres Seq. ID no. 2716841
MKLDVYNGTLPSLVSTTYSWTKTSSMIFLDQPVGTGFSYSRTQLFNKPSDTGEAKRIHEFLQKWLGKHQEFSSNPFYVGGDSYSGLVVPATVQEISKGNCQCCNRPINLQGYVLGNPLTDCVYDCNYRVPFAHKMALISDELYESLKRTCRGEYVNVHPHDTECLKFVEEFNKLTNRVCERHILHSCCETETPSCYSYRFMLTTYWANDETVRKALQINKESIGEWTRCYRGIPYNHDIKSSVPYHMNNSIDGYRSLIYSGDHDIQVPFLGTQAWIRSLNYSIIDDWRPWMIKDQIAGYTTSYVNKMTFATVTGGGHTAEFTPKETFMMFQRWINGQPL

SEQ ID NO: 70646 - protein, 314 aa, Arabidopsis thaliana
  peptide (1)..(314): Ceres Seq. ID no. 2716842
MIFLDQPVGTGFSYSRTQLFNKPSDTGEAKRIHEFLQKWLGKHQEFSSNPFYVGGDSYSGLVVPATVQEISKGNCQCCNRPINLQGYVLGNPLTDCVYDCNYRVPFAHKMALISDELYESLKRTCRGEYVNVHPHDTECLKFVEEFNKLTNRVCERHILHSCCETETPSCYSYRFMLTTYWANDETVRKALQINKESIGEWTRCYRGIPYNHDIKSSVPYHMNNSIDGYRSLIYSGDHDIQVPFLGTQAWIRSLNYSIIDDWRPWMIKDQIAGYTTSYVNKMTFATVTGGGHTAEFTPKETFMMFQRWINGQPL

SEQ ID NO: 70647 - DNA, 1743 bp, Arabidopsis thaliana
  misc_feature (1)..(1743): Ceres Seq. ID no. 2716847
  misc_feature (1)..(1743): Ortholog of  Ceres SEQ ID NO 14307682 as cited in SEQ ID NO 54529
atgatcacaagaagcaggtgtcgaagatctttgttatggtttctagtgttccatggcggagctacagccaccggagctccctctggtgggaaagagctttctcagacgcctacttgggcagtcgccgtcgtctgcacctttctcatcctcatttcccatctccttgaaaagggtcttcaaagactcgccaacgtctgctttcttcttcttcttcttcttttcttacgagtgttcttgttcaaacattcattgtctgaaacatatgaatttgtttcttctcagtggctatggaagaagcataaaaactctctccttgaagccttagagaaaatcaaagctgagctgatgatccttggattcatttctttattactcacttttggagaaccatatattctcaagatctgtgttcctcgaaaagctgctctctctatgttaccttgtttatctgaagacacagtgcttttccagaaacttgctccatcatctcttagcaggcatcttttggctgctggtgatacatctattaattgcaaacaaggatctgagccactcataacattgaaaggcttgcaccaacttcacatcttgttgttcttcttggccatctttcatatcgtatatagtttaatcaccatgatgcttagcaggctcaagattcgtggatggaaaaagtgggagcaagagacattatctaatgactatgagttttctattgatcattcaagacttaggctcactcatgagacttcttttgtgagagaacatacaagtttctggacaacaactcctttcttcttttacgtcggatgcttctttaggcagttctttgtatctgttgaaagaaccgactacttgactctgcgccatggattcatctctgcccatttagctccaggaagaaagttcaacttccagagatatatcaaaagatctctcgaggatgatttcaagttggtagttggaataagtccagttctttgggcatcatttgtaatcttcttgctgttcaatgttaatggctggagaacattgttttgggcatcgatacctcctctactcataatcctagctgttggaacaaagcttcaagcaattatggcaacaatggcgctagaaatcgtagagacacatgcagtagttcaggggatgcctttagtgcaaggttcagatcgatacttttggttcgactgtcctcaactacttcttcatcttatccactttgccttgtttcagaatgctttccagataacacacttcttctggatatggtattcttttggattaaaatcatgcttccataaagatttcaatcttgtagtcagcaaactctttctatgcctaggagctttgatcttatgcagctacatcactctcccattgtacgccctcgttactcagatgatgaaatggtgtgtggagcagatgggttcacacatgaagaaagcagtgtttgatgagcaaatggcaaaggcattgaagaagtggcacaaagacatcaaattgaagaaaggtaaagcgaggaagctcccgagcaagacacttggtgtttcagagagtttcagcctctcttcctcttcctctgcaaccactcttcaccgttccaagaccactggtcactcttctaacatcatatactacaaacaagaagatgaagaagacgaaatgtctgatcttgaagctggagcagaggatgctattgacaggattcaacaacaggagatgcaattccacaactcttag

SEQ ID NO: 70648 - protein, 580 aa, Arabidopsis thaliana
  peptide (1)..(580): Ceres Seq. ID no. 2716848
MITRSRCRRSLLWFLVFHGGATATGAPSGGKELSQTPTWAVAVVCTFLILISHLLEKGLQRLANVCFLLLLLLFLRVFLFKHSLSETYEFVSSQWLWKKHKNSLLEALEKIKAELMILGFISLLLTFGEPYILKICVPRKAALSMLPCLSEDTVLFQKLAPSSLSRHLLAAGDTSINCKQGSEPLITLKGLHQLHILLFFLAIFHIVYSLITMMLSRLKIRGWKKWEQETLSNDYEFSIDHSRLRLTHETSFVREHTSFWTTTPFFFYVGCFFRQFFVSVERTDYLTLRHGFISAHLAPGRKFNFQRYIKRSLEDDFKLVVGISPVLWASFVIFLLFNVNGWRTLFWASIPPLLIILAVGTKLQAIMATMALEIVETHAVVQGMPLVQGSDRYFWFDCPQLLLHLIHFALFQNAFQITHFFWIWYSFGLKSCFHKDFNLVVSKLFLCLGALILCSYITLPLYALVTQMMKWCVEQMGSHMKKAVFDEQMAKALKKWHKDIKLKKGKARKLPSKTLGVSESFSLSSSSSATTLHRSKTTGHSSNIIYYKQEDEEDEMSDLEAGAEDAIDRIQQQEMQFHNS

SEQ ID NO: 70649 - protein, 465 aa, Arabidopsis thaliana
  peptide (1)..(465): Ceres Seq. ID no. 2716849
MILGFISLLLTFGEPYILKICVPRKAALSMLPCLSEDTVLFQKLAPSSLSRHLLAAGDTSINCKQGSEPLITLKGLHQLHILLFFLAIFHIVYSLITMMLSRLKIRGWKKWEQETLSNDYEFSIDHSRLRLTHETSFVREHTSFWTTTPFFFYVGCFFRQFFVSVERTDYLTLRHGFISAHLAPGRKFNFQRYIKRSLEDDFKLVVGISPVLWASFVIFLLFNVNGWRTLFWASIPPLLIILAVGTKLQAIMATMALEIVETHAVVQGMPLVQGSDRYFWFDCPQLLLHLIHFALFQNAFQITHFFWIWYSFGLKSCFHKDFNLVVSKLFLCLGALILCSYITLPLYALVTQMMKWCVEQMGSHMKKAVFDEQMAKALKKWHKDIKLKKGKARKLPSKTLGVSESFSLSSSSSATTLHRSKTTGHSSNIIYYKQEDEEDEMSDLEAGAEDAIDRIQQQEMQFHNS

SEQ ID NO: 70650 - protein, 436 aa, Arabidopsis thaliana
  peptide (1)..(436): Ceres Seq. ID no. 2716850
MLPCLSEDTVLFQKLAPSSLSRHLLAAGDTSINCKQGSEPLITLKGLHQLHILLFFLAIFHIVYSLITMMLSRLKIRGWKKWEQETLSNDYEFSIDHSRLRLTHETSFVREHTSFWTTTPFFFYVGCFFRQFFVSVERTDYLTLRHGFISAHLAPGRKFNFQRYIKRSLEDDFKLVVGISPVLWASFVIFLLFNVNGWRTLFWASIPPLLIILAVGTKLQAIMATMALEIVETHAVVQGMPLVQGSDRYFWFDCPQLLLHLIHFALFQNAFQITHFFWIWYSFGLKSCFHKDFNLVVSKLFLCLGALILCSYITLPLYALVTQMMKWCVEQMGSHMKKAVFDEQMAKALKKWHKDIKLKKGKARKLPSKTLGVSESFSLSSSSSATTLHRSKTTGHSSNIIYYKQEDEEDEMSDLEAGAEDAIDRIQQQEMQFHNS

SEQ ID NO: 70651 - DNA, 1077 bp, Arabidopsis thaliana
  misc_feature (1)..(1077): Ceres Seq. ID no. 2716859
  misc_feature (1)..(1077): Ortholog of  Ceres SEQ ID NO 12612470 as cited in SEQ ID NO 55136
  misc_feature (1)..(1077): Ortholog of  Ceres SEQ ID NO 12612425 as cited in SEQ ID NO 56789
  misc_feature (1)..(1077): Ortholog of  Ceres SEQ ID NO 13503512 as cited in SEQ ID NO 65121
atgattccgtttcctctgttaccaacgccgattgaaaccaactacagagcttgcaccattccttatagattcccttccgataatctcaagaaagccactcctactgaaatctcctggatcaacgtcttcgccaattccattccttctttcaagaaacgtgcagagagcgataccagtgttccagatgctcctgctagagctaaaatttttgaacaaagatatgcgggatttcttgaaggctggaagaaagatccagagagtaatggtgggccaccagatggtgttattctcggccgagttcgtgagcatttactcagagagttaggatttagggacatattcaagaaagtcaaggatgaggagaatgcaaaggctatatcactatttcctgaagttgtcagtctgagtgatgctattgaagatgacggagaacggttagagaatttggtgagagggatatttgctggaaacatctttgatcttggttctgcacagttgtctctctttggtgctcccacaggaaaagcttgtcctaattacgcgctcttttcttttcgcattttgaagcttgctgaggttttctcaagggatggcatatctttcttggctacctctcaaaacttggttccacgaccatgggtcatcgatgacttgaacaagttccaagccaaatgggtcaagaagccttggaagaaggtcacttgtttacataattttgggtattttgcctttcgcaagagagttgctccgtcgaggaattcagacttaatctaccagttaaaggatggaaatggccaattgataggcgttgatacttcaaagcttctgattgcaaattcagggaacgatttagcggttattgatctctcaagagtatcgcacgagcttgcttacctttcatctgatgcagacttagtcatcctagaaggcatgggtcgcgggatcgagacaaacctttatgctcagttcaagtgtgattctctcaagatcggaatggtgaagcacgttgaagtagcacagtttctcggaggacgactttacgactgtgtctttaaattcaatgaagttcagagttaa

SEQ ID NO: 70652 - protein, 358 aa, Arabidopsis thaliana
  peptide (1)..(358): Ceres Seq. ID no. 2716860
MIPFPLLPTPIETNYRACTIPYRFPSDNLKKATPTEISWINVFANSIPSFKKRAESDTSVPDAPARAKIFEQRYAGFLEGWKKDPESNGGPPDGVILGRVREHLLRELGFRDIFKKVKDEENAKAISLFPEVVSLSDAIEDDGERLENLVRGIFAGNIFDLGSAQLSLFGAPTGKACPNYALFSFRILKLAEVFSRDGISFLATSQNLVPRPWVIDDLNKFQAKWVKKPWKKVTCLHNFGYFAFRKRVAPSRNSDLIYQLKDGNGQLIGVDTSKLLIANSGNDLAVIDLSRVSHELAYLSSDADLVILEGMGRGIETNLYAQFKCDSLKIGMVKHVEVAQFLGGRLYDCVFKFNEVQS

SEQ ID NO: 70653 - DNA, 2238 bp, Arabidopsis thaliana
  misc_feature (1)..(2238): Ceres Seq. ID no. 2717036
  misc_feature (1)..(2238): Ortholog of  Ceres SEQ ID NO 12586556 as cited in SEQ ID NO 64667
  misc_feature (1)..(2238): Ortholog of  Ceres SEQ ID NO 13660894 as cited in SEQ ID NO 67475
atgattacaagcttatctcaaatctcttttgggacattgaggcgctttggctcttctgttttaccttctgcactgaaacgcgaatttgttgaaggattgcgtacgttagtaaggtctggtgatatccgtcgagctgtttccttattctattctgcgccggtcgagcttcagtctcaacaggcttacgcagctctgttccaagcatgtgcagagcaacgcaatctcctcgatggaatcaacttgcaccaccacatgctctcacatccctattgttattcacagaacgttatacttgctaatttcctcattaatatgtatgccaaatgtgggaatatcttatacgcacgacaggtgtttgatacaatgcctgagaggaatgttgtttcatggactgcattgatcacaggctatgtacaggctgggaatgagcaagagggattctgtcttttctcgtctatgttatcccattgtttccctaacgagtttacgctgtcaagcgtgttaacttcatgtcgatatgagcctggaaagcaggtacatggacttgctctgaaacttggtttacattgttcgatctatgtggcgaatgcagttatctctatgtacggtaggtgtcatgatggtgccgcagcatatgaagcttggactgtgtttgaagccataaagtttaagaatttggttacttggaactcaatgattgctgcttttcagtgctgcaatcttgggaaaaaggccattggcgtttttatgcggatgcatagtgatggagtgggatttgatcgtgccacgttgcttaatatatgttcttccttgtacaaaagctctgacttagttcctaatgaggtttcaaagtgttgtcttcaactgcattctctgactgtaaaatccgggttggtgactcagactgaagtggctactgcattgattaaagtttattcagaaatgttagaagactatactgactgctacaagctttttatggaaatgagtcactgcagggacattgttgcttggaatgggattataacagcgtttgcagtgtatgatccggagagagctattcatctctttggtcagttacgtcaggagaagctaagccctgactggtatactttctcaagtgtactaaaagcttgtgcaggacttgtcactgctcgccatgctttgtctatacacgctcaagtgatcaagggtggttttttggctgacacggtgctgaacaactcattaatccatgcgtatgccaagtgtggctctcttgacttgtgtatgcgtgtatttgacgatatggattcgcgggatgttgtttcctggaactcaatgctcaaggcttactcattacatggccaagtagactcaattctaccagtctttcagaaaatggacatcaaccccgattcagcgactttcatagcccttctctcggcttgcagccacgcaggacgagtagaagaaggattgagaatattcagatccatgtttgagaaacctgaaactcttcctcagctaaatcactacgcttgtgtgatcgatatgctaagccgagctgagcgttttgctgaggcagaagaggttatcaagcagatgccaatggacccagatgctgtagtttggattgcattattgggatcatgtagaaagcacggtaacacccggttgggtaagttagcggcagataaacttaaagagctagtcgaacccacaaactcaatgagttacatccagatgtcaaacatatacaacgcagaaggtagctttaacgaagccaatcttagcataaaggagatggaaacatggagagtacggaaagaaccagacttaagctggacagagataggaaacaaggttcacgaattcgcatcgggaggaagacaccgtccggacaaggaagccgtatacagagaattgaagagactgattagttggttaaaggagatgggttacgttccagaaatgaggtcagcttcacaagatatagaagacgaagaacaggaggaagataatttattacatcacagcgagaaacttgcgttagcgtttgcggttatggagggaagaaaatcgagtgattgtggtgtgaatttgatacagattatgaagaacacaaggatctgtattgattgccataacttcatgaaattagcttctaagcttttgggaaaagagattcttatgagagactcgaatcggtttcaccatttcaaagattcttcttgctcctgtaatgactactggtaa

SEQ ID NO: 70654 - protein, 745 aa, Arabidopsis thaliana
  peptide (1)..(745): Ceres Seq. ID no. 2717037
MITSLSQISFGTLRRFGSSVLPSALKREFVEGLRTLVRSGDIRRAVSLFYSAPVELQSQQAYAALFQACAEQRNLLDGINLHHHMLSHPYCYSQNVILANFLINMYAKCGNILYARQVFDTMPERNVVSWTALITGYVQAGNEQEGFCLFSSMLSHCFPNEFTLSSVLTSCRYEPGKQVHGLALKLGLHCSIYVANAVISMYGRCHDGAAAYEAWTVFEAIKFKNLVTWNSMIAAFQCCNLGKKAIGVFMRMHSDGVGFDRATLLNICSSLYKSSDLVPNEVSKCCLQLHSLTVKSGLVTQTEVATALIKVYSEMLEDYTDCYKLFMEMSHCRDIVAWNGIITAFAVYDPERAIHLFGQLRQEKLSPDWYTFSSVLKACAGLVTARHALSIHAQVIKGGFLADTVLNNSLIHAYAKCGSLDLCMRVFDDMDSRDVVSWNSMLKAYSLHGQVDSILPVFQKMDINPDSATFIALLSACSHAGRVEEGLRIFRSMFEKPETLPQLNHYACVIDMLSRAERFAEAEEVIKQMPMDPDAVVWIALLGSCRKHGNTRLGKLAADKLKELVEPTNSMSYIQMSNIYNAEGSFNEANLSIKEMETWRVRKEPDLSWTEIGNKVHEFASGGRHRPDKEAVYRELKRLISWLKEMGYVPEMRSASQDIEDEEQEEDNLLHHSEKLALAFAVMEGRKSSDCGVNLIQIMKNTRICIDCHNFMKLASKLLGKEILMRDSNRFHHFKDSSCSCNDYW

SEQ ID NO: 70655 - protein, 661 aa, Arabidopsis thaliana
  peptide (1)..(661): Ceres Seq. ID no. 2717038
MLSHPYCYSQNVILANFLINMYAKCGNILYARQVFDTMPERNVVSWTALITGYVQAGNEQEGFCLFSSMLSHCFPNEFTLSSVLTSCRYEPGKQVHGLALKLGLHCSIYVANAVISMYGRCHDGAAAYEAWTVFEAIKFKNLVTWNSMIAAFQCCNLGKKAIGVFMRMHSDGVGFDRATLLNICSSLYKSSDLVPNEVSKCCLQLHSLTVKSGLVTQTEVATALIKVYSEMLEDYTDCYKLFMEMSHCRDIVAWNGIITAFAVYDPERAIHLFGQLRQEKLSPDWYTFSSVLKACAGLVTARHALSIHAQVIKGGFLADTVLNNSLIHAYAKCGSLDLCMRVFDDMDSRDVVSWNSMLKAYSLHGQVDSILPVFQKMDINPDSATFIALLSACSHAGRVEEGLRIFRSMFEKPETLPQLNHYACVIDMLSRAERFAEAEEVIKQMPMDPDAVVWIALLGSCRKHGNTRLGKLAADKLKELVEPTNSMSYIQMSNIYNAEGSFNEANLSIKEMETWRVRKEPDLSWTEIGNKVHEFASGGRHRPDKEAVYRELKRLISWLKEMGYVPEMRSASQDIEDEEQEEDNLLHHSEKLALAFAVMEGRKSSDCGVNLIQIMKNTRICIDCHNFMKLASKLLGKEILMRDSNRFHHFKDSSCSCNDYW

SEQ ID NO: 70656 - protein, 641 aa, Arabidopsis thaliana
  peptide (1)..(641): Ceres Seq. ID no. 2717039
MYAKCGNILYARQVFDTMPERNVVSWTALITGYVQAGNEQEGFCLFSSMLSHCFPNEFTLSSVLTSCRYEPGKQVHGLALKLGLHCSIYVANAVISMYGRCHDGAAAYEAWTVFEAIKFKNLVTWNSMIAAFQCCNLGKKAIGVFMRMHSDGVGFDRATLLNICSSLYKSSDLVPNEVSKCCLQLHSLTVKSGLVTQTEVATALIKVYSEMLEDYTDCYKLFMEMSHCRDIVAWNGIITAFAVYDPERAIHLFGQLRQEKLSPDWYTFSSVLKACAGLVTARHALSIHAQVIKGGFLADTVLNNSLIHAYAKCGSLDLCMRVFDDMDSRDVVSWNSMLKAYSLHGQVDSILPVFQKMDINPDSATFIALLSACSHAGRVEEGLRIFRSMFEKPETLPQLNHYACVIDMLSRAERFAEAEEVIKQMPMDPDAVVWIALLGSCRKHGNTRLGKLAADKLKELVEPTNSMSYIQMSNIYNAEGSFNEANLSIKEMETWRVRKEPDLSWTEIGNKVHEFASGGRHRPDKEAVYRELKRLISWLKEMGYVPEMRSASQDIEDEEQEEDNLLHHSEKLALAFAVMEGRKSSDCGVNLIQIMKNTRICIDCHNFMKLASKLLGKEILMRDSNRFHHFKDSSCSCNDYW

SEQ ID NO: 70657 - DNA, 2046 bp, Arabidopsis thaliana
  misc_feature (1)..(2046): Ceres Seq. ID no. 2717056
  misc_feature (1)..(2046): Ortholog of  Ceres SEQ ID NO 12586556 as cited in SEQ ID NO 64667
  misc_feature (1)..(2046): Ortholog of  Ceres SEQ ID NO 13660894 as cited in SEQ ID NO 67475
atgctgagtgagagtcttttcaaatctcttggacatttggccagccacggtcatttgcacgacgctttcaaaacgttttctcttcttcgtcttcaatcttcttctgcagtttcagatgacctcgttttgcattccgcggcttcccttttatccgcttgcgttgatgttcgtgcatttttagcaggggtgcaagttcacgctcactgtatttcgtcgggtgtcgaatatcactctgtgttagtcccaaagctggttaccttttactctgctttcaatctccacaatgaagctcaatcgattattgagaactctgacattttgcatcccttaccttggaatgtgctcattgcttcgtatgccaagaacgagctttttgaggaggttattgctgcttacaagagaatggtgagcaagggaatccgacccgatgccttcacttatccgtctgttcttaaggcttgtggtgaaacacttgacgttgcctttggaagggtggttcatggttccatcgaggttagctcttacaagtccagcttgtatgtttgtaatgcattgatctctatgtataaaaggtttagaaatatgggtattgctcggaggttgtttgatcgaatgtttgaaagggatgctgtctcatggaatgcagtgataaactgttatgcttcggaaggcatgtggagtgaagcgtttgagcttttcgataaaatgtggttttcaggtgttgaggtcagtgtcataacttggaatattatttctggaggttgtttgcaaacaggaaattatgtaggagctttgggtttgatctctaggatgagaaattttcctacgagcttagatcctgtggctatgattattggtttgaaggcttgctctctcataggagcaatacgattgggaaaagagattcacggtcttgctattcacagttcttatgatgggattgacaatgttcgaaacacgttgatcacaatgtactcaaaatgcaaagaccttaggcacgccttaatagtgtttcgacagactgaagaaaatagtttgtgtacttggaactctatcatttccggttatgcgcagctgaacaaatcagaagaagcctctcacctgctgagggagatgttggttgctggctttcagccaaattccattacactagcaagcattctccctctttgtgctcggattgcaaacctgcaacatggaaaagagtttcattgctacatcctgaggcgcaagtgcttcaaggactatacaatgctgtggaactcccttgttgatgtttatgcaaaatcgggaaagattgtagctgcaaagcaagtatctgatttgatgagcaaaagagacgaagtaacatacacttccttgatagatggatacggaaatcaaggtgaagggggagtagccttggccctgttcaaggagatgaccagatctggtattaaacctgaccatgtaaccgtggttgcagttctatcagcctgcagtcattccaagttagtccatgaaggtgaaaggctgtttatgaagatgcagtgtgagtatggtatacgtccttgtcttcaacatttttcttgtatggttgatctctatggcagagcaggtttcctagcaaaagccaaagacataattcacaatatgccatataagccatccggtgccacgtgggctaccctactgaacgcgtgtcacatccatgggaacacacagattggtaaatgggcagcagaaaagctcctggagatgaagccagagaacccgggatactacgtgttaattgcaaatatgtatgcagctgctggttcttggagcaagcttgctgaagtgaggactataatgagggacttgggtgtgaaaaaggatcctggctgtgcttggatcgacacagattctggattttcactgttttcggtgggggacacatcaagccctgaagcatgtaatacttatcctctattagatggactgaatcagctgatgaaagacaatgctggttatgccatcaataaggtgcaaagttcagatgaagaacttcttcaagaaatgggatga

SEQ ID NO: 70658 - protein, 681 aa, Arabidopsis thaliana
  peptide (1)..(681): Ceres Seq. ID no. 2717057
MLSESLFKSLGHLASHGHLHDAFKTFSLLRLQSSSAVSDDLVLHSAASLLSACVDVRAFLAGVQVHAHCISSGVEYHSVLVPKLVTFYSAFNLHNEAQSIIENSDILHPLPWNVLIASYAKNELFEEVIAAYKRMVSKGIRPDAFTYPSVLKACGETLDVAFGRVVHGSIEVSSYKSSLYVCNALISMYKRFRNMGIARRLFDRMFERDAVSWNAVINCYASEGMWSEAFELFDKMWFSGVEVSVITWNIISGGCLQTGNYVGALGLISRMRNFPTSLDPVAMIIGLKACSLIGAIRLGKEIHGLAIHSSYDGIDNVRNTLITMYSKCKDLRHALIVFRQTEENSLCTWNSIISGYAQLNKSEEASHLLREMLVAGFQPNSITLASILPLCARIANLQHGKEFHCYILRRKCFKDYTMLWNSLVDVYAKSGKIVAAKQVSDLMSKRDEVTYTSLIDGYGNQGEGGVALALFKEMTRSGIKPDHVTVVAVLSACSHSKLVHEGERLFMKMQCEYGIRPCLQHFSCMVDLYGRAGFLAKAKDIIHNMPYKPSGATWATLLNACHIHGNTQIGKWAAEKLLEMKPENPGYYVLIANMYAAAGSWSKLAEVRTIMRDLGVKKDPGCAWIDTDSGFSLFSVGDTSSPEACNTYPLLDGLNQLMKDNAGYAINKVQSSDEELLQEMG

SEQ ID NO: 70659 - protein, 547 aa, Arabidopsis thaliana
  peptide (1)..(547): Ceres Seq. ID no. 2717058
MVSKGIRPDAFTYPSVLKACGETLDVAFGRVVHGSIEVSSYKSSLYVCNALISMYKRFRNMGIARRLFDRMFERDAVSWNAVINCYASEGMWSEAFELFDKMWFSGVEVSVITWNIISGGCLQTGNYVGALGLISRMRNFPTSLDPVAMIIGLKACSLIGAIRLGKEIHGLAIHSSYDGIDNVRNTLITMYSKCKDLRHALIVFRQTEENSLCTWNSIISGYAQLNKSEEASHLLREMLVAGFQPNSITLASILPLCARIANLQHGKEFHCYILRRKCFKDYTMLWNSLVDVYAKSGKIVAAKQVSDLMSKRDEVTYTSLIDGYGNQGEGGVALALFKEMTRSGIKPDHVTVVAVLSACSHSKLVHEGERLFMKMQCEYGIRPCLQHFSCMVDLYGRAGFLAKAKDIIHNMPYKPSGATWATLLNACHIHGNTQIGKWAAEKLLEMKPENPGYYVLIANMYAAAGSWSKLAEVRTIMRDLGVKKDPGCAWIDTDSGFSLFSVGDTSSPEACNTYPLLDGLNQLMKDNAGYAINKVQSSDEELLQEMG

SEQ ID NO: 70660 - protein, 494 aa, Arabidopsis thaliana
  peptide (1)..(494): Ceres Seq. ID no. 2717059
MYKRFRNMGIARRLFDRMFERDAVSWNAVINCYASEGMWSEAFELFDKMWFSGVEVSVITWNIISGGCLQTGNYVGALGLISRMRNFPTSLDPVAMIIGLKACSLIGAIRLGKEIHGLAIHSSYDGIDNVRNTLITMYSKCKDLRHALIVFRQTEENSLCTWNSIISGYAQLNKSEEASHLLREMLVAGFQPNSITLASILPLCARIANLQHGKEFHCYILRRKCFKDYTMLWNSLVDVYAKSGKIVAAKQVSDLMSKRDEVTYTSLIDGYGNQGEGGVALALFKEMTRSGIKPDHVTVVAVLSACSHSKLVHEGERLFMKMQCEYGIRPCLQHFSCMVDLYGRAGFLAKAKDIIHNMPYKPSGATWATLLNACHIHGNTQIGKWAAEKLLEMKPENPGYYVLIANMYAAAGSWSKLAEVRTIMRDLGVKKDPGCAWIDTDSGFSLFSVGDTSSPEACNTYPLLDGLNQLMKDNAGYAINKVQSSDEELLQEMG

SEQ ID NO: 70661 - DNA, 1968 bp, Arabidopsis thaliana
  misc_feature (1)..(1968): Ceres Seq. ID no. 2717064
  misc_feature (1)..(1968): Ortholog of  Ceres SEQ ID NO 13598532 as cited in SEQ ID NO 65204
  misc_feature (1)..(1968): Ortholog of  Ceres SEQ ID NO 13656849 as cited in SEQ ID NO 65764
  misc_feature (1)..(1968): Ortholog of  Ceres SEQ ID NO 13656501 as cited in SEQ ID NO 69206
atgggttgtatttgtgccaccgcccgttcaccaagcgccgccgttaccgataaagatctattagattccagcaaatccatccttcaacttctccctcatcatcccccgtcgtcttcgtcttcatccaagaaggaaggatctttcacacgtacgacttcttcagcttctatcaccattgtggctaatggttatcctgtggcacgccgtccttccacttcatctgatcgaaacagcaccaaaccggtcgttgttgtgggagctccgaccagaaatccaacaagaagagtcaccgctataccggttgcacagccggcacagcagcagccagcacgtgtgatcagcaataaaacggaactccctgctgcagaatggccgtcttggctggcttctgttgctggggaggccattaaaggatgggttcctcgctgcgcagagtcctttgagaagttagacaaaattggacaggggacttacagcagcgtgtacaaagctagagaccttgaaacggggaagattgtggcgatgaagaaagttcggtttgtgaacatggatccagagagtgttcggtttatggccagggagattctcattcttcgtaagcttgatcaccccaatgttatgaagctagaaggtctagttacctctagactctcaggtagcctctaccttgtctttgagtacatggaacacgatctcgcaggtctagctgcaactcctggaatcaaattctctgaacctcagatcaagtgctatatgcagcaattgttccgtgggcttgaacattgccacagacgaggaattcttcaccgtgatattaaaggctcaaatctcttaatcaataatgaaggtgtcttgaagattggtgatttcggattggcgaatttttaccgaggtgatggagatctgcagctgaccagtcgtgttgtgaccttatggtacagagcacctgagctgttgctcggtgccactgagtatggaccagccattgacctgtggagcgccggctgcattctcactgagctcttcgccggaaaacctattatgccaggacgcacagaagtggagcagatgcacaagatctttaagctctgtggttcaccctcggaagattactggagaagagcaacactgccactagcaacaagctttaaacccagtcatccttacaagcctgttcttgctgaaacctttaaccatttcccttcatcagctctgatgctcatcaataagctactggcaatagaacctgaaaaacggggatcggctgcttctaccttgaggagcgaattcttcaccacggagccactccctgcgaatccatcaaacttacctagatatccaccaagcaaggaacttgatgccaagcttcgcaacgaagaagcaagaaaactaagggcagaaggtaacaagagaagagggggagaaactgtgacaagaggacggccaaaggatcttaaaacagcccagacaccagagtttatggctgcaggacagtccaaagtcacatgcataagccacaaattcaaaacagacgaggaaggtggcaccgggtttaggatagaaccaccaagaagagggatccagcagaatggtaaagctcatgcttcttcaatggttcacccaacagtggctgatacagaatggaacggaggtggaagcatcaaaagacaaactaatgcagagatgaagtctaggacatctcaaacaggagacttgtctggtgaatcttataggagagatcccaacagagattactcaaccggcaatgcaccaaggaaaaacagaatcaattactcaggaccattgatgcctcctggtggaaatcttgaagatttgcttaaagagcatgagaagcagatccaacaagctgtccgcaaagcacgtgtagaaaagtctgcatcaagaaaaaaccaagctttaacaggacaacaacagcagcaacgttacacaggaagaaatgctcggtag

SEQ ID NO: 70662 - protein, 655 aa, Arabidopsis thaliana
  peptide (1)..(655): Ceres Seq. ID no. 2717065
MGCICATARSPSAAVTDKDLLDSSKSILQLLPHHPPSSSSSSKKEGSFTRTTSSASITIVANGYPVARRPSTSSDRNSTKPVVVVGAPTRNPTRRVTAIPVAQPAQQQPARVISNKTELPAAEWPSWLASVAGEAIKGWVPRCAESFEKLDKIGQGTYSSVYKARDLETGKIVAMKKVRFVNMDPESVRFMAREILILRKLDHPNVMKLEGLVTSRLSGSLYLVFEYMEHDLAGLAATPGIKFSEPQIKCYMQQLFRGLEHCHRRGILHRDIKGSNLLINNEGVLKIGDFGLANFYRGDGDLQLTSRVVTLWYRAPELLLGATEYGPAIDLWSAGCILTELFAGKPIMPGRTEVEQMHKIFKLCGSPSEDYWRRATLPLATSFKPSHPYKPVLAETFNHFPSSALMLINKLLAIEPEKRGSAASTLRSEFFTTEPLPANPSNLPRYPPSKELDAKLRNEEARKLRAEGNKRRGGETVTRGRPKDLKTAQTPEFMAAGQSKVTCISHKFKTDEEGGTGFRIEPPRRGIQQNGKAHASSMVHPTVADTEWNGGGSIKRQTNAEMKSRTSQTGDLSGESYRRDPNRDYSTGNAPRKNRINYSGPLMPPGGNLEDLLKEHEKQIQQAVRKARVEKSASRKNQALTGQQQQQRYTGRNAR

SEQ ID NO: 70663 - protein, 481 aa, Arabidopsis thaliana
  peptide (1)..(481): Ceres Seq. ID no. 2717066
MKKVRFVNMDPESVRFMAREILILRKLDHPNVMKLEGLVTSRLSGSLYLVFEYMEHDLAGLAATPGIKFSEPQIKCYMQQLFRGLEHCHRRGILHRDIKGSNLLINNEGVLKIGDFGLANFYRGDGDLQLTSRVVTLWYRAPELLLGATEYGPAIDLWSAGCILTELFAGKPIMPGRTEVEQMHKIFKLCGSPSEDYWRRATLPLATSFKPSHPYKPVLAETFNHFPSSALMLINKLLAIEPEKRGSAASTLRSEFFTTEPLPANPSNLPRYPPSKELDAKLRNEEARKLRAEGNKRRGGETVTRGRPKDLKTAQTPEFMAAGQSKVTCISHKFKTDEEGGTGFRIEPPRRGIQQNGKAHASSMVHPTVADTEWNGGGSIKRQTNAEMKSRTSQTGDLSGESYRRDPNRDYSTGNAPRKNRINYSGPLMPPGGNLEDLLKEHEKQIQQAVRKARVEKSASRKNQALTGQQQQQRYTGRNAR

SEQ ID NO: 70664 - protein, 473 aa, Arabidopsis thaliana
  peptide (1)..(473): Ceres Seq. ID no. 2717067
MDPESVRFMAREILILRKLDHPNVMKLEGLVTSRLSGSLYLVFEYMEHDLAGLAATPGIKFSEPQIKCYMQQLFRGLEHCHRRGILHRDIKGSNLLINNEGVLKIGDFGLANFYRGDGDLQLTSRVVTLWYRAPELLLGATEYGPAIDLWSAGCILTELFAGKPIMPGRTEVEQMHKIFKLCGSPSEDYWRRATLPLATSFKPSHPYKPVLAETFNHFPSSALMLINKLLAIEPEKRGSAASTLRSEFFTTEPLPANPSNLPRYPPSKELDAKLRNEEARKLRAEGNKRRGGETVTRGRPKDLKTAQTPEFMAAGQSKVTCISHKFKTDEEGGTGFRIEPPRRGIQQNGKAHASSMVHPTVADTEWNGGGSIKRQTNAEMKSRTSQTGDLSGESYRRDPNRDYSTGNAPRKNRINYSGPLMPPGGNLEDLLKEHEKQIQQAVRKARVEKSASRKNQALTGQQQQQRYTGRNAR

SEQ ID NO: 70665 - DNA, 2712 bp, Arabidopsis thaliana
  misc_feature (1)..(2712): Ceres Seq. ID no. 2717204
  misc_feature (1)..(2712): Ortholog of  Ceres SEQ ID NO 13657677 as cited in SEQ ID NO 66119
atggaacaatctcttgtgaaggctttgttgaagaacacgaacaatccgagattagcatggagaatcttcaagaggatattctcttctccttcagaagaaagccatggcatttctttagatgcgactcctacaatcgctcgtatcctggttcgagccaaaatgcacgaagaaatccaagagcttcacaatcttatactctcttcttcaatccaaaagacgaaactttcgtctcttctctctgttgtatccatcttcgcgaaatcgaatcacattgataaggcgtttccgcagtttcagttagtacggtcgcggtttcctgagaacaaacctagcgtttatctgtataatttgttgcttgaaagttgcataaaggaacgacgtgtggagttcgtttcgtggttgtataaagatatggttttgtgtgggattgctccacagacttatacttttaatctcttgatacgtgctttgtgtgattcaagttgtgttgatgctgctcgagagttgttcgacgaaatgcctgagaaaggttgtaagccaaatgagtttacttttgggattttggttcgtgggtattgtaaagctggtttgactgataaagggcttgaattgttgaatgcaatggaaagttttggggttttgcctaataaagttatctataacaccattgtttcgagcttctgtagagaaggtaggaatgatgattctgaaaagatggtggagaagatgcgggaggaaggtttggtgcctgatattgtcacttttaactctaggatatcagcgctttgtaaagaaggaaaggttttggatgcgtctagaattttcagtgatatggagctagatgagtatctgggtcttcctcgtcccaatagtataacatataacttgatgttgaaaggtttctgtaaggtagggttgctggaagatgccaagaccctctttgagtcgattagagaaaatgatgatctcgctagcttgcagagttacaatatttggctgcagggtttggtcagacatgggaagtttatagaggctgaaacagtcctgaagcaaatgactgataagggaataggaccaagtatttattcttacaatatcttgatggatggattgtgtaaattgggcatgctatccgatgcaaaaactattgttggtttgatgaaaagaaatggtgtttgcccggatgctgtaacttatggctgccttcttcatggttattgcagtgttgggaaagtcgatgcagctaaaagcttgttgcaggagatgatgaggaataattgtttaccaaatgcttatacttgcaatattttgctacatagcctttggaagatggggagaatatctgaagcggaagagttgctgcgaaagatgaatgagaaaggttatggactagacactgtcacctgcaacattatcgttgacggactctgtggaagcggggaattagataaagctattgagatagttaagggaatgcgggtgcatggaagtgctgctcttggtaacttaggcaattcatatatcggactggtggatgatagcttgatcgagaacaactgtttgcctgacctgatcacgtattcaactttacttaatggtttgtgcaaagctggaaggtttgctgaagcaaaaaatttgtttgccgagatgatgggagagaaactgcaaccggactcggtcgcatataacattttcattcatcatttctgcaaacaggggaaaatatcatctgcatttcgcgttctcaaagacatggagaagaaaggttgtcataagagcctagagacttataactcactgatcctgggcttaggcataaaaaaccagatttttgaaattcatggactgatggatgagatgaaagaaaagggcatttcaccaaatatatgcacctacaatactgcaatccagtatctttgtgagggagaaaaagttgaagatgcaactaacctccttgatgaaatgatgcaaaagaacatagccccaaatgtattttccttcaaatatttgattgaagcgttctgtaaggtccctgattttgatatggcccaagaagtctttgagactgctgtaagtatctgtggacagaaagaaggcctgtacagcttgatgttcaatgagttgcttgctgcagggcaactactaaaggctacggagttgctcgaagctgttttagatagaggttttgagttggggacttttctttataaagatcttgttgagagcttatgtaagaaggatgaactagaagtagctagtggaattttgcataagatgatagacagaggatatggatttgaccctgcagcattgatgcctgtgatagatggcttaggtaagatgggaaacaagaaagaggcaaacagttttgctgataagatgatggaaatggcttcagttggtgaagtagcaaacaaagtcgatccaaatgcaagggatatacaccagaaaaagcataataagaatggtggaaacaactggcagaatatattacacagagatgacggtagtggaattgcgttaaggtctctgtcaagagttaaaaaaggatggggtcaaggggatatatcaagctttcagcctccaagagttgactacttagactactgggaggacgatgctaagctggtagaaccagacaagacgacatggctggacaaatatatccttgttagaacgacgtttaaacataagagctgcctgctttcataa

SEQ ID NO: 70666 - protein, 903 aa, Arabidopsis thaliana
  peptide (1)..(903): Ceres Seq. ID no. 2717205
MEQSLVKALLKNTNNPRLAWRIFKRIFSSPSEESHGISLDATPTIARILVRAKMHEEIQELHNLILSSSIQKTKLSSLLSVVSIFAKSNHIDKAFPQFQLVRSRFPENKPSVYLYNLLLESCIKERRVEFVSWLYKDMVLCGIAPQTYTFNLLIRALCDSSCVDAARELFDEMPEKGCKPNEFTFGILVRGYCKAGLTDKGLELLNAMESFGVLPNKVIYNTIVSSFCREGRNDDSEKMVEKMREEGLVPDIVTFNSRISALCKEGKVLDASRIFSDMELDEYLGLPRPNSITYNLMLKGFCKVGLLEDAKTLFESIRENDDLASLQSYNIWLQGLVRHGKFIEAETVLKQMTDKGIGPSIYSYNILMDGLCKLGMLSDAKTIVGLMKRNGVCPDAVTYGCLLHGYCSVGKVDAAKSLLQEMMRNNCLPNAYTCNILLHSLWKMGRISEAEELLRKMNEKGYGLDTVTCNIIVDGLCGSGELDKAIEIVKGMRVHGSAALGNLGNSYIGLVDDSLIENNCLPDLITYSTLLNGLCKAGRFAEAKNLFAEMMGEKLQPDSVAYNIFIHHFCKQGKISSAFRVLKDMEKKGCHKSLETYNSLILGLGIKNQIFEIHGLMDEMKEKGISPNICTYNTAIQYLCEGEKVEDATNLLDEMMQKNIAPNVFSFKYLIEAFCKVPDFDMAQEVFETAVSICGQKEGLYSLMFNELLAAGQLLKATELLEAVLDRGFELGTFLYKDLVESLCKKDELEVASGILHKMIDRGYGFDPAALMPVIDGLGKMGNKKEANSFADKMMEMASVGEVANKVDPNARDIHQKKHNKNGGNNWQNILHRDDGSGIALRSLSRVKKGWGQGDISSFQPPRVDYLDYWEDDAKLVEPDKTTWLDKYILVRTTFKHKSCLLS

SEQ ID NO: 70667 - protein, 850 aa, Arabidopsis thaliana
  peptide (1)..(850): Ceres Seq. ID no. 2717206
MHEEIQELHNLILSSSIQKTKLSSLLSVVSIFAKSNHIDKAFPQFQLVRSRFPENKPSVYLYNLLLESCIKERRVEFVSWLYKDMVLCGIAPQTYTFNLLIRALCDSSCVDAARELFDEMPEKGCKPNEFTFGILVRGYCKAGLTDKGLELLNAMESFGVLPNKVIYNTIVSSFCREGRNDDSEKMVEKMREEGLVPDIVTFNSRISALCKEGKVLDASRIFSDMELDEYLGLPRPNSITYNLMLKGFCKVGLLEDAKTLFESIRENDDLASLQSYNIWLQGLVRHGKFIEAETVLKQMTDKGIGPSIYSYNILMDGLCKLGMLSDAKTIVGLMKRNGVCPDAVTYGCLLHGYCSVGKVDAAKSLLQEMMRNNCLPNAYTCNILLHSLWKMGRISEAEELLRKMNEKGYGLDTVTCNIIVDGLCGSGELDKAIEIVKGMRVHGSAALGNLGNSYIGLVDDSLIENNCLPDLITYSTLLNGLCKAGRFAEAKNLFAEMMGEKLQPDSVAYNIFIHHFCKQGKISSAFRVLKDMEKKGCHKSLETYNSLILGLGIKNQIFEIHGLMDEMKEKGISPNICTYNTAIQYLCEGEKVEDATNLLDEMMQKNIAPNVFSFKYLIEAFCKVPDFDMAQEVFETAVSICGQKEGLYSLMFNELLAAGQLLKATELLEAVLDRGFELGTFLYKDLVESLCKKDELEVASGILHKMIDRGYGFDPAALMPVIDGLGKMGNKKEANSFADKMMEMASVGEVANKVDPNARDIHQKKHNKNGGNNWQNILHRDDGSGIALRSLSRVKKGWGQGDISSFQPPRVDYLDYWEDDAKLVEPDKTTWLDKYILVRTTFKHKSCLLS

SEQ ID NO: 70668 - protein, 766 aa, Arabidopsis thaliana
  peptide (1)..(766): Ceres Seq. ID no. 2717207
MVLCGIAPQTYTFNLLIRALCDSSCVDAARELFDEMPEKGCKPNEFTFGILVRGYCKAGLTDKGLELLNAMESFGVLPNKVIYNTIVSSFCREGRNDDSEKMVEKMREEGLVPDIVTFNSRISALCKEGKVLDASRIFSDMELDEYLGLPRPNSITYNLMLKGFCKVGLLEDAKTLFESIRENDDLASLQSYNIWLQGLVRHGKFIEAETVLKQMTDKGIGPSIYSYNILMDGLCKLGMLSDAKTIVGLMKRNGVCPDAVTYGCLLHGYCSVGKVDAAKSLLQEMMRNNCLPNAYTCNILLHSLWKMGRISEAEELLRKMNEKGYGLDTVTCNIIVDGLCGSGELDKAIEIVKGMRVHGSAALGNLGNSYIGLVDDSLIENNCLPDLITYSTLLNGLCKAGRFAEAKNLFAEMMGEKLQPDSVAYNIFIHHFCKQGKISSAFRVLKDMEKKGCHKSLETYNSLILGLGIKNQIFEIHGLMDEMKEKGISPNICTYNTAIQYLCEGEKVEDATNLLDEMMQKNIAPNVFSFKYLIEAFCKVPDFDMAQEVFETAVSICGQKEGLYSLMFNELLAAGQLLKATELLEAVLDRGFELGTFLYKDLVESLCKKDELEVASGILHKMIDRGYGFDPAALMPVIDGLGKMGNKKEANSFADKMMEMASVGEVANKVDPNARDIHQKKHNKNGGNNWQNILHRDDGSGIALRSLSRVKKGWGQGDISSFQPPRVDYLDYWEDDAKLVEPDKTTWLDKYILVRTTFKHKSCLLS

SEQ ID NO: 70669 - DNA, 2097 bp, Arabidopsis thaliana
  misc_feature (1)..(2097): Ceres Seq. ID no. 2717235
  misc_feature (1)..(2097): Ortholog of  Ceres SEQ ID NO 13593911 as cited in SEQ ID NO 52935
atggatttcagaaattccttcaaatctcatagctcatacaaacaaattcgaagccccggagatcaaagcgagccaagccctgaacatctgccaattctccacgatcaccatcctgatcattccggcatggtggtcgatgaccagaaacccgacagcactcgttctagcctcgacgatggtcgtaacgcgcctgtagaacgtgatgccagttacaaattctggcaagacaacactactggaacgtcaacggatcacacggcggtgagaacaagtgataaagatccaatcgctattagtcgaaaaggcgatagattaagcggtagtttcgatttcgtgcacgggaagctaccggttgatgaatctccaacgaaaatggtcgctggagagcctgtgaatcggcaatggagaggtagaaataatgaagagatcacacttgatgttgatcaagaaaatgatgatgtaagtcaccaaacaatgcctacgcctacatcaacggctcgaacctcgtttgatgcgtctagagaaatgcgagtctcttttaacgttcgtagagcgggtggtgcgtttgtcgctggttcggttccttcttcgtcttcccattcgtcttcttcttcgtccgcgacaatgcggacgaatcaggatcagccgcaactgcaggaggaagaggttgtgagatgtacttcgaacatgtcgtttcagaggaaatcagagcttatatctagagtgaagacaaggtctaggcttcaagatccgccacgtgaggaagaaacgccttactcgggttggagatcgggtcagttgaaatccgggttacttgcggatattgatgaagaggatgatccattagcggaagaagatgtaccagatgagtataaaagagggaagcttgacgccattacattgctccagtggcttagcttagtcgctattatagctgcattagcgtgtagtttgtcgattcagtcttggaagaaagttagagtttggaatcttcatctatggaaatgggaagtgttcttgttggttcttatatgtgggaggttggtttcgggttggggaatccgaatcgttgtcttcttcatcgagagaaacttccttttgcggaagcgggttctttacttcgtttacggtgtgcgtagagctgttcagaactgtctatggctaggcctagtccttctcgcttggcacttcttgttcgacaagaaagtacagagggagacaaggagcaggatgaatcataagaacatctctgcttggaacatgaagagactaatgaagattgtgagaaatgtttctctgaccacactggacgaacagatgctagaaagcacatacgaagatgaatccacccgccagatacgaagcgaaaaagaggctaaagcagctgcaaggaagattttcaagaacgttgagcaacgtggcgcaaaagagcgacgagctcttgccctgacactcaacgacaccaagacagcagtgaacaagctccatcacatgattaatattgtcactgccatagtcattgttgtcatttggcttgtccttcttgaaattgcttcctccaaggtacttctctttgtaagttcacaagttgtactcttggccttcatctttgggaacactgtcaagaccgtcttcgagtccatcatcttcttattcatcgtacacccttacgatgttggtgatcggtgtgagattgacagtgtacagttggtggtggaggagatgaacatactcactaccgtgttcttacgatacgacaatctgaagattatgtatccgaatagtcttttgtggcagaaatcaatcaacaattactaccgcagtccggatatgggagatgcaatcgagttctgtgtccacattactactcctcttgaaaaaatctccgtgatcaaacagagaatatcgaagattaatcaccaagacatggctgaaagatggacaagaagagccgtcttagtcgaagaagtgattaagatactcctcgagctcgacattcaacaccggttttatccgctcgatatcaatgtccgaacaatgcctaccgttgtctctagcagagttccacctggctggtcacaaaaccaacctgcctga

SEQ ID NO: 70670 - protein, 698 aa, Arabidopsis thaliana
  peptide (1)..(698): Ceres Seq. ID no. 2717236
MDFRNSFKSHSSYKQIRSPGDQSEPSPEHLPILHDHHPDHSGMVVDDQKPDSTRSSLDDGRNAPVERDASYKFWQDNTTGTSTDHTAVRTSDKDPIAISRKGDRLSGSFDFVHGKLPVDESPTKMVAGEPVNRQWRGRNNEEITLDVDQENDDVSHQTMPTPTSTARTSFDASREMRVSFNVRRAGGAFVAGSVPSSSSHSSSSSSATMRTNQDQPQLQEEEVVRCTSNMSFQRKSELISRVKTRSRLQDPPREEETPYSGWRSGQLKSGLLADIDEEDDPLAEEDVPDEYKRGKLDAITLLQWLSLVAIIAALACSLSIQSWKKVRVWNLHLWKWEVFLLVLICGRLVSGWGIRIVVFFIERNFLLRKRVLYFVYGVRRAVQNCLWLGLVLLAWHFLFDKKVQRETRSRMNHKNISAWNMKRLMKIVRNVSLTTLDEQMLESTYEDESTRQIRSEKEAKAAARKIFKNVEQRGAKERRALALTLNDTKTAVNKLHHMINIVTAIVIVVIWLVLLEIASSKVLLFVSSQVVLLAFIFGNTVKTVFESIIFLFIVHPYDVGDRCEIDSVQLVVEEMNILTTVFLRYDNLKIMYPNSLLWQKSINNYYRSPDMGDAIEFCVHITTPLEKISVIKQRISKINHQDMAERWTRRAVLVEEVIKILLELDIQHRFYPLDINVRTMPTVVSSRVPPGWSQNQPA

SEQ ID NO: 70671 - protein, 656 aa, Arabidopsis thaliana
  peptide (1)..(656): Ceres Seq. ID no. 2717237
MVVDDQKPDSTRSSLDDGRNAPVERDASYKFWQDNTTGTSTDHTAVRTSDKDPIAISRKGDRLSGSFDFVHGKLPVDESPTKMVAGEPVNRQWRGRNNEEITLDVDQENDDVSHQTMPTPTSTARTSFDASREMRVSFNVRRAGGAFVAGSVPSSSSHSSSSSSATMRTNQDQPQLQEEEVVRCTSNMSFQRKSELISRVKTRSRLQDPPREEETPYSGWRSGQLKSGLLADIDEEDDPLAEEDVPDEYKRGKLDAITLLQWLSLVAIIAALACSLSIQSWKKVRVWNLHLWKWEVFLLVLICGRLVSGWGIRIVVFFIERNFLLRKRVLYFVYGVRRAVQNCLWLGLVLLAWHFLFDKKVQRETRSRMNHKNISAWNMKRLMKIVRNVSLTTLDEQMLESTYEDESTRQIRSEKEAKAAARKIFKNVEQRGAKERRALALTLNDTKTAVNKLHHMINIVTAIVIVVIWLVLLEIASSKVLLFVSSQVVLLAFIFGNTVKTVFESIIFLFIVHPYDVGDRCEIDSVQLVVEEMNILTTVFLRYDNLKIMYPNSLLWQKSINNYYRSPDMGDAIEFCVHITTPLEKISVIKQRISKINHQDMAERWTRRAVLVEEVIKILLELDIQHRFYPLDINVRTMPTVVSSRVPPGWSQNQPA

SEQ ID NO: 70672 - protein, 574 aa, Arabidopsis thaliana
  peptide (1)..(574): Ceres Seq. ID no. 2717238
MVAGEPVNRQWRGRNNEEITLDVDQENDDVSHQTMPTPTSTARTSFDASREMRVSFNVRRAGGAFVAGSVPSSSSHSSSSSSATMRTNQDQPQLQEEEVVRCTSNMSFQRKSELISRVKTRSRLQDPPREEETPYSGWRSGQLKSGLLADIDEEDDPLAEEDVPDEYKRGKLDAITLLQWLSLVAIIAALACSLSIQSWKKVRVWNLHLWKWEVFLLVLICGRLVSGWGIRIVVFFIERNFLLRKRVLYFVYGVRRAVQNCLWLGLVLLAWHFLFDKKVQRETRSRMNHKNISAWNMKRLMKIVRNVSLTTLDEQMLESTYEDESTRQIRSEKEAKAAARKIFKNVEQRGAKERRALALTLNDTKTAVNKLHHMINIVTAIVIVVIWLVLLEIASSKVLLFVSSQVVLLAFIFGNTVKTVFESIIFLFIVHPYDVGDRCEIDSVQLVVEEMNILTTVFLRYDNLKIMYPNSLLWQKSINNYYRSPDMGDAIEFCVHITTPLEKISVIKQRISKINHQDMAERWTRRAVLVEEVIKILLELDIQHRFYPLDINVRTMPTVVSSRVPPGWSQNQPA

SEQ ID NO: 70673 - DNA, 2550 bp, Arabidopsis thaliana
  misc_feature (1)..(2550): Ceres Seq. ID no. 2717239
  misc_feature (1)..(2550): Ortholog of  Ceres SEQ ID NO 13593911 as cited in SEQ ID NO 52935
atggaattccgcaaaccctttaagtctcatagctcgtataaacagattataagcaccggagatcaaaacgagaagacaaagaagaagaagaaactggcgaatcttgacgatggcgacattgctaaaactcagagctctgggtctagtttcgatggaaacagctataagttctggcaagacattgcaacagatgattatacaaagagcgggagtttcgatttcccgcaataccgtgaggagatcacactcgatgtaaacgaagaaacagaggaaacagaggatgtcagcaacaacaacaatttgtccggttctaaagaaacgagagtctttttcaaaataaacagttcaggaactaataatatgtctggttctgtacgttcttgtacatcttcgacttcgttttcatcggccacaatgcggttaaatttagagcagcagttggaggatgaaggagaggtggttgtaagatgttcatcggtgaggaaaacagagctagtttcgagggcgaaggcgagatcgaggttgatagatccgccacaagaagaggaacaacaatactcgagctggatcgggacatcggatcagttaagatcaggtttacttgggagacactccgatgatattgaggaagaagatgattcttcggctgaagaagatgttccagtggaatatcgaaagttgaaaatggatgcgataacgttgcttcaatggatgagcttaatcgcactcgtagttgcgttagtgttgagtctagggcttcatacttggagaaatgcaactctatggagccttcatctgtggaaatgggaagtggtcttgctggttctcatctgtgggaggctggtttcgggatgcggaatccgaatcatcgtcttctttatcgaaagaaacttccttttgaggaaacgggttctttacttcgtatacggtgtgaagactgctgttcagaactgtctctggctcggcctcgtgcttctcgcttggcatttcttgtttgacaagaaagtagaaaaggaaacacaaagcgatgttcttcttcttatgtctaaaatattagtgtgttttttgttgagcacggtcttatggctgatcaagacactggtggtgaaagttctagcctcttcgttccacgttagtacctactttgatcggattcaagaagctctgtttcatcattacttgatcgagacgttatctggacctccaatgcttgagttaagcaggattgaggaagaggaagatcggacgcaagatgagatctacaagatgcagaaaggaggagctgatttatcacctgaactttgttccgctgcgtttcctcaggaaaaaagtggaagtacaatgaacatgaagttctctccaatcattccaaagacgggaagtgataacggaatcacaatggatgatttacacaagatgaatcagaaaaacgtttcagcttggaacatgaagagactgatgaagattgtgagaaatgtttccctgagtacgttggacgaacaagcgcttcaaaacacgtgtgaagatgaatccactcgacagatacggagcgaaaaagaagctaaagcagctgcaaggaagattttcaagaacgtagctcaacctggcacaaaacacatatatctggaggacttgatgagatttttgcgagtagacgaggcgatgaagacaatgtgtctcttcgaaggcgccttagtgaccaaaaagattactaaatcagccttgaagaactggctggtaaatgctttcagagagagaagagcacttgccttaacactcaatgacaccaaaacagcagtgaacaaactccatcacatgattagttttctcactgccattgtcatcatagtcatatggctgatccttcttgaaatcgctacttccaagtatcttttatttctaacttcacaagttgtactcttagccttcatgtttgggaactctctcaagaccgtcttcgagtcaatcatcttcctcttcatcattcacccttacgatgttggtgatcggttactcatcgacactgtagagatggtggtggaggaaatgaacattctcacaacagttttcttgagagctgacaatctgaagattgtgtatccaaatattcttctatggcagaaagcgatccacaattacaaccgtagtccggatatgggagatgaagttacatgctgtgtccacattactactcctcctgaaaagattgctgcaatcaaacaaagaatatcaagctacattgatagcaagccagagtattggtatccaaaagctgatgtcattgtaaaggatgtggaagatttgaacattgtgaggatagcaatatggctatgtcataaaattaaccatcaaaacatgggagagagatttacaagaagagcgttgttgatcgaggaagtaatcaaaatcctcctcgaactcgacattcaataccggtttcatccacttgacatcaatgttaaaaccatgccaacagttgtctcgagcagagttccacctgcctggtcacaaaaccctgatttaaggcgaattattcttcttgaatgttaa

SEQ ID NO: 70674 - protein, 849 aa, Arabidopsis thaliana
  peptide (1)..(849): Ceres Seq. ID no. 2717240
MEFRKPFKSHSSYKQIISTGDQNEKTKKKKKLANLDDGDIAKTQSSGSSFDGNSYKFWQDIATDDYTKSGSFDFPQYREEITLDVNEETEETEDVSNNNNLSGSKETRVFFKINSSGTNNMSGSVRSCTSSTSFSSATMRLNLEQQLEDEGEVVVRCSSVRKTELVSRAKARSRLIDPPQEEEQQYSSWIGTSDQLRSGLLGRHSDDIEEEDDSSAEEDVPVEYRKLKMDAITLLQWMSLIALVVALVLSLGLHTWRNATLWSLHLWKWEVVLLVLICGRLVSGCGIRIIVFFIERNFLLRKRVLYFVYGVKTAVQNCLWLGLVLLAWHFLFDKKVEKETQSDVLLLMSKILVCFLLSTVLWLIKTLVVKVLASSFHVSTYFDRIQEALFHHYLIETLSGPPMLELSRIEEEEDRTQDEIYKMQKGGADLSPELCSAAFPQEKSGSTMNMKFSPIIPKTGSDNGITMDDLHKMNQKNVSAWNMKRLMKIVRNVSLSTLDEQALQNTCEDESTRQIRSEKEAKAAARKIFKNVAQPGTKHIYLEDLMRFLRVDEAMKTMCLFEGALVTKKITKSALKNWLVNAFRERRALALTLNDTKTAVNKLHHMISFLTAIVIIVIWLILLEIATSKYLLFLTSQVVLLAFMFGNSLKTVFESIIFLFIIHPYDVGDRLLIDTVEMVVEEMNILTTVFLRADNLKIVYPNILLWQKAIHNYNRSPDMGDEVTCCVHITTPPEKIAAIKQRISSYIDSKPEYWYPKADVIVKDVEDLNIVRIAIWLCHKINHQNMGERFTRRALLIEEVIKILLELDIQYRFHPLDINVKTMPTVVSSRVPPAWSQNPDLRRIILLEC

SEQ ID NO: 70675 - protein, 729 aa, Arabidopsis thaliana
  peptide (1)..(729): Ceres Seq. ID no. 2717241
MSGSVRSCTSSTSFSSATMRLNLEQQLEDEGEVVVRCSSVRKTELVSRAKARSRLIDPPQEEEQQYSSWIGTSDQLRSGLLGRHSDDIEEEDDSSAEEDVPVEYRKLKMDAITLLQWMSLIALVVALVLSLGLHTWRNATLWSLHLWKWEVVLLVLICGRLVSGCGIRIIVFFIERNFLLRKRVLYFVYGVKTAVQNCLWLGLVLLAWHFLFDKKVEKETQSDVLLLMSKILVCFLLSTVLWLIKTLVVKVLASSFHVSTYFDRIQEALFHHYLIETLSGPPMLELSRIEEEEDRTQDEIYKMQKGGADLSPELCSAAFPQEKSGSTMNMKFSPIIPKTGSDNGITMDDLHKMNQKNVSAWNMKRLMKIVRNVSLSTLDEQALQNTCEDESTRQIRSEKEAKAAARKIFKNVAQPGTKHIYLEDLMRFLRVDEAMKTMCLFEGALVTKKITKSALKNWLVNAFRERRALALTLNDTKTAVNKLHHMISFLTAIVIIVIWLILLEIATSKYLLFLTSQVVLLAFMFGNSLKTVFESIIFLFIIHPYDVGDRLLIDTVEMVVEEMNILTTVFLRADNLKIVYPNILLWQKAIHNYNRSPDMGDEVTCCVHITTPPEKIAAIKQRISSYIDSKPEYWYPKADVIVKDVEDLNIVRIAIWLCHKINHQNMGERFTRRALLIEEVIKILLELDIQYRFHPLDINVKTMPTVVSSRVPPAWSQNPDLRRIILLEC

SEQ ID NO: 70676 - protein, 711 aa, Arabidopsis thaliana
  peptide (1)..(711): Ceres Seq. ID no. 2717242
MRLNLEQQLEDEGEVVVRCSSVRKTELVSRAKARSRLIDPPQEEEQQYSSWIGTSDQLRSGLLGRHSDDIEEEDDSSAEEDVPVEYRKLKMDAITLLQWMSLIALVVALVLSLGLHTWRNATLWSLHLWKWEVVLLVLICGRLVSGCGIRIIVFFIERNFLLRKRVLYFVYGVKTAVQNCLWLGLVLLAWHFLFDKKVEKETQSDVLLLMSKILVCFLLSTVLWLIKTLVVKVLASSFHVSTYFDRIQEALFHHYLIETLSGPPMLELSRIEEEEDRTQDEIYKMQKGGADLSPELCSAAFPQEKSGSTMNMKFSPIIPKTGSDNGITMDDLHKMNQKNVSAWNMKRLMKIVRNVSLSTLDEQALQNTCEDESTRQIRSEKEAKAAARKIFKNVAQPGTKHIYLEDLMRFLRVDEAMKTMCLFEGALVTKKITKSALKNWLVNAFRERRALALTLNDTKTAVNKLHHMISFLTAIVIIVIWLILLEIATSKYLLFLTSQVVLLAFMFGNSLKTVFESIIFLFIIHPYDVGDRLLIDTVEMVVEEMNILTTVFLRADNLKIVYPNILLWQKAIHNYNRSPDMGDEVTCCVHITTPPEKIAAIKQRISSYIDSKPEYWYPKADVIVKDVEDLNIVRIAIWLCHKINHQNMGERFTRRALLIEEVIKILLELDIQYRFHPLDINVKTMPTVVSSRVPPAWSQNPDLRRIILLEC

SEQ ID NO: 70677 - DNA, 1845 bp, Arabidopsis thaliana
  misc_feature (1)..(1845): Ceres Seq. ID no. 2717493
  misc_feature (1)..(1845): Ortholog of  Ceres SEQ ID NO 13600220 as cited in SEQ ID NO 0
atggctacagctactctcactcttttcctagggctcttagccttaactagtaccatacttagcttcaacgccgatgctaggcctcaaccaagtgatgaggatcttggtaccatcattggacctcatcaaactagcttcgatgacgagataggcatcgtgattggaccacatgcgaccgtagatgacgaagacattgacatggacatgggcaccaccgttggaccgcagaccaacctaaatgatgatgatttgggcaccatcattggacccgagtttgagatccacaagcaagatttccccgcagatttcatatttggaacatctgtttccgcatatcaggttgaaggtgctaaaaagggttctgggagaggcttgacctcatgggacgaatttacacacatgtttcctgagaaggttcaacaaaatggcgatggagatgagggagtcgacttctatacccgttacaaggatgatataaaattaatgaaggagttgaacacgaatggcttcagattttcaatctcatggaccaggatcttgccttatggaactattaaaaaaggtgtaaacgaggagggggtgaagttctacaacgatcttataaatgaacttttagctaatggaattcagccttcggttactctctttcactgggaatctccacttgctctagaaatggagtacggaggtttcctaaacgaaaggatagtagaggatttccgtgagtttgcaaacttttgcttcaaggaatttggagatagggtgaagaattgggcgacgtttaacgagccatcggtatacagcgttgctggttactcgaaaggtaagaaagcaccaggacggtgctctaaatggcaagccccaaaatgtcccacaggagattcatccgaggagccatacatagttgctcacaaccaaattcttgctcatcttgctgctgttgatgaattccgaaactgtaaaaaggtcgagggtggagggaaaattgggatagtgttggtatctcactggttcgagcctaaagatccaaattcgagtgaagacgtcaaagcagctagacgatccctcgagtaccaactcggctggtttcttcgccctctcacatatggacagtatccagcggaaatgttagaagatgtaaacatccgactgcgtgaatttacaccagaagaatctgagaaactaagaaaatctttggatttcgtcggattaaattactatggagcattcttctctacccctctcgccaaagtcaattcatcgcagcttaattatgagaccgacttacgtgtaaactggacagttattactaataacctaagtcttcctgatttgcagacaacttcaatgggtatagtgatatatccagcgggtttgaagaatatcttgaaacatatcaaagacgaatacatggacccagagatttacattatggagaatgggatggacgagatcgactatgggaccaaaaacataacggaagctactaacgattacgggaggaaagagttcatcaagagtcacatcttaatcatgggtaaatccatcaggatggacaaagtgaggctgaagggttactacatatggtcgttaatggacaacttcgagtgggataaaggttataaagtcaggttcgggctctattacgtcgattataatgacaacatgaaacgttatataaggtcatctggaaaatggctaagtgagtttcttgattccaaagagactctccataaatgctatttcgagggccatcgtgagaaaggatatgcacccaagttgttcgacgttgagtatctggaacctgagaactcgcagctaagttacaggagcgattttatgtga

SEQ ID NO: 70678 - protein, 614 aa, Arabidopsis thaliana
  peptide (1)..(614): Ceres Seq. ID no. 2717494
MATATLTLFLGLLALTSTILSFNADARPQPSDEDLGTIIGPHQTSFDDEIGIVIGPHATVDDEDIDMDMGTTVGPQTNLNDDDLGTIIGPEFEIHKQDFPADFIFGTSVSAYQVEGAKKGSGRGLTSWDEFTHMFPEKVQQNGDGDEGVDFYTRYKDDIKLMKELNTNGFRFSISWTRILPYGTIKKGVNEEGVKFYNDLINELLANGIQPSVTLFHWESPLALEMEYGGFLNERIVEDFREFANFCFKEFGDRVKNWATFNEPSVYSVAGYSKGKKAPGRCSKWQAPKCPTGDSSEEPYIVAHNQILAHLAAVDEFRNCKKVEGGGKIGIVLVSHWFEPKDPNSSEDVKAARRSLEYQLGWFLRPLTYGQYPAEMLEDVNIRLREFTPEESEKLRKSLDFVGLNYYGAFFSTPLAKVNSSQLNYETDLRVNWTVITNNLSLPDLQTTSMGIVIYPAGLKNILKHIKDEYMDPEIYIMENGMDEIDYGTKNITEATNDYGRKEFIKSHILIMGKSIRMDKVRLKGYYIWSLMDNFEWDKGYKVRFGLYYVDYNDNMKRYIRSSGKWLSEFLDSKETLHKCYFEGHREKGYAPKLFDVEYLEPENSQLSYRSDFM

SEQ ID NO: 70679 - protein, 548 aa, Arabidopsis thaliana
  peptide (1)..(548): Ceres Seq. ID no. 2717495
MDMGTTVGPQTNLNDDDLGTIIGPEFEIHKQDFPADFIFGTSVSAYQVEGAKKGSGRGLTSWDEFTHMFPEKVQQNGDGDEGVDFYTRYKDDIKLMKELNTNGFRFSISWTRILPYGTIKKGVNEEGVKFYNDLINELLANGIQPSVTLFHWESPLALEMEYGGFLNERIVEDFREFANFCFKEFGDRVKNWATFNEPSVYSVAGYSKGKKAPGRCSKWQAPKCPTGDSSEEPYIVAHNQILAHLAAVDEFRNCKKVEGGGKIGIVLVSHWFEPKDPNSSEDVKAARRSLEYQLGWFLRPLTYGQYPAEMLEDVNIRLREFTPEESEKLRKSLDFVGLNYYGAFFSTPLAKVNSSQLNYETDLRVNWTVITNNLSLPDLQTTSMGIVIYPAGLKNILKHIKDEYMDPEIYIMENGMDEIDYGTKNITEATNDYGRKEFIKSHILIMGKSIRMDKVRLKGYYIWSLMDNFEWDKGYKVRFGLYYVDYNDNMKRYIRSSGKWLSEFLDSKETLHKCYFEGHREKGYAPKLFDVEYLEPENSQLSYRSDFM

SEQ ID NO: 70680 - protein, 546 aa, Arabidopsis thaliana
  peptide (1)..(546): Ceres Seq. ID no. 2717496
MGTTVGPQTNLNDDDLGTIIGPEFEIHKQDFPADFIFGTSVSAYQVEGAKKGSGRGLTSWDEFTHMFPEKVQQNGDGDEGVDFYTRYKDDIKLMKELNTNGFRFSISWTRILPYGTIKKGVNEEGVKFYNDLINELLANGIQPSVTLFHWESPLALEMEYGGFLNERIVEDFREFANFCFKEFGDRVKNWATFNEPSVYSVAGYSKGKKAPGRCSKWQAPKCPTGDSSEEPYIVAHNQILAHLAAVDEFRNCKKVEGGGKIGIVLVSHWFEPKDPNSSEDVKAARRSLEYQLGWFLRPLTYGQYPAEMLEDVNIRLREFTPEESEKLRKSLDFVGLNYYGAFFSTPLAKVNSSQLNYETDLRVNWTVITNNLSLPDLQTTSMGIVIYPAGLKNILKHIKDEYMDPEIYIMENGMDEIDYGTKNITEATNDYGRKEFIKSHILIMGKSIRMDKVRLKGYYIWSLMDNFEWDKGYKVRFGLYYVDYNDNMKRYIRSSGKWLSEFLDSKETLHKCYFEGHREKGYAPKLFDVEYLEPENSQLSYRSDFM

SEQ ID NO: 70681 - DNA, 1389 bp, Arabidopsis thaliana
  misc_feature (1)..(1389): Ceres Seq. ID no. 2729671
  misc_feature (1)..(1389): Ortholog of  Ceres SEQ ID NO 12586556 as cited in SEQ ID NO 64667
  misc_feature (1)..(1389): Ortholog of  Ceres SEQ ID NO 13660894 as cited in SEQ ID NO 67475
atgaggtttatcttgcgtcatctgcattcacttggagtgatcaacaaatttgattcctttcttctacattttcacaccaaatcgcttaaatctaaccacactttgaagcaatatcttgaatctggggaaccaatcaaagctcttttagatttccggcaccgattcagacaaagtcctagttttgttgacagtttttctgttttgtttgccattaaagtttcgtcagctcagaaagcttcctcacttgatggtagacagatccacgctcttgtaagaaaactaggtttcaatgccgttattcaaattcaaacatctttagtgggattctactcttccgtgggtgatgtcgattatgcacgccaagtgttcgacgaaacgcctgagaaacagaacattgtcttgtggacagcgatgatttcagcttacactgagaatgagaactctgtggaagctattgagctgtttaaacgaatggaagcggaaaagatcgaacttgatggagtgattgtgactgtggctttatcagcttgtgctgatctcggggcggtgcagatgggagaagagatttattcgcgtagtatcaagagaaaacgaagattggctatggatttaactctgagaaattcacttcttaacatgtacgtgaaatctggggaaactgagaaagctaggaaactctttgatgaaagtatgagaaaagatgtgactacttacacatctatgatcttcgggtatgctttaaacggtcaagctcaagaatctttagaactcttcaagaaaatgaagacgattgatcagagccaagatactgtcattactccaaatgatgtgactttcatcggcgtcttgatggcttgtagtcacagtggcttagtagaagaaggaaaacgacatttcaagagcatgattatggattacaatctgaaacctagagaagctcatttcggatgtatggtggatttgttttgtcggtcaggtcatttgaaagatgctcacgagttcatcaatcagatgccgataaagccaaacacagtgatatggagaacactgctaggcgcttgcagtcttcacgggaatgttgagctcggagaagaagttcagagacggatctttgagttagatcgtgatcatgtcggagattatgttgcgttgtcaaatatctacgcttcaaaaggaatgtgggatgagaaatcaaagatgagggatcgtgtgaggaagagaagaatgcctggtaaaagctggattgaactcggaagcattatcaatgagtttgtctcaggacctgataataacgatgagcagctgatgatgggagagattagtgaggttttgagatgtttagtttcttgtatgacaagttttgattgtgtaatagggaaaaaaatgtag

SEQ ID NO: 70682 - protein, 462 aa, Arabidopsis thaliana
  peptide (1)..(462): Ceres Seq. ID no. 2729672
MRFILRHLHSLGVINKFDSFLLHFHTKSLKSNHTLKQYLESGEPIKALLDFRHRFRQSPSFVDSFSVLFAIKVSSAQKASSLDGRQIHALVRKLGFNAVIQIQTSLVGFYSSVGDVDYARQVFDETPEKQNIVLWTAMISAYTENENSVEAIELFKRMEAEKIELDGVIVTVALSACADLGAVQMGEEIYSRSIKRKRRLAMDLTLRNSLLNMYVKSGETEKARKLFDESMRKDVTTYTSMIFGYALNGQAQESLELFKKMKTIDQSQDTVITPNDVTFIGVLMACSHSGLVEEGKRHFKSMIMDYNLKPREAHFGCMVDLFCRSGHLKDAHEFINQMPIKPNTVIWRTLLGACSLHGNVELGEEVQRRIFELDRDHVGDYVALSNIYASKGMWDEKSKMRDRVRKRRMPGKSWIELGSIINEFVSGPDNNDEQLMMGEISEVLRCLVSCMTSFDCVIGKKM

SEQ ID NO: 70683 - protein, 325 aa, Arabidopsis thaliana
  peptide (1)..(325): Ceres Seq. ID no. 2729673
MISAYTENENSVEAIELFKRMEAEKIELDGVIVTVALSACADLGAVQMGEEIYSRSIKRKRRLAMDLTLRNSLLNMYVKSGETEKARKLFDESMRKDVTTYTSMIFGYALNGQAQESLELFKKMKTIDQSQDTVITPNDVTFIGVLMACSHSGLVEEGKRHFKSMIMDYNLKPREAHFGCMVDLFCRSGHLKDAHEFINQMPIKPNTVIWRTLLGACSLHGNVELGEEVQRRIFELDRDHVGDYVALSNIYASKGMWDEKSKMRDRVRKRRMPGKSWIELGSIINEFVSGPDNNDEQLMMGEISEVLRCLVSCMTSFDCVIGKKM

SEQ ID NO: 70684 - protein, 305 aa, Arabidopsis thaliana
  peptide (1)..(305): Ceres Seq. ID no. 2729674
MEAEKIELDGVIVTVALSACADLGAVQMGEEIYSRSIKRKRRLAMDLTLRNSLLNMYVKSGETEKARKLFDESMRKDVTTYTSMIFGYALNGQAQESLELFKKMKTIDQSQDTVITPNDVTFIGVLMACSHSGLVEEGKRHFKSMIMDYNLKPREAHFGCMVDLFCRSGHLKDAHEFINQMPIKPNTVIWRTLLGACSLHGNVELGEEVQRRIFELDRDHVGDYVALSNIYASKGMWDEKSKMRDRVRKRRMPGKSWIELGSIINEFVSGPDNNDEQLMMGEISEVLRCLVSCMTSFDCVIGKKM

SEQ ID NO: 70685 - DNA, 465 bp, Arabidopsis thaliana
  misc_feature (1)..(465): Ceres Seq. ID no. 2729705
  misc_feature (1)..(465): Ortholog of  Ceres SEQ ID NO 12584790 as cited in SEQ ID NO 62648
atgtttaagaaaatggataaaaaagcagcgcagagaattgcgatggaatacagagctatgatctcgaaagaatctttgttcagtattggtcaaaactcgaacaatatatacgaatggactgcagtgatccggggtccagatggcactccctatgaaggtggcatgtttaatctcagtattaagtttcctacggattatccttttaaaccacccaagtttacgtttaaaactccgatttaccatccaaatatcaatgatgaaggatcgatttgcatgaacattcttaaagacaaatggactcctgctcttatggttgaaaaggtgcttctgtcaatacttttactattggaaaaaccaaacccagatgatcctcttgtacctgaaattggacagctcttcaagaataacagattccaatttgaccagagagctcgagaattcactgctcgacatgctaataattaa

SEQ ID NO: 70686 - protein, 154 aa, Arabidopsis thaliana
  peptide (1)..(154): Ceres Seq. ID no. 2729706
MFKKMDKKAAQRIAMEYRAMISKESLFSIGQNSNNIYEWTAVIRGPDGTPYEGGMFNLSIKFPTDYPFKPPKFTFKTPIYHPNINDEGSICMNILKDKWTPALMVEKVLLSILLLLEKPNPDDPLVPEIGQLFKNNRFQFDQRAREFTARHANN

SEQ ID NO: 70687 - protein, 150 aa, Arabidopsis thaliana
  peptide (1)..(150): Ceres Seq. ID no. 2729707
MDKKAAQRIAMEYRAMISKESLFSIGQNSNNIYEWTAVIRGPDGTPYEGGMFNLSIKFPTDYPFKPPKFTFKTPIYHPNINDEGSICMNILKDKWTPALMVEKVLLSILLLLEKPNPDDPLVPEIGQLFKNNRFQFDQRAREFTARHANN

SEQ ID NO: 70688 - protein, 140 aa, Arabidopsis thaliana
  peptide (1)..(140): Ceres Seq. ID no. 2729708
MEYRAMISKESLFSIGQNSNNIYEWTAVIRGPDGTPYEGGMFNLSIKFPTDYPFKPPKFTFKTPIYHPNINDEGSICMNILKDKWTPALMVEKVLLSILLLLEKPNPDDPLVPEIGQLFKNNRFQFDQRAREFTARHANN

SEQ ID NO: 70689 - DNA, 1533 bp, Arabidopsis thaliana
  misc_feature (1)..(1533): Ceres Seq. ID no. 2729766
  misc_feature (1)..(1533): Ortholog of  Ceres SEQ ID NO 14302875 as cited in SEQ ID NO 66242
atggaagacaaaatccagtcagatgatttcacttcccataaaaacccaactcttcctcaagtcattgaagagctaaaagagctctgggctatggttttaccaatcacagcaatgaactgtcttgtctacgtgcgcgccgtcgtgtctgttctcttcctcggccgtctcggtagcctcgagttagccggaggagctctctccatcggattcaccaacatcacaggatactctgttatggttggactcgcctcgggtctcgagccagtgtgtagccaagcctacggtagcaaaaactgggatctcctcacgctctctcttcaccgtatggtcgtgattctcttaatggcctctctgcccataagcctcctttggatcaaccttggacccatcatgcttttcatgggtcaaaacccggagataaccgctacagcggctgaatattgtctctacgcgcttcctgatcttttgaccaatactctccttcagccgttacgtgtttatctaaggtcgcagcgagtgacgaaaccgatgatgtggtgtacgctagcagcagtggcgttccatgtgccattgaattattggcttgtgatggtgaagcattggggtgttcctggtgtggctattgcgtctgttgtgacgaatttgatcatggttgtgcttttggttggttatgtttgggttagtgggatgttgcagaagagagtgagtggtgatggtgatggtgggtctactacgatggtggcggtggtggctcagtcgtcgtctgtgatggagttggttggagggttgggaccgttgatgagagtggcggttccgagttgtttggggatatgtttggaatggtggtggtatgagattgtgattgtgatgggtggttacttggagaatcctaagcttgctgtggctgccactgggattttgattcagactactagtcttatgtatacggttcctatggctttagctggatgcgtctctgctcgggttgggaacgagctcggtgcaggtagaccttacaaggccagactagccgcgaacgtggctctagcttgcgcgtttgtagtaggagcattgaatgtggcttggacggttattctaaaagagcgttgggctggactattcactggctatgagccactcaaggtcttggttgcttcggttatgccaattgtcgggctatgcgagctagggaattgtccacagaccacgggctgcgggattcttagagggacaggtcggcctgcggttggggcacatgtgaatctcgggtcgttttatttcgttgggactcccgtggcagttggactagcgttttggttgaaaattgggtttagtgggttgtggtttgggttgctttcagctcaagcggcttgcgtggtttcgatattgtatgcggttttggcgaggacggattgggaaggggaagccgtgaaggcaatgagactgacgagtttggagatgaggaaagttggacaagatgaagagtcttcattgttattgttggatgatgagaagttgggtgatgttttgtaa

SEQ ID NO: 70690 - protein, 510 aa, Arabidopsis thaliana
  peptide (1)..(510): Ceres Seq. ID no. 2729767
MEDKIQSDDFTSHKNPTLPQVIEELKELWAMVLPITAMNCLVYVRAVVSVLFLGRLGSLELAGGALSIGFTNITGYSVMVGLASGLEPVCSQAYGSKNWDLLTLSLHRMVVILLMASLPISLLWINLGPIMLFMGQNPEITATAAEYCLYALPDLLTNTLLQPLRVYLRSQRVTKPMMWCTLAAVAFHVPLNYWLVMVKHWGVPGVAIASVVTNLIMVVLLVGYVWVSGMLQKRVSGDGDGGSTTMVAVVAQSSSVMELVGGLGPLMRVAVPSCLGICLEWWWYEIVIVMGGYLENPKLAVAATGILIQTTSLMYTVPMALAGCVSARVGNELGAGRPYKARLAANVALACAFVVGALNVAWTVILKERWAGLFTGYEPLKVLVASVMPIVGLCELGNCPQTTGCGILRGTGRPAVGAHVNLGSFYFVGTPVAVGLAFWLKIGFSGLWFGLLSAQAACVVSILYAVLARTDWEGEAVKAMRLTSLEMRKVGQDEESSLLLLDDEKLGDVL

SEQ ID NO: 70691 - protein, 480 aa, Arabidopsis thaliana
  peptide (1)..(480): Ceres Seq. ID no. 2729768
MVLPITAMNCLVYVRAVVSVLFLGRLGSLELAGGALSIGFTNITGYSVMVGLASGLEPVCSQAYGSKNWDLLTLSLHRMVVILLMASLPISLLWINLGPIMLFMGQNPEITATAAEYCLYALPDLLTNTLLQPLRVYLRSQRVTKPMMWCTLAAVAFHVPLNYWLVMVKHWGVPGVAIASVVTNLIMVVLLVGYVWVSGMLQKRVSGDGDGGSTTMVAVVAQSSSVMELVGGLGPLMRVAVPSCLGICLEWWWYEIVIVMGGYLENPKLAVAATGILIQTTSLMYTVPMALAGCVSARVGNELGAGRPYKARLAANVALACAFVVGALNVAWTVILKERWAGLFTGYEPLKVLVASVMPIVGLCELGNCPQTTGCGILRGTGRPAVGAHVNLGSFYFVGTPVAVGLAFWLKIGFSGLWFGLLSAQAACVVSILYAVLARTDWEGEAVKAMRLTSLEMRKVGQDEESSLLLLDDEKLGDVL

SEQ ID NO: 70692 - protein, 473 aa, Arabidopsis thaliana
  peptide (1)..(473): Ceres Seq. ID no. 2729769
MNCLVYVRAVVSVLFLGRLGSLELAGGALSIGFTNITGYSVMVGLASGLEPVCSQAYGSKNWDLLTLSLHRMVVILLMASLPISLLWINLGPIMLFMGQNPEITATAAEYCLYALPDLLTNTLLQPLRVYLRSQRVTKPMMWCTLAAVAFHVPLNYWLVMVKHWGVPGVAIASVVTNLIMVVLLVGYVWVSGMLQKRVSGDGDGGSTTMVAVVAQSSSVMELVGGLGPLMRVAVPSCLGICLEWWWYEIVIVMGGYLENPKLAVAATGILIQTTSLMYTVPMALAGCVSARVGNELGAGRPYKARLAANVALACAFVVGALNVAWTVILKERWAGLFTGYEPLKVLVASVMPIVGLCELGNCPQTTGCGILRGTGRPAVGAHVNLGSFYFVGTPVAVGLAFWLKIGFSGLWFGLLSAQAACVVSILYAVLARTDWEGEAVKAMRLTSLEMRKVGQDEESSLLLLDDEKLGDVL

SEQ ID NO: 70693 - DNA, 1032 bp, Arabidopsis thaliana
  misc_feature (1)..(1032): Ceres Seq. ID no. 2730036
  misc_feature (1)..(1032): Ortholog of  Ceres SEQ ID NO 12583469 as cited in SEQ ID NO 51031
  misc_feature (1)..(1032): Ortholog of  Ceres SEQ ID NO 13597389 as cited in SEQ ID NO 63426
atggattacactgtttcctctctacaatgcttcttcttagttttatgtctctctcttttggtttgctctaactctgaaactagttacaagtcaaacaagaaacctatattgataaacttcggcgactctaactccgacaccggaggagttcttgctggagttggacttcctatcggactccctcatggcattaccttcttccatagaggcactggtcgtctcggtgacggtcgactcatcgttgacttctactgtgaacatttaaagatgacatatttgagtccatatttggattcactttcaccaaatttcaaaagaggagtcaatttcgcagtctcgggcgccaccgctcttccgatcttttccttccctcttgccattcaaattcgtcaattcgtccatttcaaaaaccgttctcaagaacttatctcttccggtagaagagaccttattgatgataatggatttagaaacgcgttgtacatgatcgatattggacaaaacgatcttttacttgctctatatgattcgaatttaacctatgcacccgttgtcgaaaaaattccttccatgcttcttgagataaagaaagccatacagggtgaattggcgattcacctgcataacgattcggatcttgacccgattggttgtttccgggttcacaatgaagtcgccaaagccttcaacaaaggactccttagtctctgcaacgaactgagatcccaattcaaagacgccactctcgtctacgttgatatttactccatcaaatataaactctccgccgatttcaaactatacggatttgtggacccgttgatggcttgttgcggttatggaggaagacctaacaactatgatcgaaaagcaacgtgtggtcaacccggttcaactatttgtcgtgatgtaaccaaagcaattgtatgggatggggttcactatactgaagctgctaaccggtttgtcgttgatgctgttttgacgaatcggtactcttacccaaaaaattcccttgaccggttttggtag

SEQ ID NO: 70694 - protein, 343 aa, Arabidopsis thaliana
  peptide (1)..(343): Ceres Seq. ID no. 2730037
MDYTVSSLQCFFLVLCLSLLVCSNSETSYKSNKKPILINFGDSNSDTGGVLAGVGLPIGLPHGITFFHRGTGRLGDGRLIVDFYCEHLKMTYLSPYLDSLSPNFKRGVNFAVSGATALPIFSFPLAIQIRQFVHFKNRSQELISSGRRDLIDDNGFRNALYMIDIGQNDLLLALYDSNLTYAPVVEKIPSMLLEIKKAIQGELAIHLHNDSDLDPIGCFRVHNEVAKAFNKGLLSLCNELRSQFKDATLVYVDIYSIKYKLSADFKLYGFVDPLMACCGYGGRPNNYDRKATCGQPGSTICRDVTKAIVWDGVHYTEAANRFVVDAVLTNRYSYPKNSLDRFW

SEQ ID NO: 70695 - protein, 254 aa, Arabidopsis thaliana
  peptide (1)..(254): Ceres Seq. ID no. 2730038
MTYLSPYLDSLSPNFKRGVNFAVSGATALPIFSFPLAIQIRQFVHFKNRSQELISSGRRDLIDDNGFRNALYMIDIGQNDLLLALYDSNLTYAPVVEKIPSMLLEIKKAIQGELAIHLHNDSDLDPIGCFRVHNEVAKAFNKGLLSLCNELRSQFKDATLVYVDIYSIKYKLSADFKLYGFVDPLMACCGYGGRPNNYDRKATCGQPGSTICRDVTKAIVWDGVHYTEAANRFVVDAVLTNRYSYPKNSLDRFW

SEQ ID NO: 70696 - protein, 182 aa, Arabidopsis thaliana
  peptide (1)..(182): Ceres Seq. ID no. 2730039
MIDIGQNDLLLALYDSNLTYAPVVEKIPSMLLEIKKAIQGELAIHLHNDSDLDPIGCFRVHNEVAKAFNKGLLSLCNELRSQFKDATLVYVDIYSIKYKLSADFKLYGFVDPLMACCGYGGRPNNYDRKATCGQPGSTICRDVTKAIVWDGVHYTEAANRFVVDAVLTNRYSYPKNSLDRFW

SEQ ID NO: 70697 - DNA, 1110 bp, Arabidopsis thaliana
  misc_feature (1)..(1110): Ceres Seq. ID no. 2730114
  misc_feature (1)..(1110): Ortholog of  Ceres SEQ ID NO 13598527 as cited in SEQ ID NO 64914
atggcgacaaacttcaaatccctattaccagttatcggtacggatgaaaccctaaattcattattttcagcaaatgtcgcactcatcatcaaagttttcatattaaatctcaaggaaactaaaatgcatgagacaatggtttttgtagacatcagtcctttagtggtcaaatgtgatgatgccaacatggcggaggatgccggcgtggcggaggttgtgggaaagctggacagggcctgtcgggacgcaggattcttctacgtaattggtcatggaatatcggaggattttataaggaaggtgagagtgatgtcgcatcaattcttcgagcttccttatgaagagaaacttaagatcaagattactccagctgctggatacagaggatatcagagaatcggactaaacttaacgaatgggaaacaagatatgcacgaagccattgattgttacaaagagtttaagcaagggaagcatggggacattggaaaggttatggaaggggcaaaccagtggccagagaatcctcaagaatacaaagagttgatggaggagtatattaagctctgcatagatctttctagaaatatcttaaggggaatctcattagcccttggtggatcaccttatgagtttgagggaaagatgcttacagatccgttttggataatgcgtattcttggttatccagtaactcgtctcatctttttcacttacagtggagctcacactgactatggcttgttgtcacttataaatcaagatgatgacaaaactgctcttcaggtgagagacttggccggcgattggataccagttattccgatccctggatcatttgtctgcaacatcggtgacatgctaaagattctttctaacggagtttacgaatccacacttcatagagtgatcaataactctccccgataccgtgtttgcgtcggattcttttacgagacgaacttcgacgcagcggtggagccgttggatatcttcaaagagaagtacccaggaaaaggaacatcccaagttttcaaaagagttgtctatggggagcatctggttcacaaactccagaccacttttcaaaatttagtggaacacagttaa

SEQ ID NO: 70698 - protein, 369 aa, Arabidopsis thaliana
  peptide (1)..(369): Ceres Seq. ID no. 2730115
MATNFKSLLPVIGTDETLNSLFSANVALIIKVFILNLKETKMHETMVFVDISPLVVKCDDANMAEDAGVAEVVGKLDRACRDAGFFYVIGHGISEDFIRKVRVMSHQFFELPYEEKLKIKITPAAGYRGYQRIGLNLTNGKQDMHEAIDCYKEFKQGKHGDIGKVMEGANQWPENPQEYKELMEEYIKLCIDLSRNILRGISLALGGSPYEFEGKMLTDPFWIMRILGYPVTRLIFFTYSGAHTDYGLLSLINQDDDKTALQVRDLAGDWIPVIPIPGSFVCNIGDMLKILSNGVYESTLHRVINNSPRYRVCVGFFYETNFDAAVEPLDIFKEKYPGKGTSQVFKRVVYGEHLVHKLQTTFQNLVEHS

SEQ ID NO: 70699 - protein, 328 aa, Arabidopsis thaliana
  peptide (1)..(328): Ceres Seq. ID no. 2730116
MHETMVFVDISPLVVKCDDANMAEDAGVAEVVGKLDRACRDAGFFYVIGHGISEDFIRKVRVMSHQFFELPYEEKLKIKITPAAGYRGYQRIGLNLTNGKQDMHEAIDCYKEFKQGKHGDIGKVMEGANQWPENPQEYKELMEEYIKLCIDLSRNILRGISLALGGSPYEFEGKMLTDPFWIMRILGYPVTRLIFFTYSGAHTDYGLLSLINQDDDKTALQVRDLAGDWIPVIPIPGSFVCNIGDMLKILSNGVYESTLHRVINNSPRYRVCVGFFYETNFDAAVEPLDIFKEKYPGKGTSQVFKRVVYGEHLVHKLQTTFQNLVEHS

SEQ ID NO: 70700 - protein, 324 aa, Arabidopsis thaliana
  peptide (1)..(324): Ceres Seq. ID no. 2730117
MVFVDISPLVVKCDDANMAEDAGVAEVVGKLDRACRDAGFFYVIGHGISEDFIRKVRVMSHQFFELPYEEKLKIKITPAAGYRGYQRIGLNLTNGKQDMHEAIDCYKEFKQGKHGDIGKVMEGANQWPENPQEYKELMEEYIKLCIDLSRNILRGISLALGGSPYEFEGKMLTDPFWIMRILGYPVTRLIFFTYSGAHTDYGLLSLINQDDDKTALQVRDLAGDWIPVIPIPGSFVCNIGDMLKILSNGVYESTLHRVINNSPRYRVCVGFFYETNFDAAVEPLDIFKEKYPGKGTSQVFKRVVYGEHLVHKLQTTFQNLVEHS

SEQ ID NO: 70701 - DNA, 774 bp, Arabidopsis thaliana
  misc_feature (1)..(774): Ceres Seq. ID no. 2730195
  misc_feature (1)..(774): Ortholog of  Ceres SEQ ID NO 13595658 as cited in SEQ ID NO 59888
  misc_feature (1)..(774): Ortholog of  Ceres SEQ ID NO 13661330 as cited in SEQ ID NO 61614
  misc_feature (1)..(774): Ortholog of  Ceres SEQ ID NO 13596025 as cited in SEQ ID NO 62024
  misc_feature (1)..(774): Ortholog of  Ceres SEQ ID NO 13662324 as cited in SEQ ID NO 62162
  misc_feature (1)..(774): Ortholog of  Ceres SEQ ID NO 12625713 as cited in SEQ ID NO 64160
atggcgaattactcaagtattcacattctcttcttggtcttcatcacaatttttattgttgttgtttgttttgaaattgcaggcggcattgctgtttccgccgccaccgtcttcactttacagaacagttgtccttacaccgtttggcctggaattctctccggcaacgacaacaccctcggcgacggcggatttcccttaacaccaggcgcttccgtacagctcacggctcctgcaggatggtcaggacggttctgggctcgtaccggctgcaacttcgacgcctccggccacggtaactgcggcaccggagactgcggcggtgttcttaaatgtaacggcggcggagttccaccagtcactctggctgaattcacacttgtaggcgacggcggcaaggatttctacgacgtgagtctcgtcgacggttacaatgtcgagatggggattaaacctcaaggaggttccggtgattgccattacgccggctgcgtcgccgacgtcaacgcggtttgccctaacgagcttcggctcatggatccacatacaggaatcatcgcggcgtgtaaaagcgcttgtgcggcgtttaattctgaggagttctgttgtaccggtgctcacgcgacgccgcaaacttgttctccgacgcattactcggcgatgtttaaaagcgcttgccctggtgcttacagttacgcctacgacgacgccacgagcaccttcacttgtaccggctctaactacttgatctctttctgccccacccggaactaa

SEQ ID NO: 70702 - protein, 257 aa, Arabidopsis thaliana
  peptide (1)..(257): Ceres Seq. ID no. 2730196
MANYSSIHILFLVFITIFIVVVCFEIAGGIAVSAATVFTLQNSCPYTVWPGILSGNDNTLGDGGFPLTPGASVQLTAPAGWSGRFWARTGCNFDASGHGNCGTGDCGGVLKCNGGGVPPVTLAEFTLVGDGGKDFYDVSLVDGYNVEMGIKPQGGSGDCHYAGCVADVNAVCPNELRLMDPHTGIIAACKSACAAFNSEEFCCTGAHATPQTCSPTHYSAMFKSACPGAYSYAYDDATSTFTCTGSNYLISFCPTRN

SEQ ID NO: 70703 - DNA, 996 bp, Arabidopsis thaliana
  misc_feature (1)..(996): Ceres Seq. ID no. 2730248
  misc_feature (1)..(996): Ortholog of  Ceres SEQ ID NO 12562983 as cited in SEQ ID NO 53309
atggtgtcaatgaaaagcttcgttcatattctccgtcgatacatctccattgcaatcactctcttctataacctcatttggtgtttattcgacaatttcgattacccgatcctaatcaagctcgctgatacattcttatcattatatttcctaatcttctgcgatctccgtccaatcaccgtcgatttaaacgatggagaaaccacattacatttctggatctccggccaccgtaaaatcaaccgccctaacctcgtcatgttacacggctacggaggaaattcgaaatggcagttcattcatcaagtctcagatctatcgaaatcgtttaatctctttatccctgatcttgtgttcttcgggaaatcgtactcgagaaacaccgatcggactatcgagtttcaggcgaggagtatcgtcggaggtttgaagaggttaggttgtggtgacggagatttatcggtttattcaattagttacggtggatttgttgcgtaccggatagcgaagatttggccggagatgattgagaaattggtgattgtgagtagtggagttgggtttacacaacagcaaaagatgacggagatgaaaaaacacggcggagatgtatcggagattcttgttccgagtaatccgagagatctacggttgttagttaaggtttcgatgaatacaggtatcagatttcttgactgggttccagatttcatcctctcccaattcatcgctacaaatcggcaagagcttgttgatttagctaagaatttgctggaaagagaagaggagccagagttattttcaatatcacagagaacgttaatcgtttggggtgataaggataatgtgtttccgttggagcatggacgtcgtctacaaaggcatttgccgaattcgagtttagaggtattgaaggaaattggacatggtgtgaacattgaagcaccaactactcttaacaatttgattatctcgtttgttttaggtgttccttaa

SEQ ID NO: 70704 - protein, 331 aa, Arabidopsis thaliana
  peptide (1)..(331): Ceres Seq. ID no. 2730249
MVSMKSFVHILRRYISIAITLFYNLIWCLFDNFDYPILIKLADTFLSLYFLIFCDLRPITVDLNDGETTLHFWISGHRKINRPNLVMLHGYGGNSKWQFIHQVSDLSKSFNLFIPDLVFFGKSYSRNTDRTIEFQARSIVGGLKRLGCGDGDLSVYSISYGGFVAYRIAKIWPEMIEKLVIVSSGVGFTQQQKMTEMKKHGGDVSEILVPSNPRDLRLLVKVSMNTGIRFLDWVPDFILSQFIATNRQELVDLAKNLLEREEEPELFSISQRTLIVWGDKDNVFPLEHGRRLQRHLPNSSLEVLKEIGHGVNIEAPTTLNNLIISFVLGVP

SEQ ID NO: 70705 - protein, 328 aa, Arabidopsis thaliana
  peptide (1)..(328): Ceres Seq. ID no. 2730250
MKSFVHILRRYISIAITLFYNLIWCLFDNFDYPILIKLADTFLSLYFLIFCDLRPITVDLNDGETTLHFWISGHRKINRPNLVMLHGYGGNSKWQFIHQVSDLSKSFNLFIPDLVFFGKSYSRNTDRTIEFQARSIVGGLKRLGCGDGDLSVYSISYGGFVAYRIAKIWPEMIEKLVIVSSGVGFTQQQKMTEMKKHGGDVSEILVPSNPRDLRLLVKVSMNTGIRFLDWVPDFILSQFIATNRQELVDLAKNLLEREEEPELFSISQRTLIVWGDKDNVFPLEHGRRLQRHLPNSSLEVLKEIGHGVNIEAPTTLNNLIISFVLGVP

SEQ ID NO: 70706 - protein, 245 aa, Arabidopsis thaliana
  peptide (1)..(245): Ceres Seq. ID no. 2730251
MLHGYGGNSKWQFIHQVSDLSKSFNLFIPDLVFFGKSYSRNTDRTIEFQARSIVGGLKRLGCGDGDLSVYSISYGGFVAYRIAKIWPEMIEKLVIVSSGVGFTQQQKMTEMKKHGGDVSEILVPSNPRDLRLLVKVSMNTGIRFLDWVPDFILSQFIATNRQELVDLAKNLLEREEEPELFSISQRTLIVWGDKDNVFPLEHGRRLQRHLPNSSLEVLKEIGHGVNIEAPTTLNNLIISFVLGVP

SEQ ID NO: 70707 - DNA, 1380 bp, Arabidopsis thaliana
  misc_feature (1)..(1380): Ceres Seq. ID no. 2730313
  misc_feature (1)..(1380): Ortholog of  Ceres SEQ ID NO 13594349 as cited in SEQ ID NO 58161
  misc_feature (1)..(1380): Ortholog of  Ceres SEQ ID NO 13663419 as cited in SEQ ID NO 66561
atggattactctttccttctaatcattctcttactcacaatctctacttcatgttgtgctgctccttcttcttatgtggaagaacaattgagagacagaatcagtaacttacctggacaacctagtaatgtcgattttagacagtactcaggctatgtcactgtgcatgaagaacgtggaagagctttgttctactggttggtcgagtctccgttggcccgtgacccaaagtctagacctttggttctgtggctcaatggtggccctggttgttcttctgttgcttatggtgctgctgaagaaattggaccttttcgtgttggttctgatggcaagactcttcattccaaactttatgcttggaataaattggcaaacttgctattcttggagtctccagctggagttggtttctcatattcaaacacaacttcagatctttacacaaccggtgatcagagaacagctgaggattcgtacatatttcttgtcaactggtttgagaggtttccacaatacaagcatagggagttttacattgttggagaaagctatgcaggtcattttgttcctcaactgtctaaacttgtccatgaaaggaacaagggcttcaagaacccggctataaacctcaaaggttttatggtgggaaatgctgttacagatgactatcatgattatataggaacatttgaatactggtggaatcacggtctcatatccgattccacgtatcaccaactaaagaccgcgtgctactcagtatcatctcagcatccttcaatgcagtgtatggtggctctgagaaatgccgaattagagcaaggaaatatcgatccatatagcattttcaccaaaccttgcaacagtactgtggcacttaagagattcttaaagggtcgctacccatggatgtcaagagcttatgatccttgtacagagagatattcgaatgtgtattttaaccgcttggacgttcagaaggctctccacgcaaatgtcactcgcttatcttacccctggaaagcatgcagtgacattgtaggaagctattgggacgattctcctctgtctatgcttcctatatacaaagaattgattactgcaggtctcaaaatatgggtcttcagtggggatacagatgctgttgttcctataaccgctacccgatactctgtagatgcactgaagctagcaaccatcacgaactggtacccgtggtacgaccatggcaaggtaggtgggtggagtcaagtttacaaaggacttacattagtgacagtagcaggagctggtcatgaagtgcctctacaccgtccccggcaagcctttattcttttcagatcctttttagagagcaaaccaatgcctatgacttga

SEQ ID NO: 70708 - protein, 459 aa, Arabidopsis thaliana
  peptide (1)..(459): Ceres Seq. ID no. 2730314
MDYSFLLIILLLTISTSCCAAPSSYVEEQLRDRISNLPGQPSNVDFRQYSGYVTVHEERGRALFYWLVESPLARDPKSRPLVLWLNGGPGCSSVAYGAAEEIGPFRVGSDGKTLHSKLYAWNKLANLLFLESPAGVGFSYSNTTSDLYTTGDQRTAEDSYIFLVNWFERFPQYKHREFYIVGESYAGHFVPQLSKLVHERNKGFKNPAINLKGFMVGNAVTDDYHDYIGTFEYWWNHGLISDSTYHQLKTACYSVSSQHPSMQCMVALRNAELEQGNIDPYSIFTKPCNSTVALKRFLKGRYPWMSRAYDPCTERYSNVYFNRLDVQKALHANVTRLSYPWKACSDIVGSYWDDSPLSMLPIYKELITAGLKIWVFSGDTDAVVPITATRYSVDALKLATITNWYPWYDHGKVGGWSQVYKGLTLVTVAGAGHEVPLHRPRQAFILFRSFLESKPMPMT

SEQ ID NO: 70709 - protein, 245 aa, Arabidopsis thaliana
  peptide (1)..(245): Ceres Seq. ID no. 2730315
MVGNAVTDDYHDYIGTFEYWWNHGLISDSTYHQLKTACYSVSSQHPSMQCMVALRNAELEQGNIDPYSIFTKPCNSTVALKRFLKGRYPWMSRAYDPCTERYSNVYFNRLDVQKALHANVTRLSYPWKACSDIVGSYWDDSPLSMLPIYKELITAGLKIWVFSGDTDAVVPITATRYSVDALKLATITNWYPWYDHGKVGGWSQVYKGLTLVTVAGAGHEVPLHRPRQAFILFRSFLESKPMPMT

SEQ ID NO: 70710 - DNA, 954 bp, Arabidopsis thaliana
  misc_feature (1)..(954): Ceres Seq. ID no. 2730518
  misc_feature (1)..(954): Ortholog of  Ceres SEQ ID NO 12617197 as cited in SEQ ID NO 63406
  misc_feature (1)..(954): Ortholog of  Ceres SEQ ID NO 13597804 as cited in SEQ ID NO 64182
  misc_feature (1)..(954): Ortholog of  Ceres SEQ ID NO 13598565 as cited in SEQ ID NO 65250
  misc_feature (1)..(954): Ortholog of  Ceres SEQ ID NO 13598597 as cited in SEQ ID NO 65496
  misc_feature (1)..(954): Ortholog of  Ceres SEQ ID NO 13596284 as cited in SEQ ID NO 68273
  misc_feature (1)..(954): Ortholog of  Ceres SEQ ID NO 14308995 as cited in SEQ ID NO 0
atggctgtaaagcaaaaggtctgtgttactggtgcaggagggtttattgcttcatggctcgtcaagtttcttctctctcgtggctacactgtccatggaaccgttcgagatccttgtgatgaaaagaatgaccatttgaggaaactggataatgcttcaaaaaatctgaaacttttcaaggcagatttgtttgatgatgaaggtcttttctcagccattgatggttgctctggcgttttccatatcgcttctcctgtgccttttgaaggagaagaactgattaaaccagctctcactggcaccaagaatgttctagaagcatgcacagaaaccaaagtgcagaaagttgtggttgtatcatcaatcgctgcagttgtttacaatccaaaatggcctcaagatgttgctaaggacgaggattgttggtcagacactcaataccttcactcacttgagcgttattactatcttgccaaaacattaacggaacgtgaagctttagagtggagtaagagaaactttgctgatgttgttacgctctgtccgtctgtcattataggccctaggcttcaatccacgcttaactctagtagtttgggacttctcaagttcataaaaggtggtataaagtccttgttgagcgatgaactgtatcttgtggatgtgcgtgatgttgcggatgcgcttttgttggtgtatgaaaatcgagaagcaacaggaagatacatatgtaattctcattcactttacactgattctcttatggagaagctcaagaatatgtatcctaaacgcaacttccctgaaagtttcacggaggtaaaagagaaggaagtgaggcctctaagtgcagagaagttgaaaaacttggggtggaagtttaggccattagaagaaaccattgatgattctgttgtgagctttgaagcagctggtgatcttccaaaggcataa

SEQ ID NO: 70711 - protein, 317 aa, Arabidopsis thaliana
  peptide (1)..(317): Ceres Seq. ID no. 2730519
MAVKQKVCVTGAGGFIASWLVKFLLSRGYTVHGTVRDPCDEKNDHLRKLDNASKNLKLFKADLFDDEGLFSAIDGCSGVFHIASPVPFEGEELIKPALTGTKNVLEACTETKVQKVVVVSSIAAVVYNPKWPQDVAKDEDCWSDTQYLHSLERYYYLAKTLTEREALEWSKRNFADVVTLCPSVIIGPRLQSTLNSSSLGLLKFIKGGIKSLLSDELYLVDVRDVADALLLVYENREATGRYICNSHSLYTDSLMEKLKNMYPKRNFPESFTEVKEKEVRPLSAEKLKNLGWKFRPLEETIDDSVVSFEAAGDLPKA

SEQ ID NO: 70712 - DNA, 747 bp, Arabidopsis thaliana
  misc_feature (1)..(747): Ceres Seq. ID no. 2730552
  misc_feature (1)..(747): Ortholog of  Ceres SEQ ID NO 14306809 as cited in SEQ ID NO 57963
atggctgaccctaacaatcctatcactgaacctaaagctataatccaatcttctacttcatcgtcagttactattgtgccagttcccacgtgcggtgacagcctctctgactctgccacgtgtgaaaacccttgtccacttgatactatcactactactactactactgtttgttttgcggctccttcttctactgcaagtggtaatgatattaatactttaatggccactgacaccgacatctctcgccggaaaaagaatccggtttatcggggaattcgttgtcggagtggaaaatgggtgtctgaaatccgagagcctaaaaagactacacgtgtctggcttgggacttatccgacgccggagatggctgctgccgcatatgacgtggcggcgttagctcttaaaggtggagacactctcttgaacttcccggattccctgggatcttaccccattcccctttcctcttccgcagctcatatcagatgcgctgcagctgcggctgctgcgactaggggtgcggctggagcggccgtgaaggtaggtcaaaagaaggaagataaagtttatgatacggcggaatcttcaactatggggtttgtggatgaagaagagctattgaacatgcctggtttgctagcggatatggccaaagggatgatggtggctccaccgtggatgggatctccaccgtcagatgattcgccagagaattctgatggagagagcttgtggagctattga

SEQ ID NO: 70713 - protein, 248 aa, Arabidopsis thaliana
  peptide (1)..(248): Ceres Seq. ID no. 2730553
MADPNNPITEPKAIIQSSTSSSVTIVPVPTCGDSLSDSATCENPCPLDTITTTTTTVCFAAPSSTASGNDINTLMATDTDISRRKKNPVYRGIRCRSGKWVSEIREPKKTTRVWLGTYPTPEMAAAAYDVAALALKGGDTLLNFPDSLGSYPIPLSSSAAHIRCAAAAAAATRGAAGAAVKVGQKKEDKVYDTAESSTMGFVDEEELLNMPGLLADMAKGMMVAPPWMGSPPSDDSPENSDGESLWSY

SEQ ID NO: 70714 - protein, 174 aa, Arabidopsis thaliana
  peptide (1)..(174): Ceres Seq. ID no. 2730554
MATDTDISRRKKNPVYRGIRCRSGKWVSEIREPKKTTRVWLGTYPTPEMAAAAYDVAALALKGGDTLLNFPDSLGSYPIPLSSSAAHIRCAAAAAAATRGAAGAAVKVGQKKEDKVYDTAESSTMGFVDEEELLNMPGLLADMAKGMMVAPPWMGSPPSDDSPENSDGESLWSY

SEQ ID NO: 70715 - protein, 126 aa, Arabidopsis thaliana
  peptide (1)..(126): Ceres Seq. ID no. 2730555
MAAAAYDVAALALKGGDTLLNFPDSLGSYPIPLSSSAAHIRCAAAAAAATRGAAGAAVKVGQKKEDKVYDTAESSTMGFVDEEELLNMPGLLADMAKGMMVAPPWMGSPPSDDSPENSDGESLWSY

SEQ ID NO: 70716 - DNA, 597 bp, Arabidopsis thaliana
  misc_feature (1)..(597): Ceres Seq. ID no. 2730630
  misc_feature (1)..(597): Ortholog of  Ceres SEQ ID NO 14310243 as cited in SEQ ID NO 20666
atggtttctcgacaagaaggaaccctctactctagaaagagggatttcacagtctgtggagaagagtttcacaattcattcaagaagagcaaacaagaagatcaatcacagagcactctgttcaatgaacgaccaaaatcggagagtatgagatcaattacctttgattttgaacttcatctccacactcctctaccatcagattggcaaactaagatgagcctagaccttgagctgaacctttcaccttcaggttcaccttcacgaaccacaacgaagaaatatgaatcctcctcaattcacaatgaaacagtatcatcatcaaagattaaagttttgacgaacacaagtaagaagagcataattgggacaggactaagtcgatcaccatcctggctagcgtttgaaggtggtgatgataacgatgttgatcacaaggggcaagagatggtaacaacagtttgcatgaaatgccacatgctggttatgttgtgtacatcaactcctgtttgtcccaactgcaagttcatgcacccacacgatcacagctctacaaaactgtttaaaccatcaaatttgcttaggcttctatgctag

SEQ ID NO: 70717 - protein, 198 aa, Arabidopsis thaliana
  peptide (1)..(198): Ceres Seq. ID no. 2730631
MVSRQEGTLYSRKRDFTVCGEEFHNSFKKSKQEDQSQSTLFNERPKSESMRSITFDFELHLHTPLPSDWQTKMSLDLELNLSPSGSPSRTTTKKYESSSIHNETVSSSKIKVLTNTSKKSIIGTGLSRSPSWLAFEGGDDNDVDHKGQEMVTTVCMKCHMLVMLCTSTPVCPNCKFMHPHDHSSTKLFKPSNLLRLLC

SEQ ID NO: 70718 - protein, 149 aa, Arabidopsis thaliana
  peptide (1)..(149): Ceres Seq. ID no. 2730632
MRSITFDFELHLHTPLPSDWQTKMSLDLELNLSPSGSPSRTTTKKYESSSIHNETVSSSKIKVLTNTSKKSIIGTGLSRSPSWLAFEGGDDNDVDHKGQEMVTTVCMKCHMLVMLCTSTPVCPNCKFMHPHDHSSTKLFKPSNLLRLLC

SEQ ID NO: 70719 - protein, 126 aa, Arabidopsis thaliana
  peptide (1)..(126): Ceres Seq. ID no. 2730633
MSLDLELNLSPSGSPSRTTTKKYESSSIHNETVSSSKIKVLTNTSKKSIIGTGLSRSPSWLAFEGGDDNDVDHKGQEMVTTVCMKCHMLVMLCTSTPVCPNCKFMHPHDHSSTKLFKPSNLLRLLC

SEQ ID NO: 70720 - DNA, 1152 bp, Arabidopsis thaliana
  misc_feature (1)..(1152): Ceres Seq. ID no. 2730931
  misc_feature (1)..(1152): Ortholog of  Ceres SEQ ID NO 15169114 as cited in SEQ ID NO 58596
atgtcttctccactactctctctcacctcattgccactaattctcctcacctcatcatcccttttgtctccattagaggtcaatcttttaaaactcaaagatttcgcttttgtctttatatcttacttttgtgagattcaaagggatgatctttgttgtgttgagttaacagagaggttgaaagagaagatagaggaaacatttgggtgtgagtatgagctttttattgaattcacaggtttgattagttggtgcaaaggagctagcattggttggcatagtgatgataacagatcatatctaaaacaaagagattttgcggcagtttgttacttgaatagttacgagaaagatttcataggcggtctttttcgttttcagagtggtgaaccagtaaccgttgctccatcggctggtgatgttatcatgtacacagctgatgaccggaatattcactcagttgatgaggtaacagatggagaaagattgactcttgcactctggtttagccgggactcatcacatgacgaagattccaagcttctttctcgtctttcacaatgtacatcacatgaagtgtgcctccctttgcctgcatccactaacatgtactggttctgtcctcatcaagatggttctaatcaaaacataggttttgatgtttgcgttgcgaggttgcatcttcttggttttgatgtacatagcttacaaggcgaagatcattctacggatgcctctgaacaacttatgggaccactacaattagctaaaggaggaaagttactcacccgaaaatttgccaacattcttcatgctcttcaggttgttcagttctaccattggaaagcttctgaactcgtaacttctaatgtcgaaaatgacacattagaagaggtgaaagctatgtcccactctcagttggaaactatcaatgccctgaaatcagttttcctgctagatgagaacctcgtagccacaacttttggatattcgtgctctggtgaggatcgaaaggattcactcgacttgacgggtatagctctcgcggttacctcttgggaagagtatagctgtaagttactcaaggagctattatcatccttgcctcaatggaaaacttatcaaactatacacaaagtggaatctgattag

SEQ ID NO: 70721 - protein, 383 aa, Arabidopsis thaliana
  peptide (1)..(383): Ceres Seq. ID no. 2730932
MSSPLLSLTSLPLILLTSSSLLSPLEVNLLKLKDFAFVFISYFCEIQRDDLCCVELTERLKEKIEETFGCEYELFIEFTGLISWCKGASIGWHSDDNRSYLKQRDFAAVCYLNSYEKDFIGGLFRFQSGEPVTVAPSAGDVIMYTADDRNIHSVDEVTDGERLTLALWFSRDSSHDEDSKLLSRLSQCTSHEVCLPLPASTNMYWFCPHQDGSNQNIGFDVCVARLHLLGFDVHSLQGEDHSTDASEQLMGPLQLAKGGKLLTRKFANILHALQVVQFYHWKASELVTSNVENDTLEEVKAMSHSQLETINALKSVFLLDENLVATTFGYSCSGEDRKDSLDLTGIALAVTSWEEYSCKLLKELLSSLPQWKTYQTIHKVESD

SEQ ID NO: 70722 - protein, 241 aa, Arabidopsis thaliana
  peptide (1)..(241): Ceres Seq. ID no. 2730933
MYTADDRNIHSVDEVTDGERLTLALWFSRDSSHDEDSKLLSRLSQCTSHEVCLPLPASTNMYWFCPHQDGSNQNIGFDVCVARLHLLGFDVHSLQGEDHSTDASEQLMGPLQLAKGGKLLTRKFANILHALQVVQFYHWKASELVTSNVENDTLEEVKAMSHSQLETINALKSVFLLDENLVATTFGYSCSGEDRKDSLDLTGIALAVTSWEEYSCKLLKELLSSLPQWKTYQTIHKVESD

SEQ ID NO: 70723 - DNA, 1383 bp, Arabidopsis thaliana
  misc_feature (1)..(1383): Ceres Seq. ID no. 2731007
  misc_feature (1)..(1383): Ortholog of  Ceres SEQ ID NO 13657220 as cited in SEQ ID NO 66169
  misc_feature (1)..(1383): Ortholog of  Ceres SEQ ID NO 13663074 as cited in SEQ ID NO 69191
atggaggttttctactacttggtgtttggagtcatggctgccgtagtggcagcgttggagcttagcaagacgaacaaggatcggatcaacacttcgtcttccttcaattcattcaagaacaattacctcctcgttttctctattatgatggctggggattggcttcagggtccttatgtgtattacctttacagcacttatggttttggaaaaggagatattggtcagctattcattgctggttttggttcgtcaatgttgtttggaactattgttggatctctggctgacaaacagggtcgaaagagggcatgtgttacatactgtatagtttacatactaagttgcatcaccaagcactctccacagtacaaagttttgatggttggccgtatcttgggtggtattgctacatctctcttgttttctgctttcgagtcctggctaattgcagagcacaataagaggaactttgagcaacagtggctgtcacttacattctctaaggctgtatttcttggaaacggtctggtggctatcctttcgggattgtttggcaatcttcttgttgacactttttcctttggtcctgttgctccctttgacgccgctgcgtgctttcttgcaattggaatggcgatcatattgggaacatggtctgagaattttggagatccatctgacagcaaagacttgctgactcagttcaaagttgctgccatagcaattgcttcagatgaaaagattgcattgctgggcgctattcagtctctattcgaagcctcgatgtacacctttgttttcctctggacaccagctcttagcccaaacgatgaagaaattccacatggcttcgtctttgcaaccttcatgttagcctcaatgttgggaagctcccttgcagctcgtctcatgtctcgctcatctctcagagtcgaaaactacatgcaaattgtctttctagtctcggctgcttcacttcttcttcccattacaacaagtgtcttggtgacaccgtcaaaggtgaaagacgaaggattgtcgttaactagctccattcagctgcttggtttctgtgtttttgagtcttgtgtcggaatattttggccttcgataatgaagatgaggtcgcagtatatacctgaagaagcacgaagcaccataatgaatttcttccgtgttccactcaacatctttgtctgcatcgtcttgtacaacgtggacgcatttccgatcacaatcatgtttggtatgtgctcaatcttcctcttcgtagcctccatattacaacggcggcttatggtcatctctgaaaagccaaaggcagaagattggagtccgatgaaggagcgaaactcggaagttgatcctcttaccctctga

SEQ ID NO: 70724 - protein, 460 aa, Arabidopsis thaliana
  peptide (1)..(460): Ceres Seq. ID no. 2731008
MEVFYYLVFGVMAAVVAALELSKTNKDRINTSSSFNSFKNNYLLVFSIMMAGDWLQGPYVYYLYSTYGFGKGDIGQLFIAGFGSSMLFGTIVGSLADKQGRKRACVTYCIVYILSCITKHSPQYKVLMVGRILGGIATSLLFSAFESWLIAEHNKRNFEQQWLSLTFSKAVFLGNGLVAILSGLFGNLLVDTFSFGPVAPFDAAACFLAIGMAIILGTWSENFGDPSDSKDLLTQFKVAAIAIASDEKIALLGAIQSLFEASMYTFVFLWTPALSPNDEEIPHGFVFATFMLASMLGSSLAARLMSRSSLRVENYMQIVFLVSAASLLLPITTSVLVTPSKVKDEGLSLTSSIQLLGFCVFESCVGIFWPSIMKMRSQYIPEEARSTIMNFFRVPLNIFVCIVLYNVDAFPITIMFGMCSIFLFVASILQRRLMVISEKPKAEDWSPMKERNSEVDPLTL

SEQ ID NO: 70725 - protein, 449 aa, Arabidopsis thaliana
  peptide (1)..(449): Ceres Seq. ID no. 2731009
MAAVVAALELSKTNKDRINTSSSFNSFKNNYLLVFSIMMAGDWLQGPYVYYLYSTYGFGKGDIGQLFIAGFGSSMLFGTIVGSLADKQGRKRACVTYCIVYILSCITKHSPQYKVLMVGRILGGIATSLLFSAFESWLIAEHNKRNFEQQWLSLTFSKAVFLGNGLVAILSGLFGNLLVDTFSFGPVAPFDAAACFLAIGMAIILGTWSENFGDPSDSKDLLTQFKVAAIAIASDEKIALLGAIQSLFEASMYTFVFLWTPALSPNDEEIPHGFVFATFMLASMLGSSLAARLMSRSSLRVENYMQIVFLVSAASLLLPITTSVLVTPSKVKDEGLSLTSSIQLLGFCVFESCVGIFWPSIMKMRSQYIPEEARSTIMNFFRVPLNIFVCIVLYNVDAFPITIMFGMCSIFLFVASILQRRLMVISEKPKAEDWSPMKERNSEVDPLTL

SEQ ID NO: 70726 - protein, 412 aa, Arabidopsis thaliana
  peptide (1)..(412): Ceres Seq. ID no. 2731010
MMAGDWLQGPYVYYLYSTYGFGKGDIGQLFIAGFGSSMLFGTIVGSLADKQGRKRACVTYCIVYILSCITKHSPQYKVLMVGRILGGIATSLLFSAFESWLIAEHNKRNFEQQWLSLTFSKAVFLGNGLVAILSGLFGNLLVDTFSFGPVAPFDAAACFLAIGMAIILGTWSENFGDPSDSKDLLTQFKVAAIAIASDEKIALLGAIQSLFEASMYTFVFLWTPALSPNDEEIPHGFVFATFMLASMLGSSLAARLMSRSSLRVENYMQIVFLVSAASLLLPITTSVLVTPSKVKDEGLSLTSSIQLLGFCVFESCVGIFWPSIMKMRSQYIPEEARSTIMNFFRVPLNIFVCIVLYNVDAFPITIMFGMCSIFLFVASILQRRLMVISEKPKAEDWSPMKERNSEVDPLTL

SEQ ID NO: 70727 - DNA, 2193 bp, Arabidopsis thaliana
  misc_feature (1)..(2193): Ceres Seq. ID no. 2731141
  misc_feature (1)..(2193): Ortholog of  Ceres SEQ ID NO 14315634 as cited in SEQ ID NO 53029
atggctaccggaaacttggcttctcgtcttcatctcttgatcgatctttgtgttcgccaattccctgaaagagaagaagtaactttgccgacgaaggaaacggaaaaagatctgcttctttctctatctcaggtgttgagagaaattcaatcttggaggagcgaaatttcatgtgataaggcggtggaatcgcgagaggagactgttgttgatcatgatgaatctgctgatgctttatatggtccagactctatagagtatttatgcttagaaagacttgtggcggatcttaatgtgcatgttaaacatttggctggcaacatacttgtggaagtatccggttgtcttgttgaatctggaagtcaatgggatgagttcattcgtttgctttgtgaatgtttgcggttagcagttatctacagtttcccaattcctgctgtaggatctgaaactggatttggaagtctagatcaatgtttcttcggttctgatgttcttaaatgtaagctggaaaaggctaactggtccacggtgtcggatatctttcgagttcttcgtaatatattgaagcgcttgagccaagaagacaatgaggaaatttttgatgtatacttggaatctgtcaactctacacttgcaaaagttccttggtgccgattggatactattttttctcatcagcatggtagtggtgaaagaaatttccaaggtcagagtggaaacagtgaggaagcaactgtatttcttgggagctttgtccagtttctctgttccatggttcagcaggttcatgttgtagaagattctgatgattttgaaccttcatatttgatcctccaaaaaaccatcaagcttattccggatctcctccgttggtgccaaccaaagttgaaaagtcaaagtggctcttgcatgtcaagatacctagggcacaagttactggtgttgatgatcaggcttactgataagtccaaaatcaaatgtaccattcttctttcatggctgcaatatttgcaacgggattctcaaggctttcttcaacacaccctaacaaagtttaaacccgttcaagataattgtttggagggttcgccattctttgtgagtttgtctgatagggaggtcaatgagatgcattctaatcatttgcaaagactctctgtgtttctgttcctacggtgctccttcactttgatttactcaagtagacataacgacaagctatgtgagtttgattgtagaaagaaagggatggcagagatgtttaaatggattgaacgacagattccaggcaatatgttttctgatcacagaatttatagcaagaagaatgttgaattttctgcatccttcgttcggctgttcatgcatgaggatgatctattatttaaagtcctcctgcaattgctgtctgtaccattgcatagacaggaattgcctaacgtggaagggggttcgcttgaagatgaggaacaaattactctcttccgtttatcaaccttgttcaatcctgtaagattattctgtatatttctttcagagctgcattatgatcatcaagtacttcttgattaccttatatctaaagatattggggctagctgcgcagagtacctgctgagatgcttgcgtgcagtatgtgattcatggactctatttgtggaattcccatttgaaggaagtacagatgctccatctccgaagagaagaaaagttttgcctgagacttctgaggttgaacaaaactggagattacatgcccaggcttttgaagacgccaaagattgtctgctttcgttacaaaattcagttgttaagctacatcagaagaaactgtttccatacaacccagaggctcttctacgacgctctgtctatcccatgagtaatatatctggaccaaagcaaaatgttgtgatccttagtttgtgggttgcggtgagattctctgagacagaacagaaggatcagatgccaacacaaagaagtctcctttccagatcaaatttcaaactaatcggctcaccagtagaagtgtatagagatcctacattctttggttggtgcagctgctatgaaacagagagcattatgttcttgcctccacaatccaaatctgaatggtataagatactctctagtcaagctaatgtgaaactgccccagccaattagagtaagcaatgaagtgtag

SEQ ID NO: 70728 - protein, 730 aa, Arabidopsis thaliana
  peptide (1)..(730): Ceres Seq. ID no. 2731142
MATGNLASRLHLLIDLCVRQFPEREEVTLPTKETEKDLLLSLSQVLREIQSWRSEISCDKAVESREETVVDHDESADALYGPDSIEYLCLERLVADLNVHVKHLAGNILVEVSGCLVESGSQWDEFIRLLCECLRLAVIYSFPIPAVGSETGFGSLDQCFFGSDVLKCKLEKANWSTVSDIFRVLRNILKRLSQEDNEEIFDVYLESVNSTLAKVPWCRLDTIFSHQHGSGERNFQGQSGNSEEATVFLGSFVQFLCSMVQQVHVVEDSDDFEPSYLILQKTIKLIPDLLRWCQPKLKSQSGSCMSRYLGHKLLVLMIRLTDKSKIKCTILLSWLQYLQRDSQGFLQHTLTKFKPVQDNCLEGSPFFVSLSDREVNEMHSNHLQRLSVFLFLRCSFTLIYSSRHNDKLCEFDCRKKGMAEMFKWIERQIPGNMFSDHRIYSKKNVEFSASFVRLFMHEDDLLFKVLLQLLSVPLHRQELPNVEGGSLEDEEQITLFRLSTLFNPVRLFCIFLSELHYDHQVLLDYLISKDIGASCAEYLLRCLRAVCDSWTLFVEFPFEGSTDAPSPKRRKVLPETSEVEQNWRLHAQAFEDAKDCLLSLQNSVVKLHQKKLFPYNPEALLRRSVYPMSNISGPKQNVVILSLWVAVRFSETEQKDQMPTQRSLLSRSNFKLIGSPVEVYRDPTFFGWCSCYETESIMFLPPQSKSEWYKILSSQANVKLPQPIRVSNEV

SEQ ID NO: 70729 - protein, 472 aa, Arabidopsis thaliana
  peptide (1)..(472): Ceres Seq. ID no. 2731143
MVQQVHVVEDSDDFEPSYLILQKTIKLIPDLLRWCQPKLKSQSGSCMSRYLGHKLLVLMIRLTDKSKIKCTILLSWLQYLQRDSQGFLQHTLTKFKPVQDNCLEGSPFFVSLSDREVNEMHSNHLQRLSVFLFLRCSFTLIYSSRHNDKLCEFDCRKKGMAEMFKWIERQIPGNMFSDHRIYSKKNVEFSASFVRLFMHEDDLLFKVLLQLLSVPLHRQELPNVEGGSLEDEEQITLFRLSTLFNPVRLFCIFLSELHYDHQVLLDYLISKDIGASCAEYLLRCLRAVCDSWTLFVEFPFEGSTDAPSPKRRKVLPETSEVEQNWRLHAQAFEDAKDCLLSLQNSVVKLHQKKLFPYNPEALLRRSVYPMSNISGPKQNVVILSLWVAVRFSETEQKDQMPTQRSLLSRSNFKLIGSPVEVYRDPTFFGWCSCYETESIMFLPPQSKSEWYKILSSQANVKLPQPIRVSNEV

SEQ ID NO: 70730 - protein, 426 aa, Arabidopsis thaliana
  peptide (1)..(426): Ceres Seq. ID no. 2731144
MSRYLGHKLLVLMIRLTDKSKIKCTILLSWLQYLQRDSQGFLQHTLTKFKPVQDNCLEGSPFFVSLSDREVNEMHSNHLQRLSVFLFLRCSFTLIYSSRHNDKLCEFDCRKKGMAEMFKWIERQIPGNMFSDHRIYSKKNVEFSASFVRLFMHEDDLLFKVLLQLLSVPLHRQELPNVEGGSLEDEEQITLFRLSTLFNPVRLFCIFLSELHYDHQVLLDYLISKDIGASCAEYLLRCLRAVCDSWTLFVEFPFEGSTDAPSPKRRKVLPETSEVEQNWRLHAQAFEDAKDCLLSLQNSVVKLHQKKLFPYNPEALLRRSVYPMSNISGPKQNVVILSLWVAVRFSETEQKDQMPTQRSLLSRSNFKLIGSPVEVYRDPTFFGWCSCYETESIMFLPPQSKSEWYKILSSQANVKLPQPIRVSNEV

SEQ ID NO: 70731 - DNA, 2385 bp, Arabidopsis thaliana
  misc_feature (1)..(2385): Ceres Seq. ID no. 2731145
  misc_feature (1)..(2385): Ortholog of  Ceres SEQ ID NO 12586556 as cited in SEQ ID NO 64667
  misc_feature (1)..(2385): Ortholog of  Ceres SEQ ID NO 13660894 as cited in SEQ ID NO 67475
atgacgagaggttcgatgaaacgcagcgtattgtttgtagagacagacgccgctgccgagtatccgtacgcaaataacaatctcatatcgatgtacgtgaggtgtagttcgctggaacaagcacggaaagtgttcgacaaaatgcctcagagaaacattgtaactctattcggacttagtgctgtatttgagtatgtttccatgggatcatcactgcattcgcagattataaagcttggatcttttcagatgatcttttttatgccactgaacgaaatagcttcttccgttgtagaacttacacggaaatgcgtctcgatcacggtactaaaacgggcgcgtcagatccacgctctcgtcctcaccgccggcgctggcgccgctaccgagtctccgtacgcaaataacaatctcatctcaatgtatgtgaggtgtggttcactggaacaagcacggaaagtgttcgacaaaatgcctcacagaaacgtagtttcttataatgcgctttattcggcgtattcccggaacccagattttgcaagttatgcgtttcctctaacaacccatatggcgtttgagtacgtgaagcccaatagttcaactttcactagcttagtgcaagtatgtgctgtgcttgaggatgttttaatggggtcatcattaaactcgcagattataaagcttggttattcagataatgtagttgtccagacatcggttttggggatgtactctagttgcggggacttagaatctgcgaggagaatatttgactgtgtaaataatagagatgcggttgcttggaacacaatgatagttgggagtttgaaaaatgataagatagaagatgggcttatgttctttcgaaacatgttgatgtctggtgttgatccaacgcagttcacgtattcgattgtgttgaatggttgtagtaaattgggaagctattcactggggaaactaatccatgcccggataatagtctctgatagtttagctgatttacctctagataatgctcttcttgacatgtattgcagttgtggagacatgagggaagcattttatgtgtttgggaggattcataacccaaatttggtttcatggaactcgattatttcagggtgctcagaaaacggctttggagagcaagcgatgcttatgtatagaaggttgctgaggatgtccacacctcggccggatgaatatactttctctgctgctatatctgcgacagcggaaccagaaagatttgttcatgggaagcttcttcacggacaagtaacgaaattaggatatgaaaggagtgtttttgttggaacaacactattgtcgatgtacttcaagaacagggaagctgaatctgcacagaaggtgtttgatgtgatgaaggaaagggatgttgttctctggactgagatgatcgtagggcattctagattaggaaacagcgaattagcggtccaattcttcattgaaatgtacagagaaaagaatagaagtgatggtttttccctgagtagtgtcataggagcatgttcagatatggcaatgctaagacaaggtgaagttttccattgtcttgccataaggacgggattcgattgtgttatgtcagtatgtggagcgctagtagacatgtatgggaaaaacggtaaatacgaaactgcagaaacaatattctctcttgcttcaaatccagatttgaaatgttggaattcgatgctaggtgcttatagtcagcatggaatggtagaaaaagctctgagcttcttcgagcaaatactagaaaacggattcatgccagatgctgttacatacttgtctttattagcagcctgtagccacaggggatcaacgttgcaaggtaagttcctatggaaccaaatgaaggaacagggcatcaaagcagggtttaagcactactcttgcatggtgaatttagtatcaaaagctgggttagtagacgaggcactggaactgatagaacaatctcctcccgggaacaaccaagcagagctctggagaactctgctaagcgcatgtgttaacacaagaaacttgcagataggactatatgcagctgagcaaatactgaaacttgatccagaagacactgcaacacacattctactatcaaatttatatgcagtaaatgggagatgggaggatgttgcagagatgagaaggaagattagaggattagcttcatctaaagatccaggattgagctggattgaagtgaacaacaacaatacacaagttttctcctcaggagaccagtcgaacccagaagttgtaagtcaagctcaagatgaattaaatagattaaagagaaatatgttgtgcaaatcatcattcaataaacttgtctgttcaaattaa

SEQ ID NO: 70732 - protein, 794 aa, Arabidopsis thaliana
  peptide (1)..(794): Ceres Seq. ID no. 2731146
MTRGSMKRSVLFVETDAAAEYPYANNNLISMYVRCSSLEQARKVFDKMPQRNIVTLFGLSAVFEYVSMGSSLHSQIIKLGSFQMIFFMPLNEIASSVVELTRKCVSITVLKRARQIHALVLTAGAGAATESPYANNNLISMYVRCGSLEQARKVFDKMPHRNVVSYNALYSAYSRNPDFASYAFPLTTHMAFEYVKPNSSTFTSLVQVCAVLEDVLMGSSLNSQIIKLGYSDNVVVQTSVLGMYSSCGDLESARRIFDCVNNRDAVAWNTMIVGSLKNDKIEDGLMFFRNMLMSGVDPTQFTYSIVLNGCSKLGSYSLGKLIHARIIVSDSLADLPLDNALLDMYCSCGDMREAFYVFGRIHNPNLVSWNSIISGCSENGFGEQAMLMYRRLLRMSTPRPDEYTFSAAISATAEPERFVHGKLLHGQVTKLGYERSVFVGTTLLSMYFKNREAESAQKVFDVMKERDVVLWTEMIVGHSRLGNSELAVQFFIEMYREKNRSDGFSLSSVIGACSDMAMLRQGEVFHCLAIRTGFDCVMSVCGALVDMYGKNGKYETAETIFSLASNPDLKCWNSMLGAYSQHGMVEKALSFFEQILENGFMPDAVTYLSLLAACSHRGSTLQGKFLWNQMKEQGIKAGFKHYSCMVNLVSKAGLVDEALELIEQSPPGNNQAELWRTLLSACVNTRNLQIGLYAAEQILKLDPEDTATHILLSNLYAVNGRWEDVAEMRRKIRGLASSKDPGLSWIEVNNNNTQVFSSGDQSNPEVVSQAQDELNRLKRNMLCKSSFNKLVCSN

SEQ ID NO: 70733 - protein, 789 aa, Arabidopsis thaliana
  peptide (1)..(789): Ceres Seq. ID no. 2731147
MKRSVLFVETDAAAEYPYANNNLISMYVRCSSLEQARKVFDKMPQRNIVTLFGLSAVFEYVSMGSSLHSQIIKLGSFQMIFFMPLNEIASSVVELTRKCVSITVLKRARQIHALVLTAGAGAATESPYANNNLISMYVRCGSLEQARKVFDKMPHRNVVSYNALYSAYSRNPDFASYAFPLTTHMAFEYVKPNSSTFTSLVQVCAVLEDVLMGSSLNSQIIKLGYSDNVVVQTSVLGMYSSCGDLESARRIFDCVNNRDAVAWNTMIVGSLKNDKIEDGLMFFRNMLMSGVDPTQFTYSIVLNGCSKLGSYSLGKLIHARIIVSDSLADLPLDNALLDMYCSCGDMREAFYVFGRIHNPNLVSWNSIISGCSENGFGEQAMLMYRRLLRMSTPRPDEYTFSAAISATAEPERFVHGKLLHGQVTKLGYERSVFVGTTLLSMYFKNREAESAQKVFDVMKERDVVLWTEMIVGHSRLGNSELAVQFFIEMYREKNRSDGFSLSSVIGACSDMAMLRQGEVFHCLAIRTGFDCVMSVCGALVDMYGKNGKYETAETIFSLASNPDLKCWNSMLGAYSQHGMVEKALSFFEQILENGFMPDAVTYLSLLAACSHRGSTLQGKFLWNQMKEQGIKAGFKHYSCMVNLVSKAGLVDEALELIEQSPPGNNQAELWRTLLSACVNTRNLQIGLYAAEQILKLDPEDTATHILLSNLYAVNGRWEDVAEMRRKIRGLASSKDPGLSWIEVNNNNTQVFSSGDQSNPEVVSQAQDELNRLKRNMLCKSSFNKLVCSN

SEQ ID NO: 70734 - protein, 764 aa, Arabidopsis thaliana
  peptide (1)..(764): Ceres Seq. ID no. 2731148
MYVRCSSLEQARKVFDKMPQRNIVTLFGLSAVFEYVSMGSSLHSQIIKLGSFQMIFFMPLNEIASSVVELTRKCVSITVLKRARQIHALVLTAGAGAATESPYANNNLISMYVRCGSLEQARKVFDKMPHRNVVSYNALYSAYSRNPDFASYAFPLTTHMAFEYVKPNSSTFTSLVQVCAVLEDVLMGSSLNSQIIKLGYSDNVVVQTSVLGMYSSCGDLESARRIFDCVNNRDAVAWNTMIVGSLKNDKIEDGLMFFRNMLMSGVDPTQFTYSIVLNGCSKLGSYSLGKLIHARIIVSDSLADLPLDNALLDMYCSCGDMREAFYVFGRIHNPNLVSWNSIISGCSENGFGEQAMLMYRRLLRMSTPRPDEYTFSAAISATAEPERFVHGKLLHGQVTKLGYERSVFVGTTLLSMYFKNREAESAQKVFDVMKERDVVLWTEMIVGHSRLGNSELAVQFFIEMYREKNRSDGFSLSSVIGACSDMAMLRQGEVFHCLAIRTGFDCVMSVCGALVDMYGKNGKYETAETIFSLASNPDLKCWNSMLGAYSQHGMVEKALSFFEQILENGFMPDAVTYLSLLAACSHRGSTLQGKFLWNQMKEQGIKAGFKHYSCMVNLVSKAGLVDEALELIEQSPPGNNQAELWRTLLSACVNTRNLQIGLYAAEQILKLDPEDTATHILLSNLYAVNGRWEDVAEMRRKIRGLASSKDPGLSWIEVNNNNTQVFSSGDQSNPEVVSQAQDELNRLKRNMLCKSSFNKLVCSN

SEQ ID NO: 70735 - DNA, 678 bp, Arabidopsis thaliana
  misc_feature (1)..(678): Ceres Seq. ID no. 2992353
  misc_feature (1)..(678): Ortholog of  Ceres SEQ ID NO 13505291 as cited in SEQ ID NO 56614
  misc_feature (1)..(678): Ortholog of  Ceres SEQ ID NO 13596535 as cited in SEQ ID NO 62321
  misc_feature (1)..(678): Ortholog of  Ceres SEQ ID NO 13597394 as cited in SEQ ID NO 63457
atggcggctgctgcaagaaattatcaaaaggaagttcttgcaaatgagaaggcgcaaggatcaaatcctgttaatgaagaggttgatcttgatgaacttatggatgatccagagctagaaagattgcacgcagataggattgcagcactaaagagagaggttgagaagagagaatcgtttaaaagacaagggcatggtgaatatcgagaggtgagtgaaggagatttcttgggtgaagtcaccaggagtgagaaagtgatatgtcatttctaccataaggaattttaccggtgcaagattatggacaagcatctgaaaactcttgcacctagacatgtggacacaaagttcattaaagtggacgcagagaatgctcctttctttgtcacgaagcttgcaataaagactttgccttgcgttgtgcttttcagcaagggagttgcgatggataggctagttgggttccaggatctgggaaccaaggacgatttcacaacgaataaactagagaacgttcttcttaaaaaggttagagaatttttgcttaaagagtgcaaatctttaacaggaatgctcagcaagaagaagaaagaggaagatgatgaagacgccgaatatcaagagagcatacggaggtctgttaggtcttcagagaatctggactctgattctgactga

SEQ ID NO: 70736 - protein, 225 aa, Arabidopsis thaliana
  peptide (1)..(225): Ceres Seq. ID no. 2992354
MAAAARNYQKEVLANEKAQGSNPVNEEVDLDELMDDPELERLHADRIAALKREVEKRESFKRQGHGEYREVSEGDFLGEVTRSEKVICHFYHKEFYRCKIMDKHLKTLAPRHVDTKFIKVDAENAPFFVTKLAIKTLPCVVLFSKGVAMDRLVGFQDLGTKDDFTTNKLENVLLKKVREFLLKECKSLTGMLSKKKKEEDDEDAEYQESIRRSVRSSENLDSDSD

SEQ ID NO: 70737 - protein, 192 aa, Arabidopsis thaliana
  peptide (1)..(192): Ceres Seq. ID no. 2992355
MDDPELERLHADRIAALKREVEKRESFKRQGHGEYREVSEGDFLGEVTRSEKVICHFYHKEFYRCKIMDKHLKTLAPRHVDTKFIKVDAENAPFFVTKLAIKTLPCVVLFSKGVAMDRLVGFQDLGTKDDFTTNKLENVLLKKVREFLLKECKSLTGMLSKKKKEEDDEDAEYQESIRRSVRSSENLDSDSD

SEQ ID NO: 70738 - protein, 125 aa, Arabidopsis thaliana
  peptide (1)..(125): Ceres Seq. ID no. 2992356
MDKHLKTLAPRHVDTKFIKVDAENAPFFVTKLAIKTLPCVVLFSKGVAMDRLVGFQDLGTKDDFTTNKLENVLLKKVREFLLKECKSLTGMLSKKKKEEDDEDAEYQESIRRSVRSSENLDSDSD

SEQ ID NO: 70739 - DNA, 639 bp, Arabidopsis thaliana
  misc_feature (1)..(639): Ceres Seq. ID no. 2993897
  misc_feature (1)..(639): Ortholog of  Ceres SEQ ID NO 13599102 as cited in SEQ ID NO 1347
  misc_feature (1)..(639): Ortholog of  Ceres SEQ ID NO 15176238 as cited in SEQ ID NO 55058
  misc_feature (1)..(639): Ortholog of  Ceres SEQ ID NO 13598630 as cited in SEQ ID NO 65440
atgtataaagacttgaacatcaatatagtgtgtcctggaaaagattcaactcttggggttgagagtgttggcacagttcctgcatcactcgtgacttatgcttccattctagcaattcaaccagacttaatcattaatgcgggaaccgctggtggctttaaggccaaaggagcatgtattagcgatgtttatgttgtctctactgttgctttccatgacagaagaatacctgttcctgtccttgatatatatggtgttggtatgcggaacaccttccccacacccaaccttataaaggagctgaacctaaaggtgggaagattatccactggcgattctatggatatgtctccacatgacgaagaatccatcacagcaaatgatgctacagttaaagatatggagttactacgacttatttacggattcttggcatttcagggagcagcagtggcctatgtggctgatatctttaaagtgcctacgattctaataaaaggtgtgactgatattgtggatggcaatagaccaacttctgaagaatttttggagaacttagctgcagtcactgccaaacttgatgagtcacttaccaaagtgattgacttcatcagtgggaaatgtctctcagacctctaa

SEQ ID NO: 70740 - protein, 212 aa, Arabidopsis thaliana
  peptide (1)..(212): Ceres Seq. ID no. 2993898
MYKDLNINIVCPGKDSTLGVESVGTVPASLVTYASILAIQPDLIINAGTAGGFKAKGACISDVYVVSTVAFHDRRIPVPVLDIYGVGMRNTFPTPNLIKELNLKVGRLSTGDSMDMSPHDEESITANDATVKDMELLRLIYGFLAFQGAAVAYVADIFKVPTILIKGVTDIVDGNRPTSEEFLENLAAVTAKLDESLTKVIDFISGKCLSDL

SEQ ID NO: 70741 - protein, 125 aa, Arabidopsis thaliana
  peptide (1)..(125): Ceres Seq. ID no. 2993899
MRNTFPTPNLIKELNLKVGRLSTGDSMDMSPHDEESITANDATVKDMELLRLIYGFLAFQGAAVAYVADIFKVPTILIKGVTDIVDGNRPTSEEFLENLAAVTAKLDESLTKVIDFISGKCLSDL

SEQ ID NO: 70742 - DNA, 825 bp, Arabidopsis thaliana
  misc_feature (1)..(825): Ceres Seq. ID no. 2996468
  misc_feature (1)..(825): Ortholog of  Ceres SEQ ID NO 14303487 as cited in SEQ ID NO 54521
  misc_feature (1)..(825): Ortholog of  Ceres SEQ ID NO 14316302 as cited in SEQ ID NO 55232
  misc_feature (1)..(825): Ortholog of  Ceres SEQ ID NO 14308274 as cited in SEQ ID NO 55597
  misc_feature (1)..(825): Ortholog of  Ceres SEQ ID NO 13659710 as cited in SEQ ID NO 60808
atgggaggaagtgctagtctccagtcagactcgatggaagcagcagcagcagcagattcttcgattcccagagacaaagactttggcaaattccaattcggatgcgagcactacaagagacgatgtaaaatcagagctccttgctgcaatctcatcttctcatgccgccattgccacaacgactctgcgaattctcttcctgatcctaaagaacgtcatgatttggtccgccaaaacgtcaaacaggttgtttgttcaatttgtcaaactgagcaagaggttgctaaagtctgctcgaattgtggcgtcaatatgggagaatacttttgcgatatctgcaaattctttgacgacgatatttcgaaagaacagtttcattgtgatgactgtggaatttgtagagttggtgggcgtgacaaattctttcattgccagaactgtggagcttgctacggaatgggcttgcgcgataaacactcgtgcattgagaactctacaaaaaattcttgtcctgtctgttatgagtatctatttgattcggtaaaggccgcacatgtgatgaaatgtggtcatacaatgcatatggattgctttgaacaaatgatcaatgaaaaccagtaccgatgcccaatttgtgccaagtcaatggtggatatgtctccttcgtggcacctattagatttcgaggtttcaattctctgcaatgactgcaacaaggggagtaaagctatgttccacattttgggacacaagtgcagtgattgcggttcatacaacactcggagaatctcaacgccacaagatccagtgagtgaaacagagtga

SEQ ID NO: 70743 - protein, 274 aa, Arabidopsis thaliana
  peptide (1)..(274): Ceres Seq. ID no. 2996469
MGGSASLQSDSMEAAAAADSSIPRDKDFGKFQFGCEHYKRRCKIRAPCCNLIFSCRHCHNDSANSLPDPKERHDLVRQNVKQVVCSICQTEQEVAKVCSNCGVNMGEYFCDICKFFDDDISKEQFHCDDCGICRVGGRDKFFHCQNCGACYGMGLRDKHSCIENSTKNSCPVCYEYLFDSVKAAHVMKCGHTMHMDCFEQMINENQYRCPICAKSMVDMSPSWHLLDFEVSILCNDCNKGSKAMFHILGHKCSDCGSYNTRRISTPQDPVSETE

SEQ ID NO: 70744 - protein, 263 aa, Arabidopsis thaliana
  peptide (1)..(263): Ceres Seq. ID no. 2996470
MEAAAAADSSIPRDKDFGKFQFGCEHYKRRCKIRAPCCNLIFSCRHCHNDSANSLPDPKERHDLVRQNVKQVVCSICQTEQEVAKVCSNCGVNMGEYFCDICKFFDDDISKEQFHCDDCGICRVGGRDKFFHCQNCGACYGMGLRDKHSCIENSTKNSCPVCYEYLFDSVKAAHVMKCGHTMHMDCFEQMINENQYRCPICAKSMVDMSPSWHLLDFEVSILCNDCNKGSKAMFHILGHKCSDCGSYNTRRISTPQDPVSETE

SEQ ID NO: 70745 - protein, 180 aa, Arabidopsis thaliana
  peptide (1)..(180): Ceres Seq. ID no. 2996471
WEEVLVSSQTRWKQQQQQILRFPETKTLANSNSDASTTRDDVKSELLAAISSSHAAIATTTLRILFLILKNVMIWSAKTSNRLFVQFVKLSKRLLKSARIVASIWENTFAISANSLTTIFRKNSFIVMTVEFVELVGVTNSFIARTVELATEWACAINTRALRTLQKILVLSVMSIYLIR

SEQ ID NO: 70746 - DNA, 732 bp, Arabidopsis thaliana
  misc_feature (1)..(732): Ceres Seq. ID no. 2996700
  misc_feature (1)..(732): Ortholog of  Ceres SEQ ID NO 15178931 as cited in SEQ ID NO 1125
  misc_feature (1)..(732): Ortholog of  Ceres SEQ ID NO 13596648 as cited in SEQ ID NO 63080
atggtggcgcaaaacagtcggcgggagcttctagcagcttccctgatcctaactttagctctaattcgtctaacggaagcaaactccgaaggggacgctcttcacgcgcttcgccggagcttatcagatccagacaatgttgttcagagttgggatccaactcttgttaatccttgtacttggtttcatgtcacttgtaatcaacaccatcaagtcactcgtctggatttggggaattcaaacttatctggacatctagtacctgaacttgggaagcttgaacatttacaatatctgtatggaatcatcactcttttgccttttgattatctgaaaacatttacattatcagtcacacatataacattttgctttgagtcatatagtgaactctacaaaaacgagattcaaggaactataccttctgagcttggaaatctgaagagtctaatcagtttggatctgtacaacaacaatctcaccgggaaaatcccatcttctttgggaaaattgaagcggcttaacgaaaaccgattgaccggtcctattcctagagaactcacagttatttcaagccttaaagttgttgatgtctcagggaatgatttgtgtggaacaattccagtagaaggaccttttgaacacattcctatgcaaaactttgagaacaacctgagattggagggaccagaactactaggtcttgcgagctatgacaccaattgcacttaa

SEQ ID NO: 70747 - protein, 243 aa, Arabidopsis thaliana
  peptide (1)..(243): Ceres Seq. ID no. 2996701
MVAQNSRRELLAASLILTLALIRLTEANSEGDALHALRRSLSDPDNVVQSWDPTLVNPCTWFHVTCNQHHQVTRLDLGNSNLSGHLVPELGKLEHLQYLYGIITLLPFDYLKTFTLSVTHITFCFESYSELYKNEIQGTIPSELGNLKSLISLDLYNNNLTGKIPSSLGKLKRLNENRLTGPIPRELTVISSLKVVDVSGNDLCGTIPVEGPFEHIPMQNFENNLRLEGPELLGLASYDTNCT

SEQ ID NO: 70748 - DNA, 1440 bp, Arabidopsis thaliana
  misc_feature (1)..(1440): Ceres Seq. ID no. 2996710
  misc_feature (1)..(1440): Ortholog of  Ceres SEQ ID NO 13654166 as cited in SEQ ID NO 68381
  misc_feature (1)..(1440): Ortholog of  Ceres SEQ ID NO 13599720 as cited in SEQ ID NO 0
atggccgatgatgagtcaagaaccatcctgttggagaagaacgaagactgccctggctgtatcattgatcgaaccaagcaacagcaacgaggcgttccttacttgcacctctccttcatctggctcgtgtcactctgcactgagaatgaccaatatgtattgtggcagatcagagacttccatatagcaaaacaagaagaagatattggtttctatgctggttttgttggatcatcattcatgattggaagagctttgacatctattttctgggggaaattagctgatcgttatggtcgcaaacctattattctcattgggacattctcagtgatcatattcaataccctctttggtctaagcacaagtttctggcttgcaatttccgttagatttcttcttggctgcttcaattgtttacttggagttataagagcatatgcttcagaagtcgttagcgaagagtataacgctcttagtctttctgtcgtgagtacatcaagaggtataggattgatactaggtcctgctattggaggttatcttgctcagcctgcagaaaagtacccaaatatattttcccagagttcagtttttgggaggtttccatattttctgccgagcttagttatatccgtctatgctactgcggttctcatcgcttgctggtggcttcctgaaactcttcatacacgttgtagaattgcacaagggagacttaatccaacagagctaaacgatgatgaaagtagaggaggaggacttgatgaacagaaaataattaataagccaagtctcttgaggaatcgtccattgatggctatcatcattgtttattgtgttttttccctccaagagatagcatacaatgagatattctcactctgggctgttagtgaccgaagctatggaggattgagcttctcatctcaagatgttggtgaagttttagctatatcaggacttgggcttctggtgtttcaacttttggtatacccgccattggagaaatccgtgggactccttgcggttatacgtctttctgcggtattgctgataccgctgctttcgtgttacccctatatagctttgctttctggggtgactctccatttggtgataaattgtgcatccatcataaaaaacgctttgtctatctcacttgtcacaggactgtttatcatgttgaacaaagctgtgcctcagaatcagagaggtgctgctaatggcatttctatgaccgcgatgtctgttttcaaatcatttggccctgccggtggaggggtcttattctcatgggcgcaaaagagacaagacgctacattccttccaggtcaaatttttgcaccatgtgatgagatggtgttcttggtgttgaatttggtacagctcgtaggattgatactaacgttcataccttacatttcccaaatccagtaa

SEQ ID NO: 70749 - protein, 479 aa, Arabidopsis thaliana
  peptide (1)..(479): Ceres Seq. ID no. 2996711
MADDESRTILLEKNEDCPGCIIDRTKQQQRGVPYLHLSFIWLVSLCTENDQYVLWQIRDFHIAKQEEDIGFYAGFVGSSFMIGRALTSIFWGKLADRYGRKPIILIGTFSVIIFNTLFGLSTSFWLAISVRFLLGCFNCLLGVIRAYASEVVSEEYNALSLSVVSTSRGIGLILGPAIGGYLAQPAEKYPNIFSQSSVFGRFPYFLPSLVISVYATAVLIACWWLPETLHTRCRIAQGRLNPTELNDDESRGGGLDEQKIINKPSLLRNRPLMAIIIVYCVFSLQEIAYNEIFSLWAVSDRSYGGLSFSSQDVGEVLAISGLGLLVFQLLVYPPLEKSVGLLAVIRLSAVLLIPLLSCYPYIALLSGVTLHLVINCASIIKNALSISLVTGLFIMLNKAVPQNQRGAANGISMTAMSVFKSFGPAGGGVLFSWAQKRQDATFLPGQIFAPCDEMVFLVLNLVQLVGLILTFIPYISQIQ

SEQ ID NO: 70750 - protein, 399 aa, Arabidopsis thaliana
  peptide (1)..(399): Ceres Seq. ID no. 2996712
MIGRALTSIFWGKLADRYGRKPIILIGTFSVIIFNTLFGLSTSFWLAISVRFLLGCFNCLLGVIRAYASEVVSEEYNALSLSVVSTSRGIGLILGPAIGGYLAQPAEKYPNIFSQSSVFGRFPYFLPSLVISVYATAVLIACWWLPETLHTRCRIAQGRLNPTELNDDESRGGGLDEQKIINKPSLLRNRPLMAIIIVYCVFSLQEIAYNEIFSLWAVSDRSYGGLSFSSQDVGEVLAISGLGLLVFQLLVYPPLEKSVGLLAVIRLSAVLLIPLLSCYPYIALLSGVTLHLVINCASIIKNALSISLVTGLFIMLNKAVPQNQRGAANGISMTAMSVFKSFGPAGGGVLFSWAQKRQDATFLPGQIFAPCDEMVFLVLNLVQLVGLILTFIPYISQIQ

SEQ ID NO: 70751 - DNA, 1023 bp, Arabidopsis thaliana
  misc_feature (1)..(1023): Ceres Seq. ID no. 2996845
  misc_feature (1)..(1023): Ortholog of  Ceres SEQ ID NO 12636774 as cited in SEQ ID NO 372
  misc_feature (1)..(1023): Ortholog of  Ceres SEQ ID NO 13596470 as cited in SEQ ID NO 62158
  misc_feature (1)..(1023): Ortholog of  Ceres SEQ ID NO 12615466 as cited in SEQ ID NO 62761
  misc_feature (1)..(1023): Ortholog of  Ceres SEQ ID NO 12615907 as cited in SEQ ID NO 62860
  misc_feature (1)..(1023): Ortholog of  Ceres SEQ ID NO 13597295 as cited in SEQ ID NO 63743
  misc_feature (1)..(1023): Ortholog of  Ceres SEQ ID NO 13597439 as cited in SEQ ID NO 64081
  misc_feature (1)..(1023): Ortholog of  Ceres SEQ ID NO 13599438 as cited in SEQ ID NO 0
  misc_feature (1)..(1023): Ortholog of  Ceres SEQ ID NO 13600370 as cited in SEQ ID NO 0
atggagaaaggtgaggattcaagcacattcaaaatggggaattctgcacaagagaggagtttaccgtatgtacctgactgttacgtcgtcccgccttctagcaaaccatgtgactcaaattccggaatcgtacccactatcgatgtttctcggctgaaagggggagatgatgaacgtcgagggatagtgaaccatggaatcaaccagaacatactagatgacgccttggaggttgcgaatagcttcttcgagctgccggcgaaggagaagaaacagtttatgtcaaacgatgtctacgcaccggttcggtacagtacgagtctcaaggacggtttggacacgatccaattctggaggatttttctaaagcactatgcacatcctcttcatcgttggattcatctttggccagagaatccacccggatacagggaaaaaatgggaaagttctgcgaggaagtgaggaaactatcgatagagttaatgggagcaataacggaaagcctaggtctagggagagactacctgtcgtctcggatggacgaaaacggcatgcaagtcatgacagttaactgctatccaccctgtccggaccctgagacggcgctaggcctgccgccgcattcagactatagttgcatcaccctccttctacagaacttggacggtctcaagatcttcgatccaatggctcacggtggatctggccgttgggttggtgtcccacaagtcacaggtgtacttaaggtccatattggtgaccatgtggaagttctaagcaatggattatacaagagcatcgttcataaagtcactttgaatgaagagaagacgagaatctctctcgcgagcttgcatagcttgggtatggacgataagatgagtgtaccgcgcgaattggttaacgatgaaaatccggttcggtataaagagagcagctttaacgattttcttgattttcttgtcaaaaatgacatttctcaaggggataggtttattgacactctcagaatcaaggactga

SEQ ID NO: 70752 - protein, 340 aa, Arabidopsis thaliana
  peptide (1)..(340): Ceres Seq. ID no. 2996846
MEKGEDSSTFKMGNSAQERSLPYVPDCYVVPPSSKPCDSNSGIVPTIDVSRLKGGDDERRGIVNHGINQNILDDALEVANSFFELPAKEKKQFMSNDVYAPVRYSTSLKDGLDTIQFWRIFLKHYAHPLHRWIHLWPENPPGYREKMGKFCEEVRKLSIELMGAITESLGLGRDYLSSRMDENGMQVMTVNCYPPCPDPETALGLPPHSDYSCITLLLQNLDGLKIFDPMAHGGSGRWVGVPQVTGVLKVHIGDHVEVLSNGLYKSIVHKVTLNEEKTRISLASLHSLGMDDKMSVPRELVNDENPVRYKESSFNDFLDFLVKNDISQGDRFIDTLRIKD

SEQ ID NO: 70753 - protein, 329 aa, Arabidopsis thaliana
  peptide (1)..(329): Ceres Seq. ID no. 2996847
MGNSAQERSLPYVPDCYVVPPSSKPCDSNSGIVPTIDVSRLKGGDDERRGIVNHGINQNILDDALEVANSFFELPAKEKKQFMSNDVYAPVRYSTSLKDGLDTIQFWRIFLKHYAHPLHRWIHLWPENPPGYREKMGKFCEEVRKLSIELMGAITESLGLGRDYLSSRMDENGMQVMTVNCYPPCPDPETALGLPPHSDYSCITLLLQNLDGLKIFDPMAHGGSGRWVGVPQVTGVLKVHIGDHVEVLSNGLYKSIVHKVTLNEEKTRISLASLHSLGMDDKMSVPRELVNDENPVRYKESSFNDFLDFLVKNDISQGDRFIDTLRIKD

SEQ ID NO: 70754 - protein, 247 aa, Arabidopsis thaliana
  peptide (1)..(247): Ceres Seq. ID no. 2996848
MSNDVYAPVRYSTSLKDGLDTIQFWRIFLKHYAHPLHRWIHLWPENPPGYREKMGKFCEEVRKLSIELMGAITESLGLGRDYLSSRMDENGMQVMTVNCYPPCPDPETALGLPPHSDYSCITLLLQNLDGLKIFDPMAHGGSGRWVGVPQVTGVLKVHIGDHVEVLSNGLYKSIVHKVTLNEEKTRISLASLHSLGMDDKMSVPRELVNDENPVRYKESSFNDFLDFLVKNDISQGDRFIDTLRIKD

SEQ ID NO: 70755 - DNA, 2469 bp, Arabidopsis thaliana
  misc_feature (1)..(2469): Ceres Seq. ID no. 2996861
  misc_feature (1)..(2469): Ortholog of  Ceres SEQ ID NO 12586556 as cited in SEQ ID NO 64667
  misc_feature (1)..(2469): Ortholog of  Ceres SEQ ID NO 13660894 as cited in SEQ ID NO 67475
atgatcgtgttcatgagaataattcatgttgcgcagactcgcagattgatgatccgatgcaatcgcattcgacaatgtgggttttctgtgaaaactgcggcattggatttagaatcgtcggattcgataatcccaggcttagactctcatgcttacggtgcaatgctccgtcgctgcattcagaagaacgacccaatttcagcaaaggctattcattgcgacatcttgaagaaaggaagctgcttagaccttttcgccacaaacattctactcaacgcttatgtgaaagctggctttgacaaagatgcgttaaacctgttcgacgaaatgcctgagagaaataatgtctcttttgttactcttgcgcaagggtatgcgtgtcaagatcccattggtttgtattccaggttgcatcgagagggtcatgagcttaatccacacgtcttcacttctttcttgaagttgtttgttagtttggacaaagctgagatttgtccatggttgcattctcctatcgttaagctcggttatgattctaatgcttttgttggagctgcgcttattaatgcttactctgtctgtggttctgttgatagtgcaagaactgtttttgaagggattttgtgcaaagacattgttgtttgggcaggaattgtatcttgctatgtagaaaatggatatttcgaggattctcttaagctgctatcttgtatgaggatggctggtttcatgcccaacaactacacctttgacacggcgcttaaggctagtattgggctaggcgcatttgatttcgcgaaaggtgttcatggccaaatcttaaaaacatgttatgtgttggatcctcgtgtgggtgttggtttgcttcagttgtatacacaactcggagacatgtctgatgctttcaaagtgtttaatgagatgccaaagaatgatgtggtaccttggagttttatgattgctcgtttttgtcaaaacggtttctgcaacgaggcggttgatctttttattcgaatgagggaagcttttgttgtccctaacgagtttactttaagcagtattttgaatggctgtgccatcggaaagtgttctggcttaggtgagcaactccatggtcttgtagtcaaagttggctttgatttggatatctatgtctcaaatgctcttattgatgtatatgccaaatgtgagaaaatggataccgctgtgaagttatttgctgagttatcaagtaaaaatgaggtaagctggaacacagtcattgtcgggtatgagaatctaggcgaaggaggaaaagcgttcagcatgtttcgtgaagcgctcagaaatcaggtgtcggtaactgaagtaactttctcaagtgctcttggagcttgtgcttcattggcgagcatggacctcggtgtccaagttcatggactggcgataaaaaccaataatgccaaaaaagttgcagtgagtaactcattgatagatatgtatgcaaaatgtggtgatatcaaattcgcacaatcggtgttcaacgagatggaaacgatagatgtcgcttcatggaatgcgttgatctcaggctattccacacatggactgggtagacaggcattgagaatcctcgacattatgaaggatagagattgcaagccaaatggtttaacatttcttggtgttctttctggatgcagcaatgcaggattaatagatcaaggtcaagaatgttttgaatcaatgattcgtgatcatggtattgaaccatgtttggaacattatacgtgtatggtcaggcttttgggaagatcagggcagcttgacaaagcaatgaagctgattgaagggattccatatgagcctagcgttatgatctggagggcaatgcttagtgcctctatgaatcagaacaatgaagagtttgcaaggagatcggcagaggaaatactaaagatcaatccaaaggacgaggcgacatatgttctggtatcaaacatgtacgcaggtgcaaaacaatgggcaaacgtagcttccattaggaaaagcatgaaggaaatgggtgtcaagaaggaacctggtttaagttggatagaacatcaaggtgatgtgcattacttcagtgtggggttatcagatcatccggatatgaagctcataaatggaatgttggaatggcttaacatgaaagcaactcgagctggttacgttcctgatcggaatgcggtcctgctcgatatggatgatgaagaaaaggataagagattgtgggttcatagcgagaggttggctttggcgtatgggcttgttcgaatgccatcatcaagaaatcgcatactgatcatgaagaatctacggatatgttcagattgccacagtgctatgaaagtgatttcaagtatcgtacagcgagatctggttataagagatatgaaccggttccatcattttcatgcaggagtctgctcttgcggcgaccactggtga

SEQ ID NO: 70756 - protein, 822 aa, Arabidopsis thaliana
  peptide (1)..(822): Ceres Seq. ID no. 2996862
MIVFMRIIHVAQTRRLMIRCNRIRQCGFSVKTAALDLESSDSIIPGLDSHAYGAMLRRCIQKNDPISAKAIHCDILKKGSCLDLFATNILLNAYVKAGFDKDALNLFDEMPERNNVSFVTLAQGYACQDPIGLYSRLHREGHELNPHVFTSFLKLFVSLDKAEICPWLHSPIVKLGYDSNAFVGAALINAYSVCGSVDSARTVFEGILCKDIVVWAGIVSCYVENGYFEDSLKLLSCMRMAGFMPNNYTFDTALKASIGLGAFDFAKGVHGQILKTCYVLDPRVGVGLLQLYTQLGDMSDAFKVFNEMPKNDVVPWSFMIARFCQNGFCNEAVDLFIRMREAFVVPNEFTLSSILNGCAIGKCSGLGEQLHGLVVKVGFDLDIYVSNALIDVYAKCEKMDTAVKLFAELSSKNEVSWNTVIVGYENLGEGGKAFSMFREALRNQVSVTEVTFSSALGACASLASMDLGVQVHGLAIKTNNAKKVAVSNSLIDMYAKCGDIKFAQSVFNEMETIDVASWNALISGYSTHGLGRQALRILDIMKDRDCKPNGLTFLGVLSGCSNAGLIDQGQECFESMIRDHGIEPCLEHYTCMVRLLGRSGQLDKAMKLIEGIPYEPSVMIWRAMLSASMNQNNEEFARRSAEEILKINPKDEATYVLVSNMYAGAKQWANVASIRKSMKEMGVKKEPGLSWIEHQGDVHYFSVGLSDHPDMKLINGMLEWLNMKATRAGYVPDRNAVLLDMDDEEKDKRLWVHSERLALAYGLVRMPSSRNRILIMKNLRICSDCHSAMKVISSIVQRDLVIRDMNRFHHFHAGVCSCGDHW

SEQ ID NO: 70757 - protein, 818 aa, Arabidopsis thaliana
  peptide (1)..(818): Ceres Seq. ID no. 2996863
MRIIHVAQTRRLMIRCNRIRQCGFSVKTAALDLESSDSIIPGLDSHAYGAMLRRCIQKNDPISAKAIHCDILKKGSCLDLFATNILLNAYVKAGFDKDALNLFDEMPERNNVSFVTLAQGYACQDPIGLYSRLHREGHELNPHVFTSFLKLFVSLDKAEICPWLHSPIVKLGYDSNAFVGAALINAYSVCGSVDSARTVFEGILCKDIVVWAGIVSCYVENGYFEDSLKLLSCMRMAGFMPNNYTFDTALKASIGLGAFDFAKGVHGQILKTCYVLDPRVGVGLLQLYTQLGDMSDAFKVFNEMPKNDVVPWSFMIARFCQNGFCNEAVDLFIRMREAFVVPNEFTLSSILNGCAIGKCSGLGEQLHGLVVKVGFDLDIYVSNALIDVYAKCEKMDTAVKLFAELSSKNEVSWNTVIVGYENLGEGGKAFSMFREALRNQVSVTEVTFSSALGACASLASMDLGVQVHGLAIKTNNAKKVAVSNSLIDMYAKCGDIKFAQSVFNEMETIDVASWNALISGYSTHGLGRQALRILDIMKDRDCKPNGLTFLGVLSGCSNAGLIDQGQECFESMIRDHGIEPCLEHYTCMVRLLGRSGQLDKAMKLIEGIPYEPSVMIWRAMLSASMNQNNEEFARRSAEEILKINPKDEATYVLVSNMYAGAKQWANVASIRKSMKEMGVKKEPGLSWIEHQGDVHYFSVGLSDHPDMKLINGMLEWLNMKATRAGYVPDRNAVLLDMDDEEKDKRLWVHSERLALAYGLVRMPSSRNRILIMKNLRICSDCHSAMKVISSIVQRDLVIRDMNRFHHFHAGVCSCGDHW

SEQ ID NO: 70758 - protein, 806 aa, Arabidopsis thaliana
  peptide (1)..(806): Ceres Seq. ID no. 2996864
MIRCNRIRQCGFSVKTAALDLESSDSIIPGLDSHAYGAMLRRCIQKNDPISAKAIHCDILKKGSCLDLFATNILLNAYVKAGFDKDALNLFDEMPERNNVSFVTLAQGYACQDPIGLYSRLHREGHELNPHVFTSFLKLFVSLDKAEICPWLHSPIVKLGYDSNAFVGAALINAYSVCGSVDSARTVFEGILCKDIVVWAGIVSCYVENGYFEDSLKLLSCMRMAGFMPNNYTFDTALKASIGLGAFDFAKGVHGQILKTCYVLDPRVGVGLLQLYTQLGDMSDAFKVFNEMPKNDVVPWSFMIARFCQNGFCNEAVDLFIRMREAFVVPNEFTLSSILNGCAIGKCSGLGEQLHGLVVKVGFDLDIYVSNALIDVYAKCEKMDTAVKLFAELSSKNEVSWNTVIVGYENLGEGGKAFSMFREALRNQVSVTEVTFSSALGACASLASMDLGVQVHGLAIKTNNAKKVAVSNSLIDMYAKCGDIKFAQSVFNEMETIDVASWNALISGYSTHGLGRQALRILDIMKDRDCKPNGLTFLGVLSGCSNAGLIDQGQECFESMIRDHGIEPCLEHYTCMVRLLGRSGQLDKAMKLIEGIPYEPSVMIWRAMLSASMNQNNEEFARRSAEEILKINPKDEATYVLVSNMYAGAKQWANVASIRKSMKEMGVKKEPGLSWIEHQGDVHYFSVGLSDHPDMKLINGMLEWLNMKATRAGYVPDRNAVLLDMDDEEKDKRLWVHSERLALAYGLVRMPSSRNRILIMKNLRICSDCHSAMKVISSIVQRDLVIRDMNRFHHFHAGVCSCGDHW

SEQ ID NO: 70759 - DNA, 2253 bp, Arabidopsis thaliana
  misc_feature (1)..(2253): Ceres Seq. ID no. 2996881
  misc_feature (1)..(2253): Ortholog of  Ceres SEQ ID NO 13594958 as cited in SEQ ID NO 55996
  misc_feature (1)..(2253): Ortholog of  Ceres SEQ ID NO 15180204 as cited in SEQ ID NO 0
atggaggagagcgcagaaatattgcgggaaagaagtctcaagttttacaaaggatgccggaaatacactgaaggactaggcgaggcatacgatggggacattgctttcgcaagtgcacttgaaacatttggtggaggccataatgatccaataagtgtggcttttggaggaccggtaatgacgaaatttacaattgcgttgagggaaattgggacttataaggaagttcttcggtcacaggtggaacatatactgaatgacagattacttcagtttgccaatatggacttgcatgaagttaaggcccgtgagaagtttttatctttgaggaaaggtacaaaaagtgacgttgctgctgctttagaacaggaacttcatacttcgaggtctatgtttgagcaagctcggttcaaccttgtgactgctctatcaaatgttgaagctaagaaaaggtttgaatttttggaagcagtcagtggaacaatggatgcacatcttcggtacttcaaacagggttacgaattactgcatcagatggaaccatatatcaatcaggtcttgacatatgcgcaacaatccagagaaagatcaaattatgaacaagcagcacttaatgaaaagatgcaggagtacaaaagacaggttgatcgagagagcaggtggggttcaaatggttctaatggatcaccaaatggagatggcatacaagcaatcggtagaagctctcacaaaatgatagacgccgtaatgcaatctgctgcaagaggaaaggggtctggaagccagctttctggacagagaaatagctccgagcttgggtctggactgcttagtaggtggctttcttcgaataatcatggacatggtggtgtccatgatgagaagtctgtagctcgtcatacagtgaacttactcacctcaacaattaaagtcgacgctgatcaatcagatctgaggttttgctttaggatcatatcacctacaaaaaactacacgttgcaggctgagagtgcactcgatcaaatggattggatagaaaagatcactggggttattgcatcactacttagttctcaggtccctgaacagcgtcttcctggtagtcccatgggaagtggccaccatcgatctgctagtgaaagtagctcatatgaaagttctgaatatgatcatcctactactgaagaatttgtatgtgagaggagctttttggggtacaatgaaaggccatcaagaagttttcagccgcaacggtccattagaaagggtgagaagcccattgatgctcttcgaaaggtctgtgggaatgacaaatgtgcggattgtggagctccagaaccagactgggcttctttaaatctgggggttcttgtctgtatcgaatgttctggtgttcaccgtaatcttggtgtgcatatatctaaggttaggtcactcactctcgacgtgaaagtatgggagccatctgttataagtttgttccaagctcttggaaatactttcgcaaacacagtttgggaggaattgcttcattcaaggagcgccatccattttgaccccggcttaacagtgtctgataaatccagggtgatggtcactggaaaacccagctatgctgatatgatatctatcaaggagaagtatatacaagctaagtatgcggagaagttatttgttcggagatcaagagacagcgatttcccacaatcagctgcacaacaaatgtgggacgcagtgagtggcaatgataaaaaagctgtttaccggctcattgtcaatggtgatgcggatgtgaattatgtgtatgaccaaacttccagttcttcgttaacactttccagagtaatattagtaccagaaaggccaaagcgtgaggatgttctactcagattaagaaatgagttacttgatagaacaggtagttcttcaaatatatctcctgagggaagcggaggttcctctctgcttcactgtgcttgtgagaaggcagaccttgggatggtagagcttttgctgcagtatggtgcaaatgtaaacgcctcagattcaagtggtcaaacgccgctgcactgttgtcttctcagaggaaaagtgacaatagcaagattgcttctcactaggggagcagacccggaagctatgaacagagaaggcaaaaccgctcttgatattgctgcagagtcaaattttactgatccagaagttcttgctctcctttcagacacaaatggatacaatcacagacagtgctga

SEQ ID NO: 70760 - protein, 750 aa, Arabidopsis thaliana
  peptide (1)..(750): Ceres Seq. ID no. 2996882
MEESAEILRERSLKFYKGCRKYTEGLGEAYDGDIAFASALETFGGGHNDPISVAFGGPVMTKFTIALREIGTYKEVLRSQVEHILNDRLLQFANMDLHEVKAREKFLSLRKGTKSDVAAALEQELHTSRSMFEQARFNLVTALSNVEAKKRFEFLEAVSGTMDAHLRYFKQGYELLHQMEPYINQVLTYAQQSRERSNYEQAALNEKMQEYKRQVDRESRWGSNGSNGSPNGDGIQAIGRSSHKMIDAVMQSAARGKGSGSQLSGQRNSSELGSGLLSRWLSSNNHGHGGVHDEKSVARHTVNLLTSTIKVDADQSDLRFCFRIISPTKNYTLQAESALDQMDWIEKITGVIASLLSSQVPEQRLPGSPMGSGHHRSASESSSYESSEYDHPTTEEFVCERSFLGYNERPSRSFQPQRSIRKGEKPIDALRKVCGNDKCADCGAPEPDWASLNLGVLVCIECSGVHRNLGVHISKVRSLTLDVKVWEPSVISLFQALGNTFANTVWEELLHSRSAIHFDPGLTVSDKSRVMVTGKPSYADMISIKEKYIQAKYAEKLFVRRSRDSDFPQSAAQQMWDAVSGNDKKAVYRLIVNGDADVNYVYDQTSSSSLTLSRVILVPERPKREDVLLRLRNELLDRTGSSSNISPEGSGGSSLLHCACEKADLGMVELLLQYGANVNASDSSGQTPLHCCLLRGKVTIARLLLTRGADPEAMNREGKTALDIAAESNFTDPEVLALLSDTNGYNHRQC

SEQ ID NO: 70761 - protein, 691 aa, Arabidopsis thaliana
  peptide (1)..(691): Ceres Seq. ID no. 2996883
MTKFTIALREIGTYKEVLRSQVEHILNDRLLQFANMDLHEVKAREKFLSLRKGTKSDVAAALEQELHTSRSMFEQARFNLVTALSNVEAKKRFEFLEAVSGTMDAHLRYFKQGYELLHQMEPYINQVLTYAQQSRERSNYEQAALNEKMQEYKRQVDRESRWGSNGSNGSPNGDGIQAIGRSSHKMIDAVMQSAARGKGSGSQLSGQRNSSELGSGLLSRWLSSNNHGHGGVHDEKSVARHTVNLLTSTIKVDADQSDLRFCFRIISPTKNYTLQAESALDQMDWIEKITGVIASLLSSQVPEQRLPGSPMGSGHHRSASESSSYESSEYDHPTTEEFVCERSFLGYNERPSRSFQPQRSIRKGEKPIDALRKVCGNDKCADCGAPEPDWASLNLGVLVCIECSGVHRNLGVHISKVRSLTLDVKVWEPSVISLFQALGNTFANTVWEELLHSRSAIHFDPGLTVSDKSRVMVTGKPSYADMISIKEKYIQAKYAEKLFVRRSRDSDFPQSAAQQMWDAVSGNDKKAVYRLIVNGDADVNYVYDQTSSSSLTLSRVILVPERPKREDVLLRLRNELLDRTGSSSNISPEGSGGSSLLHCACEKADLGMVELLLQYGANVNASDSSGQTPLHCCLLRGKVTIARLLLTRGADPEAMNREGKTALDIAAESNFTDPEVLALLSDTNGYNHRQC

SEQ ID NO: 70762 - protein, 656 aa, Arabidopsis thaliana
  peptide (1)..(656): Ceres Seq. ID no. 2996884
MDLHEVKAREKFLSLRKGTKSDVAAALEQELHTSRSMFEQARFNLVTALSNVEAKKRFEFLEAVSGTMDAHLRYFKQGYELLHQMEPYINQVLTYAQQSRERSNYEQAALNEKMQEYKRQVDRESRWGSNGSNGSPNGDGIQAIGRSSHKMIDAVMQSAARGKGSGSQLSGQRNSSELGSGLLSRWLSSNNHGHGGVHDEKSVARHTVNLLTSTIKVDADQSDLRFCFRIISPTKNYTLQAESALDQMDWIEKITGVIASLLSSQVPEQRLPGSPMGSGHHRSASESSSYESSEYDHPTTEEFVCERSFLGYNERPSRSFQPQRSIRKGEKPIDALRKVCGNDKCADCGAPEPDWASLNLGVLVCIECSGVHRNLGVHISKVRSLTLDVKVWEPSVISLFQALGNTFANTVWEELLHSRSAIHFDPGLTVSDKSRVMVTGKPSYADMISIKEKYIQAKYAEKLFVRRSRDSDFPQSAAQQMWDAVSGNDKKAVYRLIVNGDADVNYVYDQTSSSSLTLSRVILVPERPKREDVLLRLRNELLDRTGSSSNISPEGSGGSSLLHCACEKADLGMVELLLQYGANVNASDSSGQTPLHCCLLRGKVTIARLLLTRGADPEAMNREGKTALDIAAESNFTDPEVLALLSDTNGYNHRQC

SEQ ID NO: 70763 - DNA, 1386 bp, Arabidopsis thaliana
  misc_feature (1)..(1386): Ceres Seq. ID no. 2997079
  misc_feature (1)..(1386): Ortholog of  Ceres SEQ ID NO 13597407 as cited in SEQ ID NO 64106
atggcggaagaatctttattaccatctcatacagaagatgtatcagcttctcctaataaatcttcatcacttctgtctgaaatatcaaatgcttccacgagaccttttgttcttgctttcactgttggttcttgtggtgccttgagctttggatgcattttttcattttttggatcgatattgacagtggggctaatccttggagcattaatttgtgggaaattggcagatttggttggtcgtgtctatacgatatggattacaaacattcttgttttaatcggctggttagctattgcatttgccaaggatgttcggctactcgatcttggaaggttattgcaagggatctcggtcggaattagctcatatttgggacctatttacattagcgagttagcaccaagaaatttgcgaggagctgcttcttcgttgatgcagttatttgtcggtgtgggtctatcggccttttatgctctcggaacagccgttgcttggcgcagtttagccattttaggatctataccttctctagtggttctgcctcttcttttcttcatccccgaatctcctagatggctagctaaagttgggagggaaaaggaggttgaaggggttttattaagcttgcgaggagcaaaatctgatgtatcagatgaagcagcaacgatattagaatatacaaaacatgtcgaacaacaagacatcgatagccgcggtttcttcaagttgttccagcgaaaatacgcgttgccactaactattggagttgtccttatatctatgcctcagcttggaggtcttaatggttatactttttacaccgataccattttcacctctaccggtgtatcaagtgacattggattcatattgacatctattgttcagatgactggaggcgttttaggtgttttgcttgtggatatatccggaagacgttctctcctactgttttctcaagctggaatgttcttgggttgtctagcaacagccatttcattcttcttgcagaagaacaattgctgggaaacaggaacaccaataatggctctcattagtgttatggtgtattttggatcatacggattaggcatgggaccaataccatggatcatagcatcagagatttaccctgtagacgtgaaaggagcagcaggaacagtgtgtaacttggtcacctctataagctcatggctcgttacttactccttcaattttttgcttcaatggagttctacaggaacgtttatgatgtttgccactgtgatgggtcttggatttgtgttcacagccaagcttgttccagagaccaaaggcaaatctttagaagaaattcaatctgcttttactgattctacttctgaagattctacaattttctaa

SEQ ID NO: 70764 - protein, 461 aa, Arabidopsis thaliana
  peptide (1)..(461): Ceres Seq. ID no. 2997080
MAEESLLPSHTEDVSASPNKSSSLLSEISNASTRPFVLAFTVGSCGALSFGCIFSFFGSILTVGLILGALICGKLADLVGRVYTIWITNILVLIGWLAIAFAKDVRLLDLGRLLQGISVGISSYLGPIYISELAPRNLRGAASSLMQLFVGVGLSAFYALGTAVAWRSLAILGSIPSLVVLPLLFFIPESPRWLAKVGREKEVEGVLLSLRGAKSDVSDEAATILEYTKHVEQQDIDSRGFFKLFQRKYALPLTIGVVLISMPQLGGLNGYTFYTDTIFTSTGVSSDIGFILTSIVQMTGGVLGVLLVDISGRRSLLLFSQAGMFLGCLATAISFFLQKNNCWETGTPIMALISVMVYFGSYGLGMGPIPWIIASEIYPVDVKGAAGTVCNLVTSISSWLVTYSFNFLLQWSSTGTFMMFATVMGLGFVFTAKLVPETKGKSLEEIQSAFTDSTSEDSTIF

SEQ ID NO: 70765 - protein, 316 aa, Arabidopsis thaliana
  peptide (1)..(316): Ceres Seq. ID no. 2997081
MQLFVGVGLSAFYALGTAVAWRSLAILGSIPSLVVLPLLFFIPESPRWLAKVGREKEVEGVLLSLRGAKSDVSDEAATILEYTKHVEQQDIDSRGFFKLFQRKYALPLTIGVVLISMPQLGGLNGYTFYTDTIFTSTGVSSDIGFILTSIVQMTGGVLGVLLVDISGRRSLLLFSQAGMFLGCLATAISFFLQKNNCWETGTPIMALISVMVYFGSYGLGMGPIPWIIASEIYPVDVKGAAGTVCNLVTSISSWLVTYSFNFLLQWSSTGTFMMFATVMGLGFVFTAKLVPETKGKSLEEIQSAFTDSTSEDSTIF

SEQ ID NO: 70766 - DNA, 2196 bp, Arabidopsis thaliana
  misc_feature (1)..(2196): Ceres Seq. ID no. 2997082
  misc_feature (1)..(2196): Ortholog of  Ceres SEQ ID NO 14302621 as cited in SEQ ID NO 0
atggttgtctcaaaggttaacaaaagcttattaagttcagtcttcaaatcccgtattagacccaccggcgaatcttcaattgcttccggcaacaaagacatcgccggaacttctcaagctgtcaaagatcttctctcttccaaaaactcttcctcagtaacaacatcagataaaagctctttggagaagaacttatttttaaagataccaagtttcaccactaagatcccttatgatatttcgttaagaacgaaagagttgtctcgtgaaaggaaagagagacgtgtttacaagcagaacggtctgtcacggcgtttcgctaagatatttagagactctgctcagaaattaggcactgaggctatgtttggtgcttttgatagagtagctaaagagatgagtgtgacagagtacaatgcaatgattggtgtttacttagagcatgctgagaaaagcaatgatctagattatgctcttggccatattgagaaggcttttgagcttttgaaatctatgagagatcgtggatttttgattgaagaaagagtttatggtcctcttcttggttatttgattggtatggatatggtagatgagtttcatagtttcaaggatgtgattagggaggctagtcccggttccgttgagagacttggttactatgaaatgcttctttggatccatcttggtgatggagagaagattgaggaactttgcagtacaattgatggtgataacggtgaaagcttatcagtcttgcaagatgaaggagtgaagaacgtttctgatctcatctctatctattctacttgcaccccaaatccaacggttgaggatacaatcttaaaatttaacaagatgcatgaagaacttgatgttatgccttcatctacatcgtacgaaaagcttgttaagtatagctgtgactcgaatgaggtagtcactgctcttgatgtagttgaaaaaatgggtgaagcaggtttgatgatatccgcagatatcctacattcattgttacatgccattgatgaagttcttgagtttgatttgtttgaaggtgcatataatatgcttggtaatttaaagaacttcaatttggaaccaaactctagcatgttcaattgtatattggctggatattttagggagaaaaatgtgagtagtgcgttaatggtcgtcaagcaaatgaaggaagctggcgttaaacctgattccataacttttggttatctaataaacaactgtacccaggaggacgctattactaagtactatgaggagatgaagcaagcaggagttcaagctactaagcgaatttacatgtccctgatagatgcatatgcagcatctgggaagtttgagaaggcgaaacaggtgctcgtagatccagatgttccggctataaaccaaaatgaactgaaaagtgtgcttatttcggctcttgcatcacgtggaaaatgggcagatgccttacatatatatgaagaaatgaggaaagccgaatgccacgtagacccgaaatcgattatatctcttatagaatactctgattcaaagggagagttaagtacgctagttcaactggctgatgacctacaagatgatactagttggatcgacggtttcttcagaatgattttgttcgctgtccgcaataaaaagtcaagcgatattgttgatctgctgaaacggaacaaggtccggttgttaaagaaaggcatacctgtggaagctcattttgacgaggtgttttgggcaatcgcagagacagagccatccaaagtgcatctaggaatggatttgctaagatttatgaaagatgagctcgggtttgttccttcaagaaaatgtctagattttctcttacatgcatgtgttaatgccaaggacctggagcacggtctattggtgtggaaagagtaccaatctgcagcattcccttgcaacgtcctgagctttctgaggatgtatcaggttctactagctgcaggggattcagaaggtgccaaggcattggtgtcaaaaattccaaaagatgataaagatgtacaacatatcatcgaagaaagtcagtctgcattttctcaagcacccaacaagaagaaaccaaaaaagaaaatgattgttttatcaacaaagatgtatcaggttctactagctgcaggggattcagaaggtgccaaggcattgatataa

SEQ ID NO: 70767 - protein, 731 aa, Arabidopsis thaliana
  peptide (1)..(731): Ceres Seq. ID no. 2997083
MVVSKVNKSLLSSVFKSRIRPTGESSIASGNKDIAGTSQAVKDLLSSKNSSSVTTSDKSSLEKNLFLKIPSFTTKIPYDISLRTKELSRERKERRVYKQNGLSRRFAKIFRDSAQKLGTEAMFGAFDRVAKEMSVTEYNAMIGVYLEHAEKSNDLDYALGHIEKAFELLKSMRDRGFLIEERVYGPLLGYLIGMDMVDEFHSFKDVIREASPGSVERLGYYEMLLWIHLGDGEKIEELCSTIDGDNGESLSVLQDEGVKNVSDLISIYSTCTPNPTVEDTILKFNKMHEELDVMPSSTSYEKLVKYSCDSNEVVTALDVVEKMGEAGLMISADILHSLLHAIDEVLEFDLFEGAYNMLGNLKNFNLEPNSSMFNCILAGYFREKNVSSALMVVKQMKEAGVKPDSITFGYLINNCTQEDAITKYYEEMKQAGVQATKRIYMSLIDAYAASGKFEKAKQVLVDPDVPAINQNELKSVLISALASRGKWADALHIYEEMRKAECHVDPKSIISLIEYSDSKGELSTLVQLADDLQDDTSWIDGFFRMILFAVRNKKSSDIVDLLKRNKVRLLKKGIPVEAHFDEVFWAIAETEPSKVHLGMDLLRFMKDELGFVPSRKCLDFLLHACVNAKDLEHGLLVWKEYQSAAFPCNVLSFLRMYQVLLAAGDSEGAKALVSKIPKDDKDVQHIIEESQSAFSQAPNKKKPKKKMIVLSTKMYQVLLAAGDSEGAKALI

SEQ ID NO: 70768 - protein, 610 aa, Arabidopsis thaliana
  peptide (1)..(610): Ceres Seq. ID no. 2997084
MFGAFDRVAKEMSVTEYNAMIGVYLEHAEKSNDLDYALGHIEKAFELLKSMRDRGFLIEERVYGPLLGYLIGMDMVDEFHSFKDVIREASPGSVERLGYYEMLLWIHLGDGEKIEELCSTIDGDNGESLSVLQDEGVKNVSDLISIYSTCTPNPTVEDTILKFNKMHEELDVMPSSTSYEKLVKYSCDSNEVVTALDVVEKMGEAGLMISADILHSLLHAIDEVLEFDLFEGAYNMLGNLKNFNLEPNSSMFNCILAGYFREKNVSSALMVVKQMKEAGVKPDSITFGYLINNCTQEDAITKYYEEMKQAGVQATKRIYMSLIDAYAASGKFEKAKQVLVDPDVPAINQNELKSVLISALASRGKWADALHIYEEMRKAECHVDPKSIISLIEYSDSKGELSTLVQLADDLQDDTSWIDGFFRMILFAVRNKKSSDIVDLLKRNKVRLLKKGIPVEAHFDEVFWAIAETEPSKVHLGMDLLRFMKDELGFVPSRKCLDFLLHACVNAKDLEHGLLVWKEYQSAAFPCNVLSFLRMYQVLLAAGDSEGAKALVSKIPKDDKDVQHIIEESQSAFSQAPNKKKPKKKMIVLSTKMYQVLLAAGDSEGAKALI

SEQ ID NO: 70769 - protein, 599 aa, Arabidopsis thaliana
  peptide (1)..(599): Ceres Seq. ID no. 2997085
MSVTEYNAMIGVYLEHAEKSNDLDYALGHIEKAFELLKSMRDRGFLIEERVYGPLLGYLIGMDMVDEFHSFKDVIREASPGSVERLGYYEMLLWIHLGDGEKIEELCSTIDGDNGESLSVLQDEGVKNVSDLISIYSTCTPNPTVEDTILKFNKMHEELDVMPSSTSYEKLVKYSCDSNEVVTALDVVEKMGEAGLMISADILHSLLHAIDEVLEFDLFEGAYNMLGNLKNFNLEPNSSMFNCILAGYFREKNVSSALMVVKQMKEAGVKPDSITFGYLINNCTQEDAITKYYEEMKQAGVQATKRIYMSLIDAYAASGKFEKAKQVLVDPDVPAINQNELKSVLISALASRGKWADALHIYEEMRKAECHVDPKSIISLIEYSDSKGELSTLVQLADDLQDDTSWIDGFFRMILFAVRNKKSSDIVDLLKRNKVRLLKKGIPVEAHFDEVFWAIAETEPSKVHLGMDLLRFMKDELGFVPSRKCLDFLLHACVNAKDLEHGLLVWKEYQSAAFPCNVLSFLRMYQVLLAAGDSEGAKALVSKIPKDDKDVQHIIEESQSAFSQAPNKKKPKKKMIVLSTKMYQVLLAAGDSEGAKALI

SEQ ID NO: 70770 - DNA, 933 bp, Arabidopsis thaliana
  misc_feature (1)..(933): Ceres Seq. ID no. 2997185
  misc_feature (1)..(933): Ortholog of  Ceres SEQ ID NO 15226198 as cited in SEQ ID NO 62150
atgtttactgattgctcctcctccacaacgtcgcgtctcatccatttatacaaccgcaatggtgttttcctcccccgcccgagcgtcagccaattcagcttacggacaactgcgtctacttggcgctgcactctctccattcgctcctcttcttctccatctgcgattgtaattgatggaaaggctgaggccaaaaagattagagatgatatcaaaatcgaagtttcaagaatgaaggaatcaatcggtgtggttcctgctgaagattcatcagaagaagaggtgttgaaatatgtatcaggattcaatgatgatccttctgttcacggagtccttgttcagttgcctctaccatcgcatatggatgaacagaacatattgaatgcggttagtatagagaaggacgttgatggatttcacccgctaaatattggacggcttgccatgcgtggtagagaacctttattcgttccatgtactccaaaaggatgcatcgagttgttgcacagatacaacattgaattcaaaggcaaaagagcagttgttattggaaggagtaacattgttggtatgccagctgctctgttgctgcagaaggaggatgcaaccgttagcattatccattcaagaaccatgaaccctgaagaactcacaagacaagctgatatcctaatctcagctgttgggaaaccaaacatggtcagaggaagctggataaaaccgggtgcagtcctcatcgatgttgggattaaacctgttgaggatccaagtgctgccggtggagagcggttggttggagacatttgctatgtggaggctagcaaaattgcatcagccatcacacctgttcctggtgatgtaggaccaatgaccatagccatgcttctatccaacactttaacatcagccaagagaattcacaacttccagtga

SEQ ID NO: 70771 - protein, 310 aa, Arabidopsis thaliana
  peptide (1)..(310): Ceres Seq. ID no. 2997186
MFTDCSSSTTSRLIHLYNRNGVFLPRPSVSQFSLRTTASTWRCTLSIRSSSSPSAIVIDGKAEAKKIRDDIKIEVSRMKESIGVVPAEDSSEEEVLKYVSGFNDDPSVHGVLVQLPLPSHMDEQNILNAVSIEKDVDGFHPLNIGRLAMRGREPLFVPCTPKGCIELLHRYNIEFKGKRAVVIGRSNIVGMPAALLLQKEDATVSIIHSRTMNPEELTRQADILISAVGKPNMVRGSWIKPGAVLIDVGIKPVEDPSAAGGERLVGDICYVEASKIASAITPVPGDVGPMTIAMLLSNTLTSAKRIHNFQ

SEQ ID NO: 70772 - protein, 233 aa, Arabidopsis thaliana
  peptide (1)..(233): Ceres Seq. ID no. 2997187
MKESIGVVPAEDSSEEEVLKYVSGFNDDPSVHGVLVQLPLPSHMDEQNILNAVSIEKDVDGFHPLNIGRLAMRGREPLFVPCTPKGCIELLHRYNIEFKGKRAVVIGRSNIVGMPAALLLQKEDATVSIIHSRTMNPEELTRQADILISAVGKPNMVRGSWIKPGAVLIDVGIKPVEDPSAAGGERLVGDICYVEASKIASAITPVPGDVGPMTIAMLLSNTLTSAKRIHNFQ

SEQ ID NO: 70773 - protein, 190 aa, Arabidopsis thaliana
  peptide (1)..(190): Ceres Seq. ID no. 2997188
MDEQNILNAVSIEKDVDGFHPLNIGRLAMRGREPLFVPCTPKGCIELLHRYNIEFKGKRAVVIGRSNIVGMPAALLLQKEDATVSIIHSRTMNPEELTRQADILISAVGKPNMVRGSWIKPGAVLIDVGIKPVEDPSAAGGERLVGDICYVEASKIASAITPVPGDVGPMTIAMLLSNTLTSAKRIHNFQ

SEQ ID NO: 70774 - DNA, 1296 bp, Arabidopsis thaliana
  misc_feature (1)..(1296): Ceres Seq. ID no. 2997336
  misc_feature (1)..(1296): Ortholog of  Ceres SEQ ID NO 14313268 as cited in SEQ ID NO 66794
atgatccgttcttcgattgtaattttatctctgttactaatttcacacttggtttctgcaaaagttctgttgatcggtaacagcacatctctctccttcgacgacgtcgaagccactttcactccgatgattaagagatcggatcaaggcggtgtgttgtatgtagcagagccactcgatgcttgttcggatttggtgaatacggtgaatgtgaaaaatggaactactgtgtctcctccgtatgtgttgattatccgcggtggttgtagtttcgaagataagattaggaatgctcaaaaggctggttataaagctgctattgtttatgactatgaagattttgggttcttagtatcaacaactggggaagtacttaaagagtatgcgggtcgtaccgattttgaagtgtggctcatgccaagtttcgagacttcagcatggtcaatcatggctatttctttcatatctctcctcgccatgtcggctgtgctcgctacttgcttctttgtccgtaggcatcgagttaggcgtcggcgtattctggctcttaatggcaatgactttcatcgtatgcccaaaagcatgataatacgtatgcctactaccatatttaacggtatttgtgatgaagcaactacatctatattgtgctgcatatgccttgagaattatgagaaaggggacaagctaaggatcctaccttgccatcacaaatttcatgttgcttgtgtagacttgtggcttggccagaggaaatccttttgcccggtttgcaaacgcgatgcaagaagcatcagtaccgacaagcccccatcagagcacacaccctttctttctcggactcctagcatgaccccgacgtcatcgtttctcttatcatcatcctccacaaccccattgcagtcatctcatgagctaccaatatccatcagagtagacccttctttaccatccacctcaatgcagccacacacagttcctatgtatctctcccactctcgctcccacacaagcttccaaaatggatcaaaccgattttcccggcctataccagttagccggagttcagcagatctcaggaacgccgtttcccaaagatcttacaactcaccccaccaggtttctttgcctcgtttcctccactcaagatatacgcacatacttggcccgggaaatgcatcaagaagccaggttgttgggttgttaacaagccagcgcgagcattcacttcatcaaaatgactcgcgcaggtctttcattcactttgcatctgcgagctccttaccaggctggtaa

SEQ ID NO: 70775 - protein, 431 aa, Arabidopsis thaliana
  peptide (1)..(431): Ceres Seq. ID no. 2997337
MIRSSIVILSLLLISHLVSAKVLLIGNSTSLSFDDVEATFTPMIKRSDQGGVLYVAEPLDACSDLVNTVNVKNGTTVSPPYVLIIRGGCSFEDKIRNAQKAGYKAAIVYDYEDFGFLVSTTGEVLKEYAGRTDFEVWLMPSFETSAWSIMAISFISLLAMSAVLATCFFVRRHRVRRRRILALNGNDFHRMPKSMIIRMPTTIFNGICDEATTSILCCICLENYEKGDKLRILPCHHKFHVACVDLWLGQRKSFCPVCKRDARSISTDKPPSEHTPFLSRTPSMTPTSSFLLSSSSTTPLQSSHELPISIRVDPSLPSTSMQPHTVPMYLSHSRSHTSFQNGSNRFSRPIPVSRSSADLRNAVSQRSYNSPHQVSLPRFLHSRYTHILGPGNASRSQVVGLLTSQREHSLHQNDSRRSFIHFASASSLPGW

SEQ ID NO: 70776 - protein, 389 aa, Arabidopsis thaliana
  peptide (1)..(389): Ceres Seq. ID no. 2997338
MIKRSDQGGVLYVAEPLDACSDLVNTVNVKNGTTVSPPYVLIIRGGCSFEDKIRNAQKAGYKAAIVYDYEDFGFLVSTTGEVLKEYAGRTDFEVWLMPSFETSAWSIMAISFISLLAMSAVLATCFFVRRHRVRRRRILALNGNDFHRMPKSMIIRMPTTIFNGICDEATTSILCCICLENYEKGDKLRILPCHHKFHVACVDLWLGQRKSFCPVCKRDARSISTDKPPSEHTPFLSRTPSMTPTSSFLLSSSSTTPLQSSHELPISIRVDPSLPSTSMQPHTVPMYLSHSRSHTSFQNGSNRFSRPIPVSRSSADLRNAVSQRSYNSPHQVSLPRFLHSRYTHILGPGNASRSQVVGLLTSQREHSLHQNDSRRSFIHFASASSLPGW

SEQ ID NO: 70777 - protein, 293 aa, Arabidopsis thaliana
  peptide (1)..(293): Ceres Seq. ID no. 2997339
MPSFETSAWSIMAISFISLLAMSAVLATCFFVRRHRVRRRRILALNGNDFHRMPKSMIIRMPTTIFNGICDEATTSILCCICLENYEKGDKLRILPCHHKFHVACVDLWLGQRKSFCPVCKRDARSISTDKPPSEHTPFLSRTPSMTPTSSFLLSSSSTTPLQSSHELPISIRVDPSLPSTSMQPHTVPMYLSHSRSHTSFQNGSNRFSRPIPVSRSSADLRNAVSQRSYNSPHQVSLPRFLHSRYTHILGPGNASRSQVVGLLTSQREHSLHQNDSRRSFIHFASASSLPGW

SEQ ID NO: 70778 - DNA, 1671 bp, Arabidopsis thaliana
  misc_feature (1)..(1671): Ceres Seq. ID no. 2997408
  misc_feature (1)..(1671): Ortholog of  Ceres SEQ ID NO 12613725 as cited in SEQ ID NO 68196
atggctgattcaaaatctggtgacacggaagtagcgcatcgctctagcgatccaagcgaaaagcgtggtggctggatcactttaccgttcatgctaggcatgtccataacttctttcggatggggaatgaacttgatcgtcttcttgatcgaggaattccacatcaagaacatcgctgctgctcagatttcaaatgttgtcaatggagttgtcaacatgttacctgttgttgcagccatcctagctgattccttttttgggaacattcccgtcatctccacctccactttcatttctctggctggaacctctctcttgaccttaatcacatctttgaactacttgatgcctagaccgtgtgaaacggggtcaattctatgccagtcgccatcaaaactacagcttgggatcttgtatgtagccttagctctagtgatcattggatcagctgggacgcggttcaccttggcagccgcgggtgcgaaccaatataagaagcctaaagaacaaggaagattcttcaactggttcttccttgcactgtatattggagctattactggcacgacagcgattgtatatacacaagacaatgctagctggaaacttgggttcggtctatgtgccgttgctaacttgatcagtttcatcgttttcatcgccggggttagattctacaagcatgacaaacccttgggaagtccttatacaagcctgatccgtgttttagttgctgctacaatgaaaagaaaggcagtgatttcatcaaaagacgaagactatcatcaatatggtctcgggaaagaggccaagacttatactacaatgccctccaagagctttaggttcttgaaccgtgcagcattaaagaacaaagaagatttaaacacgagtggtgactcaagtaataacatgtggaggctatgctctgttcaggaagtagaagacttcaaagccattctccgacttgtacctctctgggcagccgtcatgttcctcagcactcccgtggcagtacaaatgagcatgacggttctccaagctttggtcatggaccgcaaacttagcccgcacttcgaagtctctgccgggtctctacaagtcatagtactcgtctttggttgtgtctttatcatgctcaacaactggatcatctatcccatgtaccaaaagctaatcggcaaaccactgacaccacttcaacaagttgggatcggtcacgttttcaccatcctaagcatggcgatatcagctgttgtggaagcaaagagactgaaaacagttgaaaatggaggccatcccatgtcagtgctatggctagttcctgctcttgtgatggttggaataggcgaggcgtttcattttcccgcgaatgttgcagtattctatggagaattccctgagtctctgaagaacaccgcaacttcattgacctcagtggtgattggaatctctttctatctgagcacagctgttatcgacgtgatccaaagaaccacctcgtggttaccaaatgacataaaccatggaagagttgacaatgtttactgggttgtagtcataggaggagtcttgaatctcggctatttccttgtctgctcttggttttacaaatacagaaacctcaaggatgatgatcatgaacaagatcctaaagatgttaaaacctag

SEQ ID NO: 70779 - protein, 556 aa, Arabidopsis thaliana
  peptide (1)..(556): Ceres Seq. ID no. 2997409
MADSKSGDTEVAHRSSDPSEKRGGWITLPFMLGMSITSFGWGMNLIVFLIEEFHIKNIAAAQISNVVNGVVNMLPVVAAILADSFFGNIPVISTSTFISLAGTSLLTLITSLNYLMPRPCETGSILCQSPSKLQLGILYVALALVIIGSAGTRFTLAAAGANQYKKPKEQGRFFNWFFLALYIGAITGTTAIVYTQDNASWKLGFGLCAVANLISFIVFIAGVRFYKHDKPLGSPYTSLIRVLVAATMKRKAVISSKDEDYHQYGLGKEAKTYTTMPSKSFRFLNRAALKNKEDLNTSGDSSNNMWRLCSVQEVEDFKAILRLVPLWAAVMFLSTPVAVQMSMTVLQALVMDRKLSPHFEVSAGSLQVIVLVFGCVFIMLNNWIIYPMYQKLIGKPLTPLQQVGIGHVFTILSMAISAVVEAKRLKTVENGGHPMSVLWLVPALVMVGIGEAFHFPANVAVFYGEFPESLKNTATSLTSVVIGISFYLSTAVIDVIQRTTSWLPNDINHGRVDNVYWVVVIGGVLNLGYFLVCSWFYKYRNLKDDDHEQDPKDVKT

SEQ ID NO: 70780 - protein, 526 aa, Arabidopsis thaliana
  peptide (1)..(526): Ceres Seq. ID no. 2997410
MLGMSITSFGWGMNLIVFLIEEFHIKNIAAAQISNVVNGVVNMLPVVAAILADSFFGNIPVISTSTFISLAGTSLLTLITSLNYLMPRPCETGSILCQSPSKLQLGILYVALALVIIGSAGTRFTLAAAGANQYKKPKEQGRFFNWFFLALYIGAITGTTAIVYTQDNASWKLGFGLCAVANLISFIVFIAGVRFYKHDKPLGSPYTSLIRVLVAATMKRKAVISSKDEDYHQYGLGKEAKTYTTMPSKSFRFLNRAALKNKEDLNTSGDSSNNMWRLCSVQEVEDFKAILRLVPLWAAVMFLSTPVAVQMSMTVLQALVMDRKLSPHFEVSAGSLQVIVLVFGCVFIMLNNWIIYPMYQKLIGKPLTPLQQVGIGHVFTILSMAISAVVEAKRLKTVENGGHPMSVLWLVPALVMVGIGEAFHFPANVAVFYGEFPESLKNTATSLTSVVIGISFYLSTAVIDVIQRTTSWLPNDINHGRVDNVYWVVVIGGVLNLGYFLVCSWFYKYRNLKDDDHEQDPKDVKT

SEQ ID NO: 70781 - protein, 523 aa, Arabidopsis thaliana
  peptide (1)..(523): Ceres Seq. ID no. 2997411
MSITSFGWGMNLIVFLIEEFHIKNIAAAQISNVVNGVVNMLPVVAAILADSFFGNIPVISTSTFISLAGTSLLTLITSLNYLMPRPCETGSILCQSPSKLQLGILYVALALVIIGSAGTRFTLAAAGANQYKKPKEQGRFFNWFFLALYIGAITGTTAIVYTQDNASWKLGFGLCAVANLISFIVFIAGVRFYKHDKPLGSPYTSLIRVLVAATMKRKAVISSKDEDYHQYGLGKEAKTYTTMPSKSFRFLNRAALKNKEDLNTSGDSSNNMWRLCSVQEVEDFKAILRLVPLWAAVMFLSTPVAVQMSMTVLQALVMDRKLSPHFEVSAGSLQVIVLVFGCVFIMLNNWIIYPMYQKLIGKPLTPLQQVGIGHVFTILSMAISAVVEAKRLKTVENGGHPMSVLWLVPALVMVGIGEAFHFPANVAVFYGEFPESLKNTATSLTSVVIGISFYLSTAVIDVIQRTTSWLPNDINHGRVDNVYWVVVIGGVLNLGYFLVCSWFYKYRNLKDDDHEQDPKDVKT

SEQ ID NO: 70782 - DNA, 813 bp, Arabidopsis thaliana
  misc_feature (1)..(813): Ceres Seq. ID no. 2997463
  misc_feature (1)..(813): Ortholog of  Ceres SEQ ID NO 13656783 as cited in SEQ ID NO 69218
atggaggagattctagagaatcttaatgagttcatcaaactgaattcatcgtcacaagggggaaggaggattgtatgtgtgacttcagggggaacaacggttccattggagcaacgatgtgttaggtatatcgataatttcagctccggaaacagaggtgctgcttctactgagaatttcgtcaaggctggatatgctgtgatatttctgtataggaggggaacttgccaaccgtattgtcgatctcttcccgatgatccattccttgaatgttttgagttttctgataagactaacattcaaggcagcttactaaaactcccattctcaaccatatatgagtatcttcagatgttgcggttgattgcagaggcattgaaagatgttggtccatgttcaatgttttatcttgctgctgctgtatctgacttctatgtgccatggaagagcatgacagagcacaaaatagaatcaggatctggtcctttagacataagactagctcaagtccctaaaatgctatcagtcttgagatcaaattgggctccaaaggccttctgcatatcattcaagcttgagacagactcaaagattctgatggagaaggctacaaaggctctaagaaaatacaaagtgcacgcagttgtagccaatgagctatcaacccgtaaggaagaagttgtggttgtttcaagcagcggtaatgttgtggttagacgcgaatgcgataagcctgaatcttttgttgaagataatctcattcgtctcatcgtagatcgacattcaacatacatcaaagaatctcacaactga

SEQ ID NO: 70783 - protein, 270 aa, Arabidopsis thaliana
  peptide (1)..(270): Ceres Seq. ID no. 2997464
MEEILENLNEFIKLNSSSQGGRRIVCVTSGGTTVPLEQRCVRYIDNFSSGNRGAASTENFVKAGYAVIFLYRRGTCQPYCRSLPDDPFLECFEFSDKTNIQGSLLKLPFSTIYEYLQMLRLIAEALKDVGPCSMFYLAAAVSDFYVPWKSMTEHKIESGSGPLDIRLAQVPKMLSVLRSNWAPKAFCISFKLETDSKILMEKATKALRKYKVHAVVANELSTRKEEVVVVSSSGNVVVRRECDKPESFVEDNLIRLIVDRHSTYIKESHN

SEQ ID NO: 70784 - protein, 153 aa, Arabidopsis thaliana
  peptide (1)..(153): Ceres Seq. ID no. 2997465
MLRLIAEALKDVGPCSMFYLAAAVSDFYVPWKSMTEHKIESGSGPLDIRLAQVPKMLSVLRSNWAPKAFCISFKLETDSKILMEKATKALRKYKVHAVVANELSTRKEEVVVVSSSGNVVVRRECDKPESFVEDNLIRLIVDRHSTYIKESHN

SEQ ID NO: 70785 - protein, 137 aa, Arabidopsis thaliana
  peptide (1)..(137): Ceres Seq. ID no. 2997466
MFYLAAAVSDFYVPWKSMTEHKIESGSGPLDIRLAQVPKMLSVLRSNWAPKAFCISFKLETDSKILMEKATKALRKYKVHAVVANELSTRKEEVVVVSSSGNVVVRRECDKPESFVEDNLIRLIVDRHSTYIKESHN

SEQ ID NO: 70786 - DNA, 759 bp, Arabidopsis thaliana
  misc_feature (1)..(759): Ceres Seq. ID no. 2997535
  misc_feature (1)..(759): Ortholog of  Ceres SEQ ID NO 14314068 as cited in SEQ ID NO 52242
  misc_feature (1)..(759): Ortholog of  Ceres SEQ ID NO 14314999 as cited in SEQ ID NO 52342
  misc_feature (1)..(759): Ortholog of  Ceres SEQ ID NO 15177057 as cited in SEQ ID NO 55817
  misc_feature (1)..(759): Ortholog of  Ceres SEQ ID NO 13585458 as cited in SEQ ID NO 60907
  misc_feature (1)..(759): Ortholog of  Ceres SEQ ID NO 12625392 as cited in SEQ ID NO 63315
  misc_feature (1)..(759): Ortholog of  Ceres SEQ ID NO 13598319 as cited in SEQ ID NO 68758
  misc_feature (1)..(759): Ortholog of  Ceres SEQ ID NO 12589816 as cited in SEQ ID NO 0
atggcttcctcatctctcaaatgtttttcttttatcgttgttcttacaactttctttgcaatctcattgaagccatgttattgccacaataaaacccactggaacaccgccggcatcacgtggtatggcgaccgagaaggtcctggcaccacaggaggagcttgtggatatggtgatgcagtggcaaaacacccgtacagatgtatggtttcagccggaggaccttcattgttcaaagacggaaagggttgtggggcttgttacaggcttaaatgcgaccatccgttgtgcacgaaaaagccgatcaaggtgatgatatcggatgagtgtcccggctgcacgaaggagtctgtccattttgatcttagcggtaaggcctttggtgcattggccaaacgtggcaagggagatcaactacgcaaccttggagaactaaaaactatgatcgctatccatgtcgacgccggagcaaatccttactacatgtcattcgcggttaagtttgcaaacggtgatgggaacttcgcctgcattgaggtccaaccggccggaggacagtatatgaaaatggaggaaatgagatccgctgtttggagactaagccctggtgttcctttgaaaggtccgttcaacatcaggcttacctccgccgtgtccggtaagaagatcattgcgaaaggcgttatcccggaaaagtggagtcctggtgctatttaccattctaaggttaacttccccgttcaaaggaagcagaaatga

SEQ ID NO: 70787 - protein, 252 aa, Arabidopsis thaliana
  peptide (1)..(252): Ceres Seq. ID no. 2997536
MASSSLKCFSFIVVLTTFFAISLKPCYCHNKTHWNTAGITWYGDREGPGTTGGACGYGDAVAKHPYRCMVSAGGPSLFKDGKGCGACYRLKCDHPLCTKKPIKVMISDECPGCTKESVHFDLSGKAFGALAKRGKGDQLRNLGELKTMIAIHVDAGANPYYMSFAVKFANGDGNFACIEVQPAGGQYMKMEEMRSAVWRLSPGVPLKGPFNIRLTSAVSGKKIIAKGVIPEKWSPGAIYHSKVNFPVQRKQK

SEQ ID NO: 70788 - protein, 184 aa, Arabidopsis thaliana
  peptide (1)..(184): Ceres Seq. ID no. 2997537
MVSAGGPSLFKDGKGCGACYRLKCDHPLCTKKPIKVMISDECPGCTKESVHFDLSGKAFGALAKRGKGDQLRNLGELKTMIAIHVDAGANPYYMSFAVKFANGDGNFACIEVQPAGGQYMKMEEMRSAVWRLSPGVPLKGPFNIRLTSAVSGKKIIAKGVIPEKWSPGAIYHSKVNFPVQRKQK

SEQ ID NO: 70789 - protein, 148 aa, Arabidopsis thaliana
  peptide (1)..(148): Ceres Seq. ID no. 2997538
MISDECPGCTKESVHFDLSGKAFGALAKRGKGDQLRNLGELKTMIAIHVDAGANPYYMSFAVKFANGDGNFACIEVQPAGGQYMKMEEMRSAVWRLSPGVPLKGPFNIRLTSAVSGKKIIAKGVIPEKWSPGAIYHSKVNFPVQRKQK

SEQ ID NO: 70790 - DNA, 2826 bp, Arabidopsis thaliana
  misc_feature (1)..(2826): Ceres Seq. ID no. 2997821
  misc_feature (1)..(2826): Ortholog of  Ceres SEQ ID NO 15169376 as cited in SEQ ID NO 53574
atggagtcacgaatggatcagtacgagcttatggaacagatcgggagaggagcgtttggtgctgctattttagttcatcataaagctgagagaaagaagtatgttttgaagaagatcagattagctagacaaacggaacgttgccggagatctgctcatcaagagatgtctttgattgcaagagttcaacatccttatattgtggagtttaaagaagcttgggttgagaaaggttgctatgtttgtattgtcactggatactgtgaaggaggagacatggctgagttgatgaaaaagtcaaatggtgtttattttcctgaggagaaactttgcaagtggtttactcaattattattagctgttgagtatctgcattctaactatgttctacatcgggatctaaagtgttccaacattttccttacaaaagatcaagatgttcgccttggggactttggtcttgccaaaactttgaaggcggatgacctaacttcctcggttgttggaactccaaactacatgtgcccggaactgcttgctgatatcccttatggttttaagtcagatatctggtccttaggctgttgtatatatgagatggctgcgtatcgacctgctttcaaagcttttgatatggcagggcttataagcaagaaaagcactcatcaagggaatgttaaggaagaaccccgagtatcggccaaacgtatggcctccgagattttgaagcatccttatctgcagccatatgttgagcagtaccgtccaacgctttctgcggcgtctataactccagaaaagcctctcaattctcgcgagggtcggaggagtatggctgaaagtcagaatagcaatagttcaagtgaaaaagataacttctacgtgagtgacaaaaatatccgatatgtggttccaagtaatggtaataaagtcactgagaccgattcaggttttgtcgatgatgaagacatcttagaccatgtgcaacaatcagctgaaaatggtaatctccagagtgtttcagcaacaaaaccagatggccatgggattttaaagcccgtacacagtgaccagcgaccagacgttattcaaccaaggcacccaaaaactatcagaaacatcatgatggttttgaaagaagagaaagctcgagaaaatggttcacccatgagatctaatcgaagtagaccttctagtgttccgacacagaagaataatgttgaaactccatcaaagattcccaaacttggtgacattgctcatagctccaagactaacgcaagtacgcctattccaccatcaaagctggcctctgattccgcaaggactccaggatcatttccaccaaagcatcatatgccagtgattgactcttctccaaaacttaagcctagaaacgacagaatttcaccttctcctgctgctaaacatgaggctgaagaggcgatgtcagttaagcgtaggcaaagaacacctcctactttgccaagaagaacgtctttgatagcgcaccagtcgagacaactaggagcagatatttcaaatatggcagcaaaggaaaccgcgaagctacatccatctgtgccatcagagtctgaaactaattctcatcaatctcgtgttcatgcttctcctgtgagtacgacgccagagccaaagagaacctctgttggatctgccaaaggaatgcagagtgaaagcagcaactctatctcgtcgtcgttgtccatgcaggcatttgagctctgtgatgatgcttccaccccatatattgacatgacagaacatacaactcctgatgaccacagaagatcctgtcacagtgaatactcatattcatttccagatatctcctcagagatgatgatccgtagagatgaacatagcaccagtatgcggctgactgaaattcccgactctgtttccggtgtacaaaacaccattgcccatcatcagccagaaagagagcaaggaagctgtcccactgtgctcaaagatgatagtcctgcaacattacagagctacgagcctaacacatcacaacatcaacacggtgatgacaaattcacagtcaaagaattcgtctcctctgttcccggacccgcaccattgcctttgcatgttgaaccatcacaccaagtgaattcccactcggataacaaaacaagcgtaatgtctcagaactcagctcttgagaagaacaacagtcattcccatcctcatcccgtggttgatgatgtcatacatgttattcgccacagcagtttccgagtagggagcgaccagccggtcatggaaagtgttgaagtcggtgtccaaaacgtcgatatggggaaactcataaacgttgtgagagatgaaatggaagtgagaaaaggagccactccctcagaatcacccaccacaagatcgatcatctcagagcctgactcaagaaccgagcctcgtcctaaagaaccagaccccatcaccaattactcagaaacaaagagctttaactcctgctcggattcttcaccagctgagaccagaactaactcattcgtgcctgaagaggaaacaactccgactccacctgttaaagagacgttggacatcaagtcgttcagacagagagcagaagcgcttgaaggtctattggaactatctgcggatttgctggaacagagcaggctcgaagagctagccattgtgttgcagccgtttgggaagaacaaagtttcgcctcgagaaaccgctatttggttggccaagagtttgaaaggaatgatgatcgaagacatcaataataataatagcagtggcagctccaggaattgttcatga

SEQ ID NO: 70791 - protein, 941 aa, Arabidopsis thaliana
  peptide (1)..(941): Ceres Seq. ID no. 2997822
MESRMDQYELMEQIGRGAFGAAILVHHKAERKKYVLKKIRLARQTERCRRSAHQEMSLIARVQHPYIVEFKEAWVEKGCYVCIVTGYCEGGDMAELMKKSNGVYFPEEKLCKWFTQLLLAVEYLHSNYVLHRDLKCSNIFLTKDQDVRLGDFGLAKTLKADDLTSSVVGTPNYMCPELLADIPYGFKSDIWSLGCCIYEMAAYRPAFKAFDMAGLISKKSTHQGNVKEEPRVSAKRMASEILKHPYLQPYVEQYRPTLSAASITPEKPLNSREGRRSMAESQNSNSSSEKDNFYVSDKNIRYVVPSNGNKVTETDSGFVDDEDILDHVQQSAENGNLQSVSATKPDGHGILKPVHSDQRPDVIQPRHPKTIRNIMMVLKEEKARENGSPMRSNRSRPSSVPTQKNNVETPSKIPKLGDIAHSSKTNASTPIPPSKLASDSARTPGSFPPKHHMPVIDSSPKLKPRNDRISPSPAAKHEAEEAMSVKRRQRTPPTLPRRTSLIAHQSRQLGADISNMAAKETAKLHPSVPSESETNSHQSRVHASPVSTTPEPKRTSVGSAKGMQSESSNSISSSLSMQAFELCDDASTPYIDMTEHTTPDDHRRSCHSEYSYSFPDISSEMMIRRDEHSTSMRLTEIPDSVSGVQNTIAHHQPEREQGSCPTVLKDDSPATLQSYEPNTSQHQHGDDKFTVKEFVSSVPGPAPLPLHVEPSHQVNSHSDNKTSVMSQNSALEKNNSHSHPHPVVDDVIHVIRHSSFRVGSDQPVMESVEVGVQNVDMGKLINVVRDEMEVRKGATPSESPTTRSIISEPDSRTEPRPKEPDPITNYSETKSFNSCSDSSPAETRTNSFVPEEETTPTPPVKETLDIKSFRQRAEALEGLLELSADLLEQSRLEELAIVLQPFGKNKVSPRETAIWLAKSLKGMMIEDINNNNSSGSSRNCS

SEQ ID NO: 70792 - protein, 937 aa, Arabidopsis thaliana
  peptide (1)..(937): Ceres Seq. ID no. 2997823
MDQYELMEQIGRGAFGAAILVHHKAERKKYVLKKIRLARQTERCRRSAHQEMSLIARVQHPYIVEFKEAWVEKGCYVCIVTGYCEGGDMAELMKKSNGVYFPEEKLCKWFTQLLLAVEYLHSNYVLHRDLKCSNIFLTKDQDVRLGDFGLAKTLKADDLTSSVVGTPNYMCPELLADIPYGFKSDIWSLGCCIYEMAAYRPAFKAFDMAGLISKKSTHQGNVKEEPRVSAKRMASEILKHPYLQPYVEQYRPTLSAASITPEKPLNSREGRRSMAESQNSNSSSEKDNFYVSDKNIRYVVPSNGNKVTETDSGFVDDEDILDHVQQSAENGNLQSVSATKPDGHGILKPVHSDQRPDVIQPRHPKTIRNIMMVLKEEKARENGSPMRSNRSRPSSVPTQKNNVETPSKIPKLGDIAHSSKTNASTPIPPSKLASDSARTPGSFPPKHHMPVIDSSPKLKPRNDRISPSPAAKHEAEEAMSVKRRQRTPPTLPRRTSLIAHQSRQLGADISNMAAKETAKLHPSVPSESETNSHQSRVHASPVSTTPEPKRTSVGSAKGMQSESSNSISSSLSMQAFELCDDASTPYIDMTEHTTPDDHRRSCHSEYSYSFPDISSEMMIRRDEHSTSMRLTEIPDSVSGVQNTIAHHQPEREQGSCPTVLKDDSPATLQSYEPNTSQHQHGDDKFTVKEFVSSVPGPAPLPLHVEPSHQVNSHSDNKTSVMSQNSALEKNNSHSHPHPVVDDVIHVIRHSSFRVGSDQPVMESVEVGVQNVDMGKLINVVRDEMEVRKGATPSESPTTRSIISEPDSRTEPRPKEPDPITNYSETKSFNSCSDSSPAETRTNSFVPEEETTPTPPVKETLDIKSFRQRAEALEGLLELSADLLEQSRLEELAIVLQPFGKNKVSPRETAIWLAKSLKGMMIEDINNNNSSGSSRNCS

SEQ ID NO: 70793 - protein, 931 aa, Arabidopsis thaliana
  peptide (1)..(931): Ceres Seq. ID no. 2997824
MEQIGRGAFGAAILVHHKAERKKYVLKKIRLARQTERCRRSAHQEMSLIARVQHPYIVEFKEAWVEKGCYVCIVTGYCEGGDMAELMKKSNGVYFPEEKLCKWFTQLLLAVEYLHSNYVLHRDLKCSNIFLTKDQDVRLGDFGLAKTLKADDLTSSVVGTPNYMCPELLADIPYGFKSDIWSLGCCIYEMAAYRPAFKAFDMAGLISKKSTHQGNVKEEPRVSAKRMASEILKHPYLQPYVEQYRPTLSAASITPEKPLNSREGRRSMAESQNSNSSSEKDNFYVSDKNIRYVVPSNGNKVTETDSGFVDDEDILDHVQQSAENGNLQSVSATKPDGHGILKPVHSDQRPDVIQPRHPKTIRNIMMVLKEEKARENGSPMRSNRSRPSSVPTQKNNVETPSKIPKLGDIAHSSKTNASTPIPPSKLASDSARTPGSFPPKHHMPVIDSSPKLKPRNDRISPSPAAKHEAEEAMSVKRRQRTPPTLPRRTSLIAHQSRQLGADISNMAAKETAKLHPSVPSESETNSHQSRVHASPVSTTPEPKRTSVGSAKGMQSESSNSISSSLSMQAFELCDDASTPYIDMTEHTTPDDHRRSCHSEYSYSFPDISSEMMIRRDEHSTSMRLTEIPDSVSGVQNTIAHHQPEREQGSCPTVLKDDSPATLQSYEPNTSQHQHGDDKFTVKEFVSSVPGPAPLPLHVEPSHQVNSHSDNKTSVMSQNSALEKNNSHSHPHPVVDDVIHVIRHSSFRVGSDQPVMESVEVGVQNVDMGKLINVVRDEMEVRKGATPSESPTTRSIISEPDSRTEPRPKEPDPITNYSETKSFNSCSDSSPAETRTNSFVPEEETTPTPPVKETLDIKSFRQRAEALEGLLELSADLLEQSRLEELAIVLQPFGKNKVSPRETAIWLAKSLKGMMIEDINNNNSSGSSRNCS

SEQ ID NO: 70794 - DNA, 1677 bp, Arabidopsis thaliana
  misc_feature (1)..(1677): Ceres Seq. ID no. 2997899
  misc_feature (1)..(1677): Ortholog of  Ceres SEQ ID NO 12586556 as cited in SEQ ID NO 64667
  misc_feature (1)..(1677): Ortholog of  Ceres SEQ ID NO 13660894 as cited in SEQ ID NO 67475
atgagcaagggggcggcaataatagcttatgcaaatcccatctttcatattcgacatctaaagcttgaatctttcttgtggaacatcatcattcgtgccattgttcacaatgtttcgtcgcctcaacgacattctccgatctcagtctacctccgtatgcgcaaccatcgcgtctctcccgattttcatacctttccgtttcttctcccttctttccacaatccgcttcatcttcctcttgggcaacgaactcatgctcagattcttctttttggacttgacaaagacccatttgtccgaacttcactgctcaacatgtattcttcctgtggcgacttgagatcagctcagcgagttttcgatgactcgggctcgaaggatttaccggcctggaactctgtggtcaatgcttatgccaaagctgggttgatcgatgatgcgcggaaactgttcgacgaaatgcctgaaagaaacgtgatttcctggagctgcttgattaacggctacgttatgtgtgggaaatacaaagaagcgcttgatttgttccgggagatgcaattacctaaaccaaacgaagcattcgtcagacccaacgagtttacaatgtcgactgtactctcggcttgtgggcgattgggtgcgctcgagcaagggaaatgggttcacgcttacatcgataagtaccacgttgagattgacattgtcttaggcacagctctcattgatatgtacgccaaatgtgggagcctcgagagggcgaaaagggttttcaatgccttgggatccaagaaagatgtcaaagcttacagtgctatgatatgttgcttagcaatgtacggtctcacagatgagtgcttccaactgttctctgagatgaccacgagtgacaacataaacccaaactctgtgacatttgtgggcattctcggtgcttgtgtacatcgaggtctaataaacgaaggaaaatcttactttaaaatgatgattgaggaatttggtatcacgccatcaatccagcattatggttgtatggttgatctctacggaagatctggtttgatcaaagaagcagagagctttatagcatctatgcctatggagcctgatgtacttatttgggggtctctcttaagcggatcaagaatgcttggggatatcaagacttgtgaaggtgccctcaagcgactcatcgagctagatcctatgaacagtggagcatatgtgcttctctctaacgtctatgccaaaacagggaggtggatggaaggcattaataaagttccgggatgtagctatgttgaagtagagggagtggttcacgagtttgttgtaggagacgaatctcaacaagagagcgaaaggatctatgctatgctcgatgagataatgcagaggctgagagaagctggatatgttacagacactaaggaggttttacttgatcttaacgagaaagataaagagatagctttgtcttaccacagtgagaaactggctattgcgttctgtttgatgaagacaaggcctggaactccagtgagaatcatcaagaacctcagaatctgtggagattgtcatcttacgggtcttgctcttgcagagatttttggtgataacaattgcagcaatgtttgtgttggattgaataaacacattactgaattttggaggttttga

SEQ ID NO: 70795 - protein, 558 aa, Arabidopsis thaliana
  peptide (1)..(558): Ceres Seq. ID no. 2997900
MSKGAAIIAYANPIFHIRHLKLESFLWNIIIRAIVHNVSSPQRHSPISVYLRMRNHRVSPDFHTFPFLLPSFHNPLHLPLGQRTHAQILLFGLDKDPFVRTSLLNMYSSCGDLRSAQRVFDDSGSKDLPAWNSVVNAYAKAGLIDDARKLFDEMPERNVISWSCLINGYVMCGKYKEALDLFREMQLPKPNEAFVRPNEFTMSTVLSACGRLGALEQGKWVHAYIDKYHVEIDIVLGTALIDMYAKCGSLERAKRVFNALGSKKDVKAYSAMICCLAMYGLTDECFQLFSEMTTSDNINPNSVTFVGILGACVHRGLINEGKSYFKMMIEEFGITPSIQHYGCMVDLYGRSGLIKEAESFIASMPMEPDVLIWGSLLSGSRMLGDIKTCEGALKRLIELDPMNSGAYVLLSNVYAKTGRWMEGINKVPGCSYVEVEGVVHEFVVGDESQQESERIYAMLDEIMQRLREAGYVTDTKEVLLDLNEKDKEIALSYHSEKLAIAFCLMKTRPGTPVRIIKNLRICGDCHLTGLALAEIFGDNNCSNVCVGLNKHITEFWRF

SEQ ID NO: 70796 - protein, 506 aa, Arabidopsis thaliana
  peptide (1)..(506): Ceres Seq. ID no. 2997901
MRNHRVSPDFHTFPFLLPSFHNPLHLPLGQRTHAQILLFGLDKDPFVRTSLLNMYSSCGDLRSAQRVFDDSGSKDLPAWNSVVNAYAKAGLIDDARKLFDEMPERNVISWSCLINGYVMCGKYKEALDLFREMQLPKPNEAFVRPNEFTMSTVLSACGRLGALEQGKWVHAYIDKYHVEIDIVLGTALIDMYAKCGSLERAKRVFNALGSKKDVKAYSAMICCLAMYGLTDECFQLFSEMTTSDNINPNSVTFVGILGACVHRGLINEGKSYFKMMIEEFGITPSIQHYGCMVDLYGRSGLIKEAESFIASMPMEPDVLIWGSLLSGSRMLGDIKTCEGALKRLIELDPMNSGAYVLLSNVYAKTGRWMEGINKVPGCSYVEVEGVVHEFVVGDESQQESERIYAMLDEIMQRLREAGYVTDTKEVLLDLNEKDKEIALSYHSEKLAIAFCLMKTRPGTPVRIIKNLRICGDCHLTGLALAEIFGDNNCSNVCVGLNKHITEFWRF

SEQ ID NO: 70797 - protein, 453 aa, Arabidopsis thaliana
  peptide (1)..(453): Ceres Seq. ID no. 2997902
MYSSCGDLRSAQRVFDDSGSKDLPAWNSVVNAYAKAGLIDDARKLFDEMPERNVISWSCLINGYVMCGKYKEALDLFREMQLPKPNEAFVRPNEFTMSTVLSACGRLGALEQGKWVHAYIDKYHVEIDIVLGTALIDMYAKCGSLERAKRVFNALGSKKDVKAYSAMICCLAMYGLTDECFQLFSEMTTSDNINPNSVTFVGILGACVHRGLINEGKSYFKMMIEEFGITPSIQHYGCMVDLYGRSGLIKEAESFIASMPMEPDVLIWGSLLSGSRMLGDIKTCEGALKRLIELDPMNSGAYVLLSNVYAKTGRWMEGINKVPGCSYVEVEGVVHEFVVGDESQQESERIYAMLDEIMQRLREAGYVTDTKEVLLDLNEKDKEIALSYHSEKLAIAFCLMKTRPGTPVRIIKNLRICGDCHLTGLALAEIFGDNNCSNVCVGLNKHITEFWRF

SEQ ID NO: 70798 - DNA, 4206 bp, Arabidopsis thaliana
  misc_feature (1)..(4206): Ceres Seq. ID no. 2997903
  misc_feature (1)..(4206): Ortholog of  Ceres SEQ ID NO 15180400 as cited in SEQ ID NO 0
atggaggagtctgaacttgaagaaggagaggcttgctcttacaatattactaacgaatacgctggaagcatagaccctgataacgatctctcttacattgtgagcacctccttctcagctgctctacgagatgagaagcttcaacacatccttggacacttccagaaagactttgagggcggtgtttcagctgagaatcttggggcgaaatatggtggctatggctctttcttgccaacttatcaacgttctcctgtttggtctcacccgaagacaccagcaaaacctcagagttctacagggactagatctccaaacaacttactaggggagagtggcaatgcagcttcgtctagtgttcctaaaaaggcaaaatctggtcttgcttcctctggaaaccccaaaaaatcagtgaaatctaagaaacctagttccagtgccagaatggaatctgcaactaagaaaccttgtgtcttcagtaagcagaattctctgaagcttcggataaagatggtaccagatggtttatctaccgaaaagaatgctgctgcaatatacagtggccttggacttgatgtgtcaccttctttgtccttagataacaatagtctttcaggtagtgaagggatgaatgaggagcctcagggttattctccaacggagtctcccaccagtattcttaatgtaatgacttcacttcctgtggatcattgtcagttcctatctcctctctctgaggatctgattcgattcattgaaagggaaaaatccgaaaagggatataagtatacatctccatccaggcttttcactgcgagttcttctgctatggcatacggtttggaacctcagaagtctggagagaaaccatcagtagagaagaaaaaaaagatggtggagaggagcagcttttctgctgagacaaatgtccgcagtaagaagggcctgtttgattcaactgatgccattaccaaggagtcaatggaaacaaacacattatatcctacatttgcggagaaagaaacagccagtagtaaattatttgatgcatccaaggaaaactacaatggcactgttaggggcgaaatggtgggtgatgtcgacagaaggttgtggggtctaactcgtcataaagatcttggggcgcatcatgagaatccaaagactatttctgctggaagtgttcgtgaagataaaaaggctaaacttggtgataatgaggcttcaggatacccaaggaaagttggcaaatacaaaggcagcaaagcttctgattcagtcaaaaaggaatcgagtgcatcaaaggcgaaaagtggtcataaagtggagctagaacatcctcttagaaagcagaagtatgaccagatagaacaggagccaccgtcttcatcaaagttcaaggaacagcaaacctctgttgtttttgagactaagctgaatggtcaagctgagaagaaggaagtggtagccgtgaaaccacaaagtgatagcaaaaaagccgaggacacttacaaagacttttttggagacataggggactctgaagaagaagaggaacaagacgtaaaagatttgcggatttcagaaaagggacttccgcccttagaagatatgcctgaaaaatcgagcttgccgctagtagaacctcagaacgttggtcctgaacccatgttgagaaaacttggttctgatgcttctcttccgaaagcaaatcccgtgatcatacaagaacattgggttgcttgtgacaaatgtggaaagtggcggcttcttccttttggcgtcttcccagaagaccttcctgagaaatggatgtgcacaatgcttaattggctgcctggagtgaactattgcaatgttcctgaagatgaaacaacgaaagcactgtatgcaatgtatcagatccctgtccctgagaaccaggcttcgatgcagagtaatcccagtggccctaagcctcagtttacccagggagatgacaacacaaagaagaagaaaaagggtttcaaaaagatagacaatggaatggataaagaaggtgctcgaactgcagaaactaacaagaccatccaaacatcgtcaagaaatggtattcaaaattcgcagggacttggcgacttggccgaggatgagaggcaaatacataaacagaaagagaaaggaaaagcagtggatcacctctctgatgagtcgaagagcttgaaggcgaataacaaaagaaaaacagatctagagagttctatgctggccaaaaaaatgaagatcgaaagttttctgtttcctgatgaatctgaatatggaaatggacgtcctacctcgagtagtggtgtccctatcacgtcagcagatataaagccaaagccccgagtctcctccaaaatgccaaaagaggaaggaggagcttcagacactggaaatagcaatagcactggggggattaaaaagaggaaactgagagaaagccatggttctaggatttacagtgagaacgaaaatcatgaacgaaagaaagctcgagttcgtaaagaagagaaggagcctagttattcacaaggcaatgggaagttggaaaagaaaaatagaagtcattcgaaaatagagtatgcaaatgttcagaactcaatcgcggcaacctcaagttcttctaagatttctgattctcataaacccagaaacagctcccgcgaagctaaatgttctcctgttgagtcggtgtcttcctcacctatgaggctttccaacccggagaaacgtatatctgtgagtaaaaagaaagaagaatcttatgatgctaacgtctttgcagcaggtagtttgaaaaaattctcagatggtgaaggtgaagatgatggtgggagtgatagatcgcagagtcagatgaaggataaacatggatcccatgagtcttctgtgcttgatatttgggataataaaggatctttgaaagcgaaagagcgcgctgatccttctctcgatgccaattttgaaaatggtggccacaagactttaccgcggaaactggatcatattctcggtgaaggaaaacagtctagcgatcatcatcgacgtagcaatgattccctggcaaagaagtcaggaaaaggttcatcttctcggtccaaagaaaagagccaaagcattaggtctgattcacgggatggtccgagacatattgaaaagaagatatatgatggtagtcctgacagtagagcggatatgatcgtgagaccaaacattccaaaaccgcacgactccgaaagaataccagagaggagtaatatagcagatttagcttctccatcacggccaccatctagaggtgtccaaggggattcctctatgctttctgtccgtaagaaagtcgataaatgcagcacatcagctggaaataataatatccaagctgatgatgtgacaaaggcaacagcccaaataagaaggaaaagcgagccttctccaagccccttgcgaaaggaaataacatctgcgcaggccgcccataatactttaaaagaagctaaagacttgaaacatacagctgaccgtctcaagaattctgtatcaaaccttgagcacattgagctctacttccaagcttgccttaagtttcttcacggtgcttttcttttggagatgagtagcaacgagagtgctagacaaggagaaacaatggtccaatctatgaagatttatagtagcactgcgaatctttgcggcactgaaacctttttccgtgatagattttgtgcccatgagtatgagaagtctaaagatatgggagctgctgccctggcttacaaatgcatggaggtcgcgtatatgagagtggttaattcctcctacaccagtgctaatagatatcgaaatgaattgcagacttctctacaaatggttccgccaggtgaatctccttcttcatctgcctcggatgttgataacgtgaaccatccagcagcagtagacagagttggtacctcaaggggcatcagttctcctttagttgctgggaaccacgacgtaaatctgtcaatggatgcctcgaggaaatcacgtgtggcattaacagcttgtattgaaaactcaggggaggcccaacaacaaggagagggtataatatctattaaaagcgcccttgattataacttccaagacatggagggattgctacgtttagtgaagcttgctatgaaggccaacaaccggtga

SEQ ID NO: 70799 - protein, 1401 aa, Arabidopsis thaliana
  peptide (1)..(1401): Ceres Seq. ID no. 2997904
MEESELEEGEACSYNITNEYAGSIDPDNDLSYIVSTSFSAALRDEKLQHILGHFQKDFEGGVSAENLGAKYGGYGSFLPTYQRSPVWSHPKTPAKPQSSTGTRSPNNLLGESGNAASSSVPKKAKSGLASSGNPKKSVKSKKPSSSARMESATKKPCVFSKQNSLKLRIKMVPDGLSTEKNAAAIYSGLGLDVSPSLSLDNNSLSGSEGMNEEPQGYSPTESPTSILNVMTSLPVDHCQFLSPLSEDLIRFIEREKSEKGYKYTSPSRLFTASSSAMAYGLEPQKSGEKPSVEKKKKMVERSSFSAETNVRSKKGLFDSTDAITKESMETNTLYPTFAEKETASSKLFDASKENYNGTVRGEMVGDVDRRLWGLTRHKDLGAHHENPKTISAGSVREDKKAKLGDNEASGYPRKVGKYKGSKASDSVKKESSASKAKSGHKVELEHPLRKQKYDQIEQEPPSSSKFKEQQTSVVFETKLNGQAEKKEVVAVKPQSDSKKAEDTYKDFFGDIGDSEEEEEQDVKDLRISEKGLPPLEDMPEKSSLPLVEPQNVGPEPMLRKLGSDASLPKANPVIIQEHWVACDKCGKWRLLPFGVFPEDLPEKWMCTMLNWLPGVNYCNVPEDETTKALYAMYQIPVPENQASMQSNPSGPKPQFTQGDDNTKKKKKGFKKIDNGMDKEGARTAETNKTIQTSSRNGIQNSQGLGDLAEDERQIHKQKEKGKAVDHLSDESKSLKANNKRKTDLESSMLAKKMKIESFLFPDESEYGNGRPTSSSGVPITSADIKPKPRVSSKMPKEEGGASDTGNSNSTGGIKKRKLRESHGSRIYSENENHERKKARVRKEEKEPSYSQGNGKLEKKNRSHSKIEYANVQNSIAATSSSSKISDSHKPRNSSREAKCSPVESVSSSPMRLSNPEKRISVSKKKEESYDANVFAAGSLKKFSDGEGEDDGGSDRSQSQMKDKHGSHESSVLDIWDNKGSLKAKERADPSLDANFENGGHKTLPRKLDHILGEGKQSSDHHRRSNDSLAKKSGKGSSSRSKEKSQSIRSDSRDGPRHIEKKIYDGSPDSRADMIVRPNIPKPHDSERIPERSNIADLASPSRPPSRGVQGDSSMLSVRKKVDKCSTSAGNNNIQADDVTKATAQIRRKSEPSPSPLRKEITSAQAAHNTLKEAKDLKHTADRLKNSVSNLEHIELYFQACLKFLHGAFLLEMSSNESARQGETMVQSMKIYSSTANLCGTETFFRDRFCAHEYEKSKDMGAAALAYKCMEVAYMRVVNSSYTSANRYRNELQTSLQMVPPGESPSSSASDVDNVNHPAAVDRVGTSRGISSPLVAGNHDVNLSMDASRKSRVALTACIENSGEAQQQGEGIISIKSALDYNFQDMEGLLRLVKLAMKANNR

SEQ ID NO: 70800 - protein, 1253 aa, Arabidopsis thaliana
  peptide (1)..(1253): Ceres Seq. ID no. 2997905
MESATKKPCVFSKQNSLKLRIKMVPDGLSTEKNAAAIYSGLGLDVSPSLSLDNNSLSGSEGMNEEPQGYSPTESPTSILNVMTSLPVDHCQFLSPLSEDLIRFIEREKSEKGYKYTSPSRLFTASSSAMAYGLEPQKSGEKPSVEKKKKMVERSSFSAETNVRSKKGLFDSTDAITKESMETNTLYPTFAEKETASSKLFDASKENYNGTVRGEMVGDVDRRLWGLTRHKDLGAHHENPKTISAGSVREDKKAKLGDNEASGYPRKVGKYKGSKASDSVKKESSASKAKSGHKVELEHPLRKQKYDQIEQEPPSSSKFKEQQTSVVFETKLNGQAEKKEVVAVKPQSDSKKAEDTYKDFFGDIGDSEEEEEQDVKDLRISEKGLPPLEDMPEKSSLPLVEPQNVGPEPMLRKLGSDASLPKANPVIIQEHWVACDKCGKWRLLPFGVFPEDLPEKWMCTMLNWLPGVNYCNVPEDETTKALYAMYQIPVPENQASMQSNPSGPKPQFTQGDDNTKKKKKGFKKIDNGMDKEGARTAETNKTIQTSSRNGIQNSQGLGDLAEDERQIHKQKEKGKAVDHLSDESKSLKANNKRKTDLESSMLAKKMKIESFLFPDESEYGNGRPTSSSGVPITSADIKPKPRVSSKMPKEEGGASDTGNSNSTGGIKKRKLRESHGSRIYSENENHERKKARVRKEEKEPSYSQGNGKLEKKNRSHSKIEYANVQNSIAATSSSSKISDSHKPRNSSREAKCSPVESVSSSPMRLSNPEKRISVSKKKEESYDANVFAAGSLKKFSDGEGEDDGGSDRSQSQMKDKHGSHESSVLDIWDNKGSLKAKERADPSLDANFENGGHKTLPRKLDHILGEGKQSSDHHRRSNDSLAKKSGKGSSSRSKEKSQSIRSDSRDGPRHIEKKIYDGSPDSRADMIVRPNIPKPHDSERIPERSNIADLASPSRPPSRGVQGDSSMLSVRKKVDKCSTSAGNNNIQADDVTKATAQIRRKSEPSPSPLRKEITSAQAAHNTLKEAKDLKHTADRLKNSVSNLEHIELYFQACLKFLHGAFLLEMSSNESARQGETMVQSMKIYSSTANLCGTETFFRDRFCAHEYEKSKDMGAAALAYKCMEVAYMRVVNSSYTSANRYRNELQTSLQMVPPGESPSSSASDVDNVNHPAAVDRVGTSRGISSPLVAGNHDVNLSMDASRKSRVALTACIENSGEAQQQGEGIISIKSALDYNFQDMEGLLRLVKLAMKANNR

SEQ ID NO: 70801 - protein, 1231 aa, Arabidopsis thaliana
  peptide (1)..(1231): Ceres Seq. ID no. 2997906
MVPDGLSTEKNAAAIYSGLGLDVSPSLSLDNNSLSGSEGMNEEPQGYSPTESPTSILNVMTSLPVDHCQFLSPLSEDLIRFIEREKSEKGYKYTSPSRLFTASSSAMAYGLEPQKSGEKPSVEKKKKMVERSSFSAETNVRSKKGLFDSTDAITKESMETNTLYPTFAEKETASSKLFDASKENYNGTVRGEMVGDVDRRLWGLTRHKDLGAHHENPKTISAGSVREDKKAKLGDNEASGYPRKVGKYKGSKASDSVKKESSASKAKSGHKVELEHPLRKQKYDQIEQEPPSSSKFKEQQTSVVFETKLNGQAEKKEVVAVKPQSDSKKAEDTYKDFFGDIGDSEEEEEQDVKDLRISEKGLPPLEDMPEKSSLPLVEPQNVGPEPMLRKLGSDASLPKANPVIIQEHWVACDKCGKWRLLPFGVFPEDLPEKWMCTMLNWLPGVNYCNVPEDETTKALYAMYQIPVPENQASMQSNPSGPKPQFTQGDDNTKKKKKGFKKIDNGMDKEGARTAETNKTIQTSSRNGIQNSQGLGDLAEDERQIHKQKEKGKAVDHLSDESKSLKANNKRKTDLESSMLAKKMKIESFLFPDESEYGNGRPTSSSGVPITSADIKPKPRVSSKMPKEEGGASDTGNSNSTGGIKKRKLRESHGSRIYSENENHERKKARVRKEEKEPSYSQGNGKLEKKNRSHSKIEYANVQNSIAATSSSSKISDSHKPRNSSREAKCSPVESVSSSPMRLSNPEKRISVSKKKEESYDANVFAAGSLKKFSDGEGEDDGGSDRSQSQMKDKHGSHESSVLDIWDNKGSLKAKERADPSLDANFENGGHKTLPRKLDHILGEGKQSSDHHRRSNDSLAKKSGKGSSSRSKEKSQSIRSDSRDGPRHIEKKIYDGSPDSRADMIVRPNIPKPHDSERIPERSNIADLASPSRPPSRGVQGDSSMLSVRKKVDKCSTSAGNNNIQADDVTKATAQIRRKSEPSPSPLRKEITSAQAAHNTLKEAKDLKHTADRLKNSVSNLEHIELYFQACLKFLHGAFLLEMSSNESARQGETMVQSMKIYSSTANLCGTETFFRDRFCAHEYEKSKDMGAAALAYKCMEVAYMRVVNSSYTSANRYRNELQTSLQMVPPGESPSSSASDVDNVNHPAAVDRVGTSRGISSPLVAGNHDVNLSMDASRKSRVALTACIENSGEAQQQGEGIISIKSALDYNFQDMEGLLRLVKLAMKANNR

SEQ ID NO: 70802 - DNA, 1086 bp, Arabidopsis thaliana
  misc_feature (1)..(1086): Ceres Seq. ID no. 2998206
  misc_feature (1)..(1086): Ortholog of  Ceres SEQ ID NO 13593854 as cited in SEQ ID NO 53403
  misc_feature (1)..(1086): Ortholog of  Ceres SEQ ID NO 12581680 as cited in SEQ ID NO 55019
atggttaaaccctgttggagaataggtgccggtatggagagaagtaagatcaatcccacaaaggttgatggtttgacatggtacaaagatcttggtcttcacacctttggagagttttccatggcaatgatccaagccaacagtgtgatggaggatcagtgccagatcgaatcagggccgcttacattcaacaatccgacagttcaaggcacatttgttggagtttacgatggccatggaggtccagaggcttccagattcattgcagacaacatcttccccaaggagatttcagagcaggtgatcagcaaagcatttgccgagacagacaaagattttctcaagacagtgacgaagcaatggcctacgaacccacagatggcatcagtggggtcatgttgcttggcaggagtgatatgcaacggattggtgtatattgcaaacacgggagattccagagctgtgttgggcagatctgagagaggtggagtgagagctgttcagttatctgtagagcacaatgccaatcttgagtctgcgaggcaagagctatggtcattgcatcctaatgaccccaccattcttgtgatgaagcaccgcttgtggcgtgtgaaaggcgttatccaggtcacaagatccataggtgatgcatacctcaaaagagcagagttcaacagagaacctttgctgcccaaattcagactaccagaacatttcactaagccaatccttagtgcggatccatcagtcaccattacgcggcttagcccacaagatgagtttataattcttgcttcagatgggctttgggagcatcttagcaaccaggaagctgttgatattgtgcataattcccctcgacaaggaatagcaaggagactacttaaagctgcattgaaggaagcagcaaagaaaagagagatgagatactcagacctaacagagatccatcctggtgtaagaaggcatttccacgacgatataaccgttattgtggtctatctcaacccccacccggtcaaaaccaattcttgggcttcacctctgtcaattagagggggatacccgatgcattcaacatcatga

SEQ ID NO: 70803 - protein, 361 aa, Arabidopsis thaliana
  peptide (1)..(361): Ceres Seq. ID no. 2998207
MVKPCWRIGAGMERSKINPTKVDGLTWYKDLGLHTFGEFSMAMIQANSVMEDQCQIESGPLTFNNPTVQGTFVGVYDGHGGPEASRFIADNIFPKEISEQVISKAFAETDKDFLKTVTKQWPTNPQMASVGSCCLAGVICNGLVYIANTGDSRAVLGRSERGGVRAVQLSVEHNANLESARQELWSLHPNDPTILVMKHRLWRVKGVIQVTRSIGDAYLKRAEFNREPLLPKFRLPEHFTKPILSADPSVTITRLSPQDEFIILASDGLWEHLSNQEAVDIVHNSPRQGIARRLLKAALKEAAKKREMRYSDLTEIHPGVRRHFHDDITVIVVYLNPHPVKTNSWASPLSIRGGYPMHSTS

SEQ ID NO: 70804 - protein, 350 aa, Arabidopsis thaliana
  peptide (1)..(350): Ceres Seq. ID no. 2998208
MERSKINPTKVDGLTWYKDLGLHTFGEFSMAMIQANSVMEDQCQIESGPLTFNNPTVQGTFVGVYDGHGGPEASRFIADNIFPKEISEQVISKAFAETDKDFLKTVTKQWPTNPQMASVGSCCLAGVICNGLVYIANTGDSRAVLGRSERGGVRAVQLSVEHNANLESARQELWSLHPNDPTILVMKHRLWRVKGVIQVTRSIGDAYLKRAEFNREPLLPKFRLPEHFTKPILSADPSVTITRLSPQDEFIILASDGLWEHLSNQEAVDIVHNSPRQGIARRLLKAALKEAAKKREMRYSDLTEIHPGVRRHFHDDITVIVVYLNPHPVKTNSWASPLSIRGGYPMHSTS

SEQ ID NO: 70805 - protein, 321 aa, Arabidopsis thaliana
  peptide (1)..(321): Ceres Seq. ID no. 2998209
MAMIQANSVMEDQCQIESGPLTFNNPTVQGTFVGVYDGHGGPEASRFIADNIFPKEISEQVISKAFAETDKDFLKTVTKQWPTNPQMASVGSCCLAGVICNGLVYIANTGDSRAVLGRSERGGVRAVQLSVEHNANLESARQELWSLHPNDPTILVMKHRLWRVKGVIQVTRSIGDAYLKRAEFNREPLLPKFRLPEHFTKPILSADPSVTITRLSPQDEFIILASDGLWEHLSNQEAVDIVHNSPRQGIARRLLKAALKEAAKKREMRYSDLTEIHPGVRRHFHDDITVIVVYLNPHPVKTNSWASPLSIRGGYPMHSTS

SEQ ID NO: 70806 - DNA, 2739 bp, Arabidopsis thaliana
  misc_feature (1)..(2739): Ceres Seq. ID no. 2998305
  misc_feature (1)..(2739): Ortholog of  Ceres SEQ ID NO 15179011 as cited in SEQ ID NO 1042
  misc_feature (1)..(2739): Ortholog of  Ceres SEQ ID NO 13582264 as cited in SEQ ID NO 51010
atggatgatttcaatcttcgtagcgaaaaccctaattcatcatccaccacttcctcatcctcttcctctttccaccgtcacaagagcgaaaccggaaacacaaaacggtcaaggtcaacgtccacgttatcgacggaccctcagagcgtggcggctcgcgacagacggcaccgaattagcgaccgtttcaagattttacaaagcatggtccctggtggtgcgaagatggacactgtatctatgcttgacgaagccattagctacgtcaagttcttgaaggctcagatctggtatcaccaaaacatgcttctcttcataaacgaccacgaaactacatcatcttgtacttactctcccggcgctggagaatttggaccgaaactctttggttatgatgacgattatgcccctataatggacacatattcacaaggcgtgccacttacggttgcggactcgaagtatacgccgtggtttggttcggttgatgatgagcaagaacacgtcacgtatttcaaatacaggcgtgccacacgacacgcattacgagggcactgcaattgtataatcggagaaacagaggaattcgccgatcaacgagagaagatggaagtgcaaattgaagaatctggtaaaaatcaaacctctccggaatcaattgaagcagacaaagcgaagcagatagtggtgcttctgattggtccaccaggaagcggcaaatcgacgttttgtgacaccgcaatgcgttcctctcaccgcccttggtctcgtatctgccaggacattgttaacaatggcaaagctggaacaaaggctcagtgtttaaagatggctacagattctcttagggaaggcaagagcgtctttatagacagatgcaatcttgacagggagcaacgttcagagtttattaagcttggtggtcctgagttcgaagttcatgcagtggttctggagcttcctgctcaggtttgtatatctagatcagttaaaagaactggtcatgaaggaaatctacaaggtggaagagctgcagctgttgtgaataagatgcttcagagtaaggaacttcccaaagtgaatgaagggttttctcggattatgttttgttacagtgacgctgatgttgataatgctgttaacatgtataacaagcttggtccaatggatacccttccttctggctgttttggcgaaaaaaaattagatactaaaagccaacccggtataatgaagttctttaagaaagtcagtgctctgcctgcttcatcttctaatgaagctactaacacaactcggaaagctgatgaaatgacagcaaatgtccgagtttcgccagtcaagcttggttctgctgatattgtacctacactggcattcccatcaatttcgactgcggattttcagtttgatcttgaaaaggcttctgatatcattgtggagaaagcagaggagttcttgtctaaacttgggactgcgcgtctcgtcttggtggacttgagccgcgggtcaaagattctatctctggtcaaggctaaggcttctcagaagaacattgattcagcgaaattcttcacatttgttggggacataactaagcttcgttctgaaggtggtctacactgtaatgtcatagctaatgctactaactggcggcttaaacctggaggtggaggtgtgaatgcagcaatattcaaagctgctggtccagatcttgagactgcgacaagagtacgagcaaacactcttcttcctggaaaagccgtggtagttcctcttccttctacttgtccattacacaatgcagaaggaattacacatgtcatacatgttctaggaccaaacatgaacccaaaccgaccagacaaccttaacaacgactacaccaaggggtgcaaaactctccgggaagcttacacatctctatttgaaggttttctatcagtagtacaggatcaatcgaagttgcccaaacgaagcagtcaaacagctgtgtcagattctggtgaggatattaaggaagactctgagagaaacaaaaagtacaaaggatcacaagataaggccgtaactaataatttggaatcagagtctctggaggacacaagaggcagtggaaagaagatgagtaaaggatggaacacatgggcattggctctccacagcatcgcgatgcacccagagagacacgagaatgtcgtgcttgaatatttagacaacatcgttgtcataaacgaccagtacccaaaggcgcggaaacacgtgctagtactggcgagacaggagagtctagatgggctagaagatgttcgcaaagagaatcttcaacttctgcaggaaatgcacaatgttggtctgaaatgggttgatagattccagaacgaggatgcatctcttatcttccgccttggatatcactcggttccctcgatgcgacaactacacttacacgttataagccaagactttaattcagatagtttgaagaacaagaaacactggaactctttcacgacctcgttcttccgtgactcagttgatgtacttgaagaggtcaacagccaaggcaaggccaatgtggcgagcgaagatctgttgaaaggtgagctgcgttgcaatcggtgtagaagcgcacacccaaatattccaaaacttaaatcacatgtcagaagctgccattctcaatttccagaccatttactccaaaacaatcgccttgtggctagagcagagacgtag

SEQ ID NO: 70807 - protein, 912 aa, Arabidopsis thaliana
  peptide (1)..(912): Ceres Seq. ID no. 2998306
MDDFNLRSENPNSSSTTSSSSSSFHRHKSETGNTKRSRSTSTLSTDPQSVAARDRRHRISDRFKILQSMVPGGAKMDTVSMLDEAISYVKFLKAQIWYHQNMLLFINDHETTSSCTYSPGAGEFGPKLFGYDDDYAPIMDTYSQGVPLTVADSKYTPWFGSVDDEQEHVTYFKYRRATRHALRGHCNCIIGETEEFADQREKMEVQIEESGKNQTSPESIEADKAKQIVVLLIGPPGSGKSTFCDTAMRSSHRPWSRICQDIVNNGKAGTKAQCLKMATDSLREGKSVFIDRCNLDREQRSEFIKLGGPEFEVHAVVLELPAQVCISRSVKRTGHEGNLQGGRAAAVVNKMLQSKELPKVNEGFSRIMFCYSDADVDNAVNMYNKLGPMDTLPSGCFGEKKLDTKSQPGIMKFFKKVSALPASSSNEATNTTRKADEMTANVRVSPVKLGSADIVPTLAFPSISTADFQFDLEKASDIIVEKAEEFLSKLGTARLVLVDLSRGSKILSLVKAKASQKNIDSAKFFTFVGDITKLRSEGGLHCNVIANATNWRLKPGGGGVNAAIFKAAGPDLETATRVRANTLLPGKAVVVPLPSTCPLHNAEGITHVIHVLGPNMNPNRPDNLNNDYTKGCKTLREAYTSLFEGFLSVVQDQSKLPKRSSQTAVSDSGEDIKEDSERNKKYKGSQDKAVTNNLESESLEDTRGSGKKMSKGWNTWALALHSIAMHPERHENVVLEYLDNIVVINDQYPKARKHVLVLARQESLDGLEDVRKENLQLLQEMHNVGLKWVDRFQNEDASLIFRLGYHSVPSMRQLHLHVISQDFNSDSLKNKKHWNSFTTSFFRDSVDVLEEVNSQGKANVASEDLLKGELRCNRCRSAHPNIPKLKSHVRSCHSQFPDHLLQNNRLVARAET

SEQ ID NO: 70808 - protein, 844 aa, Arabidopsis thaliana
  peptide (1)..(844): Ceres Seq. ID no. 2998307
MVPGGAKMDTVSMLDEAISYVKFLKAQIWYHQNMLLFINDHETTSSCTYSPGAGEFGPKLFGYDDDYAPIMDTYSQGVPLTVADSKYTPWFGSVDDEQEHVTYFKYRRATRHALRGHCNCIIGETEEFADQREKMEVQIEESGKNQTSPESIEADKAKQIVVLLIGPPGSGKSTFCDTAMRSSHRPWSRICQDIVNNGKAGTKAQCLKMATDSLREGKSVFIDRCNLDREQRSEFIKLGGPEFEVHAVVLELPAQVCISRSVKRTGHEGNLQGGRAAAVVNKMLQSKELPKVNEGFSRIMFCYSDADVDNAVNMYNKLGPMDTLPSGCFGEKKLDTKSQPGIMKFFKKVSALPASSSNEATNTTRKADEMTANVRVSPVKLGSADIVPTLAFPSISTADFQFDLEKASDIIVEKAEEFLSKLGTARLVLVDLSRGSKILSLVKAKASQKNIDSAKFFTFVGDITKLRSEGGLHCNVIANATNWRLKPGGGGVNAAIFKAAGPDLETATRVRANTLLPGKAVVVPLPSTCPLHNAEGITHVIHVLGPNMNPNRPDNLNNDYTKGCKTLREAYTSLFEGFLSVVQDQSKLPKRSSQTAVSDSGEDIKEDSERNKKYKGSQDKAVTNNLESESLEDTRGSGKKMSKGWNTWALALHSIAMHPERHENVVLEYLDNIVVINDQYPKARKHVLVLARQESLDGLEDVRKENLQLLQEMHNVGLKWVDRFQNEDASLIFRLGYHSVPSMRQLHLHVISQDFNSDSLKNKKHWNSFTTSFFRDSVDVLEEVNSQGKANVASEDLLKGELRCNRCRSAHPNIPKLKSHVRSCHSQFPDHLLQNNRLVARAET

SEQ ID NO: 70809 - protein, 837 aa, Arabidopsis thaliana
  peptide (1)..(837): Ceres Seq. ID no. 2998308
MDTVSMLDEAISYVKFLKAQIWYHQNMLLFINDHETTSSCTYSPGAGEFGPKLFGYDDDYAPIMDTYSQGVPLTVADSKYTPWFGSVDDEQEHVTYFKYRRATRHALRGHCNCIIGETEEFADQREKMEVQIEESGKNQTSPESIEADKAKQIVVLLIGPPGSGKSTFCDTAMRSSHRPWSRICQDIVNNGKAGTKAQCLKMATDSLREGKSVFIDRCNLDREQRSEFIKLGGPEFEVHAVVLELPAQVCISRSVKRTGHEGNLQGGRAAAVVNKMLQSKELPKVNEGFSRIMFCYSDADVDNAVNMYNKLGPMDTLPSGCFGEKKLDTKSQPGIMKFFKKVSALPASSSNEATNTTRKADEMTANVRVSPVKLGSADIVPTLAFPSISTADFQFDLEKASDIIVEKAEEFLSKLGTARLVLVDLSRGSKILSLVKAKASQKNIDSAKFFTFVGDITKLRSEGGLHCNVIANATNWRLKPGGGGVNAAIFKAAGPDLETATRVRANTLLPGKAVVVPLPSTCPLHNAEGITHVIHVLGPNMNPNRPDNLNNDYTKGCKTLREAYTSLFEGFLSVVQDQSKLPKRSSQTAVSDSGEDIKEDSERNKKYKGSQDKAVTNNLESESLEDTRGSGKKMSKGWNTWALALHSIAMHPERHENVVLEYLDNIVVINDQYPKARKHVLVLARQESLDGLEDVRKENLQLLQEMHNVGLKWVDRFQNEDASLIFRLGYHSVPSMRQLHLHVISQDFNSDSLKNKKHWNSFTTSFFRDSVDVLEEVNSQGKANVASEDLLKGELRCNRCRSAHPNIPKLKSHVRSCHSQFPDHLLQNNRLVARAET

SEQ ID NO: 70810 - DNA, 804 bp, Arabidopsis thaliana
  misc_feature (1)..(804): Ceres Seq. ID no. 2998560
  misc_feature (1)..(804): Ortholog of  Ceres SEQ ID NO 13657872 as cited in SEQ ID NO 66357
atgtttgaagagattcttcacctttctgaaggaaaacaaatcgttatgttcttggattatgatggcactttatctcccattgttgatgatccagatcgagctttcatgtctagaaagatgagaagaactgtgaggaaactagcaaactgtttcccgacggccatagttagtgggagatgcatagaaaagctaattatgatagttttgacaacttttcaggtttataactttgtaaaactaactgagttgtactatgctggaagtcatggaatggacatcaaaggaccagagcaagggtccaaatatgagcaagatagtaaatctcttctttgccaaccagctacagagttcctccccatgatcgacgaggtttatcataaattagtggagaaaacaaaatctactcccggagcccaagtagagaacaacaaattttgtgtctctgttcacttccgacgcgtagatgaaaataactggagtgatttggctaaccaagttcgatcagtaatgaaagactaccctaagctccgtcttactcaaggaagaaaagttttggaggttcgtccgattattaaatgggacaaaggcaaagcactcgagtttttattagagtcacttggatacgctaattgtaccgacgttttccctctttatatcggagatgatcgcaccgacgaagatgcattcaaggtatatacagaatttagttatggagttcttgcaacgtttagtggaatggaaacaattgagatctggagcatgatgagagctataactacagaagaatcgtttcttcttaattag

SEQ ID NO: 70811 - protein, 267 aa, Arabidopsis thaliana
  peptide (1)..(267): Ceres Seq. ID no. 2998561
MFEEILHLSEGKQIVMFLDYDGTLSPIVDDPDRAFMSRKMRRTVRKLANCFPTAIVSGRCIEKLIMIVLTTFQVYNFVKLTELYYAGSHGMDIKGPEQGSKYEQDSKSLLCQPATEFLPMIDEVYHKLVEKTKSTPGAQVENNKFCVSVHFRRVDENNWSDLANQVRSVMKDYPKLRLTQGRKVLEVRPIIKWDKGKALEFLLESLGYANCTDVFPLYIGDDRTDEDAFKVYTEFSYGVLATFSGMETIEIWSMMRAITTEESFLLN

SEQ ID NO: 70812 - protein, 252 aa, Arabidopsis thaliana
  peptide (1)..(252): Ceres Seq. ID no. 2998562
MFLDYDGTLSPIVDDPDRAFMSRKMRRTVRKLANCFPTAIVSGRCIEKLIMIVLTTFQVYNFVKLTELYYAGSHGMDIKGPEQGSKYEQDSKSLLCQPATEFLPMIDEVYHKLVEKTKSTPGAQVENNKFCVSVHFRRVDENNWSDLANQVRSVMKDYPKLRLTQGRKVLEVRPIIKWDKGKALEFLLESLGYANCTDVFPLYIGDDRTDEDAFKVYTEFSYGVLATFSGMETIEIWSMMRAITTEESFLLN

SEQ ID NO: 70813 - protein, 232 aa, Arabidopsis thaliana
  peptide (1)..(232): Ceres Seq. ID no. 2998563
MSRKMRRTVRKLANCFPTAIVSGRCIEKLIMIVLTTFQVYNFVKLTELYYAGSHGMDIKGPEQGSKYEQDSKSLLCQPATEFLPMIDEVYHKLVEKTKSTPGAQVENNKFCVSVHFRRVDENNWSDLANQVRSVMKDYPKLRLTQGRKVLEVRPIIKWDKGKALEFLLESLGYANCTDVFPLYIGDDRTDEDAFKVYTEFSYGVLATFSGMETIEIWSMMRAITTEESFLLN

SEQ ID NO: 70814 - DNA, 1896 bp, Arabidopsis thaliana
  misc_feature (1)..(1896): Ceres Seq. ID no. 2998564
  misc_feature (1)..(1896): Ortholog of  Ceres SEQ ID NO 13600301 as cited in SEQ ID NO 1010
atgaataagaagaacgagccgcttcatctatgcaaagaaaggaagagatttgtcaaacaagctatggattccagatgtgctttagccgctgcacacgtgtcttacatccgttcactccgtaacatcggagcttgtcttcgtcaatacgcggaggcggagactgctcatgaatcatctccgtcgttaaccgccactgagcctgagaaatctccttctcataactcctcttaccctgacgattcggttgactcgccactgagtcataactcgaatccaaaccctaaccctaaaccccttttcaatctaagttacatgaagacggagacggctagttctactgtgactttcactattaaccctctgagcgacggtgatgacgatctggaagtgacaatgccggcgttttctcctcctcctccgccgcgtcctcgccggccagagacgtcttcttgggactatttcgacacttgtgacgattttgatagctttagatttgtagggctaagtgaacaaaccgagattgatagtgaatgtgatgcagcagttataggattagagaagattactagtcaagggaatgtagcaaaatctggttcagagacattgcaagactcgagttttaaaacaaagcagaggaaacagagttgtgaagataatgatgaaagagaagatccatcggagtttatcacacatagagccaaagactttgtgtcgagtatgaaagatatagaacataagttctttagagcttctgaatctggaagagaagtttcaagaatgcttgaagttaacaaaatcagagtcggattcgccgatatgacagagggaaaagttattcaccagtttctcaagtgttctgagttaaactttaatgtagagccattgagtcatcaagttactaaagtcattgtgtggaagagaacatcgtcgtcaagatcctccacttctagaaatccgttgatccagacatcaaaagaagatcacgatgatgaaagtggaagtgatttcatcgaagagttttgtatgatctcaggaagtcactcttcttcgcttgatcggttatacgcttgggagagaaaactctatgatgaagtcaaggcgagtgagatgattaggaaagagtatgatcgaaaatgcgagcagctaaggaaccaattcgcaaaggatcacagtgctaaatcgatggataaaacaagagcagctgctaaagatcttcattcaagaatcagagtcgcgattcaatctgttgaatcgatttcaaagcggattgagagaatcagagacgatgagctccacccacagctcttagagtttcttcaagggttgataagaatgtggaaagcgatgcttgaatgtcatcatacacagtacattaccatttcattggcttaccattgtcgacattcctccaaaacagcacacgaaagtgtccttaagaggcggattttggcggagcttctagaagaaacagagtgttttggtctaagctttgtagatttggttcacagtatggcttcttatgtggaagctctgaatggttggcttcacaactgtgtcttgctccctcaagaacgttctacaagaaaccgaagaccatggtccccacgtcgtgtcctggctccaccgatattcgtgctgtgtcgggactggtctgcagggatcaaaacactgccgtctgatgaacttagcgggtcaatcaaggggttttccttggatatggagatgttgggggaagaaaaaggcggttcactgttggtttcggatttgtcgagtgtgcattcgagtttggcgaagcttctagagagattaaaaaagttttcggaagcttctttaaaaatgtatgaagatgtaaaggtgaaaagtgaagcagctagagttgcttacactaataaataa

SEQ ID NO: 70815 - protein, 631 aa, Arabidopsis thaliana
  peptide (1)..(631): Ceres Seq. ID no. 2998565
MNKKNEPLHLCKERKRFVKQAMDSRCALAAAHVSYIRSLRNIGACLRQYAEAETAHESSPSLTATEPEKSPSHNSSYPDDSVDSPLSHNSNPNPNPKPLFNLSYMKTETASSTVTFTINPLSDGDDDLEVTMPAFSPPPPPRPRRPETSSWDYFDTCDDFDSFRFVGLSEQTEIDSECDAAVIGLEKITSQGNVAKSGSETLQDSSFKTKQRKQSCEDNDEREDPSEFITHRAKDFVSSMKDIEHKFFRASESGREVSRMLEVNKIRVGFADMTEGKVIHQFLKCSELNFNVEPLSHQVTKVIVWKRTSSSRSSTSRNPLIQTSKEDHDDESGSDFIEEFCMISGSHSSSLDRLYAWERKLYDEVKASEMIRKEYDRKCEQLRNQFAKDHSAKSMDKTRAAAKDLHSRIRVAIQSVESISKRIERIRDDELHPQLLEFLQGLIRMWKAMLECHHTQYITISLAYHCRHSSKTAHESVLKRRILAELLEETECFGLSFVDLVHSMASYVEALNGWLHNCVLLPQERSTRNRRPWSPRRVLAPPIFVLCRDWSAGIKTLPSDELSGSIKGFSLDMEMLGEEKGGSLLVSDLSSVHSSLAKLLERLKKFSEASLKMYEDVKVKSEAARVAYTNK

SEQ ID NO: 70816 - protein, 610 aa, Arabidopsis thaliana
  peptide (1)..(610): Ceres Seq. ID no. 2998566
MDSRCALAAAHVSYIRSLRNIGACLRQYAEAETAHESSPSLTATEPEKSPSHNSSYPDDSVDSPLSHNSNPNPNPKPLFNLSYMKTETASSTVTFTINPLSDGDDDLEVTMPAFSPPPPPRPRRPETSSWDYFDTCDDFDSFRFVGLSEQTEIDSECDAAVIGLEKITSQGNVAKSGSETLQDSSFKTKQRKQSCEDNDEREDPSEFITHRAKDFVSSMKDIEHKFFRASESGREVSRMLEVNKIRVGFADMTEGKVIHQFLKCSELNFNVEPLSHQVTKVIVWKRTSSSRSSTSRNPLIQTSKEDHDDESGSDFIEEFCMISGSHSSSLDRLYAWERKLYDEVKASEMIRKEYDRKCEQLRNQFAKDHSAKSMDKTRAAAKDLHSRIRVAIQSVESISKRIERIRDDELHPQLLEFLQGLIRMWKAMLECHHTQYITISLAYHCRHSSKTAHESVLKRRILAELLEETECFGLSFVDLVHSMASYVEALNGWLHNCVLLPQERSTRNRRPWSPRRVLAPPIFVLCRDWSAGIKTLPSDELSGSIKGFSLDMEMLGEEKGGSLLVSDLSSVHSSLAKLLERLKKFSEASLKMYEDVKVKSEAARVAYTNK

SEQ ID NO: 70817 - protein, 527 aa, Arabidopsis thaliana
  peptide (1)..(527): Ceres Seq. ID no. 2998567
MKTETASSTVTFTINPLSDGDDDLEVTMPAFSPPPPPRPRRPETSSWDYFDTCDDFDSFRFVGLSEQTEIDSECDAAVIGLEKITSQGNVAKSGSETLQDSSFKTKQRKQSCEDNDEREDPSEFITHRAKDFVSSMKDIEHKFFRASESGREVSRMLEVNKIRVGFADMTEGKVIHQFLKCSELNFNVEPLSHQVTKVIVWKRTSSSRSSTSRNPLIQTSKEDHDDESGSDFIEEFCMISGSHSSSLDRLYAWERKLYDEVKASEMIRKEYDRKCEQLRNQFAKDHSAKSMDKTRAAAKDLHSRIRVAIQSVESISKRIERIRDDELHPQLLEFLQGLIRMWKAMLECHHTQYITISLAYHCRHSSKTAHESVLKRRILAELLEETECFGLSFVDLVHSMASYVEALNGWLHNCVLLPQERSTRNRRPWSPRRVLAPPIFVLCRDWSAGIKTLPSDELSGSIKGFSLDMEMLGEEKGGSLLVSDLSSVHSSLAKLLERLKKFSEASLKMYEDVKVKSEAARVAYTNK

SEQ ID NO: 70818 - DNA, 1071 bp, Arabidopsis thaliana
  misc_feature (1)..(1071): Ceres Seq. ID no. 2998644
  misc_feature (1)..(1071): Ortholog of  Ceres SEQ ID NO 13593889 as cited in SEQ ID NO 53305
  misc_feature (1)..(1071): Ortholog of  Ceres SEQ ID NO 13581959 as cited in SEQ ID NO 56156
atgagtagcgatgatacgattgaggagagtttgcttgtggatcccaaattgttgttcatcggctccaagattggtgaaggcgctcacggcaaagtctaccaaggaaggtatggtcgtcagattgttgcaatcaaagttgtcaaccggggctccaaacctgaccagcaatcttctctcgagagccgtttcgtccgtgaggtcaatatgatgtcccgcgttcaacaccataaccttgtcaaggtctctctccttctttcttctctttctttgctctcgatacttcttcttgaatacacaatatccatttggcagtttattggagcgtgcaaagatcctttaatggtaatagtaacagagcttctcccagggatgtctctccgtaaatatctcaccagcatccgtcctcagttgctccatctccctcttgctctctcctttgcccttgacatcgcccgtgccttgcactgcttacacgccaatggtatcattcacagagacctcaaacctgacaacttattgctcacggagaatcacaaatccgtcaagcttgctgatttcgggcttgctagggaagaatccgtgactgagatgatgactgctgagactgggacttaccgttggatggctcctgagctctacagtacagtgaccctgcgtcaaggagagaagaagcattacaacaacaaagttgatgtctacagctttggaatcgtgctttgggagcttctcactaatcgtatgccattcgagggcatgtccaatctgcaagccgcctacgcagcagcattcaaggagaggcccgtaatgccagaggggatatctccgagtctggcgttcatagtgcagtcttgttgggtggaggacccaaacatgaggccaagcttcagtcaaattatcagactgctcaatgagttcctccttaccctgactcctccgcctcctcagcctctgcctgagactgccaccaacaggaccaatggccgagccatcactgagttctccatccgtccaaaagggaaatttgccttcattcgccagcttttcgctgccaagaggaacataaactcttag

SEQ ID NO: 70819 - protein, 356 aa, Arabidopsis thaliana
  peptide (1)..(356): Ceres Seq. ID no. 2998645
MSSDDTIEESLLVDPKLLFIGSKIGEGAHGKVYQGRYGRQIVAIKVVNRGSKPDQQSSLESRFVREVNMMSRVQHHNLVKVSLLLSSLSLLSILLLEYTISIWQFIGACKDPLMVIVTELLPGMSLRKYLTSIRPQLLHLPLALSFALDIARALHCLHANGIIHRDLKPDNLLLTENHKSVKLADFGLAREESVTEMMTAETGTYRWMAPELYSTVTLRQGEKKHYNNKVDVYSFGIVLWELLTNRMPFEGMSNLQAAYAAAFKERPVMPEGISPSLAFIVQSCWVEDPNMRPSFSQIIRLLNEFLLTLTPPPPQPLPETATNRTNGRAITEFSIRPKGKFAFIRQLFAAKRNINS

SEQ ID NO: 70820 - protein, 288 aa, Arabidopsis thaliana
  peptide (1)..(288): Ceres Seq. ID no. 2998646
MMSRVQHHNLVKVSLLLSSLSLLSILLLEYTISIWQFIGACKDPLMVIVTELLPGMSLRKYLTSIRPQLLHLPLALSFALDIARALHCLHANGIIHRDLKPDNLLLTENHKSVKLADFGLAREESVTEMMTAETGTYRWMAPELYSTVTLRQGEKKHYNNKVDVYSFGIVLWELLTNRMPFEGMSNLQAAYAAAFKERPVMPEGISPSLAFIVQSCWVEDPNMRPSFSQIIRLLNEFLLTLTPPPPQPLPETATNRTNGRAITEFSIRPKGKFAFIRQLFAAKRNINS

SEQ ID NO: 70821 - protein, 287 aa, Arabidopsis thaliana
  peptide (1)..(287): Ceres Seq. ID no. 2998647
MSRVQHHNLVKVSLLLSSLSLLSILLLEYTISIWQFIGACKDPLMVIVTELLPGMSLRKYLTSIRPQLLHLPLALSFALDIARALHCLHANGIIHRDLKPDNLLLTENHKSVKLADFGLAREESVTEMMTAETGTYRWMAPELYSTVTLRQGEKKHYNNKVDVYSFGIVLWELLTNRMPFEGMSNLQAAYAAAFKERPVMPEGISPSLAFIVQSCWVEDPNMRPSFSQIIRLLNEFLLTLTPPPPQPLPETATNRTNGRAITEFSIRPKGKFAFIRQLFAAKRNINS

SEQ ID NO: 70822 - DNA, 1068 bp, Arabidopsis thaliana
  misc_feature (1)..(1068): Ceres Seq. ID no. 2999006
  misc_feature (1)..(1068): Ortholog of  Ceres SEQ ID NO 13595351 as cited in SEQ ID NO 55934
  misc_feature (1)..(1068): Ortholog of  Ceres SEQ ID NO 13639645 as cited in SEQ ID NO 57488
atggagagtacggtggaaagagaggcgtggaaagctcacgtggcgatgatcggtgtgcaattgttcaacggaggatatcatgtcattaccaaagtggctctcaacgttggtgtaaaccaacttgtcttctgtgtctttcgtgatctcattgctctctccattcttgctcctcttgcttatatccgtgataagagaacaagacctcctttgaatcgacagtttctcttagctttcttcttccttggtttaacagggatatttggtaatcagcttttgttcctcattggtctgaattacaccaatccaacttatgctgcagccattcagccgtcgatcccggtttttactttcatcttggctctcattatgggaacagagagactgaatttattcaagctagaaggtcaagctaaggtaggaggcacactgatttgtgtcgctggggcggtgctgatggttttgtttcgtggactggctttgtttggggaaacagaggctgagtccttgggtcatggtgaatcaagacacactgaaacatctggacacttcatgcatgctccggtcttaaagaagtatccggcgaatctttcagtcacagcatactcgtatttctttgggaccatgtttatggtgacatctgcttttttcatgactaatgagtcgacgaactggagtctcacaagatccgagttctttgcagttgtctacgcaggagtaatcgcgtctgctctcaactatggtctcttgacatggtcaaataagatcttgggtccttccttggttgctctctataatcctcttcaacccgcagcctcagctttcttgtccagaatcttccttggaagccctatctacttggggagcattttaggcggatgtgcaatcatagcaggtctttatagtgtcacctgggcatcttacaaagaaaagaaagcggcagcagcaatggctgtgatcccgatcacctcaaaggaagctgaacccttgatctacaaggaccataaaaacaaaccaataggacatctattcacaaaatctcccatctcttcaccaaaatccgatgattga

SEQ ID NO: 70823 - protein, 355 aa, Arabidopsis thaliana
  peptide (1)..(355): Ceres Seq. ID no. 2999007
MESTVEREAWKAHVAMIGVQLFNGGYHVITKVALNVGVNQLVFCVFRDLIALSILAPLAYIRDKRTRPPLNRQFLLAFFFLGLTGIFGNQLLFLIGLNYTNPTYAAAIQPSIPVFTFILALIMGTERLNLFKLEGQAKVGGTLICVAGAVLMVLFRGLALFGETEAESLGHGESRHTETSGHFMHAPVLKKYPANLSVTAYSYFFGTMFMVTSAFFMTNESTNWSLTRSEFFAVVYAGVIASALNYGLLTWSNKILGPSLVALYNPLQPAASAFLSRIFLGSPIYLGSILGGCAIIAGLYSVTWASYKEKKAAAAMAVIPITSKEAEPLIYKDHKNKPIGHLFTKSPISSPKSDD

SEQ ID NO: 70824 - protein, 340 aa, Arabidopsis thaliana
  peptide (1)..(340): Ceres Seq. ID no. 2999008
MIGVQLFNGGYHVITKVALNVGVNQLVFCVFRDLIALSILAPLAYIRDKRTRPPLNRQFLLAFFFLGLTGIFGNQLLFLIGLNYTNPTYAAAIQPSIPVFTFILALIMGTERLNLFKLEGQAKVGGTLICVAGAVLMVLFRGLALFGETEAESLGHGESRHTETSGHFMHAPVLKKYPANLSVTAYSYFFGTMFMVTSAFFMTNESTNWSLTRSEFFAVVYAGVIASALNYGLLTWSNKILGPSLVALYNPLQPAASAFLSRIFLGSPIYLGSILGGCAIIAGLYSVTWASYKEKKAAAAMAVIPITSKEAEPLIYKDHKNKPIGHLFTKSPISSPKSDD

SEQ ID NO: 70825 - protein, 233 aa, Arabidopsis thaliana
  peptide (1)..(233): Ceres Seq. ID no. 2999009
MGTERLNLFKLEGQAKVGGTLICVAGAVLMVLFRGLALFGETEAESLGHGESRHTETSGHFMHAPVLKKYPANLSVTAYSYFFGTMFMVTSAFFMTNESTNWSLTRSEFFAVVYAGVIASALNYGLLTWSNKILGPSLVALYNPLQPAASAFLSRIFLGSPIYLGSILGGCAIIAGLYSVTWASYKEKKAAAAMAVIPITSKEAEPLIYKDHKNKPIGHLFTKSPISSPKSDD

SEQ ID NO: 70826 - DNA, 849 bp, Arabidopsis thaliana
  misc_feature (1)..(849): Ceres Seq. ID no. 2999210
  misc_feature (1)..(849): Ortholog of  Ceres SEQ ID NO 15178997 as cited in SEQ ID NO 0
atggattgctcaatctgcaccacaatgccatctatattaagaccaccaagaaacacaatatgtggatcatgctacgaaggggctagaacaacaattgcgctgctcaagaaacttgagggctcgaaagaagatcgtcatgacaaatcgaaccataattccaccatcaataatggctcctctatttcttcgtctcctttgttttcttgtgagccgcaaccattagagaaggtgatcaaatggatgaaaaacatgaaagaaaccgaagaagaacagaagaaaagaatagtcttcttaagcagctttgtgtcgggtttcaaagaacagcttcatgctgatattcttctaaaaccgggcgatgatggccctccaattcctgcacatagagctttgctggcttcaaaatctgagatctttaagaacattctagactcagatggatgcaaaaccgctccagaatacgccataacgctccaagaactaaattccgagcaacttcaagctctcttggagtttctatacaccggtacattggcttcagataagttggagaaaaatgtctacgcgttgtttattgcagcagataagtacatgattcattacttgcaagagttgtgcgagcaatatatgttaagttccttggacatctctagtgttcttaacgttcttgatgtctcggatcttggttcgagcaagacgctgaaggaggcttgtgtagggttcgtggtgcggaacatggacgacgtcgttttctcggataagtacgaacctttctctcagaaaaaccaacatctatgtgtggagatcacaagggcgttcttgatggaaacgagaagcaagagacgtgactaa

SEQ ID NO: 70827 - protein, 282 aa, Arabidopsis thaliana
  peptide (1)..(282): Ceres Seq. ID no. 2999211
MDCSICTTMPSILRPPRNTICGSCYEGARTTIALLKKLEGSKEDRHDKSNHNSTINNGSSISSSPLFSCEPQPLEKVIKWMKNMKETEEEQKKRIVFLSSFVSGFKEQLHADILLKPGDDGPPIPAHRALLASKSEIFKNILDSDGCKTAPEYAITLQELNSEQLQALLEFLYTGTLASDKLEKNVYALFIAADKYMIHYLQELCEQYMLSSLDISSVLNVLDVSDLGSSKTLKEACVGFVVRNMDDVVFSDKYEPFSQKNQHLCVEITRAFLMETRSKRRD

SEQ ID NO: 70828 - protein, 274 aa, Arabidopsis thaliana
  peptide (1)..(274): Ceres Seq. ID no. 2999212
MPSILRPPRNTICGSCYEGARTTIALLKKLEGSKEDRHDKSNHNSTINNGSSISSSPLFSCEPQPLEKVIKWMKNMKETEEEQKKRIVFLSSFVSGFKEQLHADILLKPGDDGPPIPAHRALLASKSEIFKNILDSDGCKTAPEYAITLQELNSEQLQALLEFLYTGTLASDKLEKNVYALFIAADKYMIHYLQELCEQYMLSSLDISSVLNVLDVSDLGSSKTLKEACVGFVVRNMDDVVFSDKYEPFSQKNQHLCVEITRAFLMETRSKRRD

SEQ ID NO: 70829 - protein, 202 aa, Arabidopsis thaliana
  peptide (1)..(202): Ceres Seq. ID no. 2999213
MKNMKETEEEQKKRIVFLSSFVSGFKEQLHADILLKPGDDGPPIPAHRALLASKSEIFKNILDSDGCKTAPEYAITLQELNSEQLQALLEFLYTGTLASDKLEKNVYALFIAADKYMIHYLQELCEQYMLSSLDISSVLNVLDVSDLGSSKTLKEACVGFVVRNMDDVVFSDKYEPFSQKNQHLCVEITRAFLMETRSKRRD

SEQ ID NO: 70830 - DNA, 1719 bp, Arabidopsis thaliana
  misc_feature (1)..(1719): Ceres Seq. ID no. 2999252
  misc_feature (1)..(1719): Ortholog of  Ceres SEQ ID NO 14301944 as cited in SEQ ID NO 0
atggcgactccgacggagctaggtttctcttcacctggtggtggtggtgacgactctgacgataaccctccacagaagcgtacttcaaaacgtactgcttccgaaacagcaacagaagaagaaacgaagaagaagaaaaagaagaagacgaagcacaacacaaaaatggcttctcctccgagcaaccggatctggaacgaagaagacgagctctctatcttaaagggattggtggattttcgagctaaaacaggactcgaatccaaaattgattgggatgcgttttattgttacgtcaaaggttccattcatgtgaaagtttccaagtgccagcttatgagtaagaccaggaagttgaagaagaagttccttgatcaaatggagaaaatcgatcaaggaaatgatccacattttactaggtctagtgaaactgaagcttttggatattccatgatgatttggcgtaaaattgatgctgaatacactaatggtgttatggataaagcacatcaaagcgagagtggagaggaggtgtttgaggaggatgaggaagtggccttaattgacaaaggggctgcgaaaagtggcaagtcacctcatgaagctgttgttgttgttgacaaaataactacgaagaagaacgggactgctggaaaagagagtgatgatgatgatgatgatgtgttgtgtgctgtgcgggatgcgtttgagaccaccatgatgtcgcaaggattaagtgattatcaaaagaagttgcagcttgagaagctgatgaaccttggaactggtaaaagaagagagttgagcaatgaatggaaagcactatgtgttgaggaactaaaattgaatatcaacaagcttcgattttccgccaagcttgcagaggcagcaaatgatgattattcttcttcttcttcttcttccattgtctcttgggttgagattccgatctcaatgtcgatcaatatcggagaaatctcaattccagaccttcctatcttcttctccatgttcttaaccatctacctaatcgcttacttcatcgtcttccgcaattggaaaccacaaatccgtcccgaagcttcaagctgcctgatctcaatcttccatggatctccagcggttttcctcgccacacgcgcagttttctcctcctccgaacgctccttcgcctccgcaaacaccgccgcacaaaacaccgtcctcgatttcagcgtcgcttacttcctcaccgatctcttccactacatcgtcttcaaccctaacgacgtactcttcatcggccatcacgtagccactctattcgtcttcctaacctgcagattcctcgtcttccacggggcttgcgccatcttaggcctcctgattctagctgaagtaacaagcgcgtgtcagaacgcgtggacgctcgccggagcaaggaagaatgatccggaatcacgattagctgtgaaagtgtacgatctcttgtctcctccgttttacgccttctacagtatcgttaggggtgtgttgggacctttgtttttcgggaaaatggtagcgttttacgctcgaggtggtgctcatggtgtgatacctaattggttgtggatttcttgggcaattgttgttggaattgctattactgttagtatactttggatttggaatctctggatagaattgtttagtgaaaggaaagctaacaaaatcagagtagacaagaaaattagatag

SEQ ID NO: 70831 - protein, 572 aa, Arabidopsis thaliana
  peptide (1)..(572): Ceres Seq. ID no. 2999253
MATPTELGFSSPGGGGDDSDDNPPQKRTSKRTASETATEEETKKKKKKKTKHNTKMASPPSNRIWNEEDELSILKGLVDFRAKTGLESKIDWDAFYCYVKGSIHVKVSKCQLMSKTRKLKKKFLDQMEKIDQGNDPHFTRSSETEAFGYSMMIWRKIDAEYTNGVMDKAHQSESGEEVFEEDEEVALIDKGAAKSGKSPHEAVVVVDKITTKKNGTAGKESDDDDDDVLCAVRDAFETTMMSQGLSDYQKKLQLEKLMNLGTGKRRELSNEWKALCVEELKLNINKLRFSAKLAEAANDDYSSSSSSSIVSWVEIPISMSINIGEISIPDLPIFFSMFLTIYLIAYFIVFRNWKPQIRPEASSCLISIFHGSPAVFLATRAVFSSSERSFASANTAAQNTVLDFSVAYFLTDLFHYIVFNPNDVLFIGHHVATLFVFLTCRFLVFHGACAILGLLILAEVTSACQNAWTLAGARKNDPESRLAVKVYDLLSPPFYAFYSIVRGVLGPLFFGKMVAFYARGGAHGVIPNWLWISWAIVVGIAITVSILWIWNLWIELFSERKANKIRVDKKIR

SEQ ID NO: 70832 - protein, 517 aa, Arabidopsis thaliana
  peptide (1)..(517): Ceres Seq. ID no. 2999254
MASPPSNRIWNEEDELSILKGLVDFRAKTGLESKIDWDAFYCYVKGSIHVKVSKCQLMSKTRKLKKKFLDQMEKIDQGNDPHFTRSSETEAFGYSMMIWRKIDAEYTNGVMDKAHQSESGEEVFEEDEEVALIDKGAAKSGKSPHEAVVVVDKITTKKNGTAGKESDDDDDDVLCAVRDAFETTMMSQGLSDYQKKLQLEKLMNLGTGKRRELSNEWKALCVEELKLNINKLRFSAKLAEAANDDYSSSSSSSIVSWVEIPISMSINIGEISIPDLPIFFSMFLTIYLIAYFIVFRNWKPQIRPEASSCLISIFHGSPAVFLATRAVFSSSERSFASANTAAQNTVLDFSVAYFLTDLFHYIVFNPNDVLFIGHHVATLFVFLTCRFLVFHGACAILGLLILAEVTSACQNAWTLAGARKNDPESRLAVKVYDLLSPPFYAFYSIVRGVLGPLFFGKMVAFYARGGAHGVIPNWLWISWAIVVGIAITVSILWIWNLWIELFSERKANKIRVDKKIR

SEQ ID NO: 70833 - protein, 460 aa, Arabidopsis thaliana
  peptide (1)..(460): Ceres Seq. ID no. 2999255
MSKTRKLKKKFLDQMEKIDQGNDPHFTRSSETEAFGYSMMIWRKIDAEYTNGVMDKAHQSESGEEVFEEDEEVALIDKGAAKSGKSPHEAVVVVDKITTKKNGTAGKESDDDDDDVLCAVRDAFETTMMSQGLSDYQKKLQLEKLMNLGTGKRRELSNEWKALCVEELKLNINKLRFSAKLAEAANDDYSSSSSSSIVSWVEIPISMSINIGEISIPDLPIFFSMFLTIYLIAYFIVFRNWKPQIRPEASSCLISIFHGSPAVFLATRAVFSSSERSFASANTAAQNTVLDFSVAYFLTDLFHYIVFNPNDVLFIGHHVATLFVFLTCRFLVFHGACAILGLLILAEVTSACQNAWTLAGARKNDPESRLAVKVYDLLSPPFYAFYSIVRGVLGPLFFGKMVAFYARGGAHGVIPNWLWISWAIVVGIAITVSILWIWNLWIELFSERKANKIRVDKKIR

SEQ ID NO: 70834 - DNA, 798 bp, Arabidopsis thaliana
  misc_feature (1)..(798): Ceres Seq. ID no. 2999911
  misc_feature (1)..(798): Ortholog of  Ceres SEQ ID NO 14316336 as cited in SEQ ID NO 60067
atggcgggagagactctacttaaaccggtgcttcaaaaaccaccaggctaccgtgagctccactcgcaacctcaaactccactcggttcatcttcatcatcatcatcaatgcttcgtcgcccaccaaaacatgccattcctgcggcgttttatccgacgaagaagagacaatggagtcgttgccgcgtcttttgctgctgcgtctgcatcaccgtcgccattgtcattctcctccttatcctcaccgtctccgttttctttctttattacagcccgagactccccgtcgtacgtctctcctctttccgcgtcagcaatttcaacttttccggtgggaaagccggcgacggtttatcgcagttgacggcggaggctacagcgaggcttgatttcagaaaccctaacgggaagttacgttactattacggtaacgttgacgtggcggtgagtgtaggagaagatgatttcgaaacgagtctcgggtcaacgaaagtcaaaggatttgtggagaagccagggaatcggacggttgtgattgttccgataaaagtgaagaagcaacaggtggatgatccgacggttaagaggctaagagcggacatgaagagtaaaaagttggtggtgaaagtgatggctaaaacgaaggtaggattgggtgtgggaaggcgtaagattgttacggtgggggttactatcagttgcggtggcgtgagattacaaacgcttgattcaaagatgagtaaatgcaccatcaaaatgcttaaatggtacgtacctatccaagttaaatgtatatga

SEQ ID NO: 70835 - protein, 265 aa, Arabidopsis thaliana
  peptide (1)..(265): Ceres Seq. ID no. 2999912
MAGETLLKPVLQKPPGYRELHSQPQTPLGSSSSSSSMLRRPPKHAIPAAFYPTKKRQWSRCRVFCCCVCITVAIVILLLILTVSVFFLYYSPRLPVVRLSSFRVSNFNFSGGKAGDGLSQLTAEATARLDFRNPNGKLRYYYGNVDVAVSVGEDDFETSLGSTKVKGFVEKPGNRTVVIVPIKVKKQQVDDPTVKRLRADMKSKKLVVKVMAKTKVGLGVGRRKIVTVGVTISCGGVRLQTLDSKMSKCTIKMLKWYVPIQVKCI

SEQ ID NO: 70836 - protein, 229 aa, Arabidopsis thaliana
  peptide (1)..(229): Ceres Seq. ID no. 2999913
MLRRPPKHAIPAAFYPTKKRQWSRCRVFCCCVCITVAIVILLLILTVSVFFLYYSPRLPVVRLSSFRVSNFNFSGGKAGDGLSQLTAEATARLDFRNPNGKLRYYYGNVDVAVSVGEDDFETSLGSTKVKGFVEKPGNRTVVIVPIKVKKQQVDDPTVKRLRADMKSKKLVVKVMAKTKVGLGVGRRKIVTVGVTISCGGVRLQTLDSKMSKCTIKMLKWYVPIQVKCI

SEQ ID NO: 70837 - DNA, 2103 bp, Arabidopsis thaliana
  misc_feature (1)..(2103): Ceres Seq. ID no. 3000012
  misc_feature (1)..(2103): Ortholog of  Ceres SEQ ID NO 13655640 as cited in SEQ ID NO 63844
atgcgtcaaaataatctcttctcattgatcttctggcttgtccctgtgagcttaattattgttgtctctgcacagttatgctcggagaagtttggaacttttacaccaggtggtacatttgacaagaaccgccgaatcattctctcatctcttccatctgaagtcacagctcaagatggcttctacaacgcttcgattggaacagatcctgaccaactctacgcaatggggatgtgcatcccaggtgctaaacaaaagctttgtagggattgtatcatggacgtcacaagacagttaatacagacatgtcccaaccagacagcagcaattcactggtcaggtggagggaaaactgtatgtatggcacgttactataaccagccgtcttctagaccattggatttggaatcagtttctattggttataacgttggaaatctcagcacaaacttaacagattttgatagattatgggagcgattgatagctcatatggtgactaaagcttcatcagcatcaataaaatatttatcatttgataacagtagattctatgcagctgatgaaacaaacttgacaaattctcaaatggtctacgctttgatgcaatgcacgccagacgtctctccttccaactgtaacacttgtttaaaacaaagtgttgatgactatgttggttgttgtcatgggaagcaaggcggctatgtgtatcggcctagttgcattttccggtgggatctataccctttcaatggcgcctttgatcttcttacgctagcgcctccaccctcatctcagctgcaatccccacctccagtgaccaacaaagatgaaaaaacgattcatacaggaactatcattgggattgtcattgtcgttgcaatggtcataatcatggctctgcttgctctaggggtttctgtttgcaggagtagaaaaaaatatcaagcttttgcctcagaaactgccgatgatattacaacagttggatatctccagtttgatattaaagacattgaagctgcaacaagtaactttttggcgagtaacaagattggtcaaggtggtttcggcgaagtttacaagggtacgttatcaaatggaactgaagttgcagtcaagaggctgtcaagaacttcagatcaaggtgaattggagttcaagaacgaggtgcttcttgtagcaaaacttcagcaccggaatctcgttaggcttctcggttttgctctgcaaggagaagaaaagatactcgtctttgagtttgttcccaacaagagcctcgattatttcctcttcggtagtactaacccaacaaaaaagggtcagctggactggacaagacggtacaacatcattggagggattacacgagggcttctctatcttcatcaagactctaggctcaccatcatacaccgtgacatcaaagcgagtaacattcttttagatgctgatatgaacccgaaaatagcggatttcgggatggctaggaatttcagagatcatcaaactgaagacagtacaggaagagtcgttggaaccttcggttacatgcctccagaatatgttgcgcatggccaattctctaccaaatccgatgtctatagcttcggagtattgattctagagattgttagtggcaggaagaatagcagcttctatcagatggatggttctgtttgcaacttggtcacatatgtttggagactttggaacactgattcatctttagagctcgtagatccggcgattagcggaagctatgagaaagatgaagtcactagatgcatccatatcggacttttatgcgttcaagaaaatcctgtgaatcgaccagcattgtctacaatattccaaatgctcactaatagctccattactctaaatgtccctcaaccacctggatttttcttcaggaacagacctgagtcagacacattacgccgtggattggagccagaccaatataacaatgaatctgttacttgttctatcgacaatgcaacaatcactacactcctcggtaaaactcttgcttctgcactctgttgtattacctcaactctattttcaaagtcaatgtatagaaacactgaggattga

SEQ ID NO: 70838 - protein, 700 aa, Arabidopsis thaliana
  peptide (1)..(700): Ceres Seq. ID no. 3000013
MRQNNLFSLIFWLVPVSLIIVVSAQLCSEKFGTFTPGGTFDKNRRIILSSLPSEVTAQDGFYNASIGTDPDQLYAMGMCIPGAKQKLCRDCIMDVTRQLIQTCPNQTAAIHWSGGGKTVCMARYYNQPSSRPLDLESVSIGYNVGNLSTNLTDFDRLWERLIAHMVTKASSASIKYLSFDNSRFYAADETNLTNSQMVYALMQCTPDVSPSNCNTCLKQSVDDYVGCCHGKQGGYVYRPSCIFRWDLYPFNGAFDLLTLAPPPSSQLQSPPPVTNKDEKTIHTGTIIGIVIVVAMVIIMALLALGVSVCRSRKKYQAFASETADDITTVGYLQFDIKDIEAATSNFLASNKIGQGGFGEVYKGTLSNGTEVAVKRLSRTSDQGELEFKNEVLLVAKLQHRNLVRLLGFALQGEEKILVFEFVPNKSLDYFLFGSTNPTKKGQLDWTRRYNIIGGITRGLLYLHQDSRLTIIHRDIKASNILLDADMNPKIADFGMARNFRDHQTEDSTGRVVGTFGYMPPEYVAHGQFSTKSDVYSFGVLILEIVSGRKNSSFYQMDGSVCNLVTYVWRLWNTDSSLELVDPAISGSYEKDEVTRCIHIGLLCVQENPVNRPALSTIFQMLTNSSITLNVPQPPGFFFRNRPESDTLRRGLEPDQYNNESVTCSIDNATITTLLGKTLASALCCITSTLFSKSMYRNTED

SEQ ID NO: 70839 - protein, 625 aa, Arabidopsis thaliana
  peptide (1)..(625): Ceres Seq. ID no. 3000014
MGMCIPGAKQKLCRDCIMDVTRQLIQTCPNQTAAIHWSGGGKTVCMARYYNQPSSRPLDLESVSIGYNVGNLSTNLTDFDRLWERLIAHMVTKASSASIKYLSFDNSRFYAADETNLTNSQMVYALMQCTPDVSPSNCNTCLKQSVDDYVGCCHGKQGGYVYRPSCIFRWDLYPFNGAFDLLTLAPPPSSQLQSPPPVTNKDEKTIHTGTIIGIVIVVAMVIIMALLALGVSVCRSRKKYQAFASETADDITTVGYLQFDIKDIEAATSNFLASNKIGQGGFGEVYKGTLSNGTEVAVKRLSRTSDQGELEFKNEVLLVAKLQHRNLVRLLGFALQGEEKILVFEFVPNKSLDYFLFGSTNPTKKGQLDWTRRYNIIGGITRGLLYLHQDSRLTIIHRDIKASNILLDADMNPKIADFGMARNFRDHQTEDSTGRVVGTFGYMPPEYVAHGQFSTKSDVYSFGVLILEIVSGRKNSSFYQMDGSVCNLVTYVWRLWNTDSSLELVDPAISGSYEKDEVTRCIHIGLLCVQENPVNRPALSTIFQMLTNSSITLNVPQPPGFFFRNRPESDTLRRGLEPDQYNNESVTCSIDNATITTLLGKTLASALCCITSTLFSKSMYRNTED

SEQ ID NO: 70840 - protein, 623 aa, Arabidopsis thaliana
  peptide (1)..(623): Ceres Seq. ID no. 3000015
MCIPGAKQKLCRDCIMDVTRQLIQTCPNQTAAIHWSGGGKTVCMARYYNQPSSRPLDLESVSIGYNVGNLSTNLTDFDRLWERLIAHMVTKASSASIKYLSFDNSRFYAADETNLTNSQMVYALMQCTPDVSPSNCNTCLKQSVDDYVGCCHGKQGGYVYRPSCIFRWDLYPFNGAFDLLTLAPPPSSQLQSPPPVTNKDEKTIHTGTIIGIVIVVAMVIIMALLALGVSVCRSRKKYQAFASETADDITTVGYLQFDIKDIEAATSNFLASNKIGQGGFGEVYKGTLSNGTEVAVKRLSRTSDQGELEFKNEVLLVAKLQHRNLVRLLGFALQGEEKILVFEFVPNKSLDYFLFGSTNPTKKGQLDWTRRYNIIGGITRGLLYLHQDSRLTIIHRDIKASNILLDADMNPKIADFGMARNFRDHQTEDSTGRVVGTFGYMPPEYVAHGQFSTKSDVYSFGVLILEIVSGRKNSSFYQMDGSVCNLVTYVWRLWNTDSSLELVDPAISGSYEKDEVTRCIHIGLLCVQENPVNRPALSTIFQMLTNSSITLNVPQPPGFFFRNRPESDTLRRGLEPDQYNNESVTCSIDNATITTLLGKTLASALCCITSTLFSKSMYRNTED

SEQ ID NO: 70841 - DNA, 1698 bp, Arabidopsis thaliana
  misc_feature (1)..(1698): Ceres Seq. ID no. 3015739
  misc_feature (1)..(1698): Ortholog of  Ceres SEQ ID NO 12623695 as cited in SEQ ID NO 61286
atggaccgaccaaagaaacgggacgtactacgagcggtgaattcgatgagctctctatgcgagaatggcaaaaaaaaggaaggaattcgagcagtaaactcgatgtgctcgatatccgaactgacggatgaagacctactgtctcggctgcttgaccgtccaagactcaaacttgaacggaaaatatcatacgaggaaatgtctttaagcctttacgacagtgcacattcactagacggtaagtctggttgggatactccggttttctccatgaaagactcaatggatcgtaacccgatggtcacagaagcttgggaggctctctgccagtctcaggtctacttccggggaaaaccggtaggaaccatcgccgcctacgaccatgcttcagaagaggtcttgaactatgatcaggtgttcgtacgtgattttgtaccgagtgctctagcatttctgatgaatggagagcctgaaattgtgaagaactttctcctgaagacacttcatattcagggacaagacaaaatgatcgacaagttcaagcttggtgacggcgcaatgccagcaagctttaaagttctacataatcctatcaagaagacggatacgattatcgctgactttggagaaagcgccatcgggagagtggctccagtcgactctggcttctggtggatcattctcctccgagcttacactaagtctacaggagatcattctctagcagagagaccagagtgccaaaagggaatgagactcatactttctttgtgtctctctgagggttttgatacttttccgactttgctttgcgcagatggttgctcgatggtcgatcgtagaatgggcatttacggctatccgattgagatccaagccctctttttcatggctcttcgatccgcactctcaatgctgaaacatgattctgagggtaaagagttcatggaaaagatagtgaagcggctgcacgcactaagcttccatatgagaagctacttttggctcgatttccagcagctcaatgacatttaccgttacaagacggaggagtactctcacaccgcggtaaacaagttcaacgtaatccctgactccatccctgattggatctttgacttcatgcctctccgaggtggctacttcgttggaaatgtcagtcccgcccgcatggacttcaggtggtttgcgttaggaaattgtatcgcaattctttcctcattggccacaccagagcagtccatggcgatcatggacctgattgaggcccggtgggaagaacttgtgggagagatgccgttgaagatatgttatccggcgatggagagtcacgagtgggggattgtcactggctgtgaccctaagaacacaaggtggagctaccacaacggaggctcttggccagtgcttctatggttactaacggcggcaagcataaagactggacggccacaaatagcacgacgggctatagagttggcggaggcacgactgttgaaggatggatggccggagtactacgacggaaagtctggaagattcatcggaaaacaggctaggaaatctcagacatggtcaatcgctggctatttggtcgccaagatgatgatggatgatccaacgcatgtgggaatgatctcaatggaagaagagaaacatatgaaacctcctcttagaagatcttcttcttggacttaa

SEQ ID NO: 70842 - protein, 565 aa, Arabidopsis thaliana
  peptide (1)..(565): Ceres Seq. ID no. 3015740
MDRPKKRDVLRAVNSMSSLCENGKKKEGIRAVNSMCSISELTDEDLLSRLLDRPRLKLERKISYEEMSLSLYDSAHSLDGKSGWDTPVFSMKDSMDRNPMVTEAWEALCQSQVYFRGKPVGTIAAYDHASEEVLNYDQVFVRDFVPSALAFLMNGEPEIVKNFLLKTLHIQGQDKMIDKFKLGDGAMPASFKVLHNPIKKTDTIIADFGESAIGRVAPVDSGFWWIILLRAYTKSTGDHSLAERPECQKGMRLILSLCLSEGFDTFPTLLCADGCSMVDRRMGIYGYPIEIQALFFMALRSALSMLKHDSEGKEFMEKIVKRLHALSFHMRSYFWLDFQQLNDIYRYKTEEYSHTAVNKFNVIPDSIPDWIFDFMPLRGGYFVGNVSPARMDFRWFALGNCIAILSSLATPEQSMAIMDLIEARWEELVGEMPLKICYPAMESHEWGIVTGCDPKNTRWSYHNGGSWPVLLWLLTAASIKTGRPQIARRAIELAEARLLKDGWPEYYDGKSGRFIGKQARKSQTWSIAGYLVAKMMMDDPTHVGMISMEEEKHMKPPLRRSSSWT

SEQ ID NO: 70843 - protein, 550 aa, Arabidopsis thaliana
  peptide (1)..(550): Ceres Seq. ID no. 3015741
MSSLCENGKKKEGIRAVNSMCSISELTDEDLLSRLLDRPRLKLERKISYEEMSLSLYDSAHSLDGKSGWDTPVFSMKDSMDRNPMVTEAWEALCQSQVYFRGKPVGTIAAYDHASEEVLNYDQVFVRDFVPSALAFLMNGEPEIVKNFLLKTLHIQGQDKMIDKFKLGDGAMPASFKVLHNPIKKTDTIIADFGESAIGRVAPVDSGFWWIILLRAYTKSTGDHSLAERPECQKGMRLILSLCLSEGFDTFPTLLCADGCSMVDRRMGIYGYPIEIQALFFMALRSALSMLKHDSEGKEFMEKIVKRLHALSFHMRSYFWLDFQQLNDIYRYKTEEYSHTAVNKFNVIPDSIPDWIFDFMPLRGGYFVGNVSPARMDFRWFALGNCIAILSSLATPEQSMAIMDLIEARWEELVGEMPLKICYPAMESHEWGIVTGCDPKNTRWSYHNGGSWPVLLWLLTAASIKTGRPQIARRAIELAEARLLKDGWPEYYDGKSGRFIGKQARKSQTWSIAGYLVAKMMMDDPTHVGMISMEEEKHMKPPLRRSSSWT

SEQ ID NO: 70844 - protein, 531 aa, Arabidopsis thaliana
  peptide (1)..(531): Ceres Seq. ID no. 3015742
MCSISELTDEDLLSRLLDRPRLKLERKISYEEMSLSLYDSAHSLDGKSGWDTPVFSMKDSMDRNPMVTEAWEALCQSQVYFRGKPVGTIAAYDHASEEVLNYDQVFVRDFVPSALAFLMNGEPEIVKNFLLKTLHIQGQDKMIDKFKLGDGAMPASFKVLHNPIKKTDTIIADFGESAIGRVAPVDSGFWWIILLRAYTKSTGDHSLAERPECQKGMRLILSLCLSEGFDTFPTLLCADGCSMVDRRMGIYGYPIEIQALFFMALRSALSMLKHDSEGKEFMEKIVKRLHALSFHMRSYFWLDFQQLNDIYRYKTEEYSHTAVNKFNVIPDSIPDWIFDFMPLRGGYFVGNVSPARMDFRWFALGNCIAILSSLATPEQSMAIMDLIEARWEELVGEMPLKICYPAMESHEWGIVTGCDPKNTRWSYHNGGSWPVLLWLLTAASIKTGRPQIARRAIELAEARLLKDGWPEYYDGKSGRFIGKQARKSQTWSIAGYLVAKMMMDDPTHVGMISMEEEKHMKPPLRRSSSWT

SEQ ID NO: 70845 - DNA, 1098 bp, Arabidopsis thaliana
  misc_feature (1)..(1098): Ceres Seq. ID no. 3017043
  misc_feature (1)..(1098): Ortholog of  Ceres SEQ ID NO 12583469 as cited in SEQ ID NO 51031
  misc_feature (1)..(1098): Ortholog of  Ceres SEQ ID NO 13597389 as cited in SEQ ID NO 63426
  misc_feature (1)..(1098): Ortholog of  Ceres SEQ ID NO 13595998 as cited in SEQ ID NO 68161
  misc_feature (1)..(1098): Ortholog of  Ceres SEQ ID NO 15180463 as cited in SEQ ID NO 0
atggattacactgtttcctctctacaatgcttcttcttagttttatgtctctctcttttggtttgctctaactctgaaactagttacaagtcaaacaagaaacctatattgataaacttcggcgactctaactccgacaccggaggagttcttgctggagttggacttcctatcggactccctcatggcattaccttcttccatagaggcactggtcgtctcggtgacggtcgactcatcgttgacttctactgtgaacatttaaagatgacatatttgagtccatatttggattcactttcaccaaatttcaaaagaggagtcaatttcgcagtctcgggcgccaccgctcttccgatcttttccttccctcttgccattcaaattcgtcaattcgtccatttcaaaaaccgttctcaagaacttatctcttccggtagaagagaccttattgatgataatggatttagaaacgcgttgtacatgatcgatattggacaaaacgatcttttacttgctctatatgattcgaatttaacctatgcacccgttgtcgaaaaaattccttccatgcttcttgagataaagaaagccatacagactgtatatttatacggagggagaaagttttgggtacacaacacaggcccattgggctgtgcaccaaaagaattggcgattcacctgcataacgattcggatcttgacccgattggttgtttccgggttcacaatgaagtcgccaaagccttcaacaaaggactccttagtctctgcaacgaactgagatcccaattcaaagacgccactctcgtctacgttgatatttactccatcaaatataaactctccgccgatttcaaactatacggatttgtggacccgttgatggcttgttgcggttatggaggaagacctaacaactatgatcgaaaagcaacgtgtggtcaacccggttcaactatttgtcgtgatgtaaccaaagcaattgtatgggatggggttcactatactgaagctgctaaccggtttgtcgttgatgctgttttgacgaatcggtactcttacccaaaaaattcccttgaccggttttggtag

SEQ ID NO: 70846 - protein, 365 aa, Arabidopsis thaliana
  peptide (1)..(365): Ceres Seq. ID no. 3017044
MDYTVSSLQCFFLVLCLSLLVCSNSETSYKSNKKPILINFGDSNSDTGGVLAGVGLPIGLPHGITFFHRGTGRLGDGRLIVDFYCEHLKMTYLSPYLDSLSPNFKRGVNFAVSGATALPIFSFPLAIQIRQFVHFKNRSQELISSGRRDLIDDNGFRNALYMIDIGQNDLLLALYDSNLTYAPVVEKIPSMLLEIKKAIQTVYLYGGRKFWVHNTGPLGCAPKELAIHLHNDSDLDPIGCFRVHNEVAKAFNKGLLSLCNELRSQFKDATLVYVDIYSIKYKLSADFKLYGFVDPLMACCGYGGRPNNYDRKATCGQPGSTICRDVTKAIVWDGVHYTEAANRFVVDAVLTNRYSYPKNSLDRFW

SEQ ID NO: 70847 - protein, 276 aa, Arabidopsis thaliana
  peptide (1)..(276): Ceres Seq. ID no. 3017045
MTYLSPYLDSLSPNFKRGVNFAVSGATALPIFSFPLAIQIRQFVHFKNRSQELISSGRRDLIDDNGFRNALYMIDIGQNDLLLALYDSNLTYAPVVEKIPSMLLEIKKAIQTVYLYGGRKFWVHNTGPLGCAPKELAIHLHNDSDLDPIGCFRVHNEVAKAFNKGLLSLCNELRSQFKDATLVYVDIYSIKYKLSADFKLYGFVDPLMACCGYGGRPNNYDRKATCGQPGSTICRDVTKAIVWDGVHYTEAANRFVVDAVLTNRYSYPKNSLDRFW

SEQ ID NO: 70848 - protein, 204 aa, Arabidopsis thaliana
  peptide (1)..(204): Ceres Seq. ID no. 3017046
MIDIGQNDLLLALYDSNLTYAPVVEKIPSMLLEIKKAIQTVYLYGGRKFWVHNTGPLGCAPKELAIHLHNDSDLDPIGCFRVHNEVAKAFNKGLLSLCNELRSQFKDATLVYVDIYSIKYKLSADFKLYGFVDPLMACCGYGGRPNNYDRKATCGQPGSTICRDVTKAIVWDGVHYTEAANRFVVDAVLTNRYSYPKNSLDRFW

SEQ ID NO: 70849 - DNA, 606 bp, Arabidopsis thaliana
  misc_feature (1)..(606): Ceres Seq. ID no. 3017321
  misc_feature (1)..(606): Ortholog of  Ceres SEQ ID NO 13638510 as cited in SEQ ID NO 51436
atgtgtgagtgtgacataaaaaaggttatggcaaacagaaaaccttggtaccagagagctatggcggttgccagattcgcaacgaattggagaacaatccctaaatcatcatcacaacaacaaccagagaattttcgtccgtctcgaaaccctagcgtcaacagcaagtcatccaatcataaccaaatttatcaccagctgagaaaatgctcgtctctcaaggtagctgcgaattctttcactagggtttgcctctgcgctccgattggtccatacgacgacgtttttcggattcacgtcccgccgagaagaagttcaagctatcctccgtcgaagcctcttcctatggagacggcagtggcggtggcgacggcgaggatgagtgtggattcagggaggaggatatttagagggaagtcgttgagggaaaacgcgttgatgaggagattcgtggtggcggaagaagaagcgataatggagaatagaaagagagatcaaatggagattgtgaggaagagaaatcagatgaggaggaagaagaagcttggacctagtcctcttagtcgtatggttatcgctgaagatcaagaagtttgtcttctttga

SEQ ID NO: 70850 - protein, 201 aa, Arabidopsis thaliana
  peptide (1)..(201): Ceres Seq. ID no. 3017322
MCECDIKKVMANRKPWYQRAMAVARFATNWRTIPKSSSQQQPENFRPSRNPSVNSKSSNHNQIYHQLRKCSSLKVAANSFTRVCLCAPIGPYDDVFRIHVPPRRSSSYPPSKPLPMETAVAVATARMSVDSGRRIFRGKSLRENALMRRFVVAEEEAIMENRKRDQMEIVRKRNQMRRKKKLGPSPLSRMVIAEDQEVCLL

SEQ ID NO: 70851 - protein, 192 aa, Arabidopsis thaliana
  peptide (1)..(192): Ceres Seq. ID no. 3017323
MANRKPWYQRAMAVARFATNWRTIPKSSSQQQPENFRPSRNPSVNSKSSNHNQIYHQLRKCSSLKVAANSFTRVCLCAPIGPYDDVFRIHVPPRRSSSYPPSKPLPMETAVAVATARMSVDSGRRIFRGKSLRENALMRRFVVAEEEAIMENRKRDQMEIVRKRNQMRRKKKLGPSPLSRMVIAEDQEVCLL

SEQ ID NO: 70852 - protein, 181 aa, Arabidopsis thaliana
  peptide (1)..(181): Ceres Seq. ID no. 3017324
MAVARFATNWRTIPKSSSQQQPENFRPSRNPSVNSKSSNHNQIYHQLRKCSSLKVAANSFTRVCLCAPIGPYDDVFRIHVPPRRSSSYPPSKPLPMETAVAVATARMSVDSGRRIFRGKSLRENALMRRFVVAEEEAIMENRKRDQMEIVRKRNQMRRKKKLGPSPLSRMVIAEDQEVCLL

SEQ ID NO: 70853 - DNA, 1623 bp, Arabidopsis thaliana
  misc_feature (1)..(1623): Ceres Seq. ID no. 3017447
  misc_feature (1)..(1623): Ortholog of  Ceres SEQ ID NO 13600220 as cited in SEQ ID NO 0
atgacgcaaaggaagaatatgtactcgaagaaaaactcgttcggccgatcagatttcccagagggtttccttttcggtacagcttcatcggcttaccaatatgaaggagccagaaacgaagctcctcgaggagagagtgtttgggacacatttgttcgcaaatatccagagagaaattgctactctaatgcggaccaagcaatcgagttctataaccattacaaggacgatatccagagaatgaaggatattaacatggatgctttcagattctctatctcttggcctaggatttttcctcttggaaagaaaagcaaaggagtgaacaaagaaggaatacaattctataacgatctcatcgatgaactcctcgctaacggaataacacctctcgccactttatttcactgggatactcctcaagcacttgaagatgaatacagtggatttttaagcgaagaagctgttgatgacttcaaggattttgcggccttatgttttgaggagtttggcgaccgtgtaaaattgtgggtcacactaaacgaaccatgggtgtacagtattggtggctatgacacgggaagaaaagcccccggacgtgcctccaaatacatgaacgaagcagccgtggcaggagaatctggtctcgaggtttacactgttagtcacaatctacttctggctcacgccgaagctgttgaggtcttcaggaacaatcccaaatgtaaagatggcaagatcggtatcgctcattgtcccgtatggttcgagccttatgactcgaactgccctaaagacatagaagcatgcgaacgagctatggagtttatgtttggatggcacatggatcctacggtgtatggagattaccctgcagtcatgaaaaaatcgatcggaaaaagattaccatcatttaccgcagcacaatccaagaagcttagaggatcttttgatttcgttggggtgaattattacagtgctttctacgtcaaaaatattgatgaagtgaatcatgacaagcccaattggagatcagacgcacgcatcgaatggagaaaagaaaacaacgcagggcaaacattaggtgtaagaggtggttcggaatgggactttctatatccacaaggccttagaaagtttctaaattatgccaagaataaatatgaaagcccgaaatttatgattaccgaaaacggacactgtgatatagattatgagaaaaagcctaaactttctaacttgatggatctccaaaggacagagtaccacaagaaacatctccaaagcatccaacaagccatccaggaggatggggttgtagttgaaggatactttgcgtggtcattactagacaattgtgaatggaacgccggttatggagttcgatatggactattctacgtcgattataacaatggactaaaacgtttcccgaaaatgtcggcgatgtggttcaaagaattcttgaagagagaagaagaaattgaagattcagaagaagaagagtacgtgttgaagtcaacaatgaacaagaagagattcttattagcaactggttcatcagcttcatgctttattcctaagatgtctgaatcttctaaagccctcgaactattattctag

SEQ ID NO: 70854 - protein, 540 aa, Arabidopsis thaliana
  peptide (1)..(540): Ceres Seq. ID no. 3017448
MTQRKNMYSKKNSFGRSDFPEGFLFGTASSAYQYEGARNEAPRGESVWDTFVRKYPERNCYSNADQAIEFYNHYKDDIQRMKDINMDAFRFSISWPRIFPLGKKSKGVNKEGIQFYNDLIDELLANGITPLATLFHWDTPQALEDEYSGFLSEEAVDDFKDFAALCFEEFGDRVKLWVTLNEPWVYSIGGYDTGRKAPGRASKYMNEAAVAGESGLEVYTVSHNLLLAHAEAVEVFRNNPKCKDGKIGIAHCPVWFEPYDSNCPKDIEACERAMEFMFGWHMDPTVYGDYPAVMKKSIGKRLPSFTAAQSKKLRGSFDFVGVNYYSAFYVKNIDEVNHDKPNWRSDARIEWRKENNAGQTLGVRGGSEWDFLYPQGLRKFLNYAKNKYESPKFMITENGHCDIDYEKKPKLSNLMDLQRTEYHKKHLQSIQQAIQEDGVVVEGYFAWSLLDNCEWNAGYGVRYGLFYVDYNNGLKRFPKMSAMWFKEFLKREEEIEDSEEEEYVLKSTMNKKRFLLATGSSASCFIPKMSESSKALELLF

SEQ ID NO: 70855 - protein, 534 aa, Arabidopsis thaliana
  peptide (1)..(534): Ceres Seq. ID no. 3017449
MYSKKNSFGRSDFPEGFLFGTASSAYQYEGARNEAPRGESVWDTFVRKYPERNCYSNADQAIEFYNHYKDDIQRMKDINMDAFRFSISWPRIFPLGKKSKGVNKEGIQFYNDLIDELLANGITPLATLFHWDTPQALEDEYSGFLSEEAVDDFKDFAALCFEEFGDRVKLWVTLNEPWVYSIGGYDTGRKAPGRASKYMNEAAVAGESGLEVYTVSHNLLLAHAEAVEVFRNNPKCKDGKIGIAHCPVWFEPYDSNCPKDIEACERAMEFMFGWHMDPTVYGDYPAVMKKSIGKRLPSFTAAQSKKLRGSFDFVGVNYYSAFYVKNIDEVNHDKPNWRSDARIEWRKENNAGQTLGVRGGSEWDFLYPQGLRKFLNYAKNKYESPKFMITENGHCDIDYEKKPKLSNLMDLQRTEYHKKHLQSIQQAIQEDGVVVEGYFAWSLLDNCEWNAGYGVRYGLFYVDYNNGLKRFPKMSAMWFKEFLKREEEIEDSEEEEYVLKSTMNKKRFLLATGSSASCFIPKMSESSKALELLF

SEQ ID NO: 70856 - protein, 460 aa, Arabidopsis thaliana
  peptide (1)..(460): Ceres Seq. ID no. 3017450
MKDINMDAFRFSISWPRIFPLGKKSKGVNKEGIQFYNDLIDELLANGITPLATLFHWDTPQALEDEYSGFLSEEAVDDFKDFAALCFEEFGDRVKLWVTLNEPWVYSIGGYDTGRKAPGRASKYMNEAAVAGESGLEVYTVSHNLLLAHAEAVEVFRNNPKCKDGKIGIAHCPVWFEPYDSNCPKDIEACERAMEFMFGWHMDPTVYGDYPAVMKKSIGKRLPSFTAAQSKKLRGSFDFVGVNYYSAFYVKNIDEVNHDKPNWRSDARIEWRKENNAGQTLGVRGGSEWDFLYPQGLRKFLNYAKNKYESPKFMITENGHCDIDYEKKPKLSNLMDLQRTEYHKKHLQSIQQAIQEDGVVVEGYFAWSLLDNCEWNAGYGVRYGLFYVDYNNGLKRFPKMSAMWFKEFLKREEEIEDSEEEEYVLKSTMNKKRFLLATGSSASCFIPKMSESSKALELLF

SEQ ID NO: 70857 - DNA, 348 bp, Arabidopsis thaliana
  misc_feature (1)..(348): Ceres Seq. ID no. 3017472
  misc_feature (1)..(348): Ortholog of  Ceres SEQ ID NO 13622871 as cited in SEQ ID NO 0
atggcttctctcaactccgacgttatcatgggtgaatcctcctccatctccgtaccttcatcttcgtccaagaactcgaaacgatttgaattaaagaagtggagtgctgtcgctctctgggcttgggatatcgttgttgataactgcgcaatttgtaggaatcacatcatggatctctgtattgaatgtctagctaatcaagctagtgccactagtgaggaatgcactgttgcttggggggtttgcaaccacgcctttcacttccactgtatcagcagatggctcaaaactcgtcaagtgtgtccactagatgtctgcgagtgggaattccagaaatatggtcactaa

SEQ ID NO: 70858 - protein, 115 aa, Arabidopsis thaliana
  peptide (1)..(115): Ceres Seq. ID no. 3017473
MASLNSDVIMGESSSISVPSSSSKNSKRFELKKWSAVALWAWDIVVDNCAICRNHIMDLCIECLANQASATSEECTVAWGVCNHAFHFHCISRWLKTRQVCPLDVCEWEFQKYGH

SEQ ID NO: 70859 - protein, 106 aa, Arabidopsis thaliana
  peptide (1)..(106): Ceres Seq. ID no. 3017474
MGESSSISVPSSSSKNSKRFELKKWSAVALWAWDIVVDNCAICRNHIMDLCIECLANQASATSEECTVAWGVCNHAFHFHCISRWLKTRQVCPLDVCEWEFQKYGH

SEQ ID NO: 70860 - protein, 59 aa, Arabidopsis thaliana
  peptide (1)..(59): Ceres Seq. ID no. 3017475
MDLCIECLANQASATSEECTVAWGVCNHAFHFHCISRWLKTRQVCPLDVCEWEFQKYGH

SEQ ID NO: 70861 - DNA, 1008 bp, Arabidopsis thaliana
  misc_feature (1)..(1008): Ceres Seq. ID no. 3018088
  misc_feature (1)..(1008): Ortholog of  Ceres SEQ ID NO 12562983 as cited in SEQ ID NO 53309
atggtgtcaatgaaaagcttcgttcatattctccgtcgatacatctccattgcaatcactctcttctataacctcatttggtgtttattcgacaatttcgattacccgatcctaatcaagctcgctgatacattcttatcattatatttcctaatcttctgcgatctccgtccaatcaccgtcgatttaaacgatggagaaaccacattacatttctggatctccggccaccgtaaaatcaaccgccctaacctcgtcatgttacacggctacggaggaaattcgaaatggcagttcattcatcaagtctcagatctatcgaaatcgtttaatctctttatccctgatcttgtgttcttcgggaaatcgtactcgagaaacaccgatcggactatcgagtttcaggcgaggagtatcgtcggaggtttgaagaggttaggttgtggtgacggagatttatcggtttattcaattagttacggtggatttgttgcgtaccggatagcgaagatttggccggagatgattgagaaattggtgattgtgagtagtggagttgggtttacacaacagcaaaagatgacggagatgaaaaaacacggcggagatgtatcggagattcttgttccgagtaatccgagagatctacggttgttagttaaggtttcgatgaatacaggtatcagatttcttgactgggttccagatttcatcctctcccaattcatcgctgtgatgtatgagacaaatcggcaagagcttgttgatttagctaagaatttgctggaaagagaagaggagccagagttattttcaatatcacagagaacgttaatcgtttggggtgataaggataatgtgtttccgttggagcatggacgtcgtctacaaaggcatttgccgaattcgagtttagaggtattgaaggaaattggacatggtgtgaacattgaagcaccaactactcttaacaatttgattatctcgtttgttttaggtgttccttaa

SEQ ID NO: 70862 - protein, 335 aa, Arabidopsis thaliana
  peptide (1)..(335): Ceres Seq. ID no. 3018089
MVSMKSFVHILRRYISIAITLFYNLIWCLFDNFDYPILIKLADTFLSLYFLIFCDLRPITVDLNDGETTLHFWISGHRKINRPNLVMLHGYGGNSKWQFIHQVSDLSKSFNLFIPDLVFFGKSYSRNTDRTIEFQARSIVGGLKRLGCGDGDLSVYSISYGGFVAYRIAKIWPEMIEKLVIVSSGVGFTQQQKMTEMKKHGGDVSEILVPSNPRDLRLLVKVSMNTGIRFLDWVPDFILSQFIAVMYETNRQELVDLAKNLLEREEEPELFSISQRTLIVWGDKDNVFPLEHGRRLQRHLPNSSLEVLKEIGHGVNIEAPTTLNNLIISFVLGVP

SEQ ID NO: 70863 - protein, 332 aa, Arabidopsis thaliana
  peptide (1)..(332): Ceres Seq. ID no. 3018090
MKSFVHILRRYISIAITLFYNLIWCLFDNFDYPILIKLADTFLSLYFLIFCDLRPITVDLNDGETTLHFWISGHRKINRPNLVMLHGYGGNSKWQFIHQVSDLSKSFNLFIPDLVFFGKSYSRNTDRTIEFQARSIVGGLKRLGCGDGDLSVYSISYGGFVAYRIAKIWPEMIEKLVIVSSGVGFTQQQKMTEMKKHGGDVSEILVPSNPRDLRLLVKVSMNTGIRFLDWVPDFILSQFIAVMYETNRQELVDLAKNLLEREEEPELFSISQRTLIVWGDKDNVFPLEHGRRLQRHLPNSSLEVLKEIGHGVNIEAPTTLNNLIISFVLGVP

SEQ ID NO: 70864 - protein, 249 aa, Arabidopsis thaliana
  peptide (1)..(249): Ceres Seq. ID no. 3018091
MLHGYGGNSKWQFIHQVSDLSKSFNLFIPDLVFFGKSYSRNTDRTIEFQARSIVGGLKRLGCGDGDLSVYSISYGGFVAYRIAKIWPEMIEKLVIVSSGVGFTQQQKMTEMKKHGGDVSEILVPSNPRDLRLLVKVSMNTGIRFLDWVPDFILSQFIAVMYETNRQELVDLAKNLLEREEEPELFSISQRTLIVWGDKDNVFPLEHGRRLQRHLPNSSLEVLKEIGHGVNIEAPTTLNNLIISFVLGVP

SEQ ID NO: 70865 - DNA, 1737 bp, Arabidopsis thaliana
  misc_feature (1)..(1737): Ceres Seq. ID no. 3018727
  misc_feature (1)..(1737): Ortholog of  Ceres SEQ ID NO 12608463 as cited in SEQ ID NO 60238
atgacgtctctattctctaaacctagagctctcacttctcatatcaccaactttaaaacttaccgtccggttatcggaaaactccacgtggcaactttaacgcttcttctcttcctaatcgccgccggtattgccgtcacttcctctctatggcttaacaagacgacaaaagcatttgatcgaccgacattagtagcaacaaaaccagaaccggagctagagccaccgcatgaaaccggagtattggtaaattgcacaagtttcttgaatcaaaaccggtccggttcttgctcaagaacacctctacttaacaagaaaaaaccatctcatcgaccgacaataacaacaataaaaccggtcccggtacgtgtatcagagaagaaatcaccggaggaaaccggaagctcggtagattgctcaagtttcttgaatcaaaaccggtctggttcttgctcaagaacactgcaatcgggttataatcaaaaccaaaccgaatctaaccggtcttgtcctgattacttcaagtggattcacgaggatctaaaaccatggagagaaacagggataacaaaagaaatggtggaaagaggcaaaactacagcacatttcaggttagttattttaaacggcaaggtgttcgtcgaaaactacaagaagtctatacaaactagagatgcgttcacactatgggggattcttcagctgctgagaaagtatccagggaagttacctgacgtggatctcatgtttgactgtgatgatcgaccagtcattagatcggacggttataatatattgaatcgtacggttgagaatgcgccacctccgttgtttagatattgcggtgataggtggacggtggatatcgtctttcctgattggtcattctggggatggcaggagataaacataagggagtggagcaaagtgttgaaagaaatggaagaaggaaagaagaagaagaaatttatggaaagagacgcctatgcatattggaaagggaacccttttgttgcatctccttcaagagaagatctcctcacttgcaatttatcctcactacatgattggaatgctagaattttcattcaggattggatatcagaaggacaaagaggatttgagaattcgaatgtagcaaatcaatgcacttacaggtacaagatctatatagaagggtatgcgtggtcagtgagtgagaaatacatattagcatgtgactcagtcacattgatggtgaaaccttattactatgatttcttctcaagaactcttcaacctctccaacactattggcccattagggataaagataaatgtagatccatcaaatttgctgttgattggcttaataatcacactcaaaaggctcaagagataggaagagaagcaagtgagttcatgcaaagagatctatcaatggaaaatgtttatgattacatgttccatctgttgaatgaatactccaagcttcttaagtacaagcctcaagttccaaagaatagtgttgagctatgcacagaagccttggtgtgcccttctgaaggggaagatgttaatggggttgataagaaatttatgataggctctttagttagtaggcctcatgcttctggcccatgttcacttcctcctccttttgattccaatggtcttgagaagttccataggaagaaattgaatctcatccggcaagtggagaaatgggaagactcttactggcaaaaggttctgtaa

SEQ ID NO: 70866 - protein, 578 aa, Arabidopsis thaliana
  peptide (1)..(578): Ceres Seq. ID no. 3018728
MTSLFSKPRALTSHITNFKTYRPVIGKLHVATLTLLLFLIAAGIAVTSSLWLNKTTKAFDRPTLVATKPEPELEPPHETGVLVNCTSFLNQNRSGSCSRTPLLNKKKPSHRPTITTIKPVPVRVSEKKSPEETGSSVDCSSFLNQNRSGSCSRTLQSGYNQNQTESNRSCPDYFKWIHEDLKPWRETGITKEMVERGKTTAHFRLVILNGKVFVENYKKSIQTRDAFTLWGILQLLRKYPGKLPDVDLMFDCDDRPVIRSDGYNILNRTVENAPPPLFRYCGDRWTVDIVFPDWSFWGWQEINIREWSKVLKEMEEGKKKKKFMERDAYAYWKGNPFVASPSREDLLTCNLSSLHDWNARIFIQDWISEGQRGFENSNVANQCTYRYKIYIEGYAWSVSEKYILACDSVTLMVKPYYYDFFSRTLQPLQHYWPIRDKDKCRSIKFAVDWLNNHTQKAQEIGREASEFMQRDLSMENVYDYMFHLLNEYSKLLKYKPQVPKNSVELCTEALVCPSEGEDVNGVDKKFMIGSLVSRPHASGPCSLPPPFDSNGLEKFHRKKLNLIRQVEKWEDSYWQKVL

SEQ ID NO: 70867 - protein, 386 aa, Arabidopsis thaliana
  peptide (1)..(386): Ceres Seq. ID no. 3018729
MVERGKTTAHFRLVILNGKVFVENYKKSIQTRDAFTLWGILQLLRKYPGKLPDVDLMFDCDDRPVIRSDGYNILNRTVENAPPPLFRYCGDRWTVDIVFPDWSFWGWQEINIREWSKVLKEMEEGKKKKKFMERDAYAYWKGNPFVASPSREDLLTCNLSSLHDWNARIFIQDWISEGQRGFENSNVANQCTYRYKIYIEGYAWSVSEKYILACDSVTLMVKPYYYDFFSRTLQPLQHYWPIRDKDKCRSIKFAVDWLNNHTQKAQEIGREASEFMQRDLSMENVYDYMFHLLNEYSKLLKYKPQVPKNSVELCTEALVCPSEGEDVNGVDKKFMIGSLVSRPHASGPCSLPPPFDSNGLEKFHRKKLNLIRQVEKWEDSYWQKVL

SEQ ID NO: 70868 - protein, 330 aa, Arabidopsis thaliana
  peptide (1)..(330): Ceres Seq. ID no. 3018730
MFDCDDRPVIRSDGYNILNRTVENAPPPLFRYCGDRWTVDIVFPDWSFWGWQEINIREWSKVLKEMEEGKKKKKFMERDAYAYWKGNPFVASPSREDLLTCNLSSLHDWNARIFIQDWISEGQRGFENSNVANQCTYRYKIYIEGYAWSVSEKYILACDSVTLMVKPYYYDFFSRTLQPLQHYWPIRDKDKCRSIKFAVDWLNNHTQKAQEIGREASEFMQRDLSMENVYDYMFHLLNEYSKLLKYKPQVPKNSVELCTEALVCPSEGEDVNGVDKKFMIGSLVSRPHASGPCSLPPPFDSNGLEKFHRKKLNLIRQVEKWEDSYWQKVL

SEQ ID NO: 70869 - DNA, 606 bp, Arabidopsis thaliana
  misc_feature (1)..(606): Ceres Seq. ID no. 3021062
  misc_feature (1)..(606): Ortholog of  Ceres SEQ ID NO 13595084 as cited in SEQ ID NO 56095
  misc_feature (1)..(606): Ortholog of  Ceres SEQ ID NO 13594252 as cited in SEQ ID NO 57528
  misc_feature (1)..(606): Ortholog of  Ceres SEQ ID NO 13594430 as cited in SEQ ID NO 60181
atggaagaatctgttcatcaatcgatacgattcggctcagttgcagatttaatcatgtggaagaatcgacgcggagggtttcttctacttggatcaacgacattgttatggttcctctttgagaaatgtggatacagtttcttcccctttgttgttaatactcagcttctctccgtcgttatactcttcctctgggccaaatctgctattctcttcaataggcctatgcctcaactacctaatcttgaaatcactgaggaatttgtgtttatggtggctgatgctatacgagtctggattaataccgtgctcgctgttgctcgtgagatttacgtgggaagaaatgcaaagcaactctttcgggtgagtgttgtgttgtggacagtatcatttgttggaaatttcttaaacttcctcacaatactctatcttggtgttgttctgagtctgttgattccctttttgtacgagagataccaggatcttattgacgagaagctatctttaactcatcgagtcattcagacacagtacaggaagatcgatgaaagattactacagaagattattgctaagcccacaaataagataaagaagatgcaatag

SEQ ID NO: 70870 - protein, 201 aa, Arabidopsis thaliana
  peptide (1)..(201): Ceres Seq. ID no. 3021063
MEESVHQSIRFGSVADLIMWKNRRGGFLLLGSTTLLWFLFEKCGYSFFPFVVNTQLLSVVILFLWAKSAILFNRPMPQLPNLEITEEFVFMVADAIRVWINTVLAVAREIYVGRNAKQLFRVSVVLWTVSFVGNFLNFLTILYLGVVLSLLIPFLYERYQDLIDEKLSLTHRVIQTQYRKIDERLLQKIIAKPTNKIKKMQ

SEQ ID NO: 70871 - protein, 183 aa, Arabidopsis thaliana
  peptide (1)..(183): Ceres Seq. ID no. 3021064
MWKNRRGGFLLLGSTTLLWFLFEKCGYSFFPFVVNTQLLSVVILFLWAKSAILFNRPMPQLPNLEITEEFVFMVADAIRVWINTVLAVAREIYVGRNAKQLFRVSVVLWTVSFVGNFLNFLTILYLGVVLSLLIPFLYERYQDLIDEKLSLTHRVIQTQYRKIDERLLQKIIAKPTNKIKKMQ

SEQ ID NO: 70872 - protein, 126 aa, Arabidopsis thaliana
  peptide (1)..(126): Ceres Seq. ID no. 3021065
MPQLPNLEITEEFVFMVADAIRVWINTVLAVAREIYVGRNAKQLFRVSVVLWTVSFVGNFLNFLTILYLGVVLSLLIPFLYERYQDLIDEKLSLTHRVIQTQYRKIDERLLQKIIAKPTNKIKKMQ

SEQ ID NO: 70873 - DNA, 1530 bp, Arabidopsis thaliana
  misc_feature (1)..(1530): Ceres Seq. ID no. 3021259
  misc_feature (1)..(1530): Ortholog of  Ceres SEQ ID NO 14315028 as cited in SEQ ID NO 57989
  misc_feature (1)..(1530): Ortholog of  Ceres SEQ ID NO 13657677 as cited in SEQ ID NO 66119
atgctgctactgaagcaaatctcaccaccgttccatctccaccaactccgccgccgtatctccaccatcatctccgccggattcactctcaacctcccaaaactcgaaccttcctccgacgccgaactaatctcccaaatgttaataacaaatcacaacccattccacttcatggaatcatctctccaactcaacggcatctccctcactcccaacctcatccaccaaaccctcctccgtctccgtcacaattccaaaattgccctctccttcttccaatatctacgctccttaccctctccttcaacaacaccaacctctttcaatctcatcatcgatatcctcggccgtgttcgtcaattcgacgtcgttagacaacttatagtcgaaatggatcaaacttctcctgagaccttcttaatcctcgttaaacggttaatcgccgccgggcttactcgacaagcggttcgtgctttcgacgatgcgccttgttttctcgagaatcgtcgtttccgtttagtcgaattcgggtttttactcgatacgctttgtaaatacggttacacgaaaatggccgttggtgtttttaatgaaaggaaggaagagtttggttctgatgagaaggtttacactattttgatcgctggttggtgtaagcttaggaggattgatatggcggagaagtttttggtagagatgattgagtctgggattgagcctaatgttgttacgtataatgtattgcttaacgggatttgtaggacggcgagtttgcatccggaagagagatttgagaggaatgtgagaaatgcagagaaggtgttcgatgaaatgcgtcagagagggattgagcccgatgttacgagtttttctatcgtgcttcatatgtatagccgagctcataaagctgagttgacgttggataagatgaaattgatgaaagcgaaagggattagcccgacgattgaaacgtatacatcggttgttaaatgtttgtgttcttgtgggaggttagaggaagcggaggagttgcttgaaacaatggtggagagcgggattagcccgtcttccgcgacgtacaattgtttttttaaagagtacaaaggaaggaaagatgctaatggagcgatgaatctgtataggaagatgaagaatggattgtgtaagccaagtacgcagacgtataatgttttgttaggtacgtttatcaatttggggaagatggagactgtgaaagagatatgggatgatcttaaagcaagtgaaacgggtccggatttggactcgtacacatcgttggttcatgggttgtgtagtaaggagaaatggaaggaggcttgtggatactttgtggagatgatagagagaggtttcttaccacaaaagctaacttttgagactttgtataaaggattaatacagtctaataagatgaggacttggaggaggttgaagaagaaactcgacgaggaatctataaccttcgggtctgagtttcagagatatccttttgagccttacaagagatga

SEQ ID NO: 70874 - protein, 509 aa, Arabidopsis thaliana
  peptide (1)..(509): Ceres Seq. ID no. 3021260
MLLLKQISPPFHLHQLRRRISTIISAGFTLNLPKLEPSSDAELISQMLITNHNPFHFMESSLQLNGISLTPNLIHQTLLRLRHNSKIALSFFQYLRSLPSPSTTPTSFNLIIDILGRVRQFDVVRQLIVEMDQTSPETFLILVKRLIAAGLTRQAVRAFDDAPCFLENRRFRLVEFGFLLDTLCKYGYTKMAVGVFNERKEEFGSDEKVYTILIAGWCKLRRIDMAEKFLVEMIESGIEPNVVTYNVLLNGICRTASLHPEERFERNVRNAEKVFDEMRQRGIEPDVTSFSIVLHMYSRAHKAELTLDKMKLMKAKGISPTIETYTSVVKCLCSCGRLEEAEELLETMVESGISPSSATYNCFFKEYKGRKDANGAMNLYRKMKNGLCKPSTQTYNVLLGTFINLGKMETVKEIWDDLKASETGPDLDSYTSLVHGLCSKEKWKEACGYFVEMIERGFLPQKLTFETLYKGLIQSNKMRTWRRLKKKLDEESITFGSEFQRYPFEPYKR

SEQ ID NO: 70875 - protein, 463 aa, Arabidopsis thaliana
  peptide (1)..(463): Ceres Seq. ID no. 3021261
MLITNHNPFHFMESSLQLNGISLTPNLIHQTLLRLRHNSKIALSFFQYLRSLPSPSTTPTSFNLIIDILGRVRQFDVVRQLIVEMDQTSPETFLILVKRLIAAGLTRQAVRAFDDAPCFLENRRFRLVEFGFLLDTLCKYGYTKMAVGVFNERKEEFGSDEKVYTILIAGWCKLRRIDMAEKFLVEMIESGIEPNVVTYNVLLNGICRTASLHPEERFERNVRNAEKVFDEMRQRGIEPDVTSFSIVLHMYSRAHKAELTLDKMKLMKAKGISPTIETYTSVVKCLCSCGRLEEAEELLETMVESGISPSSATYNCFFKEYKGRKDANGAMNLYRKMKNGLCKPSTQTYNVLLGTFINLGKMETVKEIWDDLKASETGPDLDSYTSLVHGLCSKEKWKEACGYFVEMIERGFLPQKLTFETLYKGLIQSNKMRTWRRLKKKLDEESITFGSEFQRYPFEPYKR

SEQ ID NO: 70876 - protein, 452 aa, Arabidopsis thaliana
  peptide (1)..(452): Ceres Seq. ID no. 3021262
MESSLQLNGISLTPNLIHQTLLRLRHNSKIALSFFQYLRSLPSPSTTPTSFNLIIDILGRVRQFDVVRQLIVEMDQTSPETFLILVKRLIAAGLTRQAVRAFDDAPCFLENRRFRLVEFGFLLDTLCKYGYTKMAVGVFNERKEEFGSDEKVYTILIAGWCKLRRIDMAEKFLVEMIESGIEPNVVTYNVLLNGICRTASLHPEERFERNVRNAEKVFDEMRQRGIEPDVTSFSIVLHMYSRAHKAELTLDKMKLMKAKGISPTIETYTSVVKCLCSCGRLEEAEELLETMVESGISPSSATYNCFFKEYKGRKDANGAMNLYRKMKNGLCKPSTQTYNVLLGTFINLGKMETVKEIWDDLKASETGPDLDSYTSLVHGLCSKEKWKEACGYFVEMIERGFLPQKLTFETLYKGLIQSNKMRTWRRLKKKLDEESITFGSEFQRYPFEPYKR

SEQ ID NO: 70877 - DNA, 771 bp, Arabidopsis thaliana
  misc_feature (1)..(771): Ceres Seq. ID no. 3021265
  misc_feature (1)..(771): Ortholog of  Ceres SEQ ID NO 13639514 as cited in SEQ ID NO 55736
  misc_feature (1)..(771): Ortholog of  Ceres SEQ ID NO 13595560 as cited in SEQ ID NO 56738
atgggaattcagaaaccggcatggttggatgcgctatacgcagagaagttcttcgtgggatgtccataccatgagacggcgaagaagaacgagaggaacgtgtgttgtcttgattgttgcaccagtctctgccctcactgtgtaccctctcatagattccatagactccttcaagttcgccgttatgtgtatcacgacgttgttcggcttgaagatcttcagaaactcatcgactgctctaacgttcaagcttatacaataaatagtgcaaaagtggtgttcatcaagaagagaccacaaaatagacaattcaaaggagctggcaactattgcacttcttgtgaccgaagtcttcaagaaccttatatccattgctccttgggttgtaaggtggactttgtgatgaaacgttacagggacataaccccattcctcaagccatgccacactctaaccctaggtcctgactacatcatcccacaagacttactgacagatgatgaagtggcggcctacgagactcctcgatcaactgtggtagacggcgatgagtccatgagctggtcctcagcttcctcggataacaacaatgcgggtgcggcggctgcttatgccgcaaccaccacccatgtcgtgaggaaaaaaaggactggtttttgcctttgcgctaaatcggctaatagttataaagaagtttcggaggatcctgacgatatttctgcttgcatcaatcggcgaaaaggcgttcctcaacgatctcctctctgttaa

SEQ ID NO: 70878 - protein, 256 aa, Arabidopsis thaliana
  peptide (1)..(256): Ceres Seq. ID no. 3021266
MGIQKPAWLDALYAEKFFVGCPYHETAKKNERNVCCLDCCTSLCPHCVPSHRFHRLLQVRRYVYHDVVRLEDLQKLIDCSNVQAYTINSAKVVFIKKRPQNRQFKGAGNYCTSCDRSLQEPYIHCSLGCKVDFVMKRYRDITPFLKPCHTLTLGPDYIIPQDLLTDDEVAAYETPRSTVVDGDESMSWSSASSDNNNAGAAAAYAATTTHVVRKKRTGFCLCAKSANSYKEVSEDPDDISACINRRKGVPQRSPLC

SEQ ID NO: 70879 - DNA, 663 bp, Arabidopsis thaliana
  misc_feature (1)..(663): Ceres Seq. ID no. 3021484
  misc_feature (1)..(663): Ortholog of  Ceres SEQ ID NO 12578784 as cited in SEQ ID NO 20729
atggttctcttaggggtgagtaaggtaatatggagaagggctgtctatgatgcagagaagaagaagatgaacagtgtagacagtgcgcgaaagggtaaaaggagaagcaggagatggttagtgcaaccacagttacatgggtttaggatctttactggcgacaagggaccttttgatccaggaggagctgattgtgtgtatgagctggttagagtatggaggctatttgagaagcctcatggaacttggccaaggggttgtagttcgaaagagaagataaagaacctctacttaggattcataaccatcttaggaatcgccactgtgcttgtttctctcctcccggagtttcgggtggtgggggcgtctctgttctttggaatgggattctctggcttagctccgattcttcacaagctgataatcttttgggaccaacctgaagcccttcacacgacatgttatgagattttgatgggtttgctttatgggttaggagctctggtttatgcaactaggatcccagagagatggatgccgggtaaattcgatatagcaggacatagccatcagttgtttcatgttctggtagttgctggtgcgttcacgcactatagagctgggctagtgtatcttaagtggagagatattgaaggatgttga

SEQ ID NO: 70880 - protein, 220 aa, Arabidopsis thaliana
  peptide (1)..(220): Ceres Seq. ID no. 3021485
MVLLGVSKVIWRRAVYDAEKKKMNSVDSARKGKRRSRRWLVQPQLHGFRIFTGDKGPFDPGGADCVYELVRVWRLFEKPHGTWPRGCSSKEKIKNLYLGFITILGIATVLVSLLPEFRVVGASLFFGMGFSGLAPILHKLIIFWDQPEALHTTCYEILMGLLYGLGALVYATRIPERWMPGKFDIAGHSHQLFHVLVVAGAFTHYRAGLVYLKWRDIEGC

SEQ ID NO: 70881 - protein, 198 aa, Arabidopsis thaliana
  peptide (1)..(198): Ceres Seq. ID no. 3021486
MNSVDSARKGKRRSRRWLVQPQLHGFRIFTGDKGPFDPGGADCVYELVRVWRLFEKPHGTWPRGCSSKEKIKNLYLGFITILGIATVLVSLLPEFRVVGASLFFGMGFSGLAPILHKLIIFWDQPEALHTTCYEILMGLLYGLGALVYATRIPERWMPGKFDIAGHSHQLFHVLVVAGAFTHYRAGLVYLKWRDIEGC

SEQ ID NO: 70882 - DNA, 1161 bp, Arabidopsis thaliana
  misc_feature (1)..(1161): Ceres Seq. ID no. 3022721
  misc_feature (1)..(1161): Ortholog of  Ceres SEQ ID NO 15180501 as cited in SEQ ID NO 0
atggaagaaattggaggagctgaagcagtgataaatctcaaatctggatattcgctaccaatttcttatcacccatgttttgggcctcacgaggatctacttcttcttgaagctgatgacaaactcgtctctgatatctttcatcaaagggtaacattgagaggacttcctgatgaagatgctgttctttgcaccaagtctaagacttatgctatcaaatttgttggtaattctaattccatgttccttattcctccttcaatttttcctggagatgcacaagtttctgataccaacaacaatgtatcggttctcaaaatcgctcctggtaatatggaacttgttgaggcttctcctaggcttgataaacttaagcagattctcttggcaaatccttttggtgctggtgaagttgaagctatgatggatgttgataatgatgacttagaccatagtgggaagaaagatctagcgttgtacacttggagcgatttggttaacacggttcaagcgagtgatgaggagttacgcaatggcttgcagagtctttctgctattgagattgatggtttctggagggttatagatgagaattacctagacgtgattctgagaatgcttcttcataactgtgtattgaaagattggtcatttgatgatcttgatgaagatgaagttgtgaatgctttggtagctgatgagtttcctagtcaactagcgagtcactgcttgcgtgtgtttggctctaaagttaatgaaactgataagtggaagttggaaccgaggcttgtgtgtttgcactttgctagacagatactgagagaagaaaagatgagactagagagtttcatggaagagtggaagaagaagataccagatgggatggaagaaagattcgagatgcttgaaggagaggttttaacagagaaaatcgggatcgagacacgggtctatacgtttagtgtgcgctctctgccttcaactccagaagaaaggttttcagtactctttaaacatagatcaaaatgggaatggaaagacttagagccttacctaagggatcttcatgttcctagactatctatggaagggttacttctgaaatacacacgcagagcacaacctaaagctgatgcaccacctgtctttagtgcaagataa

SEQ ID NO: 70883 - protein, 386 aa, Arabidopsis thaliana
  peptide (1)..(386): Ceres Seq. ID no. 3022722
MEEIGGAEAVINLKSGYSLPISYHPCFGPHEDLLLLEADDKLVSDIFHQRVTLRGLPDEDAVLCTKSKTYAIKFVGNSNSMFLIPPSIFPGDAQVSDTNNNVSVLKIAPGNMELVEASPRLDKLKQILLANPFGAGEVEAMMDVDNDDLDHSGKKDLALYTWSDLVNTVQASDEELRNGLQSLSAIEIDGFWRVIDENYLDVILRMLLHNCVLKDWSFDDLDEDEVVNALVADEFPSQLASHCLRVFGSKVNETDKWKLEPRLVCLHFARQILREEKMRLESFMEEWKKKIPDGMEERFEMLEGEVLTEKIGIETRVYTFSVRSLPSTPEERFSVLFKHRSKWEWKDLEPYLRDLHVPRLSMEGLLLKYTRRAQPKADAPPVFSAR

SEQ ID NO: 70884 - protein, 306 aa, Arabidopsis thaliana
  peptide (1)..(306): Ceres Seq. ID no. 3022723
MFLIPPSIFPGDAQVSDTNNNVSVLKIAPGNMELVEASPRLDKLKQILLANPFGAGEVEAMMDVDNDDLDHSGKKDLALYTWSDLVNTVQASDEELRNGLQSLSAIEIDGFWRVIDENYLDVILRMLLHNCVLKDWSFDDLDEDEVVNALVADEFPSQLASHCLRVFGSKVNETDKWKLEPRLVCLHFARQILREEKMRLESFMEEWKKKIPDGMEERFEMLEGEVLTEKIGIETRVYTFSVRSLPSTPEERFSVLFKHRSKWEWKDLEPYLRDLHVPRLSMEGLLLKYTRRAQPKADAPPVFSAR

SEQ ID NO: 70885 - protein, 275 aa, Arabidopsis thaliana
  peptide (1)..(275): Ceres Seq. ID no. 3022724
MELVEASPRLDKLKQILLANPFGAGEVEAMMDVDNDDLDHSGKKDLALYTWSDLVNTVQASDEELRNGLQSLSAIEIDGFWRVIDENYLDVILRMLLHNCVLKDWSFDDLDEDEVVNALVADEFPSQLASHCLRVFGSKVNETDKWKLEPRLVCLHFARQILREEKMRLESFMEEWKKKIPDGMEERFEMLEGEVLTEKIGIETRVYTFSVRSLPSTPEERFSVLFKHRSKWEWKDLEPYLRDLHVPRLSMEGLLLKYTRRAQPKADAPPVFSAR

SEQ ID NO: 70886 - DNA, 759 bp, Arabidopsis thaliana
  misc_feature (1)..(759): Ceres Seq. ID no. 3023316
  misc_feature (1)..(759): Ortholog of  Ceres SEQ ID NO 13639102 as cited in SEQ ID NO 56610
atggggtctgaagagagaatgatgataagttcttcttcagttctagacgaagagtatgaatatacagatgatgggtttcattacgagacaaggcaaaacagtttgtctagattatctatctgcacaaactccttccacgaagacgacgaagatcatccttcagaattgggtaatttcttctctacgttgtcgttagagagcttcaacgacgacgtcggagccgaagctgacgtagaaatctccgatgacggtggcgaatcggattccgacaaagactcttccggattttactctctaccgacgatcacatctcgccggagaagaaaactcacagtttccggcggtttagaaacgagcaaagagagtgagacgaaagtcgatgggagtaagtgtaatatagttagtcaacggagggtattaagggaaaagagtaaaagagggaatcagtacggtcactggtttaacggcgtggagagagacagtgacggcggaggagagttgacggtgttaacgaaggtgaggggagggaagaagaagtcaatgaagatggggtttgaagaagtcaaagcttgtagagatctcggcttcgaactggatgttccgggtcgggtttcagggtcaaaccgtgaaactagtagtggcggcaactctcccattgccaactggcgtatctcaagtcctggggatgatccgaaagaggttaaggcgagattaaagatgtgggcacaagcagtagctttagcttctgcgtcacgttaa

SEQ ID NO: 70887 - protein, 252 aa, Arabidopsis thaliana
  peptide (1)..(252): Ceres Seq. ID no. 3023317
MGSEERMMISSSSVLDEEYEYTDDGFHYETRQNSLSRLSICTNSFHEDDEDHPSELGNFFSTLSLESFNDDVGAEADVEISDDGGESDSDKDSSGFYSLPTITSRRRRKLTVSGGLETSKESETKVDGSKCNIVSQRRVLREKSKRGNQYGHWFNGVERDSDGGGELTVLTKVRGGKKKSMKMGFEEVKACRDLGFELDVPGRVSGSNRETSSGGNSPIANWRISSPGDDPKEVKARLKMWAQAVALASASR

SEQ ID NO: 70888 - protein, 246 aa, Arabidopsis thaliana
  peptide (1)..(246): Ceres Seq. ID no. 3023318
MMISSSSVLDEEYEYTDDGFHYETRQNSLSRLSICTNSFHEDDEDHPSELGNFFSTLSLESFNDDVGAEADVEISDDGGESDSDKDSSGFYSLPTITSRRRRKLTVSGGLETSKESETKVDGSKCNIVSQRRVLREKSKRGNQYGHWFNGVERDSDGGGELTVLTKVRGGKKKSMKMGFEEVKACRDLGFELDVPGRVSGSNRETSSGGNSPIANWRISSPGDDPKEVKARLKMWAQAVALASASR

SEQ ID NO: 70889 - protein, 245 aa, Arabidopsis thaliana
  peptide (1)..(245): Ceres Seq. ID no. 3023319
MISSSSVLDEEYEYTDDGFHYETRQNSLSRLSICTNSFHEDDEDHPSELGNFFSTLSLESFNDDVGAEADVEISDDGGESDSDKDSSGFYSLPTITSRRRRKLTVSGGLETSKESETKVDGSKCNIVSQRRVLREKSKRGNQYGHWFNGVERDSDGGGELTVLTKVRGGKKKSMKMGFEEVKACRDLGFELDVPGRVSGSNRETSSGGNSPIANWRISSPGDDPKEVKARLKMWAQAVALASASR

SEQ ID NO: 70890 - DNA, 1230 bp, Arabidopsis thaliana
  misc_feature (1)..(1230): Ceres Seq. ID no. 3023647
  misc_feature (1)..(1230): Ortholog of  Ceres SEQ ID NO 13597334 as cited in SEQ ID NO 64244
atgatgcttaatcagacagtgatcttcttccttctttgggtgatcatagcacttgtagtcgaaattactttggccggaaagatcacagtttctgatatccatgagcagaaaatcgaacaacggttgaaccaactcaacaaacccgccgttaaatctatccatagtccagatggagatataatcgattgtgtatggatctatcaccaaccagcttttgatcatcctttactcaaaaaccacaccattcagatgaggccgaaaagtgactcgacaagggacaaaactggaggtaacaagacagacattatccatcaattgtggcgcacgaaaggtgaatgtcctaagaacactattcccatcagaagaagaacaagagatgatcttctaagatcagattccatcaaaactcatggaagaaagaacccaccaaccatttctccaactacttatcacctccccgatgatcagacagaagttcatgagcatgcgagtgtgtacctggactatggtgaataccatggcagcaagagccgtataagtatatggagaccagacgttaatatgaccgagtttagtttggctcaaacatgggtcgtcggtggagattgggacactgttttgaacactgtggagtctggttggcagatcctacattctatgtacggtgacaataatacaagacttttcgccttttggacgagcgattcatatggagacaacagctgctacaatcttgactgtccaggctttgttcaagtgaataaagatattgcccttggtgcagccctcaacactatctcgacctacaatggtaaccaatatgatttccttctaactattgagaaggaacaagataccggactttggtggcttaagtttgatactcatctagtcggatactggccaagctttctagtcccgaagctagcagactcagcacggatgatcgcttggggaggtgaaattgtgtatgatgctagtggccaaaatgaacatacgcttacgcaaatggggagtggccatttcgcggaagaagggtttaagaaggcggcttatatcaataacatagagtacatcgataaatctaatcatccgatcaaaccctttcctcaaaatcttgaagcttctgttactcggcctgaatgctataacctcaaggttggctctagccgaagatggggaacttacattttctatggtggacctggacgtaaccctcaatgcctatga

SEQ ID NO: 70891 - protein, 409 aa, Arabidopsis thaliana
  peptide (1)..(409): Ceres Seq. ID no. 3023648
MMLNQTVIFFLLWVIIALVVEITLAGKITVSDIHEQKIEQRLNQLNKPAVKSIHSPDGDIIDCVWIYHQPAFDHPLLKNHTIQMRPKSDSTRDKTGGNKTDIIHQLWRTKGECPKNTIPIRRRTRDDLLRSDSIKTHGRKNPPTISPTTYHLPDDQTEVHEHASVYLDYGEYHGSKSRISIWRPDVNMTEFSLAQTWVVGGDWDTVLNTVESGWQILHSMYGDNNTRLFAFWTSDSYGDNSCYNLDCPGFVQVNKDIALGAALNTISTYNGNQYDFLLTIEKEQDTGLWWLKFDTHLVGYWPSFLVPKLADSARMIAWGGEIVYDASGQNEHTLTQMGSGHFAEEGFKKAAYINNIEYIDKSNHPIKPFPQNLEASVTRPECYNLKVGSSRRWGTYIFYGGPGRNPQCL

SEQ ID NO: 70892 - protein, 408 aa, Arabidopsis thaliana
  peptide (1)..(408): Ceres Seq. ID no. 3023649
MLNQTVIFFLLWVIIALVVEITLAGKITVSDIHEQKIEQRLNQLNKPAVKSIHSPDGDIIDCVWIYHQPAFDHPLLKNHTIQMRPKSDSTRDKTGGNKTDIIHQLWRTKGECPKNTIPIRRRTRDDLLRSDSIKTHGRKNPPTISPTTYHLPDDQTEVHEHASVYLDYGEYHGSKSRISIWRPDVNMTEFSLAQTWVVGGDWDTVLNTVESGWQILHSMYGDNNTRLFAFWTSDSYGDNSCYNLDCPGFVQVNKDIALGAALNTISTYNGNQYDFLLTIEKEQDTGLWWLKFDTHLVGYWPSFLVPKLADSARMIAWGGEIVYDASGQNEHTLTQMGSGHFAEEGFKKAAYINNIEYIDKSNHPIKPFPQNLEASVTRPECYNLKVGSSRRWGTYIFYGGPGRNPQCL

SEQ ID NO: 70893 - protein, 326 aa, Arabidopsis thaliana; identical to SEQ ID NO: 70449
  peptide (1)..(326): Ceres Seq. ID no. 3023650

SEQ ID NO: 70894 - DNA, 2274 bp, Arabidopsis thaliana
  misc_feature (1)..(2274): Ceres Seq. ID no. 3024092
  misc_feature (1)..(2274): Ortholog of  Ceres SEQ ID NO 13658778 as cited in SEQ ID NO 66511
atggcggattcaagcttttctcttcctcctctttgtgaaaggatctcatacacgaactattttctaagagctgtatatctcacggttctaggccttttcttttctcttctcttgcaccgaatccgacatacgagcgaatacgacaacgtttggctcgtggctttcttttgtgaatcttgtttcttcttggtatgtctgcttattacttgcctaaaatggagtcctgctgatactaaaccctttcctgatagacttgatgaaagggttcatgaccttccttcggtggatatgttcgtgcccacagcagatccggttcgagagccaccgattatggttgtggacaccgtgctttcgctgttagctgtaaattatccggcaaataaactagcttgttatgtgtcggacgatggatgctcacctctcacttatttctctctcaaggaagcttctaagttcgccaagatttgggtaccgttctgcaaaaagtacaacactagagttagagctccttctagatattttctgaaacctataagcgtcgcaacagaggattatgaattcaatagagactgggaaaagacgaagagggagtacgagaagttgaggcggaaagtggaagatgccaccggagattctcatatgttggatgtagaagatgattttgaagcattctcaaacacaaaaccaaatgatcattcaactctagttaaggtggtatgggagaacaagggaggtgtaggagacgagaaagagatccctcatatcatatacatatcaagagagaaaagaccaaattatgttcataatcaaaaatgtggagccatgaactttctggcaagagtgtcagggttgatgacaaacgcaccatacatcttgaacgtggattgcgacatgtatgccaatgatgcagatgtagtccgacaagcaatgtgtatacttctgcaagaatcattaaatatgaaacattgtgcttttgttcaattccgtcaagaattctatgattcaagcaccgagctaatagtcgtcctacaatcacatttgggacgaggaatcgcgggaatccaaggaccgatatatataggatcaggatgcgtccacacgagaagagttatgtatggtttatctccagacgatttcgaagttgatggaagtctttcttcagttgctacaagggagtttttggttaaggatagtttagcgagaagatttggtaattctaaagagatgatgaaatcagtggttgatgcaatacaaagaaatccaaatccacaaaatatacttacaaactccatagaagcggctcgagaagtgggacattgtcagtacgagtaccaaaccagctggggaaacaccatcggctggttatatgattcagtggcggaagatttaaacacgagtatcggaatacattcgagaggttggactagctcatacatttctccggatacacctgcatttcttggatctatgccggcaggagtacccgaggcgttactccagcagcgtcgatgggcgacaggatggatcgaaatccttttcaacaagcaaagtccgttgcgaggattgtttagcaagaaaataagattccgacaacgattagcttatctttgcattatcacctgtctaaggtcaatccctgagcttatttattgtctccttcctgcttattgcctactccacaactctaccttattccccaagggactttatttaggcataactgtcacacttgttgggatacattgtctctatactctatgggaatttatgagccttggttattccgtacaatcgtggctagtctcccaatcagtttggagaatagtagccactagtagttggttatttagcatctttgatatcacactcaagcttcttggcatctcggaaacggtgttcataatcactaaaaagactgtggctgggaccaagtcagcattagggtctggaccctctcaaggagaagacgttggtccaaactcagacttgtttaaatttgaatttgatggctcactttgtttcttgcctggcacatttattgtgttggtgaatatagccgctctagctgttttttctgtgggtctacaacggtcgagttacagccatgaaggaggtggttcgggtctggcagaggcttgcggatgtgttttggtaatgatgttgttccttccatttctaatgggtttgtttaagaaaggaaaatatggaaccccattgtctactctctctatagctggctttttagcagttttatttgttgttttctctgtttga

SEQ ID NO: 70895 - protein, 757 aa, Arabidopsis thaliana
  peptide (1)..(757): Ceres Seq. ID no. 3024093
MADSSFSLPPLCERISYTNYFLRAVYLTVLGLFFSLLLHRIRHTSEYDNVWLVAFFCESCFFLVCLLITCLKWSPADTKPFPDRLDERVHDLPSVDMFVPTADPVREPPIMVVDTVLSLLAVNYPANKLACYVSDDGCSPLTYFSLKEASKFAKIWVPFCKKYNTRVRAPSRYFLKPISVATEDYEFNRDWEKTKREYEKLRRKVEDATGDSHMLDVEDDFEAFSNTKPNDHSTLVKVVWENKGGVGDEKEIPHIIYISREKRPNYVHNQKCGAMNFLARVSGLMTNAPYILNVDCDMYANDADVVRQAMCILLQESLNMKHCAFVQFRQEFYDSSTELIVVLQSHLGRGIAGIQGPIYIGSGCVHTRRVMYGLSPDDFEVDGSLSSVATREFLVKDSLARRFGNSKEMMKSVVDAIQRNPNPQNILTNSIEAAREVGHCQYEYQTSWGNTIGWLYDSVAEDLNTSIGIHSRGWTSSYISPDTPAFLGSMPAGVPEALLQQRRWATGWIEILFNKQSPLRGLFSKKIRFRQRLAYLCIITCLRSIPELIYCLLPAYCLLHNSTLFPKGLYLGITVTLVGIHCLYTLWEFMSLGYSVQSWLVSQSVWRIVATSSWLFSIFDITLKLLGISETVFIITKKTVAGTKSALGSGPSQGEDVGPNSDLFKFEFDGSLCFLPGTFIVLVNIAALAVFSVGLQRSSYSHEGGGSGLAEACGCVLVMMLFLPFLMGLFKKGKYGTPLSTLSIAGFLAVLFVVFSV

SEQ ID NO: 70896 - protein, 661 aa, Arabidopsis thaliana
  peptide (1)..(661): Ceres Seq. ID no. 3024094
MFVPTADPVREPPIMVVDTVLSLLAVNYPANKLACYVSDDGCSPLTYFSLKEASKFAKIWVPFCKKYNTRVRAPSRYFLKPISVATEDYEFNRDWEKTKREYEKLRRKVEDATGDSHMLDVEDDFEAFSNTKPNDHSTLVKVVWENKGGVGDEKEIPHIIYISREKRPNYVHNQKCGAMNFLARVSGLMTNAPYILNVDCDMYANDADVVRQAMCILLQESLNMKHCAFVQFRQEFYDSSTELIVVLQSHLGRGIAGIQGPIYIGSGCVHTRRVMYGLSPDDFEVDGSLSSVATREFLVKDSLARRFGNSKEMMKSVVDAIQRNPNPQNILTNSIEAAREVGHCQYEYQTSWGNTIGWLYDSVAEDLNTSIGIHSRGWTSSYISPDTPAFLGSMPAGVPEALLQQRRWATGWIEILFNKQSPLRGLFSKKIRFRQRLAYLCIITCLRSIPELIYCLLPAYCLLHNSTLFPKGLYLGITVTLVGIHCLYTLWEFMSLGYSVQSWLVSQSVWRIVATSSWLFSIFDITLKLLGISETVFIITKKTVAGTKSALGSGPSQGEDVGPNSDLFKFEFDGSLCFLPGTFIVLVNIAALAVFSVGLQRSSYSHEGGGSGLAEACGCVLVMMLFLPFLMGLFKKGKYGTPLSTLSIAGFLAVLFVVFSV

SEQ ID NO: 70897 - protein, 647 aa, Arabidopsis thaliana
  peptide (1)..(647): Ceres Seq. ID no. 3024095
MVVDTVLSLLAVNYPANKLACYVSDDGCSPLTYFSLKEASKFAKIWVPFCKKYNTRVRAPSRYFLKPISVATEDYEFNRDWEKTKREYEKLRRKVEDATGDSHMLDVEDDFEAFSNTKPNDHSTLVKVVWENKGGVGDEKEIPHIIYISREKRPNYVHNQKCGAMNFLARVSGLMTNAPYILNVDCDMYANDADVVRQAMCILLQESLNMKHCAFVQFRQEFYDSSTELIVVLQSHLGRGIAGIQGPIYIGSGCVHTRRVMYGLSPDDFEVDGSLSSVATREFLVKDSLARRFGNSKEMMKSVVDAIQRNPNPQNILTNSIEAAREVGHCQYEYQTSWGNTIGWLYDSVAEDLNTSIGIHSRGWTSSYISPDTPAFLGSMPAGVPEALLQQRRWATGWIEILFNKQSPLRGLFSKKIRFRQRLAYLCIITCLRSIPELIYCLLPAYCLLHNSTLFPKGLYLGITVTLVGIHCLYTLWEFMSLGYSVQSWLVSQSVWRIVATSSWLFSIFDITLKLLGISETVFIITKKTVAGTKSALGSGPSQGEDVGPNSDLFKFEFDGSLCFLPGTFIVLVNIAALAVFSVGLQRSSYSHEGGGSGLAEACGCVLVMMLFLPFLMGLFKKGKYGTPLSTLSIAGFLAVLFVVFSV

SEQ ID NO: 70898 - DNA, 948 bp, Arabidopsis thaliana
  misc_feature (1)..(948): Ceres Seq. ID no. 3024189
  misc_feature (1)..(948): Ortholog of  Ceres SEQ ID NO 12474685 as cited in SEQ ID NO 88
  misc_feature (1)..(948): Ortholog of  Ceres SEQ ID NO 13638574 as cited in SEQ ID NO 51223
  misc_feature (1)..(948): Ortholog of  Ceres SEQ ID NO 14311531 as cited in SEQ ID NO 51466
  misc_feature (1)..(948): Ortholog of  Ceres SEQ ID NO 15170465 as cited in SEQ ID NO 52798
  misc_feature (1)..(948): Ortholog of  Ceres SEQ ID NO 15177112 as cited in SEQ ID NO 55956
  misc_feature (1)..(948): Ortholog of  Ceres SEQ ID NO 12610790 as cited in SEQ ID NO 56123
  misc_feature (1)..(948): Ortholog of  Ceres SEQ ID NO 14315399 as cited in SEQ ID NO 57112
  misc_feature (1)..(948): Ortholog of  Ceres SEQ ID NO 13655636 as cited in SEQ ID NO 63519
  misc_feature (1)..(948): Ortholog of  Ceres SEQ ID NO 13655896 as cited in SEQ ID NO 64970
atggcaaatgcgatcacatttttcaagctcaacaccggcgctaagttcccttcggtgggtcttggaacatggcaagcttctcctggcctcgtcggtgatgcagtcgccgcggctgttaagattggctatcgtcacattgattgtgctcagatctatggcaacgaaaaagagattggggcagttctgaaaaaattgtttgaagacagagtagtgaaacgcgaggatttgttcatcacctccaaactctggtgtactgatcatgaccctcaagatgtcccggaggcattgaacagaactctcaaggatctgcagcttgaatacgtcgatctttatctgatacactggcctgcacggataaagaaaggttctgttggaataaagccagagaaccttttgcctgtagatattcctagtacatggaaagcgatggaagcactatacgattcgggcaaggcacgagccataggtgtaagcaatttctctaccaagaaactagctgatctcttggagttagctcgtgttcctcctgctgttaatcaggtcgaatgtcatccttcttggcgacaaactaagctacaagaattctgcaaatccaaaggggttcacctaagtgcatactcgccattaggttctccagggacaacatggctgaagagcgatgttttgaagaacccgatactgaatatggttgcggaaaaactcggaaagagtcctgcgcaagtcgcccttcgttggggactccaaatgggtcacagtgtgcttcccaagagtacaaatgaaggaaggatcaaagagaactttaatgttttcgactggtcaatacccgattacatgttcgctaagtttgctgagattgaacaggctaggttagtcactggttccttccttgttcatgagacactaagcccttacaagtctattgaagaattatgggatggcgagatatga

SEQ ID NO: 70899 - protein, 315 aa, Arabidopsis thaliana
  peptide (1)..(315): Ceres Seq. ID no. 3024190
MANAITFFKLNTGAKFPSVGLGTWQASPGLVGDAVAAAVKIGYRHIDCAQIYGNEKEIGAVLKKLFEDRVVKREDLFITSKLWCTDHDPQDVPEALNRTLKDLQLEYVDLYLIHWPARIKKGSVGIKPENLLPVDIPSTWKAMEALYDSGKARAIGVSNFSTKKLADLLELARVPPAVNQVECHPSWRQTKLQEFCKSKGVHLSAYSPLGSPGTTWLKSDVLKNPILNMVAEKLGKSPAQVALRWGLQMGHSVLPKSTNEGRIKENFNVFDWSIPDYMFAKFAEIEQARLVTGSFLVHETLSPYKSIEELWDGEI

SEQ ID NO: 70900 - protein, 173 aa, Arabidopsis thaliana
  peptide (1)..(173): Ceres Seq. ID no. 3024191
MEALYDSGKARAIGVSNFSTKKLADLLELARVPPAVNQVECHPSWRQTKLQEFCKSKGVHLSAYSPLGSPGTTWLKSDVLKNPILNMVAEKLGKSPAQVALRWGLQMGHSVLPKSTNEGRIKENFNVFDWSIPDYMFAKFAEIEQARLVTGSFLVHETLSPYKSIEELWDGEI

SEQ ID NO: 70901 - DNA, 1116 bp, Arabidopsis thaliana
  misc_feature (1)..(1116): Ceres Seq. ID no. 3024373
  misc_feature (1)..(1116): Ortholog of  Ceres SEQ ID NO 12616332 as cited in SEQ ID NO 63449
  misc_feature (1)..(1116): Ortholog of  Ceres SEQ ID NO 13597498 as cited in SEQ ID NO 64648
atgccactattctcccaccgcttcaccaccgcatcttcttcttccccggcgtctccttcttactacaataaaccctcttcgaaaacccataaaccaaactcttcttcttcttcttatacttcgtctcgtattcatgtagctatcatattcttctcccttgtctctgttttcatcggagtcgccggaactatcttcgcactctcctccaccggtcctgcttctgtttatcgatgcggcggatctaaagacacttctcgggttgtgtctgcttcaagaaagctcggaggagatggtggtaataatggtgttgttgttgaaagacgaaagcttttagggtttgttgggatccagactggttttgattccggtgatcgtagaactgctttgagaagtacttggttcccttctgatcctgattctcttctaaggttggaacaagcgactggattagcttttagattcgtcattggaaagtcaaaggatgccaaaaagatggctgagcttgagaaggagataaaagagtacagagattttgtgcttcttgataccgaggaagaatatatacgacttccatataaaacgttggctttcttcaaagcagcttttaaactctttgaagctgattattatgtcaaagccgacgatgacatttatttgagaccagatcgacttgcgacgcttcttgccaatgaaagacttcattcacagacatacattggctgcatgaagaaaggaccagttataactgaccctaaactaaaatggtacgagaaacaaggcaatttgattggaaatgaatactttttacatgcttatggaccgatatacgttctttcagccgagatagtagcttcacttgcagcagctaggaatggcagtctgagaatgtttaataatgaagatgtaactatcggatcttggatgcttgcaatggatgtacatcacgaagacaaccgcgctttatgcgatccgcattgttccccaaagtccatagcagtttgggacattcccaaatgctcagggctttgtgacccggagagtcggttaaaagagcttcataagacggatatgtgctccaagagtccgacattacctcccgatgacatcgatcagtag

SEQ ID NO: 70902 - protein, 371 aa, Arabidopsis thaliana
  peptide (1)..(371): Ceres Seq. ID no. 3024374
MPLFSHRFTTASSSSPASPSYYNKPSSKTHKPNSSSSSYTSSRIHVAIIFFSLVSVFIGVAGTIFALSSTGPASVYRCGGSKDTSRVVSASRKLGGDGGNNGVVVERRKLLGFVGIQTGFDSGDRRTALRSTWFPSDPDSLLRLEQATGLAFRFVIGKSKDAKKMAELEKEIKEYRDFVLLDTEEEYIRLPYKTLAFFKAAFKLFEADYYVKADDDIYLRPDRLATLLANERLHSQTYIGCMKKGPVITDPKLKWYEKQGNLIGNEYFLHAYGPIYVLSAEIVASLAAARNGSLRMFNNEDVTIGSWMLAMDVHHEDNRALCDPHCSPKSIAVWDIPKCSGLCDPESRLKELHKTDMCSKSPTLPPDDIDQ

SEQ ID NO: 70903 - protein, 207 aa, Arabidopsis thaliana
  peptide (1)..(207): Ceres Seq. ID no. 3024375
MAELEKEIKEYRDFVLLDTEEEYIRLPYKTLAFFKAAFKLFEADYYVKADDDIYLRPDRLATLLANERLHSQTYIGCMKKGPVITDPKLKWYEKQGNLIGNEYFLHAYGPIYVLSAEIVASLAAARNGSLRMFNNEDVTIGSWMLAMDVHHEDNRALCDPHCSPKSIAVWDIPKCSGLCDPESRLKELHKTDMCSKSPTLPPDDIDQ

SEQ ID NO: 70904 - DNA, 1116 bp, Arabidopsis thaliana
  misc_feature (1)..(1116): Ceres Seq. ID no. 3024541
  misc_feature (1)..(1116): Ortholog of  Ceres SEQ ID NO 15177870 as cited in SEQ ID NO 52373
  misc_feature (1)..(1116): Ortholog of  Ceres SEQ ID NO 13582380 as cited in SEQ ID NO 56782
atgcttctatacttgctcatcacttgtctctctttcttcttcttttccaaatctttatcctttcctcaatgggcatctaaaaccaaaaatttgctctccttctacttctccaagtatttgtttacaaacagtctacaccagatcacacccgatctagcctctccggtgctcggaaaaatgtcaattcttgacctccctgaccttccactcgactgcattcttgaacttcttccaccctctgaactatgtaccatggctagggtctgtagctcgttaagagagagatgtgtaagtgatcatttatgggagaaacacttgaagactaaatggggaaaaatccttggaccttctgctcacaaagaatggcaatgctatctatcttctccatatcatctcgattctcctcatcacaaaactagtcatcttggtttggccaaaatcatatctcttatgcgatcgctttcatccatttttcgagatgatgatcataggaggagatatccatcttcaatccctcttgactctaccatgaacttctacctatccctcgaaacaggtcgcttttggtttccagctcaagtttacaaccgtgagaatggacatgtagggttcatgttgtcatgctatgatgctgagctcagctatgacactgacactaatacttttcaagctaggtatccaccacatggtaaaagagcaattgcggttgaaaaagacgtgacatgggagaggataagagcagctcccgttgatgcatcaccccataatctctatgtgtcagattctctaaatgagttaaaacccggagaccacatagagatccagtggagaaggaacaaagagtttccttatggatggtggtatagtgttgttggacacatggaatcttgtgatggcaatctaaaccattgtcaatgccataatagcgagatgatggtgttggaatttaaccagtacacagtcggatcaaggtggagaaaaacgatgattaacaggagagatcatagagagaaaggtaacgaggaagacgggttctatggaggaattcgaaaaataaattgtaaagaagatattgaaatgtggaagcgtctttggccatcctccatcttggagtag

SEQ ID NO: 70905 - protein, 371 aa, Arabidopsis thaliana
  peptide (1)..(371): Ceres Seq. ID no. 3024542
MLLYLLITCLSFFFFSKSLSFPQWASKTKNLLSFYFSKYLFTNSLHQITPDLASPVLGKMSILDLPDLPLDCILELLPPSELCTMARVCSSLRERCVSDHLWEKHLKTKWGKILGPSAHKEWQCYLSSPYHLDSPHHKTSHLGLAKIISLMRSLSSIFRDDDHRRRYPSSIPLDSTMNFYLSLETGRFWFPAQVYNRENGHVGFMLSCYDAELSYDTDTNTFQARYPPHGKRAIAVEKDVTWERIRAAPVDASPHNLYVSDSLNELKPGDHIEIQWRRNKEFPYGWWYSVVGHMESCDGNLNHCQCHNSEMMVLEFNQYTVGSRWRKTMINRRDHREKGNEEDGFYGGIRKINCKEDIEMWKRLWPSSILE

SEQ ID NO: 70906 - protein, 312 aa, Arabidopsis thaliana
  peptide (1)..(312): Ceres Seq. ID no. 3024543
MSILDLPDLPLDCILELLPPSELCTMARVCSSLRERCVSDHLWEKHLKTKWGKILGPSAHKEWQCYLSSPYHLDSPHHKTSHLGLAKIISLMRSLSSIFRDDDHRRRYPSSIPLDSTMNFYLSLETGRFWFPAQVYNRENGHVGFMLSCYDAELSYDTDTNTFQARYPPHGKRAIAVEKDVTWERIRAAPVDASPHNLYVSDSLNELKPGDHIEIQWRRNKEFPYGWWYSVVGHMESCDGNLNHCQCHNSEMMVLEFNQYTVGSRWRKTMINRRDHREKGNEEDGFYGGIRKINCKEDIEMWKRLWPSSILE

SEQ ID NO: 70907 - protein, 287 aa, Arabidopsis thaliana
  peptide (1)..(287): Ceres Seq. ID no. 3024544
MARVCSSLRERCVSDHLWEKHLKTKWGKILGPSAHKEWQCYLSSPYHLDSPHHKTSHLGLAKIISLMRSLSSIFRDDDHRRRYPSSIPLDSTMNFYLSLETGRFWFPAQVYNRENGHVGFMLSCYDAELSYDTDTNTFQARYPPHGKRAIAVEKDVTWERIRAAPVDASPHNLYVSDSLNELKPGDHIEIQWRRNKEFPYGWWYSVVGHMESCDGNLNHCQCHNSEMMVLEFNQYTVGSRWRKTMINRRDHREKGNEEDGFYGGIRKINCKEDIEMWKRLWPSSILE

SEQ ID NO: 70908 - DNA, 711 bp, Arabidopsis thaliana
  misc_feature (1)..(711): Ceres Seq. ID no. 3024551
  misc_feature (1)..(711): Ortholog of  Ceres SEQ ID NO 15178717 as cited in SEQ ID NO 54457
  misc_feature (1)..(711): Ortholog of  Ceres SEQ ID NO 13584012 as cited in SEQ ID NO 63469
atgggtttggtctgctctaaaaatctaattacttttcacagttccgacggaaccgccgcagctgtagtcatcaacaagcgcaattctctaacaaattatcagttgacgaagtttacgtttggttctcatgttcttgagctctactgtctccaatcagcttcaactgattttgatttaacagggcagctggtttggcctggtgcgatgcttatgaatggttatctctcagaaaatgctgacattctccagggatgttcagttttggagttgggatctggcgttggtataactggagtcctatgtagcaaattttgccgtaaaatactgaagaaaaacattgaccttcatggacattcaagtggtcccaaaccctcagctgaattagaggctgcaaagcttgaatggggaaatagtgatcagcttggtcaaattttaaagaaacacaatgatggctttgatcttattcttggagctgagatctatatccttattgttgagcagcttctgcggatcaggggacaaggaaactgcaaattcatactagcatacgtatcacgggctagacagatggattctgcaatcttgagagaaggcgctcagcacgggatgctgatgaatgaagtttctgggactcggtgtaccgtaggaaacttggaaggggtcatatatgaaatcacacttcaaaagaagagaggaattgtgttcgagtaa

SEQ ID NO: 70909 - protein, 236 aa, Arabidopsis thaliana
  peptide (1)..(236): Ceres Seq. ID no. 3024552
MGLVCSKNLITFHSSDGTAAAVVINKRNSLTNYQLTKFTFGSHVLELYCLQSASTDFDLTGQLVWPGAMLMNGYLSENADILQGCSVLELGSGVGITGVLCSKFCRKILKKNIDLHGHSSGPKPSAELEAAKLEWGNSDQLGQILKKHNDGFDLILGAEIYILIVEQLLRIRGQGNCKFILAYVSRARQMDSAILREGAQHGMLMNEVSGTRCTVGNLEGVIYEITLQKKRGIVFE

SEQ ID NO: 70910 - protein, 168 aa, Arabidopsis thaliana
  peptide (1)..(168): Ceres Seq. ID no. 3024553
MLMNGYLSENADILQGCSVLELGSGVGITGVLCSKFCRKILKKNIDLHGHSSGPKPSAELEAAKLEWGNSDQLGQILKKHNDGFDLILGAEIYILIVEQLLRIRGQGNCKFILAYVSRARQMDSAILREGAQHGMLMNEVSGTRCTVGNLEGVIYEITLQKKRGIVFE

SEQ ID NO: 70911 - protein, 166 aa, Arabidopsis thaliana
  peptide (1)..(166): Ceres Seq. ID no. 3024554
MNGYLSENADILQGCSVLELGSGVGITGVLCSKFCRKILKKNIDLHGHSSGPKPSAELEAAKLEWGNSDQLGQILKKHNDGFDLILGAEIYILIVEQLLRIRGQGNCKFILAYVSRARQMDSAILREGAQHGMLMNEVSGTRCTVGNLEGVIYEITLQKKRGIVFE

SEQ ID NO: 70912 - DNA, 756 bp, Arabidopsis thaliana
  misc_feature (1)..(756): Ceres Seq. ID no. 3024708
  misc_feature (1)..(756): Ortholog of  Ceres SEQ ID NO 14313959 as cited in SEQ ID NO 57842
atggctgaacaaaagaagtacctattgtttctagcgacaccggactcggagtttgcgaagaagacatatggaggataccataatgtgtttgtttcactgcttggcgatgaaggagagcaatgggactcttttagagtcgtggacggcgagtttccagaagagaaggatcttgagaaatacgaaggatttgtaatcagtggtagctctcatgatgcctttcaagacactgattggatcttaaagctctgtgatatcatcaagaaactcgatgacatgaacaagaaagtcctcggtatttgctttggccaccagctaatagctagagcgaagggaggcaaagtagcgagagcaaggaaaggaccagagctttgccttggaaacataaccatcgtgaaagaggcagtgatgccggaaaattacttcggcgaagaagttccagcgaatctgaggatcataaaatgtcatcaggatgaagttttggagcttccggaaaatgcaaaactgttagcatattcaagcatgtacgaggtagagatgtattcaatcaaagataacttcctttgcattcagggacatcctgagtataaccgtgacatcttgttcgatatcattgatcgtgttcttgccggaggccacattaagcaaaactttgccgaaacgtcaaaggcaacaatggaaaagaatgaagcagacaggaagttttggcagaaaatttgcaaaaacttcctcaaacgtcaaccctccttattagtttga

SEQ ID NO: 70913 - protein, 251 aa, Arabidopsis thaliana
  peptide (1)..(251): Ceres Seq. ID no. 3024709
MAEQKKYLLFLATPDSEFAKKTYGGYHNVFVSLLGDEGEQWDSFRVVDGEFPEEKDLEKYEGFVISGSSHDAFQDTDWILKLCDIIKKLDDMNKKVLGICFGHQLIARAKGGKVARARKGPELCLGNITIVKEAVMPENYFGEEVPANLRIIKCHQDEVLELPENAKLLAYSSMYEVEMYSIKDNFLCIQGHPEYNRDILFDIIDRVLAGGHIKQNFAETSKATMEKNEADRKFWQKICKNFLKRQPSLLV

SEQ ID NO: 70914 - protein, 160 aa, Arabidopsis thaliana
  peptide (1)..(160): Ceres Seq. ID no. 3024710
MNKKVLGICFGHQLIARAKGGKVARARKGPELCLGNITIVKEAVMPENYFGEEVPANLRIIKCHQDEVLELPENAKLLAYSSMYEVEMYSIKDNFLCIQGHPEYNRDILFDIIDRVLAGGHIKQNFAETSKATMEKNEADRKFWQKICKNFLKRQPSLLV

SEQ ID NO: 70915 - DNA, 648 bp, Arabidopsis thaliana
  misc_feature (1)..(648): Ceres Seq. ID no. 3025082
  misc_feature (1)..(648): Ortholog of  Ceres SEQ ID NO 12609339 as cited in SEQ ID NO 51780
atggcgaagttgaagctctactcttactggagaagctcatgtgctcatcgcgtccgtatcgccctcactttaaaagggcttgattatgaatatataccggttaatttgctcaaaggggatcaatccgattcagatttcaagaagatcaatccaatgggcactgtaccagcgcttgttgatggtgatgttgtgattaatgactctttcgcaataataatgtacctggatgataagtatccggagccaccgctgttaccaagtgactaccataaacgggcggtaaattaccaggcgacgagtattgtcatgtctggtatacagcctcatcaaaatatggctctttttaggtatctcgaggacaagataaatgctgaggagaaaactgcttggattactaatgctatcacaaaaggattcacagctctcgagaaactgttggtgagttgcgctggaaaatacgcgactggtgatgaagtttacttggctgatcttttcctagcaccacagatccacgcagcattcaacagattccatattaacatggaaccattcccgactcttgcaaggttttacgagtcatacaacgaactgcctgcatttcaaaatgcagtcccggagaagcaaccagatactccttccaccatctga

SEQ ID NO: 70916 - protein, 215 aa, Arabidopsis thaliana
  peptide (1)..(215): Ceres Seq. ID no. 3025083
MAKLKLYSYWRSSCAHRVRIALTLKGLDYEYIPVNLLKGDQSDSDFKKINPMGTVPALVDGDVVINDSFAIIMYLDDKYPEPPLLPSDYHKRAVNYQATSIVMSGIQPHQNMALFRYLEDKINAEEKTAWITNAITKGFTALEKLLVSCAGKYATGDEVYLADLFLAPQIHAAFNRFHINMEPFPTLARFYESYNELPAFQNAVPEKQPDTPSTI

SEQ ID NO: 70917 - protein, 164 aa, Arabidopsis thaliana; identical to SEQ ID NO: 70468
  peptide (1)..(164): Ceres Seq. ID no. 3025084

SEQ ID NO: 70918 - protein, 143 aa, Arabidopsis thaliana; identical to SEQ ID NO: 70469
  peptide (1)..(143): Ceres Seq. ID no. 3025085

SEQ ID NO: 70919 - DNA, 924 bp, Arabidopsis thaliana
  misc_feature (1)..(924): Ceres Seq. ID no. 3025181
  misc_feature (1)..(924): Ortholog of  Ceres SEQ ID NO 13596465 as cited in SEQ ID NO 62133
atggaccgagaagcagtaaaggatcaatacgacatccttatcgacctggaaggatcagtagggactcaaagcgacattgttctgaggtggactcagaccagattatctctttacttcaggcttcttcaacggatgagcttaacgctgtcttctccaggatcgtcaccaccatcctcgccgacagcaccccgagctgatgaagtgaataaagaggtgaattcatgggttgaagagcagacaaatggactcatcactgatcttcttccaccaaactctgcttctcctttgactgatctcatatttgctaatgccttgtttttcaacggaagatgggatagtcaattcaatccatcgctaacaaaagaatccgactttcaccttcttgatggaaccaaagtacgtgtgcccttcatgaccggtgcccacgaagacagtcttgatgtttacgaagctttcaaagtcctcaatctaccgtatagagaaggacgcgaagacagtcgtggtttctctatgcaaatctatctccctgatgagaaagatgggttgccttcaatgctggagagcttagcttctactcgtggattcttgaaggacaacaaggttcttcctagccagaaggcgggtgtcaaggaactcaagattccaaggtttaaatttgcttttgatttcgaagcctcgaaagctctcaagggtttgggtttgaaggtgccattgtctacgatcatccacaagtcttgcatcgaggtcgatgaagtgggatcgaaagctgcagctgctgccgcattaagatcatgtggaggttgttattttccgccaaagaagtatgacttcgtggctgatcatccttttctcttcatcgtcaaagagtacataagcggactagttttgtttcttggtcatgtcatggatccttctaagcactaa

SEQ ID NO: 70920 - protein, 307 aa, Arabidopsis thaliana
  peptide (1)..(307): Ceres Seq. ID no. 3025182
MDREAVKDQYDILIDLEGSVGTQSDIVLRWTQTRLSLYFRLLQRMSLTLSSPGSSPPSSPTAPRADEVNKEVNSWVEEQTNGLITDLLPPNSASPLTDLIFANALFFNGRWDSQFNPSLTKESDFHLLDGTKVRVPFMTGAHEDSLDVYEAFKVLNLPYREGREDSRGFSMQIYLPDEKDGLPSMLESLASTRGFLKDNKVLPSQKAGVKELKIPRFKFAFDFEASKALKGLGLKVPLSTIIHKSCIEVDEVGSKAAAAAALRSCGGCYFPPKKYDFVADHPFLFIVKEYISGLVLFLGHVMDPSKH

SEQ ID NO: 70921 - protein, 263 aa, Arabidopsis thaliana
  peptide (1)..(263): Ceres Seq. ID no. 3025183
MSLTLSSPGSSPPSSPTAPRADEVNKEVNSWVEEQTNGLITDLLPPNSASPLTDLIFANALFFNGRWDSQFNPSLTKESDFHLLDGTKVRVPFMTGAHEDSLDVYEAFKVLNLPYREGREDSRGFSMQIYLPDEKDGLPSMLESLASTRGFLKDNKVLPSQKAGVKELKIPRFKFAFDFEASKALKGLGLKVPLSTIIHKSCIEVDEVGSKAAAAAALRSCGGCYFPPKKYDFVADHPFLFIVKEYISGLVLFLGHVMDPSKH

SEQ ID NO: 70922 - protein, 170 aa, Arabidopsis thaliana
  peptide (1)..(170): Ceres Seq. ID no. 3025184
MTGAHEDSLDVYEAFKVLNLPYREGREDSRGFSMQIYLPDEKDGLPSMLESLASTRGFLKDNKVLPSQKAGVKELKIPRFKFAFDFEASKALKGLGLKVPLSTIIHKSCIEVDEVGSKAAAAAALRSCGGCYFPPKKYDFVADHPFLFIVKEYISGLVLFLGHVMDPSKH

SEQ ID NO: 70923 - DNA, 2643 bp, Arabidopsis thaliana
  misc_feature (1)..(2643): Ceres Seq. ID no. 3025301
  misc_feature (1)..(2643): Ortholog of  Ceres SEQ ID NO 13654989 as cited in SEQ ID NO 63117
  misc_feature (1)..(2643): Ortholog of  Ceres SEQ ID NO 13584744 as cited in SEQ ID NO 69137
atggaaggtcgtcgtcaacgtttactggtgttcatctttggggctttggccattacacatcttgttcaagctcagccgcctgatcaacgaggattcatcagtttggattgcggtttacccgttaatgagtctccttataccgacccacgaaccggattaacattctcatctgatgctgattttattttaagtggtttacgtggtgaagctggggatgataacacatatatctacaggcagtacaaggatttgagatattttcccgatggaatacgaaactgctataatctgaaagtagagcaaggcatcaactatttgataagagcagggttcggatatggaaattatgatggtcttaatgtatatcccaaatttgatttacatgttgggcctaacatgtggattgcggttgatttggaattcggaaaagatcgtgagatcatttacatgacaacgtcgaacttattgcagatttgtcttgtcaaaacaggatcaactataccaatgatatcaaccttggaactacggccactaagaaatgattcatatttgactcaattcggtcccttagacctcatctaccggcgggcctatagtagcaattctaccggttttatacggtatcctgatgatatttttgatcgcaaatgggaccgatataatgaatttgaaacggatgtgaacaccaccctcaacgtgagatcctcgagtccctttcaagtaccagaagctgtaagtaggatgggaatcacgcccgaaaatgccagcttgccattgagattttacgtgtctctagatgacgacagtgacaaggttaacgtgtactttcactttgccgaaatccaagctttgaggggcaatgagactagagaattcgacattgaattggaagaagatattattcagtcagcatatagtcctacgatgttacaatcagataccaaatataacctatcacctcacaaatgtagctccgggttgtgctacttgaaactcgttagaactccaaggtcaactcttccaccgctgattagtgctattgaggctttcaaggttgtggactttccatacgctgaaacaaatccaaatgacgtcgctgctatgaaggatatcgaagcattttatggattgaagatgattagttggcaaggagatccttgtgtccctgaactattaaagtgggaagatctaaaatgcagctacacaaataagtctactcctccaagaattatttctttagatttgtcatcacgagggttaaaaggggtcattgcgcctgccttccaaaatttgaccgagcttcgaaaactagacttgtcaaataatagttttactggaggagtgcccgagtttctagccagcatgaagtcattatcgatcataaatttaaattggaatgaccttacgggtcctcttcctaaattgcttcttgatagagaaaagaatgggcttaagctaacgatccaaggaaacccaaagttgtgtaacgatgcgtcatgcaaaaataataacaatcaaacgtacattgtaccagttgttgcgtcagtagcttctgtgctcatcattatagccgtactgattctcattcttgttttcaaaaagagaaggccaacgcaagttgattcattacctacagtgcaacatgggttaccaaatagaccgtctatatttactcaaacgaaaaggttcacttattcagaggtagaagcattaacagataattttgaaagagttcttggagaaggagggtttggggtagtgtatcatggtattttaaatggtacgcaaccaatagctgttaaactactctctcaatcatcagtacaaggctataaggaattcaaagctgaggttgaacttcttttgagagtgcaccacgtcaatttggttagtttggttggatattgtgatgaagaaagcaacttggccctgctttatgagtatgcaccgaacggagacttaaaacaacatctatcaggagaacggggtggctctccattgaagtggtcaagtagactaaaaattgtcgtcgaaactgcgcaaggattagaatacttgcatacgggttgcaaacctccaatggtacatcgtgatgtaaaaacaacaaatatacttttagacgaacacttccaagcaaaactcgccgattttggcctttcaagatcatttccagttggaggtgaaactcatgtttcaacagctgttgctggaactcctggatatttggatcccgaatattatcgaacaaataggttgaacgaaaagagtgatgtatatagctttgggattgtattattggagatcatcacaagtcgacctgtgattcagcaaacccgagagaagccgcacatagcagcatgggtgggatacatgcttactaagggagatattgagaacgttgtggatccaagactcaatagagattatgagcctacttctgtttggaaggctcttgagatagcaatgtcttgcgtgaatccttcttcggagaaaagaccaaccatgtctcaagttactaatgaactaaagcaatgtctaacattagaaaactcaaagcgaggagtgagagaagacatgggatcaagaagttctgttgaaatgagcacaagctttacaaccgaaattaacccaaaagcacgataa

SEQ ID NO: 70924 - protein, 880 aa, Arabidopsis thaliana
  peptide (1)..(880): Ceres Seq. ID no. 3025302
MEGRRQRLLVFIFGALAITHLVQAQPPDQRGFISLDCGLPVNESPYTDPRTGLTFSSDADFILSGLRGEAGDDNTYIYRQYKDLRYFPDGIRNCYNLKVEQGINYLIRAGFGYGNYDGLNVYPKFDLHVGPNMWIAVDLEFGKDREIIYMTTSNLLQICLVKTGSTIPMISTLELRPLRNDSYLTQFGPLDLIYRRAYSSNSTGFIRYPDDIFDRKWDRYNEFETDVNTTLNVRSSSPFQVPEAVSRMGITPENASLPLRFYVSLDDDSDKVNVYFHFAEIQALRGNETREFDIELEEDIIQSAYSPTMLQSDTKYNLSPHKCSSGLCYLKLVRTPRSTLPPLISAIEAFKVVDFPYAETNPNDVAAMKDIEAFYGLKMISWQGDPCVPELLKWEDLKCSYTNKSTPPRIISLDLSSRGLKGVIAPAFQNLTELRKLDLSNNSFTGGVPEFLASMKSLSIINLNWNDLTGPLPKLLLDREKNGLKLTIQGNPKLCNDASCKNNNNQTYIVPVVASVASVLIIIAVLILILVFKKRRPTQVDSLPTVQHGLPNRPSIFTQTKRFTYSEVEALTDNFERVLGEGGFGVVYHGILNGTQPIAVKLLSQSSVQGYKEFKAEVELLLRVHHVNLVSLVGYCDEESNLALLYEYAPNGDLKQHLSGERGGSPLKWSSRLKIVVETAQGLEYLHTGCKPPMVHRDVKTTNILLDEHFQAKLADFGLSRSFPVGGETHVSTAVAGTPGYLDPEYYRTNRLNEKSDVYSFGIVLLEIITSRPVIQQTREKPHIAAWVGYMLTKGDIENVVDPRLNRDYEPTSVWKALEIAMSCVNPSSEKRPTMSQVTNELKQCLTLENSKRGVREDMGSRSSVEMSTSFTTEINPKAR

SEQ ID NO: 70925 - protein, 748 aa, Arabidopsis thaliana
  peptide (1)..(748): Ceres Seq. ID no. 3025303
MWIAVDLEFGKDREIIYMTTSNLLQICLVKTGSTIPMISTLELRPLRNDSYLTQFGPLDLIYRRAYSSNSTGFIRYPDDIFDRKWDRYNEFETDVNTTLNVRSSSPFQVPEAVSRMGITPENASLPLRFYVSLDDDSDKVNVYFHFAEIQALRGNETREFDIELEEDIIQSAYSPTMLQSDTKYNLSPHKCSSGLCYLKLVRTPRSTLPPLISAIEAFKVVDFPYAETNPNDVAAMKDIEAFYGLKMISWQGDPCVPELLKWEDLKCSYTNKSTPPRIISLDLSSRGLKGVIAPAFQNLTELRKLDLSNNSFTGGVPEFLASMKSLSIINLNWNDLTGPLPKLLLDREKNGLKLTIQGNPKLCNDASCKNNNNQTYIVPVVASVASVLIIIAVLILILVFKKRRPTQVDSLPTVQHGLPNRPSIFTQTKRFTYSEVEALTDNFERVLGEGGFGVVYHGILNGTQPIAVKLLSQSSVQGYKEFKAEVELLLRVHHVNLVSLVGYCDEESNLALLYEYAPNGDLKQHLSGERGGSPLKWSSRLKIVVETAQGLEYLHTGCKPPMVHRDVKTTNILLDEHFQAKLADFGLSRSFPVGGETHVSTAVAGTPGYLDPEYYRTNRLNEKSDVYSFGIVLLEIITSRPVIQQTREKPHIAAWVGYMLTKGDIENVVDPRLNRDYEPTSVWKALEIAMSCVNPSSEKRPTMSQVTNELKQCLTLENSKRGVREDMGSRSSVEMSTSFTTEINPKAR

SEQ ID NO: 70926 - protein, 731 aa, Arabidopsis thaliana
  peptide (1)..(731): Ceres Seq. ID no. 3025304
MTTSNLLQICLVKTGSTIPMISTLELRPLRNDSYLTQFGPLDLIYRRAYSSNSTGFIRYPDDIFDRKWDRYNEFETDVNTTLNVRSSSPFQVPEAVSRMGITPENASLPLRFYVSLDDDSDKVNVYFHFAEIQALRGNETREFDIELEEDIIQSAYSPTMLQSDTKYNLSPHKCSSGLCYLKLVRTPRSTLPPLISAIEAFKVVDFPYAETNPNDVAAMKDIEAFYGLKMISWQGDPCVPELLKWEDLKCSYTNKSTPPRIISLDLSSRGLKGVIAPAFQNLTELRKLDLSNNSFTGGVPEFLASMKSLSIINLNWNDLTGPLPKLLLDREKNGLKLTIQGNPKLCNDASCKNNNNQTYIVPVVASVASVLIIIAVLILILVFKKRRPTQVDSLPTVQHGLPNRPSIFTQTKRFTYSEVEALTDNFERVLGEGGFGVVYHGILNGTQPIAVKLLSQSSVQGYKEFKAEVELLLRVHHVNLVSLVGYCDEESNLALLYEYAPNGDLKQHLSGERGGSPLKWSSRLKIVVETAQGLEYLHTGCKPPMVHRDVKTTNILLDEHFQAKLADFGLSRSFPVGGETHVSTAVAGTPGYLDPEYYRTNRLNEKSDVYSFGIVLLEIITSRPVIQQTREKPHIAAWVGYMLTKGDIENVVDPRLNRDYEPTSVWKALEIAMSCVNPSSEKRPTMSQVTNELKQCLTLENSKRGVREDMGSRSSVEMSTSFTTEINPKAR

SEQ ID NO: 70927 - DNA, 867 bp, Arabidopsis thaliana
  misc_feature (1)..(867): Ceres Seq. ID no. 3025327
  misc_feature (1)..(867): Ortholog of  Ceres SEQ ID NO 13599900 as cited in SEQ ID NO 531
  misc_feature (1)..(867): Ortholog of  Ceres SEQ ID NO 14310498 as cited in SEQ ID NO 55066
  misc_feature (1)..(867): Ortholog of  Ceres SEQ ID NO 15176759 as cited in SEQ ID NO 59678
  misc_feature (1)..(867): Ortholog of  Ceres SEQ ID NO 15172875 as cited in SEQ ID NO 60423
  misc_feature (1)..(867): Ortholog of  Ceres SEQ ID NO 13596509 as cited in SEQ ID NO 62004
  misc_feature (1)..(867): Ortholog of  Ceres SEQ ID NO 13659971 as cited in SEQ ID NO 67565
  misc_feature (1)..(867): Ortholog of  Ceres SEQ ID NO 13500385 as cited in SEQ ID NO 67583
atggggatttctacagagacgcagcaaattgcggcttcagaggctgcacaaaagagatggactacaagcgatttcgatatcggaaagccacttggtagaggaaagtttggccatgtttatctagcaagagagaaacggagcgatcacattgtggctttaaaggttctttttaaggctcagcttcaacaatctcaagttgaacaccagttacgaagggaagtagagattcaatctcatcttcggcatcccaatattctgcggctctacggttacttctatgatcagaaaagagtttatttgattttggagtatgctgtaaggggtgagctttataaagagcttcagaagtgcaagtacttcagcgaacgtcgagcagcaacttatgttgcgtcattggctagagccctcatctattgccatggaaagcatgtaattcacagagatataaaacctgaaaatctgttgattggtgctcagggtgagctcaagattgcagattttggatggtcagtacacacattcaaccgtagaaggactatgtgtggcactttggattaccttccacctgagatggtggaaagcgttgaacatgatgcgagtgtcgatatatggagtctaggaattctctgctacgaatttctttatggtgttcctccttttgaggccagggagcattcagagacatacaaaaggattgttcaagtggatctcaagttccctcccaaacccattgtgtcatcatctgcaaaggacctgattagccagatgttggttaaggagtctacgcaacgtttggccttgcacaagcttcttgaacacccgtggattgtgcaaaacgcagacccatcaggcctttacagaggatga

SEQ ID NO: 70928 - protein, 288 aa, Arabidopsis thaliana
  peptide (1)..(288): Ceres Seq. ID no. 3025328
MGISTETQQIAASEAAQKRWTTSDFDIGKPLGRGKFGHVYLAREKRSDHIVALKVLFKAQLQQSQVEHQLRREVEIQSHLRHPNILRLYGYFYDQKRVYLILEYAVRGELYKELQKCKYFSERRAATYVASLARALIYCHGKHVIHRDIKPENLLIGAQGELKIADFGWSVHTFNRRRTMCGTLDYLPPEMVESVEHDASVDIWSLGILCYEFLYGVPPFEAREHSETYKRIVQVDLKFPPKPIVSSSAKDLISQMLVKESTQRLALHKLLEHPWIVQNADPSGLYRG

SEQ ID NO: 70929 - DNA, 1386 bp, Arabidopsis thaliana
  misc_feature (1)..(1386): Ceres Seq. ID no. 3025677
  misc_feature (1)..(1386): Ortholog of  Ceres SEQ ID NO 14304004 as cited in SEQ ID NO 52969
  misc_feature (1)..(1386): Ortholog of  Ceres SEQ ID NO 14313875 as cited in SEQ ID NO 54872
atggaagacgacaagaagaagaagagaaacaagaaaaagaagaataagcagaataataaacgtgttgacgacgctttagcttctggtgcaacgacctccgtcgatgaaaatcatatcggagatggtgacgttcctcaaattagcggaggtccagatgccgatgagtcgcaatcatctcatcagatcgatgtcgtcgcaactgaagatgattctggtgttgagaacaagtctcagggaagtgaggtgctgttggaagaaacaattaaacagttacgtgaggaaaatggttcctaccttcagaaagaggcattgttagaagaaaggcttgtacatttgaaaacagagaatgaagctcacgtacataatgaggcactgttagaaggaaagctcttgcatttgagaacagagaatgaagatcacatacagaatgaggcactgttagaagaaaagctcttgcatttgagaacagagaatgaagctcacatacaaaatgaggcactgttggaagaaaggctcttacattttagaactgaaaatgaagctcacaaacaaaacgaagaaaagttggaggaaagacttgtgcagtataaaaacaagaacgacatgcttcttcgtgaaatgtctagcacagaagcccagatgagacaattgctagatgaaagatctaccttcactcagaaagaggcgagtctagaaaagaaagttcaacaacttcaacacgatgaagaatccttggtggctgaggagaagtcatccagagaaatgatatctagccttaacaatgaaattgcaaggctgcgagcacaggttacggagttggaaaaatctaagagtaatcttctagagcagaatcagagtcttaaggaaactatatccaatcttcaagtccagcatgaaaaccatgatagtaacgcaaagggtgcttctgaggaagaattaaactcacagattgaagcagcttgtactctagttgaaaagcttatcactgaaaatgctgatctagttgaaaaggtgaacgaattgtgtattaagctaaaccaatcacagcatgcttcccctgagagcctagcaattgaagtagagaaatctgaatccttagaagaaatacccatacacgacgagttgattagaattgataactctagggacatggatactgcatcaataaagagaaacttttcagaaggtgaaatagaagaaacggtgccgctctctctgaacgcgaatggggaagtagacgtggaatcacaggttgcagtagctggagaagacgaaataaatgctggtgtgcctctggcggacgctccacttatcggtgctccattcaggctcgtctcgtttgtagcaagatacgtgagtggtgcagatttggcggcaaagaaatag

SEQ ID NO: 70930 - protein, 461 aa, Arabidopsis thaliana
  peptide (1)..(461): Ceres Seq. ID no. 3025678
MEDDKKKKRNKKKKNKQNNKRVDDALASGATTSVDENHIGDGDVPQISGGPDADESQSSHQIDVVATEDDSGVENKSQGSEVLLEETIKQLREENGSYLQKEALLEERLVHLKTENEAHVHNEALLEGKLLHLRTENEDHIQNEALLEEKLLHLRTENEAHIQNEALLEERLLHFRTENEAHKQNEEKLEERLVQYKNKNDMLLREMSSTEAQMRQLLDERSTFTQKEASLEKKVQQLQHDEESLVAEEKSSREMISSLNNEIARLRAQVTELEKSKSNLLEQNQSLKETISNLQVQHENHDSNAKGASEEELNSQIEAACTLVEKLITENADLVEKVNELCIKLNQSQHASPESLAIEVEKSESLEEIPIHDELIRIDNSRDMDTASIKRNFSEGEIEETVPLSLNANGEVDVESQVAVAGEDEINAGVPLADAPLIGAPFRLVSFVARYVSGADLAAKK

SEQ ID NO: 70931 - protein, 260 aa, Arabidopsis thaliana; identical to SEQ ID NO: 70476
  peptide (1)..(260): Ceres Seq. ID no. 3025679

SEQ ID NO: 70932 - protein, 255 aa, Arabidopsis thaliana; identical to SEQ ID NO: 70477
  peptide (1)..(255): Ceres Seq. ID no. 3025680

SEQ ID NO: 70933 - DNA, 987 bp, Arabidopsis thaliana
  misc_feature (1)..(987): Ceres Seq. ID no. 3025681
  misc_feature (1)..(987): Ortholog of  Ceres SEQ ID NO 14311088 as cited in SEQ ID NO 53246
atgtgcaattgctcatcttccttcttctgttctcttccagttctcaatgctcgattggtgaaacccaattcagaaacttgtcgatggaggctcaaacggattcagcattcaatcctcaattgcttttggattgattcgaaaaactctccctttctcgggcaattcagttttatagagaaaccgagagacaatttcatctgttgcttgagttcttcactatctaatgaagaagatgtagtgcatcaaactgtggggagtgatagtgtagaattacctggagaaagtgatttggttcgactagtaggtgataatgatctgagcattacgggttcgcgaggattcaagcagtcgacgacaagatcgaatcttgttgctaagcaagttgttagtatacaatcagctttgagtttaggatttatctctcagctttgggttgacactacttcttggttggttttggtggttgatgttaaaccaagcttgctatctggagaatctgagagatttctgctcacagacattgtccgggtgggtgatgttgtccttgttgataatgagactgtcttggatactgaattcaagatggttggacttgaaacactggtaggttacagagtagttacaccaggagggagaaacattggaaaggttcgaggttactcattcaacattaactcgggaatagttgaatcgcttgagctcgattccttcggggtaactattataccatcaagcctggtgagtacatacagattagatgtcgaggatataatcgaggtcttacaagatatagttgtggttcaagaagatgcagcttctagaaaacagaggttgactaagggactctgggatgctcagtttgatagtgaataccctgatgttgaagatcttgaaagttcatctgatagaagacggcgaaggagaaacaatcgatccaaccgaaaaaagagagatttggatgatgaagaatgggacatattccgctag

SEQ ID NO: 70934 - protein, 328 aa, Arabidopsis thaliana
  peptide (1)..(328): Ceres Seq. ID no. 3025682
MCNCSSSFFCSLPVLNARLVKPNSETCRWRLKRIQHSILNCFWIDSKNSPFLGQFSFIEKPRDNFICCLSSSLSNEEDVVHQTVGSDSVELPGESDLVRLVGDNDLSITGSRGFKQSTTRSNLVAKQVVSIQSALSLGFISQLWVDTTSWLVLVVDVKPSLLSGESERFLLTDIVRVGDVVLVDNETVLDTEFKMVGLETLVGYRVVTPGGRNIGKVRGYSFNINSGIVESLELDSFGVTIIPSSLVSTYRLDVEDIIEVLQDIVVVQEDAASRKQRLTKGLWDAQFDSEYPDVEDLESSSDRRRRRRNNRSNRKKRDLDDEEWDIFR

SEQ ID NO: 70935 - DNA, 870 bp, Arabidopsis thaliana
  misc_feature (1)..(870): Ceres Seq. ID no. 3026462
  misc_feature (1)..(870): Ortholog of  Ceres SEQ ID NO 14307424 as cited in SEQ ID NO 54228
  misc_feature (1)..(870): Ortholog of  Ceres SEQ ID NO 13664279 as cited in SEQ ID NO 61603
  misc_feature (1)..(870): Ortholog of  Ceres SEQ ID NO 13584254 as cited in SEQ ID NO 63465
atgaagatcagtccatggatactcatagccatcatcatgatgatcttagcatcatttccttctccgatcaaagtcgttggtgcaaaaaaagagctaccattttgcaatctggatcttctagcttgcgtccaaccttttctagttaacggtcacggaggcaaactgcctaaaggctgttttgctttgtgccaatcggattcggaagattctggcttcgaagtttctgatgttggtgaagaagagagtgatgcagaggaagtttttggtttggaacttacctcagctcctggaattgaaaccctttgcgttttccccaagaacagtgcaaaaataataaaagctggagttgagactgagctgcttgttggaatgaaaaatgatggtcaatccaatgtagatattgttgctgttaaaggcagtttacatcttccttttgatcaaaatgctgttcagaatctcactgctctgagtttcagcaacgcgtctgtgccaacttccgctcaagctaccttgccatatgcttttgctgtcagcaagttcctgcaggcgggtgcttttgattttgttggcaccatcatctatgagatagatggtaagccataccaaagcatcttttataatggaactattgaagttgttgaagatggtcctctcttcagaatggagtcagtcttccttagtggtcttttaatctttgttatcgcttttctcgccatctatatccaaaatgttttgaagcatatgaccaagaaaacaaagagagcaccaaaagttgaagttggaaccgcaactaaagatgcttcgcatgatgaatggcttgagggtacttcgtacactcaatcttcgagtaagtcaaagaagaagaagtag

SEQ ID NO: 70936 - protein, 289 aa, Arabidopsis thaliana
  peptide (1)..(289): Ceres Seq. ID no. 3026463
MKISPWILIAIIMMILASFPSPIKVVGAKKELPFCNLDLLACVQPFLVNGHGGKLPKGCFALCQSDSEDSGFEVSDVGEEESDAEEVFGLELTSAPGIETLCVFPKNSAKIIKAGVETELLVGMKNDGQSNVDIVAVKGSLHLPFDQNAVQNLTALSFSNASVPTSAQATLPYAFAVSKFLQAGAFDFVGTIIYEIDGKPYQSIFYNGTIEVVEDGPLFRMESVFLSGLLIFVIAFLAIYIQNVLKHMTKKTKRAPKVEVGTATKDASHDEWLEGTSYTQSSSKSKKKK

SEQ ID NO: 70937 - protein, 277 aa, Arabidopsis thaliana
  peptide (1)..(277): Ceres Seq. ID no. 3026464
MMILASFPSPIKVVGAKKELPFCNLDLLACVQPFLVNGHGGKLPKGCFALCQSDSEDSGFEVSDVGEEESDAEEVFGLELTSAPGIETLCVFPKNSAKIIKAGVETELLVGMKNDGQSNVDIVAVKGSLHLPFDQNAVQNLTALSFSNASVPTSAQATLPYAFAVSKFLQAGAFDFVGTIIYEIDGKPYQSIFYNGTIEVVEDGPLFRMESVFLSGLLIFVIAFLAIYIQNVLKHMTKKTKRAPKVEVGTATKDASHDEWLEGTSYTQSSSKSKKKK

SEQ ID NO: 70938 - protein, 276 aa, Arabidopsis thaliana
  peptide (1)..(276): Ceres Seq. ID no. 3026465
MILASFPSPIKVVGAKKELPFCNLDLLACVQPFLVNGHGGKLPKGCFALCQSDSEDSGFEVSDVGEEESDAEEVFGLELTSAPGIETLCVFPKNSAKIIKAGVETELLVGMKNDGQSNVDIVAVKGSLHLPFDQNAVQNLTALSFSNASVPTSAQATLPYAFAVSKFLQAGAFDFVGTIIYEIDGKPYQSIFYNGTIEVVEDGPLFRMESVFLSGLLIFVIAFLAIYIQNVLKHMTKKTKRAPKVEVGTATKDASHDEWLEGTSYTQSSSKSKKKK

SEQ ID NO: 70939 - DNA, 2427 bp, Arabidopsis thaliana
  misc_feature (1)..(2427): Ceres Seq. ID no. 3026736
  misc_feature (1)..(2427): Ortholog of  Ceres SEQ ID NO 13654989 as cited in SEQ ID NO 63117
  misc_feature (1)..(2427): Ortholog of  Ceres SEQ ID NO 13584744 as cited in SEQ ID NO 69137
atgagtggcggtggtggtccaaaggcggaagagggtcagctgtttgtggcggtggccgtgaagggtttgatcggagacaaattaggcggtgcaggaagtcgtcgtgccgtacggtgggctgtcgataatcttttaccgaaggctgataaatttgtgatgatccacgtcatccctaccattacttctattcctactccgaccggagatagattgccggtggaagaagtggaggagagtgtggtggaaatgtatgtaagagacgtgaaaaaagaatatgaaacagtctttgttccctttttgaaaatgtgcaagagtactaggagtaccaagtgtaaggtagagactctattgctagagtacgacgatcctgcaaaagcacttgtcagattgatatccaaatcaggagttaacagtttgcgatattttcggtctaggagaacaaaaggtacaggagtaccactgaccgttttaagatacgcaccagaaacatgtgaagtatacattgtgtgtaaagacagaatcactacaaaatctatggatccattaatcaaccgagagccgtgcacaagtccacacgcagccgcgactgcccatgacttcttgagagactgggcggctagtttccacactctacggtctccaacgttacccgatcctcgacagtcaactgaggcaggaacaaggaggtcagcatcggcaagagagctgagatttgaggcattaagccttacttgtaataaacccaaaacgcctcaaagtagtaaggcttctagtgcaacaactccagagatttttaggcgacggagaggatccgatattcctcagctgaattactcagattttgataaaacatgtaccaagccccaatcaaatgttgagaacatcgttagcgaacaccgagactctgatcgttcacccccggaaacatcaagaaaatccaagaaggttgagattgaagaagaggtcgaacgtttgaagaatgagctacaaagtacagtctttaaatataaacaagcttgtgaagagctcttctccacacaaaacaaggttaaaatgctttcgactgaatatttgaatgaatctaaaagagtgaacaatgctgtggagaaagaagagttgcagaggaacaccgcggcgctggagaaagagcggtacatgaaggcggtgaaagaggtcgaaaccgcgaaagcgttgctcgcaagagagttttgtcagcgacagatcgcggaggtgaatgctttaaggacttacttggagaagaagaaagtgatcgatcagcttttagggactgatcaccggtacagaaaatacacaattgaggaaattgtaacagccacagaaggattctcgccagagaaagtgattggagaaggaggatacgggaaagtttaccaatgtagccttgatagtactccggcggctgttaaagttgtccggctagatacaccggagaagaaacaagagttcttgaaagaggttgaggttctaagccaactccgacacccacacgtggttctcctcctcggagcttgtccggagaatggttgtttggtttacgagtacttggaaaatggaagcctcgaggaatatatatttcaccgaaaaaataaaccgcctttgccttggtttatccggtttagggtaattttcgaggtagcttgcggtttggccttcttacacagctctaaaccggaaccaattgttcaccgtgacttaaaaccgggaaatatcttgttaaaccggaactacgttagcaaaatcgctgacgttggcctagccaagctggttacggatgttgcacccgataatgtcacgatgtaccgaaactcggttcttgccggtacattgcattatattgatccagaataccacagaaccggaacaattagaccaaagtcggatctatatgcgttcggcataatcattcttcagttgttgacggctcgtaacccgagcgggattgtaccagcggtcgaaaacgcggtaaagaaagggacgttaaccgaaatgctagataaatcggttaccgattggcctttggcagaaaccgaggaattggctcggatcggtttaaaatgtgctgaatttcgatgccgagatagaccggatcttaaatcagaggttataccggttttgaaacggcttgtggagacggcgaattcgaaagtaaagaaagaaggaagcaatttacgtgcaccgagtcattacttctgtccaatcttacgggagataatggaggagccagagattgctgccgatggattcacgtacgagaggaaagcgatcttagcgtggcttgagaaacataacatttcaccggtgactcgacaaaagctagaccacttcaagctcacaccgaaccatacgctccggtctgcgattcgcgattggaaatcaagagtccggttttctaatgtcgttgtttaa

SEQ ID NO: 70940 - protein, 808 aa, Arabidopsis thaliana
  peptide (1)..(808): Ceres Seq. ID no. 3026737
MSGGGGPKAEEGQLFVAVAVKGLIGDKLGGAGSRRAVRWAVDNLLPKADKFVMIHVIPTITSIPTPTGDRLPVEEVEESVVEMYVRDVKKEYETVFVPFLKMCKSTRSTKCKVETLLLEYDDPAKALVRLISKSGVNSLRYFRSRRTKGTGVPLTVLRYAPETCEVYIVCKDRITTKSMDPLINREPCTSPHAAATAHDFLRDWAASFHTLRSPTLPDPRQSTEAGTRRSASARELRFEALSLTCNKPKTPQSSKASSATTPEIFRRRRGSDIPQLNYSDFDKTCTKPQSNVENIVSEHRDSDRSPPETSRKSKKVEIEEEVERLKNELQSTVFKYKQACEELFSTQNKVKMLSTEYLNESKRVNNAVEKEELQRNTAALEKERYMKAVKEVETAKALLAREFCQRQIAEVNALRTYLEKKKVIDQLLGTDHRYRKYTIEEIVTATEGFSPEKVIGEGGYGKVYQCSLDSTPAAVKVVRLDTPEKKQEFLKEVEVLSQLRHPHVVLLLGACPENGCLVYEYLENGSLEEYIFHRKNKPPLPWFIRFRVIFEVACGLAFLHSSKPEPIVHRDLKPGNILLNRNYVSKIADVGLAKLVTDVAPDNVTMYRNSVLAGTLHYIDPEYHRTGTIRPKSDLYAFGIIILQLLTARNPSGIVPAVENAVKKGTLTEMLDKSVTDWPLAETEELARIGLKCAEFRCRDRPDLKSEVIPVLKRLVETANSKVKKEGSNLRAPSHYFCPILREIMEEPEIAADGFTYERKAILAWLEKHNISPVTRQKLDHFKLTPNHTLRSAIRDWKSRVRFSNVVV

SEQ ID NO: 70941 - protein, 756 aa, Arabidopsis thaliana
  peptide (1)..(756): Ceres Seq. ID no. 3026738
MIHVIPTITSIPTPTGDRLPVEEVEESVVEMYVRDVKKEYETVFVPFLKMCKSTRSTKCKVETLLLEYDDPAKALVRLISKSGVNSLRYFRSRRTKGTGVPLTVLRYAPETCEVYIVCKDRITTKSMDPLINREPCTSPHAAATAHDFLRDWAASFHTLRSPTLPDPRQSTEAGTRRSASARELRFEALSLTCNKPKTPQSSKASSATTPEIFRRRRGSDIPQLNYSDFDKTCTKPQSNVENIVSEHRDSDRSPPETSRKSKKVEIEEEVERLKNELQSTVFKYKQACEELFSTQNKVKMLSTEYLNESKRVNNAVEKEELQRNTAALEKERYMKAVKEVETAKALLAREFCQRQIAEVNALRTYLEKKKVIDQLLGTDHRYRKYTIEEIVTATEGFSPEKVIGEGGYGKVYQCSLDSTPAAVKVVRLDTPEKKQEFLKEVEVLSQLRHPHVVLLLGACPENGCLVYEYLENGSLEEYIFHRKNKPPLPWFIRFRVIFEVACGLAFLHSSKPEPIVHRDLKPGNILLNRNYVSKIADVGLAKLVTDVAPDNVTMYRNSVLAGTLHYIDPEYHRTGTIRPKSDLYAFGIIILQLLTARNPSGIVPAVENAVKKGTLTEMLDKSVTDWPLAETEELARIGLKCAEFRCRDRPDLKSEVIPVLKRLVETANSKVKKEGSNLRAPSHYFCPILREIMEEPEIAADGFTYERKAILAWLEKHNISPVTRQKLDHFKLTPNHTLRSAIRDWKSRVRFSNVVV

SEQ ID NO: 70942 - protein, 726 aa, Arabidopsis thaliana
  peptide (1)..(726): Ceres Seq. ID no. 3026739
MYVRDVKKEYETVFVPFLKMCKSTRSTKCKVETLLLEYDDPAKALVRLISKSGVNSLRYFRSRRTKGTGVPLTVLRYAPETCEVYIVCKDRITTKSMDPLINREPCTSPHAAATAHDFLRDWAASFHTLRSPTLPDPRQSTEAGTRRSASARELRFEALSLTCNKPKTPQSSKASSATTPEIFRRRRGSDIPQLNYSDFDKTCTKPQSNVENIVSEHRDSDRSPPETSRKSKKVEIEEEVERLKNELQSTVFKYKQACEELFSTQNKVKMLSTEYLNESKRVNNAVEKEELQRNTAALEKERYMKAVKEVETAKALLAREFCQRQIAEVNALRTYLEKKKVIDQLLGTDHRYRKYTIEEIVTATEGFSPEKVIGEGGYGKVYQCSLDSTPAAVKVVRLDTPEKKQEFLKEVEVLSQLRHPHVVLLLGACPENGCLVYEYLENGSLEEYIFHRKNKPPLPWFIRFRVIFEVACGLAFLHSSKPEPIVHRDLKPGNILLNRNYVSKIADVGLAKLVTDVAPDNVTMYRNSVLAGTLHYIDPEYHRTGTIRPKSDLYAFGIIILQLLTARNPSGIVPAVENAVKKGTLTEMLDKSVTDWPLAETEELARIGLKCAEFRCRDRPDLKSEVIPVLKRLVETANSKVKKEGSNLRAPSHYFCPILREIMEEPEIAADGFTYERKAILAWLEKHNISPVTRQKLDHFKLTPNHTLRSAIRDWKSRVRFSNVVV

SEQ ID NO: 70943 - DNA, 1446 bp, Arabidopsis thaliana
  misc_feature (1)..(1446): Ceres Seq. ID no. 3026804
  misc_feature (1)..(1446): Ortholog of  Ceres SEQ ID NO 13503610 as cited in SEQ ID NO 62416
  misc_feature (1)..(1446): Ortholog of  Ceres SEQ ID NO 13657610 as cited in SEQ ID NO 66165
  misc_feature (1)..(1446): Ortholog of  Ceres SEQ ID NO 13598312 as cited in SEQ ID NO 68448
  misc_feature (1)..(1446): Ortholog of  Ceres SEQ ID NO 13596100 as cited in SEQ ID NO 68573
atgaagaacttaaagatggttttcttcaagatcctctttatctctttaatggcaggattagccatgaaaggatctaagatcaacgtagaagatctccaaaagttctccctccaccatacacagaacaacctccaaaccataagccttctattgtttcttgtcgtttttgtgtggatcctctacatgttaacccgacctaaacccgtttaccttgttgatttctcctgctaccttccaccgtcgcatctcaaggtcagtatccaaaccctaatgggacacgcaagacgtgcaagagaagcaggcatgtgttggaagaacaaagagagcgaccatttagttgacttccaggagaagattcttgaacgttccggtcttggtcaagaaacctacatccccgagggtcttcagtgcttcccacttcagcaaggcatgggtgcttcacgtaaagagacggaagaagtaatcttcggagctcttgacaatctttttcgcaacaccggtgtaaaacctgatgatatcggtatattggtggtgaattctagcacgtttaatccaactccatcactcgcctccatgattgtgaacaagtacaaactcagagacaacatcaagagtttgaatcttggagggatgggttgcagtgccggagttatagctgttgatgtcgctaagggattactacaagttcataggaacacttatgctattgtagtaagcacagagaacatcactcagaacttatacttggggaaaaacaaatcaatgctagtcacaaactgtttgttccgcgttggtggtgctgcggttctgctttcaaacagatctagagaccgtaaccgcgccaaatacgagcttgttcacaccgtacggatccataccggatcagatgataggtcgttcgaatgtgcgacacaagaagaggatgaagatggtataattggagttaccttgacaaagaatctacctatggtggctgcaaggactcttaagataaatatcgcaactttgggtcctcttgtacttccattaaaagagaagctagccttctttattacttttgtcaagaagaagtatttcaagccagagttaaggaattatacaccagatttcaagcttgcctttgagcatttctgtatccacgctggtggaagagctctaatagatgagctggagaagaaccttaagctttctccgttacacgtagaggcgtcaagaatgacactacacaggtttggtaacacttcttctagctcaatctggtacgagttagcttatacagaagctaaaggaaggatgaaggaaggagataggatttggcagattgctttggggtcaggttttaagtgtaacagttcagtatgggtggctctgcgagacgttaagccttcagctaacagtccatgggaagactgtatggatagatatccggttgagattgatatttaa

SEQ ID NO: 70944 - protein, 481 aa, Arabidopsis thaliana
  peptide (1)..(481): Ceres Seq. ID no. 3026805
MKNLKMVFFKILFISLMAGLAMKGSKINVEDLQKFSLHHTQNNLQTISLLLFLVVFVWILYMLTRPKPVYLVDFSCYLPPSHLKVSIQTLMGHARRAREAGMCWKNKESDHLVDFQEKILERSGLGQETYIPEGLQCFPLQQGMGASRKETEEVIFGALDNLFRNTGVKPDDIGILVVNSSTFNPTPSLASMIVNKYKLRDNIKSLNLGGMGCSAGVIAVDVAKGLLQVHRNTYAIVVSTENITQNLYLGKNKSMLVTNCLFRVGGAAVLLSNRSRDRNRAKYELVHTVRIHTGSDDRSFECATQEEDEDGIIGVTLTKNLPMVAARTLKINIATLGPLVLPLKEKLAFFITFVKKKYFKPELRNYTPDFKLAFEHFCIHAGGRALIDELEKNLKLSPLHVEASRMTLHRFGNTSSSSIWYELAYTEAKGRMKEGDRIWQIALGSGFKCNSSVWVALRDVKPSANSPWEDCMDRYPVEIDI

SEQ ID NO: 70945 - protein, 476 aa, Arabidopsis thaliana
  peptide (1)..(476): Ceres Seq. ID no. 3026806
MVFFKILFISLMAGLAMKGSKINVEDLQKFSLHHTQNNLQTISLLLFLVVFVWILYMLTRPKPVYLVDFSCYLPPSHLKVSIQTLMGHARRAREAGMCWKNKESDHLVDFQEKILERSGLGQETYIPEGLQCFPLQQGMGASRKETEEVIFGALDNLFRNTGVKPDDIGILVVNSSTFNPTPSLASMIVNKYKLRDNIKSLNLGGMGCSAGVIAVDVAKGLLQVHRNTYAIVVSTENITQNLYLGKNKSMLVTNCLFRVGGAAVLLSNRSRDRNRAKYELVHTVRIHTGSDDRSFECATQEEDEDGIIGVTLTKNLPMVAARTLKINIATLGPLVLPLKEKLAFFITFVKKKYFKPELRNYTPDFKLAFEHFCIHAGGRALIDELEKNLKLSPLHVEASRMTLHRFGNTSSSSIWYELAYTEAKGRMKEGDRIWQIALGSGFKCNSSVWVALRDVKPSANSPWEDCMDRYPVEIDI

SEQ ID NO: 70946 - protein, 465 aa, Arabidopsis thaliana
  peptide (1)..(465): Ceres Seq. ID no. 3026807
MAGLAMKGSKINVEDLQKFSLHHTQNNLQTISLLLFLVVFVWILYMLTRPKPVYLVDFSCYLPPSHLKVSIQTLMGHARRAREAGMCWKNKESDHLVDFQEKILERSGLGQETYIPEGLQCFPLQQGMGASRKETEEVIFGALDNLFRNTGVKPDDIGILVVNSSTFNPTPSLASMIVNKYKLRDNIKSLNLGGMGCSAGVIAVDVAKGLLQVHRNTYAIVVSTENITQNLYLGKNKSMLVTNCLFRVGGAAVLLSNRSRDRNRAKYELVHTVRIHTGSDDRSFECATQEEDEDGIIGVTLTKNLPMVAARTLKINIATLGPLVLPLKEKLAFFITFVKKKYFKPELRNYTPDFKLAFEHFCIHAGGRALIDELEKNLKLSPLHVEASRMTLHRFGNTSSSSIWYELAYTEAKGRMKEGDRIWQIALGSGFKCNSSVWVALRDVKPSANSPWEDCMDRYPVEIDI

SEQ ID NO: 70947 - DNA, 1095 bp, Arabidopsis thaliana
  misc_feature (1)..(1095): Ceres Seq. ID no. 3027024
  misc_feature (1)..(1095): Ortholog of  Ceres SEQ ID NO 14303405 as cited in SEQ ID NO 54555
atgagattcagaagaggaagtagagttgaggtgtttagcatcaaagaagcctcttatggtgtgtggcgatcagcggagattatatctggtaatggtcacacttacaatgttagatattactcttttgaaattgctaacaatgaggttgttgaggatagagttccaaggaagataattaggccgtgtcctccgcaagtagatgttgatagatgggaagctggtgaattggttgaggttcttgataataatatttcatggaaaactgctactgtcttggaggtgttatctggaagatattatgttgttcggttacttggtgctaaagcagaactcacggttcacaaagtttacctcagggctagacaatcttggcaagatgaaagatgggttatgattggaaaggtatcttgttctgtgaagtcctccacgctgactggatcagatgaacaccagaatagaccttcaccatgtgattgggcggagtctgctgaatcatgcactagaagtcctaagaagatacgatcattggaggaagaaggacaccagcaccggtttgcttcttcttcagcacagaaggtatataatgatagttctgaacgtaggggtgttgaattgtacgtgaaagcttcgtgtaacgagaataaaagtggtttccgtcaaatggtcagggtaagatcaaaaaggtttagtgaatgtgttggtacaggaaactcagtctctaatagttgttatgatactgatgcatcctcagttggtagttgtagccctattagttatgatgagagtgacaaaccaacttcttttctagatggtgccgactcttgtagtagtgatgctgaatcttcaaaagaagcatctggatgcagagatgaagctaggcgaaaacattcattatcaggtaatggatcagtggtgagatcatgtaggcctgaactttacacttaccgtagtacactgacgaagttatttgcttctggctccctaagttgggatcaggaagcatcactaactgatctccgactttctcttaatatatcaaatgatgaacatttgatggagctaagaaatctcaagtctgccggtacccacagttaa

SEQ ID NO: 70948 - protein, 364 aa, Arabidopsis thaliana
  peptide (1)..(364): Ceres Seq. ID no. 3027025
MRFRRGSRVEVFSIKEASYGVWRSAEIISGNGHTYNVRYYSFEIANNEVVEDRVPRKIIRPCPPQVDVDRWEAGELVEVLDNNISWKTATVLEVLSGRYYVVRLLGAKAELTVHKVYLRARQSWQDERWVMIGKVSCSVKSSTLTGSDEHQNRPSPCDWAESAESCTRSPKKIRSLEEEGHQHRFASSSAQKVYNDSSERRGVELYVKASCNENKSGFRQMVRVRSKRFSECVGTGNSVSNSCYDTDASSVGSCSPISYDESDKPTSFLDGADSCSSDAESSKEASGCRDEARRKHSLSGNGSVVRSCRPELYTYRSTLTKLFASGSLSWDQEASLTDLRLSLNISNDEHLMELRNLKSAGTHS

SEQ ID NO: 70949 - protein, 234 aa, Arabidopsis thaliana
  peptide (1)..(234): Ceres Seq. ID no. 3027026
MIGKVSCSVKSSTLTGSDEHQNRPSPCDWAESAESCTRSPKKIRSLEEEGHQHRFASSSAQKVYNDSSERRGVELYVKASCNENKSGFRQMVRVRSKRFSECVGTGNSVSNSCYDTDASSVGSCSPISYDESDKPTSFLDGADSCSSDAESSKEASGCRDEARRKHSLSGNGSVVRSCRPELYTYRSTLTKLFASGSLSWDQEASLTDLRLSLNISNDEHLMELRNLKSAGTHS

SEQ ID NO: 70950 - DNA, 2160 bp, Arabidopsis thaliana
  misc_feature (1)..(2160): Ceres Seq. ID no. 3027471
  misc_feature (1)..(2160): Ortholog of  Ceres SEQ ID NO 13623325 as cited in SEQ ID NO 357
  misc_feature (1)..(2160): Ortholog of  Ceres SEQ ID NO 13635680 as cited in SEQ ID NO 578
atggctcaagaggcaaatcctgtcaccccaaccatcgctccaccagctttctctctggaggacctcaaagccatcttcgccaccatgactaaagatctctccgatgctgtcacagaaaccaaccgccgattcgacgagttagtaaggggaatcccgcaacatccaaactccaagataacaccgccgagatcaattcaaccgcgtggcctcaccttcgacttcacggacgcacagtccaacagggtcaacaccatgttcccagggctacaccatcatgtcagtcagcacgggagaccacccatgccccttgaagaggaagacgctaagttggcggggaagtctcaaccacccaaaataaaagacagagcgcgggaagacttccaggagccacaatggggcgatttcaaacatgcccaaggtgaacacgcgaacaaaggacaacacttgctggagaatcatccaaaccaagaggaagatcatgcggaggaattcaggaccctagagaatgaactcccggggccttcaaaaagatggaggggacaacaaccccagcgagctccagaccacccccgtggaagaatttccacgaatatggtcggtctgtccgacgatgaagattcagtgtcagctctaaagaaaagagcacgacaagtatgcagcgttagggtcgtcccagaggctgcaccgctaagccaagagcccatcgtcttcacaccagaggacgctagtggtattcagcatccgcataacgacgcactggtcgtcaaactagtaatggaagattttgatgtggagcgggtcttgatcaacactggcagctcggtcaacttgattttcttgaaaactttcttaaagatggggatctccgaaagaaagataatgccaaaaatccggcctttgacgagatacgatggagaagcgaagatgtccataggagaaattaagctccttgtccaggcggacggcatcacccagaaaactaagttcgttgtcattgattcggaaccgatctacaacgccatcctgggaagtctctggatttactcgatgagagctatcccctcaacctaccatctgtgtttgaagttcccaatagcaacgggaatcttcaccctgtacgagccatcccgaacagtcggtatcggaagagaactagagggggagatgaaggaaaagctgattgccttcctgaaatcaaggtcgtccaccttcgcttggtccacaaaggatatgactgggatcgctcaaaaggtaacctgtcacaaattcaatatggatccgacttttaaaccagttcgccagaagcgcaggcggttgggatctgatcgtgccaaggctgttcaaaacgaggtcgaaagactgctgaaggctggtctgatcaaggaagtccaatattctgaatggctagccaacccggttgtagacaagaagaaaaacgggaagtggagagtttgtgtcgattataccgatctgaatagagcgtgcccaaaagacagttatcctctcccacacatagaccgcctcgtagaggcgactgccgggaatcagcttttgtccttcatggacgctttcttgggagaagtaccaaggctgacaggtcgcatcgcagctttgaatcgctttatcgcccgatcaacagacaagtgcctttctgtctacaaacttctacgtggcaataaggatttccatttggatgagaaatgtgaaaccgccttccaggagctcaaatcctaccttatgagcaggacgatcttggccaaacctgaggttggtgagactctatatatatatgtctcgatgtcaagttcggcggtgagtggagtgttagtaagagacgatcatggtaatgaaaaactggagaagctagcattggcagttataaaggctgctcatttcataaccgaactatctccatgtgtgatcgatgaagtccctaaagaaaactggatactctacgcaaatggctcttcatcactacaaggttacggtcttggaatcctactccagtctccgaccagggaggtgcttgaacagttgctccgacttccattcaaagcatccaacaacaaagcgcagtacgaggcacttctcgctggacttcgcctcactgaagggattggggccaaacaaatcaaagcctttagcgaactcaactcgtag

SEQ ID NO: 70951 - protein, 719 aa, Arabidopsis thaliana
  peptide (1)..(719): Ceres Seq. ID no. 3027472
MAQEANPVTPTIAPPAFSLEDLKAIFATMTKDLSDAVTETNRRFDELVRGIPQHPNSKITPPRSIQPRGLTFDFTDAQSNRVNTMFPGLHHHVSQHGRPPMPLEEEDAKLAGKSQPPKIKDRAREDFQEPQWGDFKHAQGEHANKGQHLLENHPNQEEDHAEEFRTLENELPGPSKRWRGQQPQRAPDHPRGRISTNMVGLSDDEDSVSALKKRARQVCSVRVVPEAAPLSQEPIVFTPEDASGIQHPHNDALVVKLVMEDFDVERVLINTGSSVNLIFLKTFLKMGISERKIMPKIRPLTRYDGEAKMSIGEIKLLVQADGITQKTKFVVIDSEPIYNAILGSLWIYSMRAIPSTYHLCLKFPIATGIFTLYEPSRTVGIGRELEGEMKEKLIAFLKSRSSTFAWSTKDMTGIAQKVTCHKFNMDPTFKPVRQKRRRLGSDRAKAVQNEVERLLKAGLIKEVQYSEWLANPVVDKKKNGKWRVCVDYTDLNRACPKDSYPLPHIDRLVEATAGNQLLSFMDAFLGEVPRLTGRIAALNRFIARSTDKCLSVYKLLRGNKDFHLDEKCETAFQELKSYLMSRTILAKPEVGETLYIYVSMSSSAVSGVLVRDDHGNEKLEKLALAVIKAAHFITELSPCVIDEVPKENWILYANGSSSLQGYGLGILLQSPTREVLEQLLRLPFKASNNKAQYEALLAGLRLTEGIGAKQIKAFSELNS

SEQ ID NO: 70952 - protein, 691 aa, Arabidopsis thaliana
  peptide (1)..(691): Ceres Seq. ID no. 3027473
MTKDLSDAVTETNRRFDELVRGIPQHPNSKITPPRSIQPRGLTFDFTDAQSNRVNTMFPGLHHHVSQHGRPPMPLEEEDAKLAGKSQPPKIKDRAREDFQEPQWGDFKHAQGEHANKGQHLLENHPNQEEDHAEEFRTLENELPGPSKRWRGQQPQRAPDHPRGRISTNMVGLSDDEDSVSALKKRARQVCSVRVVPEAAPLSQEPIVFTPEDASGIQHPHNDALVVKLVMEDFDVERVLINTGSSVNLIFLKTFLKMGISERKIMPKIRPLTRYDGEAKMSIGEIKLLVQADGITQKTKFVVIDSEPIYNAILGSLWIYSMRAIPSTYHLCLKFPIATGIFTLYEPSRTVGIGRELEGEMKEKLIAFLKSRSSTFAWSTKDMTGIAQKVTCHKFNMDPTFKPVRQKRRRLGSDRAKAVQNEVERLLKAGLIKEVQYSEWLANPVVDKKKNGKWRVCVDYTDLNRACPKDSYPLPHIDRLVEATAGNQLLSFMDAFLGEVPRLTGRIAALNRFIARSTDKCLSVYKLLRGNKDFHLDEKCETAFQELKSYLMSRTILAKPEVGETLYIYVSMSSSAVSGVLVRDDHGNEKLEKLALAVIKAAHFITELSPCVIDEVPKENWILYANGSSSLQGYGLGILLQSPTREVLEQLLRLPFKASNNKAQYEALLAGLRLTEGIGAKQIKAFSELNS

SEQ ID NO: 70953 - protein, 635 aa, Arabidopsis thaliana
  peptide (1)..(635): Ceres Seq. ID no. 3027474
MFPGLHHHVSQHGRPPMPLEEEDAKLAGKSQPPKIKDRAREDFQEPQWGDFKHAQGEHANKGQHLLENHPNQEEDHAEEFRTLENELPGPSKRWRGQQPQRAPDHPRGRISTNMVGLSDDEDSVSALKKRARQVCSVRVVPEAAPLSQEPIVFTPEDASGIQHPHNDALVVKLVMEDFDVERVLINTGSSVNLIFLKTFLKMGISERKIMPKIRPLTRYDGEAKMSIGEIKLLVQADGITQKTKFVVIDSEPIYNAILGSLWIYSMRAIPSTYHLCLKFPIATGIFTLYEPSRTVGIGRELEGEMKEKLIAFLKSRSSTFAWSTKDMTGIAQKVTCHKFNMDPTFKPVRQKRRRLGSDRAKAVQNEVERLLKAGLIKEVQYSEWLANPVVDKKKNGKWRVCVDYTDLNRACPKDSYPLPHIDRLVEATAGNQLLSFMDAFLGEVPRLTGRIAALNRFIARSTDKCLSVYKLLRGNKDFHLDEKCETAFQELKSYLMSRTILAKPEVGETLYIYVSMSSSAVSGVLVRDDHGNEKLEKLALAVIKAAHFITELSPCVIDEVPKENWILYANGSSSLQGYGLGILLQSPTREVLEQLLRLPFKASNNKAQYEALLAGLRLTEGIGAKQIKAFSELNS

SEQ ID NO: 70954 - DNA, 753 bp, Arabidopsis thaliana
  misc_feature (1)..(753): Ceres Seq. ID no. 3027620
  misc_feature (1)..(753): Ortholog of  Ceres SEQ ID NO 13502983 as cited in SEQ ID NO 68464
atgggagacggaagagaaggagactgggaatgtttaggatgcagaaacaggaattatgcgtttagatcattctgtaacagatgcaagcagcctcgtcttatcatggataataatacttctccaaactctaagtggcttcctcgtatcggcgattggatctgcactggttgtactaacaacaattatgcatcacgagaaaagtgcaagaaatgtgggcaatctaaggaagtagcagcattgtcagcacttgctatccctggagcttctcttcaaactcatctccattacttcacccgtggacctgagtcacatgatcaacctggttctttactcgcattctctaacgctacaaatcaagcttcggttcataaagaatggaggagtggtgactggatttgcagatgtggttttcacaattattcctctcgtatacagtgcaaaaagtgcaatgaaatagctccactagcccttggtacaaagagattagcatcagaagctttggctcatgaatgggatagcaaaagactgaatcaaggatatacaagcatgcaaacacagtcagcgatatatgcatcttttcctggtatgagcctaggaagggtctcaaattggcaacttcctctcccgtttctacaacaacactcaacacctgctttacttggaatgggagtgaaacaatggcgtgatggcgactggatgtgtacaaattgcaagaatcacaattatgcatcacgagcagagtgcaataggtga

SEQ ID NO: 70955 - protein, 250 aa, Arabidopsis thaliana
  peptide (1)..(250): Ceres Seq. ID no. 3027621
MGDGREGDWECLGCRNRNYAFRSFCNRCKQPRLIMDNNTSPNSKWLPRIGDWICTGCTNNNYASREKCKKCGQSKEVAALSALAIPGASLQTHLHYFTRGPESHDQPGSLLAFSNATNQASVHKEWRSGDWICRCGFHNYSSRIQCKKCNEIAPLALGTKRLASEALAHEWDSKRLNQGYTSMQTQSAIYASFPGMSLGRVSNWQLPLPFLQQHSTPALLGMGVKQWRDGDWMCTNCKNHNYASRAECNR

SEQ ID NO: 70956 - protein, 216 aa, Arabidopsis thaliana
  peptide (1)..(216): Ceres Seq. ID no. 3027622
MDNNTSPNSKWLPRIGDWICTGCTNNNYASREKCKKCGQSKEVAALSALAIPGASLQTHLHYFTRGPESHDQPGSLLAFSNATNQASVHKEWRSGDWICRCGFHNYSSRIQCKKCNEIAPLALGTKRLASEALAHEWDSKRLNQGYTSMQTQSAIYASFPGMSLGRVSNWQLPLPFLQQHSTPALLGMGVKQWRDGDWMCTNCKNHNYASRAECNR

SEQ ID NO: 70957 - DNA, 1035 bp, Arabidopsis thaliana
  misc_feature (1)..(1035): Ceres Seq. ID no. 3028243
  misc_feature (1)..(1035): Ortholog of  Ceres SEQ ID NO 15226870 as cited in SEQ ID NO 58831
  misc_feature (1)..(1035): Ortholog of  Ceres SEQ ID NO 15224334 as cited in SEQ ID NO 0
atgggcgacgaacactctctcatcccaaaggatagttttgtcttcaagcttcctaaaaaatcaccacttgtgttgagaacggttgttctcttgtttgtgatggtttgtactgtttatatttgctctatttgtttaaagcaaattggtgttgtccctagtgctggattcttgaatgttgaagtgtttgagagaccttgtcctgagcctaacattcaaccttgggacattccttatgttcactatcctaaacctaagacctatagcagggaggaatgttcgtgcaatcccgttaggtattttgctattctctcgatgcagagatctggtagcggttggtttgagactttacttaacaatcatactaacattagctcgaacggggagatcttttcggttaaagataggagggctaatgtgtcgaccatttttgagacgttggacaaagtatataatttagattggttgagtagtgcttctaagaacgagtgtacatctgctgttggtttgaaatggatgcttaatcagggtctaatgaaaaaccatgaagagatagtagaatacttcaaaacccgaggcgtgtctgctattttcctctttagaagaaacctcttgcgccggatgatttcagttcttgcaaactcttacgatagagatgctaagccattaaacggaactcacaagtcccatgtccattcccctaaagaggctgagatattggcgcgctacaaaccattgatcaacacgagtcttttgatacctgatctgaagcaggttcaagagatgacttcaaaagcacttgcttactttaacaccacgcggcatatcttcctctactacgaagatgttgtcaagaaccgcaccaaactagacgatgtacaagagtttctgaaggtcccgaaactagatttaaagagtaggcaagtgaagattcatcatggtccgttgtcacaacacgtacaaaattgggaagaggtgcaaaagacactgaaagggaccggtttcgaaaactttctacttgaagattaccgcaggtga

SEQ ID NO: 70958 - protein, 344 aa, Arabidopsis thaliana
  peptide (1)..(344): Ceres Seq. ID no. 3028244
MGDEHSLIPKDSFVFKLPKKSPLVLRTVVLLFVMVCTVYICSICLKQIGVVPSAGFLNVEVFERPCPEPNIQPWDIPYVHYPKPKTYSREECSCNPVRYFAILSMQRSGSGWFETLLNNHTNISSNGEIFSVKDRRANVSTIFETLDKVYNLDWLSSASKNECTSAVGLKWMLNQGLMKNHEEIVEYFKTRGVSAIFLFRRNLLRRMISVLANSYDRDAKPLNGTHKSHVHSPKEAEILARYKPLINTSLLIPDLKQVQEMTSKALAYFNTTRHIFLYYEDVVKNRTKLDDVQEFLKVPKLDLKSRQVKIHHGPLSQHVQNWEEVQKTLKGTGFENFLLEDYRR

SEQ ID NO: 70959 - protein, 311 aa, Arabidopsis thaliana
  peptide (1)..(311): Ceres Seq. ID no. 3028245
MVCTVYICSICLKQIGVVPSAGFLNVEVFERPCPEPNIQPWDIPYVHYPKPKTYSREECSCNPVRYFAILSMQRSGSGWFETLLNNHTNISSNGEIFSVKDRRANVSTIFETLDKVYNLDWLSSASKNECTSAVGLKWMLNQGLMKNHEEIVEYFKTRGVSAIFLFRRNLLRRMISVLANSYDRDAKPLNGTHKSHVHSPKEAEILARYKPLINTSLLIPDLKQVQEMTSKALAYFNTTRHIFLYYEDVVKNRTKLDDVQEFLKVPKLDLKSRQVKIHHGPLSQHVQNWEEVQKTLKGTGFENFLLEDYRR

SEQ ID NO: 70960 - protein, 240 aa, Arabidopsis thaliana
  peptide (1)..(240): Ceres Seq. ID no. 3028246
MQRSGSGWFETLLNNHTNISSNGEIFSVKDRRANVSTIFETLDKVYNLDWLSSASKNECTSAVGLKWMLNQGLMKNHEEIVEYFKTRGVSAIFLFRRNLLRRMISVLANSYDRDAKPLNGTHKSHVHSPKEAEILARYKPLINTSLLIPDLKQVQEMTSKALAYFNTTRHIFLYYEDVVKNRTKLDDVQEFLKVPKLDLKSRQVKIHHGPLSQHVQNWEEVQKTLKGTGFENFLLEDYRR

SEQ ID NO: 70961 - DNA, 3714 bp, Arabidopsis thaliana
  misc_feature (1)..(3714): Ceres Seq. ID no. 3030441
  misc_feature (1)..(3714): Ortholog of  Ceres SEQ ID NO 13595870 as cited in SEQ ID NO 62101
  misc_feature (1)..(3714): Ortholog of  Ceres SEQ ID NO 13590241 as cited in SEQ ID NO 63878
  misc_feature (1)..(3714): Ortholog of  Ceres SEQ ID NO 13657939 as cited in SEQ ID NO 66349
atgtgcggaattgcaattgtagtgtgcggcgttcgtatcgaactctcgacactttcgtcgtctctctctgaaactgagactcctttcgaacgattacaagtctctgttgaagatgttaaagctgtcttaagccaaagaggtcctgatagtgtaggagaaaagactattcatcttcgaccaaattgtggtcaagaatctgctactctctctgttgttgagactagtgaaggaacttataagcttgaggagactacttctttgggtgaattgcattttattggttctacattacagcttagaggaactagtcctataaggcaaccattggtggattcttctgggaacattctagcttacaatggcgaagtatttggtggaattgaactcaacagctatgataatgatactgaagtgcttttgaagtctttagagaaagcaaaatctttagttccagatgttctttcgatgattaaaggtccctgggccattatatattggcaggaaagctcgagaacgttatggtttggtaaagatccgtttggtcggaggagccttcttgttcactcgccaactgtggaagaccctcgttttcttctatcgtctgtttcaccagcttcttcagtttctcaaggtgctggattggatactgaaaatggtaatagccttcatagatattgggaagagcttccatgtggcgtgtacagtatttcttttggggtttcagaattatgtattcatggtgaagttacaaaacacgaatggagaaataccatctggaaagaattgattgaatgggaaaggaaattagttgtacctagacctgaagatctatcaacgtcatcgcttagtggagttcaggaagacaaatctgtgtcaacttctctaggtttagctttaggatttgcgcagacagttttggtcgtgttaaaggaatcagtgaggcggcgaacttcacttcatagcatttatcagggagataaagaagctgtcccagtagctgttcttttctctggtggattggattcgatgattcttgctgcgctgttgcatcagtgccttgatccaaaatatgaagttgatctccttaatgtcagttttgatggtcctaatgctcctgataggatctccgccaaggctggaataaaggaactcaaaaagattgcaccttttagaaggtggaaacttgttgagattgatgctgatctgtcaaaactaggctttgagacaaaacgtgttatgtcactcataaatcctgcagacacttacatggaccttaacataggaacagcattatggttagctgctcgtggtgatggttggattcacgaagataatggaaatccaagtgtagaggaaaataaccagcgggtcaagtataagtccgatgctagaatcctgcttgttggcgctggtgctgatgagcaatgtgccggttacggtaggcacagaactaaatatcgaaatggaagttgggttgcgttggatcaagaaatgaaattagatatgcagagaatttggaaaagaaatttgggtcgagatgatcgatgcattgcagataacggtaaagaggggcgattcccgttcttagatgaagatgtgataaagactctccttgacattcccttgtgggaaatcgctgatcttgagcaaccaagtggaacgggagacaagaagattcttagacaggttgcaagcctgcttggtgtacatgaagttgcaaagatgcctaagagagcaattcagtttggatcaagaatcgctcgtgaatcaaaccggaagaattttggaagtaaccgtgccgcaaaccaggcttctgccgggagcagacattctttcaatgatctcaaaactggtttgaacactgaacacaaatggactaataagaggacattttggttcttcatgttggaaaccgaaagcagtgtctgcgacaacatcgccggcaatgagaaatggcgagcggaagctgaaattggtggcaacgagagagctctgcaagcgcttcgagaactcattatcttcccttttcgttaccctctcgaagctcgaactcttggtctcaaatggcctagaggattgcttctctacggtcctcctggaaccggcaagacaagcttggtccgtgctgttgtccaggaatgtgatgcacatttgattgttttaagccctcattctgtacatcgagcacatgctggagaaagcgagaaagtcttaagggaagctttcgctgaggcttcttctcacgctgtttcagacaagccttctgtgatttttattgatgaaatcgatgttctttgtcctcgtcgtgatgctagacgagaacaagatgttcgtattgcttctcaactgtttacacttatggactcaaacaagccttcatcatctgcaccaagagttgttgttgtagcatccacaaatagggtggatgcgattgacccagcgctaagaagagcgggacgatttgatgctttagttgaagtgagcacaccaaatgaggaggatcgtttaaaaatcctgcagctgtacacaaagaaagtcaatttagatcctagtgtcgatcttcaagccattgcaatatcttgcaacggttatgttggagcagatttggaagctttatgtcgtgaagcgacaatatctgcaagtaaaagatcttcagattctcttattctaacatctcaagacttcaagattgcaaaatctgtggttggtccaagtataaacagaggcatcacagttgaaatccctaaagtgacatgggacgatgttggtggtcttaaagacttaaagaaaaagctccagcaagctgttgaatggccaatcaaacattcagctgcatttgtaaaaatgggcatatcgccaatgcgtgggatacttctacatggtcctccaggttgctcaaagacaactcttgctaaagccgctgcaaatgctgctcaagcctccttcttttccttaagctgtgcggagctattttctatgtatgttggagaaggtgaagcattattgcggaatacatttcaaagagctcgacttgcttctccaagtataatattctttgatgaagctgatgtcgttgcctgtaaaagaggtgatgagagctcaagcaatagttctacagttggagaaaggcttctatctacactgttaaccgaaatggacggtcttgaagaagcaaagggaatcctcgtcttggctgccacaaaccgcccgtatgcaattgatgctgctctaatgcgacctggtcgatttgatctcgtgctatacgtgccaccgcctgatctagaagcccggtttgaaatactgcaagtgcatacacgcaacatgacactaggagacgacgttgatctcagaaaaatcgctgaagaaaccgatctcttcacaggtgccgagctcgagggtctatgcagagaaagcggaactgtctcacttagagaaaacatcgcagcaaccgctgtcttcaatcgccatttccaaaccgcaaaaagctcgcttaaaccagcgttaacaatcgaagaagtcgaaacttattcatcattcaggaaggcggcgaaaagatctgattcgaaaccgattccgattaacaaaaagaaggcgacttccaccgtcttcggattctcatggcaattaggtgttttgagcttattgttgcttgctactggaaactattacttcaaccacactaaacatgaattactagtagcttctgctacatga

SEQ ID NO: 70962 - protein, 1237 aa, Arabidopsis thaliana
  peptide (1)..(1237): Ceres Seq. ID no. 3030442
MCGIAIVVCGVRIELSTLSSSLSETETPFERLQVSVEDVKAVLSQRGPDSVGEKTIHLRPNCGQESATLSVVETSEGTYKLEETTSLGELHFIGSTLQLRGTSPIRQPLVDSSGNILAYNGEVFGGIELNSYDNDTEVLLKSLEKAKSLVPDVLSMIKGPWAIIYWQESSRTLWFGKDPFGRRSLLVHSPTVEDPRFLLSSVSPASSVSQGAGLDTENGNSLHRYWEELPCGVYSISFGVSELCIHGEVTKHEWRNTIWKELIEWERKLVVPRPEDLSTSSLSGVQEDKSVSTSLGLALGFAQTVLVVLKESVRRRTSLHSIYQGDKEAVPVAVLFSGGLDSMILAALLHQCLDPKYEVDLLNVSFDGPNAPDRISAKAGIKELKKIAPFRRWKLVEIDADLSKLGFETKRVMSLINPADTYMDLNIGTALWLAARGDGWIHEDNGNPSVEENNQRVKYKSDARILLVGAGADEQCAGYGRHRTKYRNGSWVALDQEMKLDMQRIWKRNLGRDDRCIADNGKEGRFPFLDEDVIKTLLDIPLWEIADLEQPSGTGDKKILRQVASLLGVHEVAKMPKRAIQFGSRIARESNRKNFGSNRAANQASAGSRHSFNDLKTGLNTEHKWTNKRTFWFFMLETESSVCDNIAGNEKWRAEAEIGGNERALQALRELIIFPFRYPLEARTLGLKWPRGLLLYGPPGTGKTSLVRAVVQECDAHLIVLSPHSVHRAHAGESEKVLREAFAEASSHAVSDKPSVIFIDEIDVLCPRRDARREQDVRIASQLFTLMDSNKPSSSAPRVVVVASTNRVDAIDPALRRAGRFDALVEVSTPNEEDRLKILQLYTKKVNLDPSVDLQAIAISCNGYVGADLEALCREATISASKRSSDSLILTSQDFKIAKSVVGPSINRGITVEIPKVTWDDVGGLKDLKKKLQQAVEWPIKHSAAFVKMGISPMRGILLHGPPGCSKTTLAKAAANAAQASFFSLSCAELFSMYVGEGEALLRNTFQRARLASPSIIFFDEADVVACKRGDESSSNSSTVGERLLSTLLTEMDGLEEAKGILVLAATNRPYAIDAALMRPGRFDLVLYVPPPDLEARFEILQVHTRNMTLGDDVDLRKIAEETDLFTGAELEGLCRESGTVSLRENIAATAVFNRHFQTAKSSLKPALTIEEVETYSSFRKAAKRSDSKPIPINKKKATSTVFGFSWQLGVLSLLLLATGNYYFNHTKHELLVASAT

SEQ ID NO: 70963 - protein, 1082 aa, Arabidopsis thaliana
  peptide (1)..(1082): Ceres Seq. ID no. 3030443
MIKGPWAIIYWQESSRTLWFGKDPFGRRSLLVHSPTVEDPRFLLSSVSPASSVSQGAGLDTENGNSLHRYWEELPCGVYSISFGVSELCIHGEVTKHEWRNTIWKELIEWERKLVVPRPEDLSTSSLSGVQEDKSVSTSLGLALGFAQTVLVVLKESVRRRTSLHSIYQGDKEAVPVAVLFSGGLDSMILAALLHQCLDPKYEVDLLNVSFDGPNAPDRISAKAGIKELKKIAPFRRWKLVEIDADLSKLGFETKRVMSLINPADTYMDLNIGTALWLAARGDGWIHEDNGNPSVEENNQRVKYKSDARILLVGAGADEQCAGYGRHRTKYRNGSWVALDQEMKLDMQRIWKRNLGRDDRCIADNGKEGRFPFLDEDVIKTLLDIPLWEIADLEQPSGTGDKKILRQVASLLGVHEVAKMPKRAIQFGSRIARESNRKNFGSNRAANQASAGSRHSFNDLKTGLNTEHKWTNKRTFWFFMLETESSVCDNIAGNEKWRAEAEIGGNERALQALRELIIFPFRYPLEARTLGLKWPRGLLLYGPPGTGKTSLVRAVVQECDAHLIVLSPHSVHRAHAGESEKVLREAFAEASSHAVSDKPSVIFIDEIDVLCPRRDARREQDVRIASQLFTLMDSNKPSSSAPRVVVVASTNRVDAIDPALRRAGRFDALVEVSTPNEEDRLKILQLYTKKVNLDPSVDLQAIAISCNGYVGADLEALCREATISASKRSSDSLILTSQDFKIAKSVVGPSINRGITVEIPKVTWDDVGGLKDLKKKLQQAVEWPIKHSAAFVKMGISPMRGILLHGPPGCSKTTLAKAAANAAQASFFSLSCAELFSMYVGEGEALLRNTFQRARLASPSIIFFDEADVVACKRGDESSSNSSTVGERLLSTLLTEMDGLEEAKGILVLAATNRPYAIDAALMRPGRFDLVLYVPPPDLEARFEILQVHTRNMTLGDDVDLRKIAEETDLFTGAELEGLCRESGTVSLRENIAATAVFNRHFQTAKSSLKPALTIEEVETYSSFRKAAKRSDSKPIPINKKKATSTVFGFSWQLGVLSLLLLATGNYYFNHTKHELLVASAT

SEQ ID NO: 70964 - protein, 895 aa, Arabidopsis thaliana
  peptide (1)..(895): Ceres Seq. ID no. 3030444
MILAALLHQCLDPKYEVDLLNVSFDGPNAPDRISAKAGIKELKKIAPFRRWKLVEIDADLSKLGFETKRVMSLINPADTYMDLNIGTALWLAARGDGWIHEDNGNPSVEENNQRVKYKSDARILLVGAGADEQCAGYGRHRTKYRNGSWVALDQEMKLDMQRIWKRNLGRDDRCIADNGKEGRFPFLDEDVIKTLLDIPLWEIADLEQPSGTGDKKILRQVASLLGVHEVAKMPKRAIQFGSRIARESNRKNFGSNRAANQASAGSRHSFNDLKTGLNTEHKWTNKRTFWFFMLETESSVCDNIAGNEKWRAEAEIGGNERALQALRELIIFPFRYPLEARTLGLKWPRGLLLYGPPGTGKTSLVRAVVQECDAHLIVLSPHSVHRAHAGESEKVLREAFAEASSHAVSDKPSVIFIDEIDVLCPRRDARREQDVRIASQLFTLMDSNKPSSSAPRVVVVASTNRVDAIDPALRRAGRFDALVEVSTPNEEDRLKILQLYTKKVNLDPSVDLQAIAISCNGYVGADLEALCREATISASKRSSDSLILTSQDFKIAKSVVGPSINRGITVEIPKVTWDDVGGLKDLKKKLQQAVEWPIKHSAAFVKMGISPMRGILLHGPPGCSKTTLAKAAANAAQASFFSLSCAELFSMYVGEGEALLRNTFQRARLASPSIIFFDEADVVACKRGDESSSNSSTVGERLLSTLLTEMDGLEEAKGILVLAATNRPYAIDAALMRPGRFDLVLYVPPPDLEARFEILQVHTRNMTLGDDVDLRKIAEETDLFTGAELEGLCRESGTVSLRENIAATAVFNRHFQTAKSSLKPALTIEEVETYSSFRKAAKRSDSKPIPINKKKATSTVFGFSWQLGVLSLLLLATGNYYFNHTKHELLVASAT

SEQ ID NO: 70965 - DNA, 1260 bp, Arabidopsis thaliana
  misc_feature (1)..(1260): Ceres Seq. ID no. 3030741
  misc_feature (1)..(1260): Ortholog of  Ceres SEQ ID NO 14303888 as cited in SEQ ID NO 53771
atgggaccttttgggatggaaacaacacccggttttcctgatacttttgctggattcaaatctgccagtgtgagaacatcttcttcttcatcacttgttgatgagaatcttggccattcaatggaggataaaatgagtgacatgaagcatttcctaatggatcctcatcatgataataccgcggtggacagtttcttaggtcttggtatggagaatatgggcttaacctccaagatggaggagttttcacatggatttgacgttagctttctcccagattatggtggagttaacacttttagcactcaagatgtggaagcaggtttaaagtttgaaattcttgatggaattctggatggagttgatgaagtggaagatatctacgcatcacatgagctttcttctattgttaaccatttccctccagaaactgaagtcaagaagaatgaattagagggtgacccctatggtcttatgaacttcagttcagaatcttattctcctggaattagtggaagcatcggactcgcggagtggtcaaaagaaactgttccatatgctgaatcccagattgtatccagcgaaaaagttaaagatagttgggatacaaatgagtcagaagatgacaagaaaccactatccacatttataggctcttggattaaacgaaagaatcggaaacagaaattgctcaacaccgcttgtagtagattagattcttctcgtgaaagaaagtcttgcgagtcctatgacttcaggccccggaaaggacctatgaagaaatacattcacacttcaatggagaaaacattttctgatgatcagcttactttatctgagagtgaagatgacatttctgtaacaaagacatccagaaccaaaagtgacaggagaaagaatcagaggatatggactcttgatgaagtaatgaatttggttgatggtatttctcactttggtgttgggaaatggaccgatataaagaaccacttctttcattatgcagcacaccgcaaacccgttgatatcagagacaaatggcgtaatctactgaaagcaagttataacgaaaagcataacgatggacaggctgaagaaaaacgaaagtcagtggctcgctctataccgaaggatattctacatcgtgtaagagaacttgcttcactccatccatatcccttctccaaatcaccgtgtattgttcatgattcctcaagaagccgaagcacttcaaagaacaagaagaagaagagtggatga

SEQ ID NO: 70966 - protein, 419 aa, Arabidopsis thaliana
  peptide (1)..(419): Ceres Seq. ID no. 3030742
MGPFGMETTPGFPDTFAGFKSASVRTSSSSSLVDENLGHSMEDKMSDMKHFLMDPHHDNTAVDSFLGLGMENMGLTSKMEEFSHGFDVSFLPDYGGVNTFSTQDVEAGLKFEILDGILDGVDEVEDIYASHELSSIVNHFPPETEVKKNELEGDPYGLMNFSSESYSPGISGSIGLAEWSKETVPYAESQIVSSEKVKDSWDTNESEDDKKPLSTFIGSWIKRKNRKQKLLNTACSRLDSSRERKSCESYDFRPRKGPMKKYIHTSMEKTFSDDQLTLSESEDDISVTKTSRTKSDRRKNQRIWTLDEVMNLVDGISHFGVGKWTDIKNHFFHYAAHRKPVDIRDKWRNLLKASYNEKHNDGQAEEKRKSVARSIPKDILHRVRELASLHPYPFSKSPCIVHDSSRSRSTSKNKKKKSG

SEQ ID NO: 70967 - protein, 414 aa, Arabidopsis thaliana
  peptide (1)..(414): Ceres Seq. ID no. 3030743
METTPGFPDTFAGFKSASVRTSSSSSLVDENLGHSMEDKMSDMKHFLMDPHHDNTAVDSFLGLGMENMGLTSKMEEFSHGFDVSFLPDYGGVNTFSTQDVEAGLKFEILDGILDGVDEVEDIYASHELSSIVNHFPPETEVKKNELEGDPYGLMNFSSESYSPGISGSIGLAEWSKETVPYAESQIVSSEKVKDSWDTNESEDDKKPLSTFIGSWIKRKNRKQKLLNTACSRLDSSRERKSCESYDFRPRKGPMKKYIHTSMEKTFSDDQLTLSESEDDISVTKTSRTKSDRRKNQRIWTLDEVMNLVDGISHFGVGKWTDIKNHFFHYAAHRKPVDIRDKWRNLLKASYNEKHNDGQAEEKRKSVARSIPKDILHRVRELASLHPYPFSKSPCIVHDSSRSRSTSKNKKKKSG

SEQ ID NO: 70968 - protein, 379 aa, Arabidopsis thaliana
  peptide (1)..(379): Ceres Seq. ID no. 3030744
MEDKMSDMKHFLMDPHHDNTAVDSFLGLGMENMGLTSKMEEFSHGFDVSFLPDYGGVNTFSTQDVEAGLKFEILDGILDGVDEVEDIYASHELSSIVNHFPPETEVKKNELEGDPYGLMNFSSESYSPGISGSIGLAEWSKETVPYAESQIVSSEKVKDSWDTNESEDDKKPLSTFIGSWIKRKNRKQKLLNTACSRLDSSRERKSCESYDFRPRKGPMKKYIHTSMEKTFSDDQLTLSESEDDISVTKTSRTKSDRRKNQRIWTLDEVMNLVDGISHFGVGKWTDIKNHFFHYAAHRKPVDIRDKWRNLLKASYNEKHNDGQAEEKRKSVARSIPKDILHRVRELASLHPYPFSKSPCIVHDSSRSRSTSKNKKKKSG

SEQ ID NO: 70969 - DNA, 570 bp, Arabidopsis thaliana
  misc_feature (1)..(570): Ceres Seq. ID no. 3030818
  misc_feature (1)..(570): Ortholog of  Ceres SEQ ID NO 13639514 as cited in SEQ ID NO 55736
  misc_feature (1)..(570): Ortholog of  Ceres SEQ ID NO 13662804 as cited in SEQ ID NO 65394
  misc_feature (1)..(570): Ortholog of  Ceres SEQ ID NO 13656519 as cited in SEQ ID NO 69226
atggaggagccgaaatggctcgaaggtctcttaagaacaaacttcttcagcatttgccctcgacatcgcgagacaccgcgaaatgagtgcaacatgttctgtctctcctgtcaaaacgctgcgttttgcttctactgccgctcctcctttcacattgatcatcccgtccttcagataagaagatcgtcgtatcatgatgtggtgagagtatcggagatagagaatgcattggacataagaggagtgcaaacttatgtcatcaatagcgcgagggttctcttcttaaacgagagacctcagcctaagaactcctcccatggtgccgcctcctccactccgaaaaccatgtcctacttctgtgagacatgttgcagaacccttcttgatccctttcgcttctgttccttgggttgcaaggttgaaggaatgaggaagaataaggaagaggaagaagaaagattgcgtaaagaaagacaacaagaaacgcacaaaggcacgcatcctccaactcatacctctaattctaggcgacgaaaaggcattcctcatagagctccttttgcctcctaa

SEQ ID NO: 70970 - protein, 189 aa, Arabidopsis thaliana
  peptide (1)..(189): Ceres Seq. ID no. 3030819
MEEPKWLEGLLRTNFFSICPRHRETPRNECNMFCLSCQNAAFCFYCRSSFHIDHPVLQIRRSSYHDVVRVSEIENALDIRGVQTYVINSARVLFLNERPQPKNSSHGAASSTPKTMSYFCETCCRTLLDPFRFCSLGCKVEGMRKNKEEEEERLRKERQQETHKGTHPPTHTSNSRRRKGIPHRAPFAS

SEQ ID NO: 70971 - protein, 158 aa, Arabidopsis thaliana
  peptide (1)..(158): Ceres Seq. ID no. 3030820
MFCLSCQNAAFCFYCRSSFHIDHPVLQIRRSSYHDVVRVSEIENALDIRGVQTYVINSARVLFLNERPQPKNSSHGAASSTPKTMSYFCETCCRTLLDPFRFCSLGCKVEGMRKNKEEEEERLRKERQQETHKGTHPPTHTSNSRRRKGIPHRAPFAS

SEQ ID NO: 70972 - DNA, 1092 bp, Arabidopsis thaliana
  misc_feature (1)..(1092): Ceres Seq. ID no. 3031113
  misc_feature (1)..(1092): Ortholog of  Ceres SEQ ID NO 13593955 as cited in SEQ ID NO 54278
  misc_feature (1)..(1092): Ortholog of  Ceres SEQ ID NO 13597380 as cited in SEQ ID NO 64054
  misc_feature (1)..(1092): Ortholog of  Ceres SEQ ID NO 12625474 as cited in SEQ ID NO 64169
  misc_feature (1)..(1092): Ortholog of  Ceres SEQ ID NO 13597502 as cited in SEQ ID NO 64681
atgtcgacttctaagaccataaccttcactctcttcatagcagcactactctcgtcctgcgacgcagccacaaacgctacatcgcaaccactatttccagcgattcttatctttggcgattcaacagttgacacaggtaacaacaactaccactcacaaacaatcttcaaagccaaacatcttccttacggaatcgatctcccaaaccacaaagctagtggaagatttacaaatggcaaaatcttttccgacataatcgcaacaaaactcaacatcaaacagtttgttcctcccttcttacaaccaaatctctctgaccaagagattgtaaccggagtctgttttgcatcagccggtgcgggttacgatgaccataccagtctctctacgcaagcgattcgtgtcttggaccaacaaaagatgttcaagaattacattgctcgtcttaaaagtatcgtaggagacaagaaagctatggaaatcataaaaaatgctttggtggttataagtgcagggcctaacgattttatcttgaactattacgatattccttcaaggcgtcttgagtttcctcacatttctggttaccaagactttgttcttcaaaggcttgacaatttcgtgcgggagctttacagtttaggttgccggaaaattatggtaggaggtttaccgccgatgggttgtttaccgattcaaatgactgctaaattccgaaacgctctaaggttctgcttggaacaagagaaccgagactctgtcttatacaatcagaaacttcagaatctattacctcaaatcgaagcatcgcttacaggaagcaagatcctttactccaatgtctatgaccctatgatggacatgatgcaaaaccctagcaaatacggatttaaagagacgaagagaggatgttgtggaacagggcatttggagacgagcttcatgtgtaatgctttttctccaacgtgtagaaatcactcggagtttttgttctttgactcgattcatccatccgaagctacttataattatatgggcaattttctagatactcagatccgcgtgtggcttagcttgaggcttaagtcataa

SEQ ID NO: 70973 - protein, 363 aa, Arabidopsis thaliana
  peptide (1)..(363): Ceres Seq. ID no. 3031114
MSTSKTITFTLFIAALLSSCDAATNATSQPLFPAILIFGDSTVDTGNNNYHSQTIFKAKHLPYGIDLPNHKASGRFTNGKIFSDIIATKLNIKQFVPPFLQPNLSDQEIVTGVCFASAGAGYDDHTSLSTQAIRVLDQQKMFKNYIARLKSIVGDKKAMEIIKNALVVISAGPNDFILNYYDIPSRRLEFPHISGYQDFVLQRLDNFVRELYSLGCRKIMVGGLPPMGCLPIQMTAKFRNALRFCLEQENRDSVLYNQKLQNLLPQIEASLTGSKILYSNVYDPMMDMMQNPSKYGFKETKRGCCGTGHLETSFMCNAFSPTCRNHSEFLFFDSIHPSEATYNYMGNFLDTQIRVWLSLRLKS

SEQ ID NO: 70974 - protein, 223 aa, Arabidopsis thaliana
  peptide (1)..(223): Ceres Seq. ID no. 3031115
MFKNYIARLKSIVGDKKAMEIIKNALVVISAGPNDFILNYYDIPSRRLEFPHISGYQDFVLQRLDNFVRELYSLGCRKIMVGGLPPMGCLPIQMTAKFRNALRFCLEQENRDSVLYNQKLQNLLPQIEASLTGSKILYSNVYDPMMDMMQNPSKYGFKETKRGCCGTGHLETSFMCNAFSPTCRNHSEFLFFDSIHPSEATYNYMGNFLDTQIRVWLSLRLKS

SEQ ID NO: 70975 - protein, 205 aa, Arabidopsis thaliana
  peptide (1)..(205): Ceres Seq. ID no. 3031116
MEIIKNALVVISAGPNDFILNYYDIPSRRLEFPHISGYQDFVLQRLDNFVRELYSLGCRKIMVGGLPPMGCLPIQMTAKFRNALRFCLEQENRDSVLYNQKLQNLLPQIEASLTGSKILYSNVYDPMMDMMQNPSKYGFKETKRGCCGTGHLETSFMCNAFSPTCRNHSEFLFFDSIHPSEATYNYMGNFLDTQIRVWLSLRLKS

SEQ ID NO: 70976 - DNA, 1929 bp, Arabidopsis thaliana
  misc_feature (1)..(1929): Ceres Seq. ID no. 3031144
  misc_feature (1)..(1929): Ortholog of  Ceres SEQ ID NO 12586556 as cited in SEQ ID NO 64667
  misc_feature (1)..(1929): Ortholog of  Ceres SEQ ID NO 13660894 as cited in SEQ ID NO 67475
atgtctatctttctccaagccactactacctctttcaattccttcaagttacaagtcgaacaagtccaaacccatctcacaaaatcaggtcttgatcggttcgtatacgtgaaaacatctcttcttaatctctacttgaagaagggttgcgtaacgagtgcacaaatgttgttcgatgaaatgcctgagagagatacagttgtttggaatgcattgatttgtgggtattcacgaaatggttatgagtgtgatgcgtggaagctttttatcgtaatgcttcagcaagggttttctccatctgctactacacttgtgaatttgttacctttttgtggacaatgtggttttgtatctcaagggagatctgttcatggtgttgctgcaaagtctggccttgagttggattctcaggtgaagaatgcgttgatttcgttttactcaaagtgtgcagagttgggttcagcagaagtcttgtttagagaaatgaaagataaaagcacagtttcttggaatacaatgattggtgcctatagccagagtggtttacaggaagaagccatcactgttttcaagaatatgtttgagaagaatgtggaaattagtccagtcactatcatcaatcttctttctgctcatgttagtcacgagccactacattgtcttgttgttaaatgtggaatggtgaatgatatatctgtggttacttctttggtctgtgcatattcaaggtgtgggtgtttggtttcagcagagcgtctttatgcgtctgctaaacaagatagtattgtcggcttaacttcgattgtttcatgctatgcggagaaaggagatatggatatagcagttgtgtatttttctaaaacgcgtcagttgtgtatgaaaattgatgctgtagctttagttggaattctccatggatgtaaaaagtcttcccatattgacataggaatgtcgttacatggttatgcgatcaaaagcggattgtgcacaaaaacactggttgtgaatggactgataactatgtactctaagtttgatgatgtagagactgtcctgtttttgtttgagcaactgcaggagactcctttaattagctggaactcagtgatatccgggtgtgtacagtctggaagggcaagtacagcttttgaggtgttccatcagatgatgttaactggtggacttttgccggatgccattacgatagccagtttgcttgctggctgttcccagctttgttgcttgaatttggggaaggagcttcatggctatactcttaggaacaattttgaaaatgagaactttgtttgcactgctctgatagatatgtatgccaaatgtggaaacgaagtacaagcggaaagtgtgttcaagagtataaaagctccgtgtacagcaacatggaactcaatgatatcaggatacagcttatcggggttacaacatcgagctctttcttgttacttggaaatgcgagagaaggggttgaaacctgacgagatcacctttttgggggttctgtctgcatgtaaccatggaggctttgtcgatgaaggaaaaatatgtttcagagcaatgatcaaagagtttggaatatctccaactttacagcattatgcacttatggttggcttgttgggaagagcatgtttatttactgaggcattgtatttaatttggaagatggatataaagccggattctgcagtatggggtgctctacttagcgcgtgcattattcacagagagttggaggttggggaatatgtagctaggaaaatgtttatgctggattacaagaatggagggctgtatgtattgatgtcaaacctatatgcaacagaagcaatgtgggacgacgtagttagagtcaggaatatgatgaaagataatggatacgatggttatttgggagttagccaaatataa

SEQ ID NO: 70977 - protein, 642 aa, Arabidopsis thaliana
  peptide (1)..(642): Ceres Seq. ID no. 3031145
MSIFLQATTTSFNSFKLQVEQVQTHLTKSGLDRFVYVKTSLLNLYLKKGCVTSAQMLFDEMPERDTVVWNALICGYSRNGYECDAWKLFIVMLQQGFSPSATTLVNLLPFCGQCGFVSQGRSVHGVAAKSGLELDSQVKNALISFYSKCAELGSAEVLFREMKDKSTVSWNTMIGAYSQSGLQEEAITVFKNMFEKNVEISPVTIINLLSAHVSHEPLHCLVVKCGMVNDISVVTSLVCAYSRCGCLVSAERLYASAKQDSIVGLTSIVSCYAEKGDMDIAVVYFSKTRQLCMKIDAVALVGILHGCKKSSHIDIGMSLHGYAIKSGLCTKTLVVNGLITMYSKFDDVETVLFLFEQLQETPLISWNSVISGCVQSGRASTAFEVFHQMMLTGGLLPDAITIASLLAGCSQLCCLNLGKELHGYTLRNNFENENFVCTALIDMYAKCGNEVQAESVFKSIKAPCTATWNSMISGYSLSGLQHRALSCYLEMREKGLKPDEITFLGVLSACNHGGFVDEGKICFRAMIKEFGISPTLQHYALMVGLLGRACLFTEALYLIWKMDIKPDSAVWGALLSACIIHRELEVGEYVARKMFMLDYKNGGLYVLMSNLYATEAMWDDVVRVRNMMKDNGYDGYLGVSQI

SEQ ID NO: 70978 - protein, 587 aa, Arabidopsis thaliana
  peptide (1)..(587): Ceres Seq. ID no. 3031146
MLFDEMPERDTVVWNALICGYSRNGYECDAWKLFIVMLQQGFSPSATTLVNLLPFCGQCGFVSQGRSVHGVAAKSGLELDSQVKNALISFYSKCAELGSAEVLFREMKDKSTVSWNTMIGAYSQSGLQEEAITVFKNMFEKNVEISPVTIINLLSAHVSHEPLHCLVVKCGMVNDISVVTSLVCAYSRCGCLVSAERLYASAKQDSIVGLTSIVSCYAEKGDMDIAVVYFSKTRQLCMKIDAVALVGILHGCKKSSHIDIGMSLHGYAIKSGLCTKTLVVNGLITMYSKFDDVETVLFLFEQLQETPLISWNSVISGCVQSGRASTAFEVFHQMMLTGGLLPDAITIASLLAGCSQLCCLNLGKELHGYTLRNNFENENFVCTALIDMYAKCGNEVQAESVFKSIKAPCTATWNSMISGYSLSGLQHRALSCYLEMREKGLKPDEITFLGVLSACNHGGFVDEGKICFRAMIKEFGISPTLQHYALMVGLLGRACLFTEALYLIWKMDIKPDSAVWGALLSACIIHRELEVGEYVARKMFMLDYKNGGLYVLMSNLYATEAMWDDVVRVRNMMKDNGYDGYLGVSQI

SEQ ID NO: 70979 - protein, 582 aa, Arabidopsis thaliana
  peptide (1)..(582): Ceres Seq. ID no. 3031147
MPERDTVVWNALICGYSRNGYECDAWKLFIVMLQQGFSPSATTLVNLLPFCGQCGFVSQGRSVHGVAAKSGLELDSQVKNALISFYSKCAELGSAEVLFREMKDKSTVSWNTMIGAYSQSGLQEEAITVFKNMFEKNVEISPVTIINLLSAHVSHEPLHCLVVKCGMVNDISVVTSLVCAYSRCGCLVSAERLYASAKQDSIVGLTSIVSCYAEKGDMDIAVVYFSKTRQLCMKIDAVALVGILHGCKKSSHIDIGMSLHGYAIKSGLCTKTLVVNGLITMYSKFDDVETVLFLFEQLQETPLISWNSVISGCVQSGRASTAFEVFHQMMLTGGLLPDAITIASLLAGCSQLCCLNLGKELHGYTLRNNFENENFVCTALIDMYAKCGNEVQAESVFKSIKAPCTATWNSMISGYSLSGLQHRALSCYLEMREKGLKPDEITFLGVLSACNHGGFVDEGKICFRAMIKEFGISPTLQHYALMVGLLGRACLFTEALYLIWKMDIKPDSAVWGALLSACIIHRELEVGEYVARKMFMLDYKNGGLYVLMSNLYATEAMWDDVVRVRNMMKDNGYDGYLGVSQI

SEQ ID NO: 70980 - DNA, 2568 bp, Arabidopsis thaliana
  misc_feature (1)..(2568): Ceres Seq. ID no. 3031600
  misc_feature (1)..(2568): Ortholog of  Ceres SEQ ID NO 14312537 as cited in SEQ ID NO 58953
atggcttctgattcttctctcggcaacaccaacgacggtcctccttctcccggagaaaacgtttcaagccctatcgaaaacacatactcttcccccgccgcacttcaccgtcgccggcgaggaagatcctctactcccacgcaattcgcaactcctccaccaccgccttcacgtctcgcatcatccaattccactcctccaacatctcgtccttccgccgccagatctaaaggaagaaatggacacggaggtggcggtggtggcggtggtggcggagacccagggacgccaatgtccactgacgagccactgccttcttccgatgacggtgaagaagacggaggcgacgatactactccgactttcgtttggggaactaacatcagtgtgcaagatgttaaatctgcgattgaaatgtttgttaagcatttcagagaagctagagagaatagtgatgatttgtttagagaagggaagtatatggtttcgataaggaaggtgattgagattgaaggagaatggattgatgttgatgcgtttgatgtgtttgattatgatcctgatttgtataacaagatggttcgttatcctttggaagttctcgctatcttcgatattgtgctgatggatattgtttccacgattaatcgtttgttcgagaaacatgttcaagttaggatttttaacctcaggacatctacttccatgagaaatctcaatccatctgatatcgagaagatgatctctttgaaaggtatgataattcggagtagctctatcattcctgaaataagggaagctgtgtttagatgccttgtttgtggttacttctctgaccccatcatcgttgatagagggaaaataagtgagcctcctacttgcttgaaacaagagtgcatgaccaagaactccatgacactagtgcacaaccgatgcaggtttgctgataagcagattgtgaggcttcaggaaacacctgatgagattccagaaggaggaacacctcacacagttagcttgttgctgcatgataagctagttgataatgggaagcctggtgatagaattgaggtcaccggaatttacagagcaatgactgtccgagtgggacctgctcacaggactgtgaaatctgtgtttaaggcatgtcatcttatttcttcctctacctatatcgattgccttcacataaagaaagcaagtaagttaagaatgtctgctgaggatcctatggatgttgacaatagtctgcgtagagttgatgaagatgtcgagttagatgaggagaagctgaggaagtttcaggaactctctaaacaaccagatatatatgagaggcttagtagatcactagcaccaaacatctgggagttggatgatgttaaaaagggtcttctatgccagctttttggagggaatgctttgaacttagcatctggtgctaattttcgtggtgacatcaacatcttacttgttggtgaccctggtacgagcaagtcccagctgctccagtacattcataagctttcaccccgtggcatttacacaagtgggcgagggagctcagctgttggtttaacagcttatgtagctaaagatcctgagacaggagaaactgttttggagagtggagctcttgttcttagtgaccgaggtatctgctgtattgatgaatttgacaaaatgtctgacagtgcgaggagcatgctacacgaggtgatggaacagcagactgtttcaatagcaaaggctggtattattgcatctctaaatgccagaacctctgtgttggcttgtgcaaatcctagtggctcacgttataatccccggctttctgttattgagaatattcaccttcctccaaccttgctatctagattcgatttgatctacttgattcttgacaagcccgatgagcagactgaccgaaggcttgcaaagcatattgtggcccttcactttgagaacgctgagagtgctcaggaggaagctatagatattactacactgacaacttatgttagctatgcccgcaagaacattcatcctaaactgtcagatgaagctgcagaggagttgacccgaggatatgttgagctgagaaaagcagggaagtttgctggcagtagcaaaaaggtcataacagcaactcctaggcagattgaaagtttgatcagacttagtgaggccttggctcggatgcgcttctccgaatgggttgaaaagcatgacgtggacgaggcatttcgacttctcagagttgcaatgcagcaatcagcaacggatcacgccacagggaccattgacatggacctgataaatactggagtgtcagcaagtgaacgaatgaggcgggatacctttgcgtcgtcaattagagacatagctctggagaagatgcaaattggaggatcatcaatgcgcttatccgagttacttgaagaactgaagaagcatggaggcaacataaacaccgaaattcatcttcatgatgttagaaaagcagtcgcgacgctagcgagtgaaggatttctggtagctgaaggtgatagaatcaagagagtataa

SEQ ID NO: 70981 - protein, 855 aa, Arabidopsis thaliana
  peptide (1)..(855): Ceres Seq. ID no. 3031601
MASDSSLGNTNDGPPSPGENVSSPIENTYSSPAALHRRRRGRSSTPTQFATPPPPPSRLASSNSTPPTSRPSAARSKGRNGHGGGGGGGGGGDPGTPMSTDEPLPSSDDGEEDGGDDTTPTFVWGTNISVQDVKSAIEMFVKHFREARENSDDLFREGKYMVSIRKVIEIEGEWIDVDAFDVFDYDPDLYNKMVRYPLEVLAIFDIVLMDIVSTINRLFEKHVQVRIFNLRTSTSMRNLNPSDIEKMISLKGMIIRSSSIIPEIREAVFRCLVCGYFSDPIIVDRGKISEPPTCLKQECMTKNSMTLVHNRCRFADKQIVRLQETPDEIPEGGTPHTVSLLLHDKLVDNGKPGDRIEVTGIYRAMTVRVGPAHRTVKSVFKACHLISSSTYIDCLHIKKASKLRMSAEDPMDVDNSLRRVDEDVELDEEKLRKFQELSKQPDIYERLSRSLAPNIWELDDVKKGLLCQLFGGNALNLASGANFRGDINILLVGDPGTSKSQLLQYIHKLSPRGIYTSGRGSSAVGLTAYVAKDPETGETVLESGALVLSDRGICCIDEFDKMSDSARSMLHEVMEQQTVSIAKAGIIASLNARTSVLACANPSGSRYNPRLSVIENIHLPPTLLSRFDLIYLILDKPDEQTDRRLAKHIVALHFENAESAQEEAIDITTLTTYVSYARKNIHPKLSDEAAEELTRGYVELRKAGKFAGSSKKVITATPRQIESLIRLSEALARMRFSEWVEKHDVDEAFRLLRVAMQQSATDHATGTIDMDLINTGVSASERMRRDTFASSIRDIALEKMQIGGSSMRLSELLEELKKHGGNINTEIHLHDVRKAVATLASEGFLVAEGDRIKRV

SEQ ID NO: 70982 - protein, 758 aa, Arabidopsis thaliana
  peptide (1)..(758): Ceres Seq. ID no. 3031602
MSTDEPLPSSDDGEEDGGDDTTPTFVWGTNISVQDVKSAIEMFVKHFREARENSDDLFREGKYMVSIRKVIEIEGEWIDVDAFDVFDYDPDLYNKMVRYPLEVLAIFDIVLMDIVSTINRLFEKHVQVRIFNLRTSTSMRNLNPSDIEKMISLKGMIIRSSSIIPEIREAVFRCLVCGYFSDPIIVDRGKISEPPTCLKQECMTKNSMTLVHNRCRFADKQIVRLQETPDEIPEGGTPHTVSLLLHDKLVDNGKPGDRIEVTGIYRAMTVRVGPAHRTVKSVFKACHLISSSTYIDCLHIKKASKLRMSAEDPMDVDNSLRRVDEDVELDEEKLRKFQELSKQPDIYERLSRSLAPNIWELDDVKKGLLCQLFGGNALNLASGANFRGDINILLVGDPGTSKSQLLQYIHKLSPRGIYTSGRGSSAVGLTAYVAKDPETGETVLESGALVLSDRGICCIDEFDKMSDSARSMLHEVMEQQTVSIAKAGIIASLNARTSVLACANPSGSRYNPRLSVIENIHLPPTLLSRFDLIYLILDKPDEQTDRRLAKHIVALHFENAESAQEEAIDITTLTTYVSYARKNIHPKLSDEAAEELTRGYVELRKAGKFAGSSKKVITATPRQIESLIRLSEALARMRFSEWVEKHDVDEAFRLLRVAMQQSATDHATGTIDMDLINTGVSASERMRRDTFASSIRDIALEKMQIGGSSMRLSELLEELKKHGGNINTEIHLHDVRKAVATLASEGFLVAEGDRIKRV

SEQ ID NO: 70983 - protein, 717 aa, Arabidopsis thaliana
  peptide (1)..(717): Ceres Seq. ID no. 3031603
MFVKHFREARENSDDLFREGKYMVSIRKVIEIEGEWIDVDAFDVFDYDPDLYNKMVRYPLEVLAIFDIVLMDIVSTINRLFEKHVQVRIFNLRTSTSMRNLNPSDIEKMISLKGMIIRSSSIIPEIREAVFRCLVCGYFSDPIIVDRGKISEPPTCLKQECMTKNSMTLVHNRCRFADKQIVRLQETPDEIPEGGTPHTVSLLLHDKLVDNGKPGDRIEVTGIYRAMTVRVGPAHRTVKSVFKACHLISSSTYIDCLHIKKASKLRMSAEDPMDVDNSLRRVDEDVELDEEKLRKFQELSKQPDIYERLSRSLAPNIWELDDVKKGLLCQLFGGNALNLASGANFRGDINILLVGDPGTSKSQLLQYIHKLSPRGIYTSGRGSSAVGLTAYVAKDPETGETVLESGALVLSDRGICCIDEFDKMSDSARSMLHEVMEQQTVSIAKAGIIASLNARTSVLACANPSGSRYNPRLSVIENIHLPPTLLSRFDLIYLILDKPDEQTDRRLAKHIVALHFENAESAQEEAIDITTLTTYVSYARKNIHPKLSDEAAEELTRGYVELRKAGKFAGSSKKVITATPRQIESLIRLSEALARMRFSEWVEKHDVDEAFRLLRVAMQQSATDHATGTIDMDLINTGVSASERMRRDTFASSIRDIALEKMQIGGSSMRLSELLEELKKHGGNINTEIHLHDVRKAVATLASEGFLVAEGDRIKRV

SEQ ID NO: 70984 - DNA, 1077 bp, Arabidopsis thaliana
  misc_feature (1)..(1077): Ceres Seq. ID no. 3031896
  misc_feature (1)..(1077): Ortholog of  Ceres SEQ ID NO 15172426 as cited in SEQ ID NO 59156
atgggattccgtgggaagtacttcttcccaattctcatgactctatcgttatttctaataatcagatacaactacatagtctccgatgatcctcctctccggcaagaactccccggtcgccgatcagcttcttccggagatgacatcacatataccgtcaagactccgtcaaagaagacaaagagactgtttcacacggcggtgacagccacggattccgtgtacagcacgtggcagtgtcgggtcatgtattattggtacaacaggttcagggacgaacccgggtcggatatgggcgggtatacccggatcttgcattcgggtcgacccgatggactcatggatgagatccctactttcgttgctgaccctcttccctccggtgttgacaagggatatgttgttctaaataggccttgggcctttgttcaatggcttcaacaagcacatatagaggaagattacattctcatggcggaacctgatcatatcatagttaaaccgataccaaacctagctagaggcaatctcgcggctgcgtttccctttttctacattgaaccaaagaaatatgaatcggttctccgcaaattcttccccaaagagaatggaccaatatcaagaatcgatcccatcgggaattctccagtgatcgtcactaagaatgcattaatgaaaattgctccaacatggatgaatgtttctttggctatgaagaatgacccacaaacagataaagcttttggttgggtccttgaaatgtatgcatatgctgtttcttctgcgttacacggcgtgagcaacattctacacaaggacttcatgattcagcctccttgggacactgaaacaaagaagacgttcataatacattacacttacggctgtgatttcgacatgaaggggaagatgatggtagggaagattggagaatggagattcgataaacggtcttacggggataaaccacccccaagaaatctcacactgcctccccgaggtgttcccgagagcgtggtgacattggtgacaatgataaacgaagctactgctaatattcccaactgggaatcttga

SEQ ID NO: 70985 - protein, 358 aa, Arabidopsis thaliana
  peptide (1)..(358): Ceres Seq. ID no. 3031897
MGFRGKYFFPILMTLSLFLIIRYNYIVSDDPPLRQELPGRRSASSGDDITYTVKTPSKKTKRLFHTAVTATDSVYSTWQCRVMYYWYNRFRDEPGSDMGGYTRILHSGRPDGLMDEIPTFVADPLPSGVDKGYVVLNRPWAFVQWLQQAHIEEDYILMAEPDHIIVKPIPNLARGNLAAAFPFFYIEPKKYESVLRKFFPKENGPISRIDPIGNSPVIVTKNALMKIAPTWMNVSLAMKNDPQTDKAFGWVLEMYAYAVSSALHGVSNILHKDFMIQPPWDTETKKTFIIHYTYGCDFDMKGKMMVGKIGEWRFDKRSYGDKPPPRNLTLPPRGVPESVVTLVTMINEATANIPNWES

SEQ ID NO: 70986 - protein, 346 aa, Arabidopsis thaliana
  peptide (1)..(346): Ceres Seq. ID no. 3031898
MTLSLFLIIRYNYIVSDDPPLRQELPGRRSASSGDDITYTVKTPSKKTKRLFHTAVTATDSVYSTWQCRVMYYWYNRFRDEPGSDMGGYTRILHSGRPDGLMDEIPTFVADPLPSGVDKGYVVLNRPWAFVQWLQQAHIEEDYILMAEPDHIIVKPIPNLARGNLAAAFPFFYIEPKKYESVLRKFFPKENGPISRIDPIGNSPVIVTKNALMKIAPTWMNVSLAMKNDPQTDKAFGWVLEMYAYAVSSALHGVSNILHKDFMIQPPWDTETKKTFIIHYTYGCDFDMKGKMMVGKIGEWRFDKRSYGDKPPPRNLTLPPRGVPESVVTLVTMINEATANIPNWES

SEQ ID NO: 70987 - protein, 276 aa, Arabidopsis thaliana
  peptide (1)..(276): Ceres Seq. ID no. 3031899
MYYWYNRFRDEPGSDMGGYTRILHSGRPDGLMDEIPTFVADPLPSGVDKGYVVLNRPWAFVQWLQQAHIEEDYILMAEPDHIIVKPIPNLARGNLAAAFPFFYIEPKKYESVLRKFFPKENGPISRIDPIGNSPVIVTKNALMKIAPTWMNVSLAMKNDPQTDKAFGWVLEMYAYAVSSALHGVSNILHKDFMIQPPWDTETKKTFIIHYTYGCDFDMKGKMMVGKIGEWRFDKRSYGDKPPPRNLTLPPRGVPESVVTLVTMINEATANIPNWES

SEQ ID NO: 70988 - DNA, 1689 bp, Arabidopsis thaliana
  misc_feature (1)..(1689): Ceres Seq. ID no. 3031983
  misc_feature (1)..(1689): Ortholog of  Ceres SEQ ID NO 15176302 as cited in SEQ ID NO 58592
atggattctgaagaagacatgctcgatgcgcacgatatggagtctggagaggatgatttctacagcggtggaactgatgattgtaatgatagtgatgatggtgaacctgattatgggtttgttgaggaagatgctgatgattctgctatgatcgcctctcatcgctctcagaaaaacttttgtgttctgagggaagaagatattcgcaggcatcagatggataatattgaacgagtttccgttgttctctcgataactgaggttgaagcgagtattctacttcgtcactttcactggagtgtcggtagagttcatgatgagtggtttgctgatgaagagagagttcggaagactgttggcatattggagagtcatgttgttccaccatctgatgacagtgaacttacatgtggaatctgtttcgattcctaccctcctgagaaaatcgcttcagtttcttgtggccatcctttctgcactacatgctggacaggttatatcagcacaaccattaatgatggcccgggatgtttgatgctaagatgtcctgacccatcttgtcttgctgctgttggtcatgatatggttgacaaattagcgtctgaagacgaaaaggagaagtacaacagatattttcttaggtcttatattgaagacaacagaaagatgaagtggtgtcctgccccgggatgtgattttgcgattgattttgttgcagggtctggaaattatgatgtttcctgcttgtgctcgtttagcttttgctggaattgcactgaggaggctcaccgacctgtggattgtagcacagtttcaaaatggatattaaagaacagcgctgaatctgaaaatatgaattggatacttgccaattcaaagccttgtccgagatgtaagaggccaattgaaaagaatcagggctgtatgcacatgacatgtacaccgccttgtaaatatgaattttgttggctatgtcttggtgcatggatggatcacggggaaagaactggtggtttttatgcttgtaaccgttatgaggtggccaagcaagaaggacagtatgatgagacagagaggaggagagagatggccaaaaattcgctagagagatacacacactattatgaacgctgggcaagcaatcaaacgtcgaggcaaaaggctatggctgatctgcagcaagcgcagatgcagaatcttgagaagcttagtgataaacagtgcacaccagagtctcagctcaaattcattttagaagcttggcttcagatcatcgaatgtaggcgagtcttgaaatggacttatgcatatggatactacctacctgagcatgaacatgccaaacgacaatttttcgagtatttgcaaggtgaagctgagtcaggtttagagaggctccatcaatgcgtagagaaagacttggttcagtttctcattgcggaaggtccatcaaaagatttcaatgatttccggacaaaactagctggtttgaccagcgtgacgaaaaactactttgagaatttggtgaaagctctggagaacggtcttgctgatgtagactcacatgcggcttgcagcagcaaatcaacaagctctaaatcaacaggttgcagtagcaaaacaagaggtaaaggcaaaggaagttccagaactggtggatccagcagaaacccagatgacaacttataa

SEQ ID NO: 70989 - protein, 562 aa, Arabidopsis thaliana
  peptide (1)..(562): Ceres Seq. ID no. 3031984
MDSEEDMLDAHDMESGEDDFYSGGTDDCNDSDDGEPDYGFVEEDADDSAMIASHRSQKNFCVLREEDIRRHQMDNIERVSVVLSITEVEASILLRHFHWSVGRVHDEWFADEERVRKTVGILESHVVPPSDDSELTCGICFDSYPPEKIASVSCGHPFCTTCWTGYISTTINDGPGCLMLRCPDPSCLAAVGHDMVDKLASEDEKEKYNRYFLRSYIEDNRKMKWCPAPGCDFAIDFVAGSGNYDVSCLCSFSFCWNCTEEAHRPVDCSTVSKWILKNSAESENMNWILANSKPCPRCKRPIEKNQGCMHMTCTPPCKYEFCWLCLGAWMDHGERTGGFYACNRYEVAKQEGQYDETERRREMAKNSLERYTHYYERWASNQTSRQKAMADLQQAQMQNLEKLSDKQCTPESQLKFILEAWLQIIECRRVLKWTYAYGYYLPEHEHAKRQFFEYLQGEAESGLERLHQCVEKDLVQFLIAEGPSKDFNDFRTKLAGLTSVTKNYFENLVKALENGLADVDSHAACSSKSTSSKSTGCSSKTRGKGKGSSRTGGSSRNPDDNL

SEQ ID NO: 70990 - protein, 556 aa, Arabidopsis thaliana
  peptide (1)..(556): Ceres Seq. ID no. 3031985
MLDAHDMESGEDDFYSGGTDDCNDSDDGEPDYGFVEEDADDSAMIASHRSQKNFCVLREEDIRRHQMDNIERVSVVLSITEVEASILLRHFHWSVGRVHDEWFADEERVRKTVGILESHVVPPSDDSELTCGICFDSYPPEKIASVSCGHPFCTTCWTGYISTTINDGPGCLMLRCPDPSCLAAVGHDMVDKLASEDEKEKYNRYFLRSYIEDNRKMKWCPAPGCDFAIDFVAGSGNYDVSCLCSFSFCWNCTEEAHRPVDCSTVSKWILKNSAESENMNWILANSKPCPRCKRPIEKNQGCMHMTCTPPCKYEFCWLCLGAWMDHGERTGGFYACNRYEVAKQEGQYDETERRREMAKNSLERYTHYYERWASNQTSRQKAMADLQQAQMQNLEKLSDKQCTPESQLKFILEAWLQIIECRRVLKWTYAYGYYLPEHEHAKRQFFEYLQGEAESGLERLHQCVEKDLVQFLIAEGPSKDFNDFRTKLAGLTSVTKNYFENLVKALENGLADVDSHAACSSKSTSSKSTGCSSKTRGKGKGSSRTGGSSRNPDDNL

SEQ ID NO: 70991 - protein, 550 aa, Arabidopsis thaliana
  peptide (1)..(550): Ceres Seq. ID no. 3031986
MESGEDDFYSGGTDDCNDSDDGEPDYGFVEEDADDSAMIASHRSQKNFCVLREEDIRRHQMDNIERVSVVLSITEVEASILLRHFHWSVGRVHDEWFADEERVRKTVGILESHVVPPSDDSELTCGICFDSYPPEKIASVSCGHPFCTTCWTGYISTTINDGPGCLMLRCPDPSCLAAVGHDMVDKLASEDEKEKYNRYFLRSYIEDNRKMKWCPAPGCDFAIDFVAGSGNYDVSCLCSFSFCWNCTEEAHRPVDCSTVSKWILKNSAESENMNWILANSKPCPRCKRPIEKNQGCMHMTCTPPCKYEFCWLCLGAWMDHGERTGGFYACNRYEVAKQEGQYDETERRREMAKNSLERYTHYYERWASNQTSRQKAMADLQQAQMQNLEKLSDKQCTPESQLKFILEAWLQIIECRRVLKWTYAYGYYLPEHEHAKRQFFEYLQGEAESGLERLHQCVEKDLVQFLIAEGPSKDFNDFRTKLAGLTSVTKNYFENLVKALENGLADVDSHAACSSKSTSSKSTGCSSKTRGKGKGSSRTGGSSRNPDDNL

SEQ ID NO: 70992 - DNA, 2352 bp, Arabidopsis thaliana
  misc_feature (1)..(2352): Ceres Seq. ID no. 3031991
  misc_feature (1)..(2352): Ortholog of  Ceres SEQ ID NO 13593889 as cited in SEQ ID NO 53305
  misc_feature (1)..(2352): Ortholog of  Ceres SEQ ID NO 13581959 as cited in SEQ ID NO 56156
atgggagctaagtgttgcagaggtcaccgaggatcagtggtggaatcaaatggttccgtgatcttgtcgttagctgacctagaggtccaagctactgaccttagggagatgactgtggtagaggcaagagatgctgctggaccatcagaaccaagacctccaagtcctaccttgaggccttcagaagttgaggagacatccgagcctgtatgtcagggatcactagtagaaacctctaatactgatgatgctggaccatcagaaccaaatccaccaagtcctaccttgaggccttcagaagttgagaagatatacgtgcctgtatgtcagggatcactagcagaaacctctaatcttgatcaagatggggtgtcaagttatgaagcatcgaatattttttggagtactgggtccttatcagacccgatcccaagtggtttttacactgtgatcccggttgagagattgatgcattttaaaagcattcctacattggaagaaattaatgcgctgggggaagatcgtcttaaggctgatgcgatttttgtagatcttaagaacgatatacagcttgttttgataaaggagtttgtcatcaaacttgtcacaggattggactccgataaagttattaagaaaattgctggactggtggcaaatatatataaaagaaaaactctgcagagtccggcaagaacgctgcaatattttgacgttcaagggtttaccctgctaggacaaatcaagcatggttcttgtcgtgcacgagcaatcctctttaaagttctagctgatgctgttggtcttgacagtaagcttgtaatgggtttccctactgatctgagattttctgctagcatcgactcatataatcatatctctgctgtggttgagctcaataatgttgaaatgctagtcgaccttaagcgatgtcctggtcagcttaaacccttctcacccaaggcagtttatatggctcatatctcaatggcatggcagcctgattttgtagacaataacccttgtgcttcaccattggagccaaacagtcccatggaacggtctggtccaccatctgcattacaatccgggcaagcaaaagcgttatgcacgtataaaagtaacttttgttgtttcctcagtcgttcactaggcgagccaaacatagctactgaagttttgcggagaaaggtcatcaaggaaccgccacctgctgatttcagtggtaactcaggagcagcggaatcggaaagtaagagaacaaatggaagggcaacaatgatgcagagtgacctcttgaaagagcgaggtgttgatgattcatctccttactctccagatgaaaagaatgtctctggtttccagcttgattcccatgacctagtgtctggtgaatgttcgacagtatatccgcggaagtcaatatcattgccgtcatctccgcgaagctatcaaattcaattatctgaaagaagtgaacattcacctcaagaaataagccacatttggaatgaagtgctggagtctccaatgttccagaataaacctttgttaccatttgaagaatggaacatagatttctccaagttgaaagttggggcttctgttgggagtggaacttctggagtagtatgtcgtggcgtctggaataaaactgaagttgcgatcaagatatttcttggacaacagcttacagctgagaacatgaaagttttctgcaatgagatatctattcttagccgtcttcaacatcccaatgttattctgctccttggagcatgcacaaagcctcctcagttatcactggtcacagagtatatgagtacggggtccttgtatgatgtgatccgtaccagaaaaaaggagttgagctggcaaaggaaactaaagattctggctgaaatttgcaggggtttgatgtacatacacaagatggggatagtccaccgtgatctaaccagtgcgaactgcctgttaaacaagtcgatagtcaagatctgtgattttgggctctcgagaaggatgacaggtacggcagtgaaagatactgaagctgcaggaactcctgagtggatggctcctgaacttatccgcaatgaacccgtcacagaaaaaagcgacatctttagctttggtgttataatgtgggaacttagcactctatccaagccctggaaaggagtcccaaaagaaaaagtcattcatatcgttgcaaacgaaggagcccggctcaaaatacctgaaggaccactacagaagcttattgcagattgttggtcggaaccagagcaaaggccgagctgtaaagagatactgcaccgtcttaagacctgcgagattccgatttgctga

SEQ ID NO: 70993 - protein, 783 aa, Arabidopsis thaliana
  peptide (1)..(783): Ceres Seq. ID no. 3031992
MGAKCCRGHRGSVVESNGSVILSLADLEVQATDLREMTVVEARDAAGPSEPRPPSPTLRPSEVEETSEPVCQGSLVETSNTDDAGPSEPNPPSPTLRPSEVEKIYVPVCQGSLAETSNLDQDGVSSYEASNIFWSTGSLSDPIPSGFYTVIPVERLMHFKSIPTLEEINALGEDRLKADAIFVDLKNDIQLVLIKEFVIKLVTGLDSDKVIKKIAGLVANIYKRKTLQSPARTLQYFDVQGFTLLGQIKHGSCRARAILFKVLADAVGLDSKLVMGFPTDLRFSASIDSYNHISAVVELNNVEMLVDLKRCPGQLKPFSPKAVYMAHISMAWQPDFVDNNPCASPLEPNSPMERSGPPSALQSGQAKALCTYKSNFCCFLSRSLGEPNIATEVLRRKVIKEPPPADFSGNSGAAESESKRTNGRATMMQSDLLKERGVDDSSPYSPDEKNVSGFQLDSHDLVSGECSTVYPRKSISLPSSPRSYQIQLSERSEHSPQEISHIWNEVLESPMFQNKPLLPFEEWNIDFSKLKVGASVGSGTSGVVCRGVWNKTEVAIKIFLGQQLTAENMKVFCNEISILSRLQHPNVILLLGACTKPPQLSLVTEYMSTGSLYDVIRTRKKELSWQRKLKILAEICRGLMYIHKMGIVHRDLTSANCLLNKSIVKICDFGLSRRMTGTAVKDTEAAGTPEWMAPELIRNEPVTEKSDIFSFGVIMWELSTLSKPWKGVPKEKVIHIVANEGARLKIPEGPLQKLIADCWSEPEQRPSCKEILHRLKTCEIPIC

SEQ ID NO: 70994 - protein, 747 aa, Arabidopsis thaliana
  peptide (1)..(747): Ceres Seq. ID no. 3031993
MTVVEARDAAGPSEPRPPSPTLRPSEVEETSEPVCQGSLVETSNTDDAGPSEPNPPSPTLRPSEVEKIYVPVCQGSLAETSNLDQDGVSSYEASNIFWSTGSLSDPIPSGFYTVIPVERLMHFKSIPTLEEINALGEDRLKADAIFVDLKNDIQLVLIKEFVIKLVTGLDSDKVIKKIAGLVANIYKRKTLQSPARTLQYFDVQGFTLLGQIKHGSCRARAILFKVLADAVGLDSKLVMGFPTDLRFSASIDSYNHISAVVELNNVEMLVDLKRCPGQLKPFSPKAVYMAHISMAWQPDFVDNNPCASPLEPNSPMERSGPPSALQSGQAKALCTYKSNFCCFLSRSLGEPNIATEVLRRKVIKEPPPADFSGNSGAAESESKRTNGRATMMQSDLLKERGVDDSSPYSPDEKNVSGFQLDSHDLVSGECSTVYPRKSISLPSSPRSYQIQLSERSEHSPQEISHIWNEVLESPMFQNKPLLPFEEWNIDFSKLKVGASVGSGTSGVVCRGVWNKTEVAIKIFLGQQLTAENMKVFCNEISILSRLQHPNVILLLGACTKPPQLSLVTEYMSTGSLYDVIRTRKKELSWQRKLKILAEICRGLMYIHKMGIVHRDLTSANCLLNKSIVKICDFGLSRRMTGTAVKDTEAAGTPEWMAPELIRNEPVTEKSDIFSFGVIMWELSTLSKPWKGVPKEKVIHIVANEGARLKIPEGPLQKLIADCWSEPEQRPSCKEILHRLKTCEIPIC

SEQ ID NO: 70995 - protein, 627 aa, Arabidopsis thaliana
  peptide (1)..(627): Ceres Seq. ID no. 3031994
MHFKSIPTLEEINALGEDRLKADAIFVDLKNDIQLVLIKEFVIKLVTGLDSDKVIKKIAGLVANIYKRKTLQSPARTLQYFDVQGFTLLGQIKHGSCRARAILFKVLADAVGLDSKLVMGFPTDLRFSASIDSYNHISAVVELNNVEMLVDLKRCPGQLKPFSPKAVYMAHISMAWQPDFVDNNPCASPLEPNSPMERSGPPSALQSGQAKALCTYKSNFCCFLSRSLGEPNIATEVLRRKVIKEPPPADFSGNSGAAESESKRTNGRATMMQSDLLKERGVDDSSPYSPDEKNVSGFQLDSHDLVSGECSTVYPRKSISLPSSPRSYQIQLSERSEHSPQEISHIWNEVLESPMFQNKPLLPFEEWNIDFSKLKVGASVGSGTSGVVCRGVWNKTEVAIKIFLGQQLTAENMKVFCNEISILSRLQHPNVILLLGACTKPPQLSLVTEYMSTGSLYDVIRTRKKELSWQRKLKILAEICRGLMYIHKMGIVHRDLTSANCLLNKSIVKICDFGLSRRMTGTAVKDTEAAGTPEWMAPELIRNEPVTEKSDIFSFGVIMWELSTLSKPWKGVPKEKVIHIVANEGARLKIPEGPLQKLIADCWSEPEQRPSCKEILHRLKTCEIPIC

SEQ ID NO: 70996 - DNA, 558 bp, Arabidopsis thaliana
  misc_feature (1)..(558): Ceres Seq. ID no. 3032488
  misc_feature (1)..(558): Ortholog of  Ceres SEQ ID NO 13597334 as cited in SEQ ID NO 64244
atgctacaaccttcagtgtcgtggttcatacaaacaagtaacaccattattcttggaggcaccattactcctgtctctacattcgagggtaaacaatttgagatcactgtatcagtatggaaagatcaagagtccgaaaactggtggctgagtttgggatccaaccattcattggttggatattggccaggtacaattttcccaaatttagcttatgcagacgacgtgcaatggggtggtgaggtcgtgaattcacaaagtcttggccgacacacaacaacacaaatgggatctggtcgcttctccgacggaggcttcagaaaagttagctactttcacaatttggagattgtcgataacaacagattcaagtccgttcgtgatgtaggagtactagtagacgaccctaagttctacaacatcagagcgatgtttagagatgattggggtagttacattttgtatggagggccagaccatatgcattcaggagtctcttttctagcattgagttcgcttattttttactttagtttcatcattttcattattatttag

SEQ ID NO: 70997 - protein, 185 aa, Arabidopsis thaliana
  peptide (1)..(185): Ceres Seq. ID no. 3032489
MLQPSVSWFIQTSNTIILGGTITPVSTFEGKQFEITVSVWKDQESENWWLSLGSNHSLVGYWPGTIFPNLAYADDVQWGGEVVNSQSLGRHTTTQMGSGRFSDGGFRKVSYFHNLEIVDNNRFKSVRDVGVLVDDPKFYNIRAMFRDDWGSYILYGGPDHMHSGVSFLALSSLIFYFSFIIFIII

SEQ ID NO: 70998 - DNA, 1050 bp, Arabidopsis thaliana
  misc_feature (1)..(1050): Ceres Seq. ID no. 3032595
  misc_feature (1)..(1050): Ortholog of  Ceres SEQ ID NO 15179824 as cited in SEQ ID NO 66250
  misc_feature (1)..(1050): Ortholog of  Ceres SEQ ID NO 13657872 as cited in SEQ ID NO 66357
atggttagattcatcgaagaaaatattactaaaatgttggagacaaaggccatctcaaactcggaggttttatatgtcggaggagacgacggagacacgtcaccaacgacgaaagttcttcatgattttcagatcaacagcggaggaggactgataagatcatgggttgattctatgagagcttgttctcctactcgccctaaatccttcaatagccaatcttgttggattaaggaacatccatctgctttgaacatgttcgaagaaatacttcataaatctgaaggaaaacaaatagttatgtttcttgattatgatggtactctctctcccattgttgatgatcctgatcgagctttcatgtccaagaagatgcgaaatactgtgaggaaacttgcaaagtgttttccaacagccatagttagtgggagatgcagagagaaggtttctagttttgtgaaattaactgagttatactacgctggaagtcatggcatggacatcaaaggaccagagcaaggatctaaatacaagaaagaaaatcagtctcttctttgtcaacccgcaactgaattcctcccggtgataaacgaggtttataaaaaactagtcgagaacactcaatcgattccaggagcgaaagttgagaacaacaaattttgtgcgtctgttcactttcgatgcgtagaagaaaataaatggagtgacttggcccatcaagttcgatcagtcttgaagaattaccccaagctcatgcttacccaaggaagaaaagtattggagattcgtccaatcattaagtgggataaaggcaaagcactcgagtttttgttagaatcactaggatatgataattgtaccgatgtttttcctatatatattggagatgatcgtaccgacgaagacgcctttaagatactgagagacaaaaaacaaggtcttggaattcttgtgtccaaatacgcaaaggagactaatgcttcttattctttgcaagagccagatgagatttcttataaaaaaaagtctcttattttctacgttttatag

SEQ ID NO: 70999 - protein, 349 aa, Arabidopsis thaliana
  peptide (1)..(349): Ceres Seq. ID no. 3032596
MVRFIEENITKMLETKAISNSEVLYVGGDDGDTSPTTKVLHDFQINSGGGLIRSWVDSMRACSPTRPKSFNSQSCWIKEHPSALNMFEEILHKSEGKQIVMFLDYDGTLSPIVDDPDRAFMSKKMRNTVRKLAKCFPTAIVSGRCREKVSSFVKLTELYYAGSHGMDIKGPEQGSKYKKENQSLLCQPATEFLPVINEVYKKLVENTQSIPGAKVENNKFCASVHFRCVEENKWSDLAHQVRSVLKNYPKLMLTQGRKVLEIRPIIKWDKGKALEFLLESLGYDNCTDVFPIYIGDDRTDEDAFKILRDKKQGLGILVSKYAKETNASYSLQEPDEISYKKKSLIFYVL

SEQ ID NO: 71000 - protein, 338 aa, Arabidopsis thaliana
  peptide (1)..(338): Ceres Seq. ID no. 3032597
MLETKAISNSEVLYVGGDDGDTSPTTKVLHDFQINSGGGLIRSWVDSMRACSPTRPKSFNSQSCWIKEHPSALNMFEEILHKSEGKQIVMFLDYDGTLSPIVDDPDRAFMSKKMRNTVRKLAKCFPTAIVSGRCREKVSSFVKLTELYYAGSHGMDIKGPEQGSKYKKENQSLLCQPATEFLPVINEVYKKLVENTQSIPGAKVENNKFCASVHFRCVEENKWSDLAHQVRSVLKNYPKLMLTQGRKVLEIRPIIKWDKGKALEFLLESLGYDNCTDVFPIYIGDDRTDEDAFKILRDKKQGLGILVSKYAKETNASYSLQEPDEISYKKKSLIFYVL

SEQ ID NO: 71001 - protein, 291 aa, Arabidopsis thaliana
  peptide (1)..(291): Ceres Seq. ID no. 3032598
MRACSPTRPKSFNSQSCWIKEHPSALNMFEEILHKSEGKQIVMFLDYDGTLSPIVDDPDRAFMSKKMRNTVRKLAKCFPTAIVSGRCREKVSSFVKLTELYYAGSHGMDIKGPEQGSKYKKENQSLLCQPATEFLPVINEVYKKLVENTQSIPGAKVENNKFCASVHFRCVEENKWSDLAHQVRSVLKNYPKLMLTQGRKVLEIRPIIKWDKGKALEFLLESLGYDNCTDVFPIYIGDDRTDEDAFKILRDKKQGLGILVSKYAKETNASYSLQEPDEISYKKKSLIFYVL

SEQ ID NO: 71002 - DNA, 1356 bp, Arabidopsis thaliana
  misc_feature (1)..(1356): Ceres Seq. ID no. 3034710
  misc_feature (1)..(1356): Ortholog of  Ceres SEQ ID NO 15177285 as cited in SEQ ID NO 52481
  misc_feature (1)..(1356): Ortholog of  Ceres SEQ ID NO 13594068 as cited in SEQ ID NO 58624
atgggtggagaagagagatcaggagatggagaaaaaagaggggaagaagtagttgatgctggttctctcttcgtccttaaatccaaagggacatggtggcactgcggattccacttgacgacgtctatagtggcgcctgcgctactgagtctaccgtacgccttcaagttcttaggatgggctgccgggatatcttgtctggtcggaggagcagccgttactttctactcgtacactcttctttctcttactctcgaacaccacgcttctctcggcaaccgttacctccgcttccgtgacatggctcatcacatcctcagtccgaaatggggaaggtactacgttggaccaatacaaatggcggtgtgctatggtgtggttattgccaatgcgctcttgggagggcaatgcctaaaggcaatgtacttggtagtgcagccaaatggggaaatgaaactctttgagtttgtgattatttttggatgcttacttttggttttggcacaattcccatcctttcactctctacgatacatcaactcactgtctctcctcctctgcctcctctacagtgcttctgccgctgctgcatccatctacattggaaaagaaccaaatgcaccagagaaggactatactatagttggtgatccagaaactagagtgtttggaatctttaatgctatggctattattgctactacatacggcaatggcattatacctgaaattcaggcaacaatatcggcaccagtgaaaggaaaaatgatgaaagggttgtgtatgtgttaccttgtagtaataatgacatttttcacagtagccatcacaggatattgggcattcggtaaaaaagccaatggacttatcttcaccaatttcttaaatgccgagacaaaccattactttgtccctacttggtttatttttctcgtcaatctcttcactgtccttcaactttcggccgttgctgtggtatacctacaacctataaacgatattttggaaagtgtgatcagcgatccaacaaagaaagaattctctatccgcaatgtcatccctcgactagttgtgcgttccctcttcgtcgtgatggctacaatcgttgcggcaatgcttccattttttggagatgtaaactccttgttaggcgctttcggttttatacctctagacttcgttcttcctgtagttttcttcaactttactttcaagccgtctaaaaaaagtttcattttttggatcaacactgtgatcgccgtggttttttcgtgtttaggggtgattgctatggtagcggcggttagacagattataatagatgccaatacgtataagttgtttgcggatgtataa

SEQ ID NO: 71003 - protein, 451 aa, Arabidopsis thaliana
  peptide (1)..(451): Ceres Seq. ID no. 3034711
MGGEERSGDGEKRGEEVVDAGSLFVLKSKGTWWHCGFHLTTSIVAPALLSLPYAFKFLGWAAGISCLVGGAAVTFYSYTLLSLTLEHHASLGNRYLRFRDMAHHILSPKWGRYYVGPIQMAVCYGVVIANALLGGQCLKAMYLVVQPNGEMKLFEFVIIFGCLLLVLAQFPSFHSLRYINSLSLLLCLLYSASAAAASIYIGKEPNAPEKDYTIVGDPETRVFGIFNAMAIIATTYGNGIIPEIQATISAPVKGKMMKGLCMCYLVVIMTFFTVAITGYWAFGKKANGLIFTNFLNAETNHYFVPTWFIFLVNLFTVLQLSAVAVVYLQPINDILESVISDPTKKEFSIRNVIPRLVVRSLFVVMATIVAAMLPFFGDVNSLLGAFGFIPLDFVLPVVFFNFTFKPSKKSFIFWINTVIAVVFSCLGVIAMVAAVRQIIIDANTYKLFADV

SEQ ID NO: 71004 - protein, 351 aa, Arabidopsis thaliana
  peptide (1)..(351): Ceres Seq. ID no. 3034712
MAHHILSPKWGRYYVGPIQMAVCYGVVIANALLGGQCLKAMYLVVQPNGEMKLFEFVIIFGCLLLVLAQFPSFHSLRYINSLSLLLCLLYSASAAAASIYIGKEPNAPEKDYTIVGDPETRVFGIFNAMAIIATTYGNGIIPEIQATISAPVKGKMMKGLCMCYLVVIMTFFTVAITGYWAFGKKANGLIFTNFLNAETNHYFVPTWFIFLVNLFTVLQLSAVAVVYLQPINDILESVISDPTKKEFSIRNVIPRLVVRSLFVVMATIVAAMLPFFGDVNSLLGAFGFIPLDFVLPVVFFNFTFKPSKKSFIFWINTVIAVVFSCLGVIAMVAAVRQIIIDANTYKLFADV

SEQ ID NO: 71005 - protein, 332 aa, Arabidopsis thaliana
  peptide (1)..(332): Ceres Seq. ID no. 3034713
MAVCYGVVIANALLGGQCLKAMYLVVQPNGEMKLFEFVIIFGCLLLVLAQFPSFHSLRYINSLSLLLCLLYSASAAAASIYIGKEPNAPEKDYTIVGDPETRVFGIFNAMAIIATTYGNGIIPEIQATISAPVKGKMMKGLCMCYLVVIMTFFTVAITGYWAFGKKANGLIFTNFLNAETNHYFVPTWFIFLVNLFTVLQLSAVAVVYLQPINDILESVISDPTKKEFSIRNVIPRLVVRSLFVVMATIVAAMLPFFGDVNSLLGAFGFIPLDFVLPVVFFNFTFKPSKKSFIFWINTVIAVVFSCLGVIAMVAAVRQIIIDANTYKLFADV

SEQ ID NO: 71006 - DNA, 2589 bp, Arabidopsis thaliana
  misc_feature (1)..(2589): Ceres Seq. ID no. 3036346
  misc_feature (1)..(2589): Ortholog of  Ceres SEQ ID NO 13600310 as cited in SEQ ID NO 5086
  misc_feature (1)..(2589): Ortholog of  Ceres SEQ ID NO 14313863 as cited in SEQ ID NO 54791
atgggagcgattgctggagaagagctgaagaaaatggagaagacacaggtgcatgttgcccgggaagagaagatattggttctggtgagactgagacctctgaacgagaaagagatcttggctaatgaagctgcggactgggaatgcatcaacgacaccaccgtattgtacagaaacacgttgcgtgagggctcaacttttccttctgcatactcatttgatagagtgtaccgaggtgaatgcccaaccagacaagtttacgaagatggccccaaggaagttgctctctcggtggtcaaaggaattaactctagtattttcgcgtatggtcagacgagcagtggaaagacatacaccatgtctggtataactgagtttgctgtggctgacatatttgattatatatttaagcatgaagatagggcatttgttgtgaaattttcggctatagagatctacaatgaggccatccgcgatcttctcagcccagatagtacaccactgaggctacgagatgaccctgagaaaggggccgccgttgaaaaagccacagaggaaacgctgagagattggaaccatttgaaggaacttatctcagtttgtgaagcacagcggaagattggtgaaacttcactaaatgagagaagttcaagatctcatcaaattatcaaactaacagttgaaagctctgctcgtgagttcttaggcaaggaaaactcaaccactctcatggcgagtgtgaattttattgatttggcggggagcgagcgtgcatcgcaggccttatcagctggtgcaagacttaaggagggttgtcatatcaatcgaagcttgctgactctaggaacagtgatacgcaaactcagcaacggaagacaaggacacatcaactatagagactccaaactcacacgcattcttcagccgtgcttggggggcaatgccagaaccgccatagtctgcacgctgagtccagcgaggagtcatgtggagcagactagaaacactctcttgtttgcttgctgtgccaaggaagtcaccacgaaagcacagatcaatgttgttatgtcagacaaggctttggtgaagcaactacagcgtgagctagccaggctcgagagcgagctgagaaacccagcacctgcaacctcaagctgcgattgtggggtgacactgagaaagaaagatcttcagatacaaaagatggagaagcagcttgcagaaatgacaaaacagcgggatattgctcaatctcggcttgaagattttatgaagatggtggaacacgatgcgtcttcgaaggctggaactccgcatttccgtaaccgtaccaacaagtgggaggatggttcagtgtcagagatatcaggcgtggttgatccagacaggaccagtttcatatcagatgggacgtcaacgcctctgtcgactgcaagagctcatgttaggtctcactctgatgatgatctggaggaggaaatgtcgcccaggcattcaggagatcaatcagaagaatactgcaaagaggtacaatgcattgagatggaagaatcgaccagagacattaataacgacagtgaagaaaggacagacgcagaaacacttttgggacacaatgcagaggcaaacggtgaaacaggtagtgctcaacacaggatcccgtcaagtgttagaagtgtcaggaggaggaagagttggagccgtggagataccatgacaggcacaagcactcctcctgatgccctggagacagactaccgtggaagaccggagggtcatggatttgcgtttcctgatttggagtttggttctggtgggaaattgttgaggaacgattcaatgacttctcgtggaagtgattcaactgaggctcacagcattggaacaccgttggtgggagaagagggaggtatcaccagcatacggtcatttgttgaagggctgaaggagatggtttcggatccggagaattcagggaaaatgaggaaggacattggtgtggatgctatggaggaagaggtgtctgggacaatgacaaactggtcggaggaattcgagagacagagagaacaaattctggggctgtggcagacatgtcatgtctcgttggtgcatagaacgtacttcttcttgctcttcacgggagatcaagcggattcgatatacatcggagtagagctaagaagactctcctttatgaaagaaagtttctctcaaggaaaccatgcctttgaaagaggacagacactcacaatagcttcaagcctgaaggcgcttcatagggagagacggatgctaagcaagcttgtcgggaagaggtttactggagaggaaaggaagagactttaccagaagtttgggattgctgtgaactcgaaacgtcggcggttgcagctagcgaaccagctctggagtaaacccaatgacataactcatgcggttgaaagcgcagccgttgtagcgaaactggttaggtttgtggagcaaggtagagctatgaaggagatgtttggtctgagcttcacgcctccgctaccgacaacgcggagatcactaaactggaggaaaagcatggccacactgttctaa

SEQ ID NO: 71007 - protein, 862 aa, Arabidopsis thaliana
  peptide (1)..(862): Ceres Seq. ID no. 3036347
MGAIAGEELKKMEKTQVHVAREEKILVLVRLRPLNEKEILANEAADWECINDTTVLYRNTLREGSTFPSAYSFDRVYRGECPTRQVYEDGPKEVALSVVKGINSSIFAYGQTSSGKTYTMSGITEFAVADIFDYIFKHEDRAFVVKFSAIEIYNEAIRDLLSPDSTPLRLRDDPEKGAAVEKATEETLRDWNHLKELISVCEAQRKIGETSLNERSSRSHQIIKLTVESSAREFLGKENSTTLMASVNFIDLAGSERASQALSAGARLKEGCHINRSLLTLGTVIRKLSNGRQGHINYRDSKLTRILQPCLGGNARTAIVCTLSPARSHVEQTRNTLLFACCAKEVTTKAQINVVMSDKALVKQLQRELARLESELRNPAPATSSCDCGVTLRKKDLQIQKMEKQLAEMTKQRDIAQSRLEDFMKMVEHDASSKAGTPHFRNRTNKWEDGSVSEISGVVDPDRTSFISDGTSTPLSTARAHVRSHSDDDLEEEMSPRHSGDQSEEYCKEVQCIEMEESTRDINNDSEERTDAETLLGHNAEANGETGSAQHRIPSSVRSVRRRKSWSRGDTMTGTSTPPDALETDYRGRPEGHGFAFPDLEFGSGGKLLRNDSMTSRGSDSTEAHSIGTPLVGEEGGITSIRSFVEGLKEMVSDPENSGKMRKDIGVDAMEEEVSGTMTNWSEEFERQREQILGLWQTCHVSLVHRTYFFLLFTGDQADSIYIGVELRRLSFMKESFSQGNHAFERGQTLTIASSLKALHRERRMLSKLVGKRFTGEERKRLYQKFGIAVNSKRRRLQLANQLWSKPNDITHAVESAAVVAKLVRFVEQGRAMKEMFGLSFTPPLPTTRRSLNWRKSMATLF

SEQ ID NO: 71008 - protein, 851 aa, Arabidopsis thaliana
  peptide (1)..(851): Ceres Seq. ID no. 3036348
MEKTQVHVAREEKILVLVRLRPLNEKEILANEAADWECINDTTVLYRNTLREGSTFPSAYSFDRVYRGECPTRQVYEDGPKEVALSVVKGINSSIFAYGQTSSGKTYTMSGITEFAVADIFDYIFKHEDRAFVVKFSAIEIYNEAIRDLLSPDSTPLRLRDDPEKGAAVEKATEETLRDWNHLKELISVCEAQRKIGETSLNERSSRSHQIIKLTVESSAREFLGKENSTTLMASVNFIDLAGSERASQALSAGARLKEGCHINRSLLTLGTVIRKLSNGRQGHINYRDSKLTRILQPCLGGNARTAIVCTLSPARSHVEQTRNTLLFACCAKEVTTKAQINVVMSDKALVKQLQRELARLESELRNPAPATSSCDCGVTLRKKDLQIQKMEKQLAEMTKQRDIAQSRLEDFMKMVEHDASSKAGTPHFRNRTNKWEDGSVSEISGVVDPDRTSFISDGTSTPLSTARAHVRSHSDDDLEEEMSPRHSGDQSEEYCKEVQCIEMEESTRDINNDSEERTDAETLLGHNAEANGETGSAQHRIPSSVRSVRRRKSWSRGDTMTGTSTPPDALETDYRGRPEGHGFAFPDLEFGSGGKLLRNDSMTSRGSDSTEAHSIGTPLVGEEGGITSIRSFVEGLKEMVSDPENSGKMRKDIGVDAMEEEVSGTMTNWSEEFERQREQILGLWQTCHVSLVHRTYFFLLFTGDQADSIYIGVELRRLSFMKESFSQGNHAFERGQTLTIASSLKALHRERRMLSKLVGKRFTGEERKRLYQKFGIAVNSKRRRLQLANQLWSKPNDITHAVESAAVVAKLVRFVEQGRAMKEMFGLSFTPPLPTTRRSLNWRKSMATLF

SEQ ID NO: 71009 - protein, 743 aa, Arabidopsis thaliana
  peptide (1)..(743): Ceres Seq. ID no. 3036349
MSGITEFAVADIFDYIFKHEDRAFVVKFSAIEIYNEAIRDLLSPDSTPLRLRDDPEKGAAVEKATEETLRDWNHLKELISVCEAQRKIGETSLNERSSRSHQIIKLTVESSAREFLGKENSTTLMASVNFIDLAGSERASQALSAGARLKEGCHINRSLLTLGTVIRKLSNGRQGHINYRDSKLTRILQPCLGGNARTAIVCTLSPARSHVEQTRNTLLFACCAKEVTTKAQINVVMSDKALVKQLQRELARLESELRNPAPATSSCDCGVTLRKKDLQIQKMEKQLAEMTKQRDIAQSRLEDFMKMVEHDASSKAGTPHFRNRTNKWEDGSVSEISGVVDPDRTSFISDGTSTPLSTARAHVRSHSDDDLEEEMSPRHSGDQSEEYCKEVQCIEMEESTRDINNDSEERTDAETLLGHNAEANGETGSAQHRIPSSVRSVRRRKSWSRGDTMTGTSTPPDALETDYRGRPEGHGFAFPDLEFGSGGKLLRNDSMTSRGSDSTEAHSIGTPLVGEEGGITSIRSFVEGLKEMVSDPENSGKMRKDIGVDAMEEEVSGTMTNWSEEFERQREQILGLWQTCHVSLVHRTYFFLLFTGDQADSIYIGVELRRLSFMKESFSQGNHAFERGQTLTIASSLKALHRERRMLSKLVGKRFTGEERKRLYQKFGIAVNSKRRRLQLANQLWSKPNDITHAVESAAVVAKLVRFVEQGRAMKEMFGLSFTPPLPTTRRSLNWRKSMATLF

SEQ ID NO: 71010 - DNA, 1476 bp, Arabidopsis thaliana
  misc_feature (1)..(1476): Ceres Seq. ID no. 3036983
  misc_feature (1)..(1476): Ortholog of  Ceres SEQ ID NO 13660287 as cited in SEQ ID NO 67316
atggccggaagaggaggagagctcacggaggctctggtgaaaaagaccggcagagaagaagaggatgagttggggatgaaggagaaggtttggattgaatcaaagaaactgtgggttgtggcggcgccagcgatcttcacaagatactctacgttcggagtttcaatggtaactcaagctttcattggccatcttggcccaaccgagttggccgcttactctatcaccttcaccattctcctccgtttcagtaatggtatcttgttaggtatggccggtgcactaggaacattatgtggtcaagcctacggagccaaacaataccagatgctcgggatctacctccaaaggtcatggatcgtcctcacaggtggtaccatttgcctcatgcccgtcttcatctttgcgggccctatcctcttagctttaggtcaagaggaacgcattgttcgtgtggctcgggtcttagccctatgggtcataggcatcaacttctccttcgtgccctccttcacttgccaaatgtttctccaagctcagagcaagaacaagattatttcctacgtgactgctgtctccttagggctccatgtcttcttctcgtggctcctagtggctcatttcaattttgggatcactggtgcgatgacctctatgctaattgcgttctggttgcctatcattgtgcagctcttgtatgtaacatgtggtggatgtaaggatacatggagaggattctctatgttggccttcaaagatttgtggcccgtcttaaaactatctttgtcttccggtggaatgctttgcttggagttatggtacaactcggtattggtattgctcactggaaatttgaaaaacgcagaggtggctcttgatgcactagcaatctgcatcagcataaatgcactggagatgatgatagcacttgggtttttggcagcagtaagtgtaagagtgtccaacgagctcggtagtggaaaccccaaaggagccaagtttgcaacattgatagcggttttcacgtcactctctataggaatagttctattcttcgtttttttgtttttgaggggaagaatttcctacattttcactacaagtgaagctgtcgcggccgaagttgctgatctttctccacttttagcattttccatcctcttgaacagtgttcaacctgttctctctggagtggcaatcggagcgggatggcaaggatatgtggcttacgttaaccttgcttgctattaccttgtcggaattcctattggtgttatccttggttatgttgttggtttgcaagtgaaaggtgtatggataggaatgctttttggaatattcgttcagacttgtgtgctcaccgtcatgactctcagaacagattgggatcaacaggtatctacgtcgttgagaaatataaaccggtgggttgtaccagaatctagagatgcaaatcaaatttcatcagaggaataa

SEQ ID NO: 71011 - protein, 491 aa, Arabidopsis thaliana
  peptide (1)..(491): Ceres Seq. ID no. 3036984
MAGRGGELTEALVKKTGREEEDELGMKEKVWIESKKLWVVAAPAIFTRYSTFGVSMVTQAFIGHLGPTELAAYSITFTILLRFSNGILLGMAGALGTLCGQAYGAKQYQMLGIYLQRSWIVLTGGTICLMPVFIFAGPILLALGQEERIVRVARVLALWVIGINFSFVPSFTCQMFLQAQSKNKIISYVTAVSLGLHVFFSWLLVAHFNFGITGAMTSMLIAFWLPIIVQLLYVTCGGCKDTWRGFSMLAFKDLWPVLKLSLSSGGMLCLELWYNSVLVLLTGNLKNAEVALDALAICISINALEMMIALGFLAAVSVRVSNELGSGNPKGAKFATLIAVFTSLSIGIVLFFVFLFLRGRISYIFTTSEAVAAEVADLSPLLAFSILLNSVQPVLSGVAIGAGWQGYVAYVNLACYYLVGIPIGVILGYVVGLQVKGVWIGMLFGIFVQTCVLTVMTLRTDWDQQVSTSLRNINRWVVPESRDANQISSEE

SEQ ID NO: 71012 - protein, 466 aa, Arabidopsis thaliana
  peptide (1)..(466): Ceres Seq. ID no. 3036985
MKEKVWIESKKLWVVAAPAIFTRYSTFGVSMVTQAFIGHLGPTELAAYSITFTILLRFSNGILLGMAGALGTLCGQAYGAKQYQMLGIYLQRSWIVLTGGTICLMPVFIFAGPILLALGQEERIVRVARVLALWVIGINFSFVPSFTCQMFLQAQSKNKIISYVTAVSLGLHVFFSWLLVAHFNFGITGAMTSMLIAFWLPIIVQLLYVTCGGCKDTWRGFSMLAFKDLWPVLKLSLSSGGMLCLELWYNSVLVLLTGNLKNAEVALDALAICISINALEMMIALGFLAAVSVRVSNELGSGNPKGAKFATLIAVFTSLSIGIVLFFVFLFLRGRISYIFTTSEAVAAEVADLSPLLAFSILLNSVQPVLSGVAIGAGWQGYVAYVNLACYYLVGIPIGVILGYVVGLQVKGVWIGMLFGIFVQTCVLTVMTLRTDWDQQVSTSLRNINRWVVPESRDANQISSEE

SEQ ID NO: 71013 - protein, 436 aa, Arabidopsis thaliana
  peptide (1)..(436): Ceres Seq. ID no. 3036986
MVTQAFIGHLGPTELAAYSITFTILLRFSNGILLGMAGALGTLCGQAYGAKQYQMLGIYLQRSWIVLTGGTICLMPVFIFAGPILLALGQEERIVRVARVLALWVIGINFSFVPSFTCQMFLQAQSKNKIISYVTAVSLGLHVFFSWLLVAHFNFGITGAMTSMLIAFWLPIIVQLLYVTCGGCKDTWRGFSMLAFKDLWPVLKLSLSSGGMLCLELWYNSVLVLLTGNLKNAEVALDALAICISINALEMMIALGFLAAVSVRVSNELGSGNPKGAKFATLIAVFTSLSIGIVLFFVFLFLRGRISYIFTTSEAVAAEVADLSPLLAFSILLNSVQPVLSGVAIGAGWQGYVAYVNLACYYLVGIPIGVILGYVVGLQVKGVWIGMLFGIFVQTCVLTVMTLRTDWDQQVSTSLRNINRWVVPESRDANQISSEE

SEQ ID NO: 71014 - DNA, 1485 bp, Arabidopsis thaliana
  misc_feature (1)..(1485): Ceres Seq. ID no. 3036987
  misc_feature (1)..(1485): Ortholog of  Ceres SEQ ID NO 13660287 as cited in SEQ ID NO 67316
atggccggagaaggaggagagctcacggcggctttgttgaaaaagacgactgagaacggaggagaagaaaatgatgagttagggttgaaggaaaaagtttggattgaatcaaagaagctatgggttgtggcggcgccatcgatcttcacgaagttctctacgtacggagtttcattggtaactcaaggctttgttggccatattggcccaaccgagttggccgcttactctatcaccttcaccgttctcctccgtttcagtaatggtatcttgttaggtatggccagtgcactaggaacattatgtggtcaagcctacggagccaaacaataccatatgctcgggattcacctccaaaggtcatggatcgtccttacaggttgtaccatttgcatcatgcccatcttcatcttttcaggcccgatcctcttagccttaggtcaagaggaccacattgttcgtgtggctcgggtcatagccctatggctcatagccatcaacttcaccttcgtacccgccttcacttgccaaatattcctccaatctcagagcaagaacaagatcatcgcctacgtgtctgctgtaaccttagggctccatgttttcttctcgtggctcctagtggttcatttcaatttcgggatcactggtgcaatgacctctacgctagttgcgttctggatgcctaacattgtgcagctcttgtatgtcacatccggtgggtgtaaggatacatggagaggattcactatgttggccttcaaagatttatggcccgtcttcaaactatctttgtcttccggtggaatggtttgcttggagttatggtacaactcgatattagtattgctcactgggaatttgaaaaacgcagaggtggcgattgatgcactagcaatctgcatcaacgtaaatgcactgcagatgatgatagcacttgggtttttggcagcagtaagtgtaagagtgtccaacgagctcggtaggggaaaccccgaaggcgccaaatttgcaacaatcgtagcggttttcacgtcactctctataggattagttctattcttcgtcttcttgtttctaaggggaagaatttcgtacattttcactacaagtgaagctgtggcagccgaagtcgctgatctttctccacttttagcattttccatcctcttgaacagtgttcaacccgttctctcaggagtggcagtgggagcgggatggcaaggatatgtggcttacattaaccttgcttgctattaccttctcggaattcctgttggtcttgtccttggttacgttgttggtttgcaagtcaaaggtgtatggataggaatgctttttggaatatttgttcagacttgtgtgcttaccatcatgactctcagaacagattgggatcaacaggtatctacgtcgttgaaaaatataaaccggtgggttgtaccagaatctagagatgcaaatcaaatttcatcagaggaataa

SEQ ID NO: 71015 - protein, 494 aa, Arabidopsis thaliana
  peptide (1)..(494): Ceres Seq. ID no. 3036988
MAGEGGELTAALLKKTTENGGEENDELGLKEKVWIESKKLWVVAAPSIFTKFSTYGVSLVTQGFVGHIGPTELAAYSITFTVLLRFSNGILLGMASALGTLCGQAYGAKQYHMLGIHLQRSWIVLTGCTICIMPIFIFSGPILLALGQEDHIVRVARVIALWLIAINFTFVPAFTCQIFLQSQSKNKIIAYVSAVTLGLHVFFSWLLVVHFNFGITGAMTSTLVAFWMPNIVQLLYVTSGGCKDTWRGFTMLAFKDLWPVFKLSLSSGGMVCLELWYNSILVLLTGNLKNAEVAIDALAICINVNALQMMIALGFLAAVSVRVSNELGRGNPEGAKFATIVAVFTSLSIGLVLFFVFLFLRGRISYIFTTSEAVAAEVADLSPLLAFSILLNSVQPVLSGVAVGAGWQGYVAYINLACYYLLGIPVGLVLGYVVGLQVKGVWIGMLFGIFVQTCVLTIMTLRTDWDQQVSTSLKNINRWVVPESRDANQISSEE

SEQ ID NO: 71016 - protein, 401 aa, Arabidopsis thaliana
  peptide (1)..(401): Ceres Seq. ID no. 3036989
MASALGTLCGQAYGAKQYHMLGIHLQRSWIVLTGCTICIMPIFIFSGPILLALGQEDHIVRVARVIALWLIAINFTFVPAFTCQIFLQSQSKNKIIAYVSAVTLGLHVFFSWLLVVHFNFGITGAMTSTLVAFWMPNIVQLLYVTSGGCKDTWRGFTMLAFKDLWPVFKLSLSSGGMVCLELWYNSILVLLTGNLKNAEVAIDALAICINVNALQMMIALGFLAAVSVRVSNELGRGNPEGAKFATIVAVFTSLSIGLVLFFVFLFLRGRISYIFTTSEAVAAEVADLSPLLAFSILLNSVQPVLSGVAVGAGWQGYVAYINLACYYLLGIPVGLVLGYVVGLQVKGVWIGMLFGIFVQTCVLTIMTLRTDWDQQVSTSLKNINRWVVPESRDANQISSEE

SEQ ID NO: 71017 - protein, 382 aa, Arabidopsis thaliana
  peptide (1)..(382): Ceres Seq. ID no. 3036990
MLGIHLQRSWIVLTGCTICIMPIFIFSGPILLALGQEDHIVRVARVIALWLIAINFTFVPAFTCQIFLQSQSKNKIIAYVSAVTLGLHVFFSWLLVVHFNFGITGAMTSTLVAFWMPNIVQLLYVTSGGCKDTWRGFTMLAFKDLWPVFKLSLSSGGMVCLELWYNSILVLLTGNLKNAEVAIDALAICINVNALQMMIALGFLAAVSVRVSNELGRGNPEGAKFATIVAVFTSLSIGLVLFFVFLFLRGRISYIFTTSEAVAAEVADLSPLLAFSILLNSVQPVLSGVAVGAGWQGYVAYINLACYYLLGIPVGLVLGYVVGLQVKGVWIGMLFGIFVQTCVLTIMTLRTDWDQQVSTSLKNINRWVVPESRDANQISSEE

SEQ ID NO: 71018 - DNA, 1548 bp, Arabidopsis thaliana
  misc_feature (1)..(1548): Ceres Seq. ID no. 3037975
  misc_feature (1)..(1548): Ortholog of  Ceres SEQ ID NO 13593889 as cited in SEQ ID NO 53305
  misc_feature (1)..(1548): Ortholog of  Ceres SEQ ID NO 13581959 as cited in SEQ ID NO 56156
  misc_feature (1)..(1548): Ortholog of  Ceres SEQ ID NO 15171809 as cited in SEQ ID NO 57329
atggatggagaggttacttcttggattaggagagcaaatttctctcatactgtttgttatcgtatgattacgccgagtttagaatctatgccttttactgtaaaccaagagaagagttctggattgaaaagaatgactttgagttcaccatctgatttgaaatcacttgtaggaatttgtcagagtacgcagcagctgactggtttgagttgtggtagtgttgttggtactgaagtgcagaggaatccagttactaataagaagagatctgtttctccgttgcctcatatggctctttctgatgcttttatcgaagcaaagtctgatattaagaggttttctactccacatcctagaagagtggaaccagagaagggaatgaaggccaagtcgtcgtcccgcaaagattcttctgagaaaaaatcagttaatctacggtccctgtctcactcgggtcctattagggatcttagtacgcagaaagttaaagagaggggaaagagcaagatagataagaagtcttcaaagtctgttgactatagaggttctaaagtaagttctgcaggagtgcttgaagaatgcctcattgatgtgtctaagttgtcttatggggataggtttgctcacgggaaatatagccagatttatcatggtgaatatgaaggcaaagctgttgctctgaagattatcacagcgcctgaggatagtgacgacatattcttgggagctcgtttagaaaaagagtttatcgtggaagccactcttttatctcgactaagccatccaaatgtcgttaagtttgttggagtgaatactggaaactgtatcatcacagagtatgtacctcgagggtctttaagatcatatctgcacaagctcgagcagaaatcccttcctttggaacagctaatcgattttggtctggatattgctaaaggaatggaatatattcactcaagagagatagttcatcaggatctgaagccagaaaacgtgttgatcgacaatgactttcacttgaagattgctgactttggcatagcgtgcgaggaggagtactgtgatgttttgggggataacataggaacttataggtggatggcacctgaagttttaaaacggataccacatggacggaagtgcgatgtttatagttttggacttcttttatgggaaatggtagctggagcacttccatatgaggagatgaaatttgctgaacaaattgcctacgcagttatatacaagaaaattaggccagttataccgacggattgtccagcggccatgaaagagctgatcgagcgatgttggtcatcgcaaacagacaagagaccggaattctggcagattgtcaaagtgttggaacatttcaagaagtctctaacaagcgaaggaaaacttaatcttttacctagccagatctgtccagaactaaagaaatgtcctaaattctggattcatatattcggatcattccaccaccacagcagcggtggcggcagcagcagcaacaactcagccttacctaagcctaaattcgcttga

SEQ ID NO: 71019 - protein, 515 aa, Arabidopsis thaliana
  peptide (1)..(515): Ceres Seq. ID no. 3037976
MDGEVTSWIRRANFSHTVCYRMITPSLESMPFTVNQEKSSGLKRMTLSSPSDLKSLVGICQSTQQLTGLSCGSVVGTEVQRNPVTNKKRSVSPLPHMALSDAFIEAKSDIKRFSTPHPRRVEPEKGMKAKSSSRKDSSEKKSVNLRSLSHSGPIRDLSTQKVKERGKSKIDKKSSKSVDYRGSKVSSAGVLEECLIDVSKLSYGDRFAHGKYSQIYHGEYEGKAVALKIITAPEDSDDIFLGARLEKEFIVEATLLSRLSHPNVVKFVGVNTGNCIITEYVPRGSLRSYLHKLEQKSLPLEQLIDFGLDIAKGMEYIHSREIVHQDLKPENVLIDNDFHLKIADFGIACEEEYCDVLGDNIGTYRWMAPEVLKRIPHGRKCDVYSFGLLLWEMVAGALPYEEMKFAEQIAYAVIYKKIRPVIPTDCPAAMKELIERCWSSQTDKRPEFWQIVKVLEHFKKSLTSEGKLNLLPSQICPELKKCPKFWIHIFGSFHHHSSGGGSSSNNSALPKPKFA

SEQ ID NO: 71020 - protein, 494 aa, Arabidopsis thaliana
  peptide (1)..(494): Ceres Seq. ID no. 3037977
MITPSLESMPFTVNQEKSSGLKRMTLSSPSDLKSLVGICQSTQQLTGLSCGSVVGTEVQRNPVTNKKRSVSPLPHMALSDAFIEAKSDIKRFSTPHPRRVEPEKGMKAKSSSRKDSSEKKSVNLRSLSHSGPIRDLSTQKVKERGKSKIDKKSSKSVDYRGSKVSSAGVLEECLIDVSKLSYGDRFAHGKYSQIYHGEYEGKAVALKIITAPEDSDDIFLGARLEKEFIVEATLLSRLSHPNVVKFVGVNTGNCIITEYVPRGSLRSYLHKLEQKSLPLEQLIDFGLDIAKGMEYIHSREIVHQDLKPENVLIDNDFHLKIADFGIACEEEYCDVLGDNIGTYRWMAPEVLKRIPHGRKCDVYSFGLLLWEMVAGALPYEEMKFAEQIAYAVIYKKIRPVIPTDCPAAMKELIERCWSSQTDKRPEFWQIVKVLEHFKKSLTSEGKLNLLPSQICPELKKCPKFWIHIFGSFHHHSSGGGSSSNNSALPKPKFA

SEQ ID NO: 71021 - protein, 486 aa, Arabidopsis thaliana
  peptide (1)..(486): Ceres Seq. ID no. 3037978
MPFTVNQEKSSGLKRMTLSSPSDLKSLVGICQSTQQLTGLSCGSVVGTEVQRNPVTNKKRSVSPLPHMALSDAFIEAKSDIKRFSTPHPRRVEPEKGMKAKSSSRKDSSEKKSVNLRSLSHSGPIRDLSTQKVKERGKSKIDKKSSKSVDYRGSKVSSAGVLEECLIDVSKLSYGDRFAHGKYSQIYHGEYEGKAVALKIITAPEDSDDIFLGARLEKEFIVEATLLSRLSHPNVVKFVGVNTGNCIITEYVPRGSLRSYLHKLEQKSLPLEQLIDFGLDIAKGMEYIHSREIVHQDLKPENVLIDNDFHLKIADFGIACEEEYCDVLGDNIGTYRWMAPEVLKRIPHGRKCDVYSFGLLLWEMVAGALPYEEMKFAEQIAYAVIYKKIRPVIPTDCPAAMKELIERCWSSQTDKRPEFWQIVKVLEHFKKSLTSEGKLNLLPSQICPELKKCPKFWIHIFGSFHHHSSGGGSSSNNSALPKPKFA

SEQ ID NO: 71022 - DNA, 1611 bp, Arabidopsis thaliana
  misc_feature (1)..(1611): Ceres Seq. ID no. 3038306
  misc_feature (1)..(1611): Ortholog of  Ceres SEQ ID NO 12608463 as cited in SEQ ID NO 60238
atgagagagaacacacaagtggctcaattcacagaagatcatcaccagagacatcaaaccccaataacttgtttaagctctaaactagcaaagatatggacattgttcaccaccaaaatcttcatcttcgtcctcttcatcatcctccttagtgcttctgtctcttggatgtatgcgtttgttttaggtgagaataaattccaagtgacatcaatattcacaagaaacaccaaaaaaagcactcccacaaaaacaacaacaactacagatatccccaagatcgccatcaagatcccattaaactgcacatcactcaacagcaacacaacacaaacatgtccttcaaattacccaaccaagttcgaaccagcgatctcttcctcggagacatgtcctgactacttcaagtggatccaccgagacttaaaggtatggcaaaagacagggatcacaagggaaacactagagagagcaagaccaaatgctcacttcaggatagtgataaagtcagggagattgtacgttcatcaatacgagaaagcatttcagacaagagatgtgttcacaatctggggaatacttcagcttctaaggatgtatcctggtcaaatccctgaccttgagcttctcttcctctgccatgatagacccgccatttggaaaagagacttgaagaaaaaacgaaaggatacgtggcctcctccgccgttgtttcactactgtggtcaccgtgatgcatacgacatagttttccctgattggagcttctggggatggcctgagctgaatataaaggagtggaataaattatctgtggcactaaaagaagggaacaaaaaggtgaaatgggaagatagagttccgtacgcttattggaaaggaaaccctcatgtttctcctataagaggagatcttatgagatgtaacttctccgacaagtatgatcctatggttcgtctctatgtccaggattggaggagtgagatagaggcagggttcagaggatcgaacctagaagatcaatgtactcatagatataagatctacatagaaggaaacgcatggtcggtgagcgaaaagtatatactttcgtgtgatagtatgactctgttggttaaaccagagtactacgactttttcttccgaagtatggtcccaatgaagcatttttggcctattagacaaaacaacaaatgtggtgacctcaaatttgcagtcgaatggggcaacaacaacaccgaaaaggcacaaatcatagggagacaaggaagtgagtacatgatgaagaacctaaagatgaagtatgtgtatgattacatgttgtatgtgttacaaggctatgggaaattgatgaagttggatgtgacagtgcctgaaaatgccacggaggtttgttcagagacgatggcttgttcgattactgatggtggacggatcaggcagtgcatggacgactcgttggttatgtctccgagtgtcaaggcggcttgtgatttgccaccttcttatggagactatgagctcaagaagtttcgtaagaaacaagaaagtgcggagagaaaggttgagcagtggaccaataagtattggaacttgagagatccaaaataa

SEQ ID NO: 71023 - protein, 536 aa, Arabidopsis thaliana
  peptide (1)..(536): Ceres Seq. ID no. 3038307
MRENTQVAQFTEDHHQRHQTPITCLSSKLAKIWTLFTTKIFIFVLFIILLSASVSWMYAFVLGENKFQVTSIFTRNTKKSTPTKTTTTTDIPKIAIKIPLNCTSLNSNTTQTCPSNYPTKFEPAISSSETCPDYFKWIHRDLKVWQKTGITRETLERARPNAHFRIVIKSGRLYVHQYEKAFQTRDVFTIWGILQLLRMYPGQIPDLELLFLCHDRPAIWKRDLKKKRKDTWPPPPLFHYCGHRDAYDIVFPDWSFWGWPELNIKEWNKLSVALKEGNKKVKWEDRVPYAYWKGNPHVSPIRGDLMRCNFSDKYDPMVRLYVQDWRSEIEAGFRGSNLEDQCTHRYKIYIEGNAWSVSEKYILSCDSMTLLVKPEYYDFFFRSMVPMKHFWPIRQNNKCGDLKFAVEWGNNNTEKAQIIGRQGSEYMMKNLKMKYVYDYMLYVLQGYGKLMKLDVTVPENATEVCSETMACSITDGGRIRQCMDDSLVMSPSVKAACDLPPSYGDYELKKFRKKQESAERKVEQWTNKYWNLRDPK

SEQ ID NO: 71024 - protein, 480 aa, Arabidopsis thaliana
  peptide (1)..(480): Ceres Seq. ID no. 3038308
MYAFVLGENKFQVTSIFTRNTKKSTPTKTTTTTDIPKIAIKIPLNCTSLNSNTTQTCPSNYPTKFEPAISSSETCPDYFKWIHRDLKVWQKTGITRETLERARPNAHFRIVIKSGRLYVHQYEKAFQTRDVFTIWGILQLLRMYPGQIPDLELLFLCHDRPAIWKRDLKKKRKDTWPPPPLFHYCGHRDAYDIVFPDWSFWGWPELNIKEWNKLSVALKEGNKKVKWEDRVPYAYWKGNPHVSPIRGDLMRCNFSDKYDPMVRLYVQDWRSEIEAGFRGSNLEDQCTHRYKIYIEGNAWSVSEKYILSCDSMTLLVKPEYYDFFFRSMVPMKHFWPIRQNNKCGDLKFAVEWGNNNTEKAQIIGRQGSEYMMKNLKMKYVYDYMLYVLQGYGKLMKLDVTVPENATEVCSETMACSITDGGRIRQCMDDSLVMSPSVKAACDLPPSYGDYELKKFRKKQESAERKVEQWTNKYWNLRDPK

SEQ ID NO: 71025 - protein, 338 aa, Arabidopsis thaliana
  peptide (1)..(338): Ceres Seq. ID no. 3038309
MYPGQIPDLELLFLCHDRPAIWKRDLKKKRKDTWPPPPLFHYCGHRDAYDIVFPDWSFWGWPELNIKEWNKLSVALKEGNKKVKWEDRVPYAYWKGNPHVSPIRGDLMRCNFSDKYDPMVRLYVQDWRSEIEAGFRGSNLEDQCTHRYKIYIEGNAWSVSEKYILSCDSMTLLVKPEYYDFFFRSMVPMKHFWPIRQNNKCGDLKFAVEWGNNNTEKAQIIGRQGSEYMMKNLKMKYVYDYMLYVLQGYGKLMKLDVTVPENATEVCSETMACSITDGGRIRQCMDDSLVMSPSVKAACDLPPSYGDYELKKFRKKQESAERKVEQWTNKYWNLRDPK

SEQ ID NO: 71026 - DNA, 1353 bp, Arabidopsis thaliana
  misc_feature (1)..(1353): Ceres Seq. ID no. 3038950
  misc_feature (1)..(1353): Ortholog of  Ceres SEQ ID NO 13594068 as cited in SEQ ID NO 58624
atgccaaaataccttgatcagaatgacgaggagaacaaaggaagatcaacggacaataacaatcaccgtcaaatggattacaacgattggttaccagtcacagcgtctagagaagccaaatggtattactccgccttccacaatgtcacggccatggttggcgccggagttcttggtctccctttcgccatgtcacaacttggctggggacctggacttgttgctataataatgtcatgggctataacgttctactcgttatggcaaatggtacagttgcacgaagccgttccagggaaacggttggaccgttaccccgagctagggcaagaagcttttggaccaaaactaggttactggatcgtcatgccgcaacagcttcttgtccaaatcgcttccgacatagtctacaacgtgacaggaggaaaatctctcaagaaatttgtcgagcttctatttccgaatctcgaacatatccgtcagacttattacatccttggattcgccgcgcttcagcttgtcctctctcaatctcctgatttcaactccatcaagatcgtctctctcctcgccgccctcatgtctttcctttactcaatgatagcttcggtggcgtcaatagcaaaaggaacggaacaccgtccttcaacttacggagtcaggggagacacggtggcctcaatggtctttgatgcatttaacggcattggaaccatagcgtttgcgtttgcaggacacagtgtggttcttgagatccaagcaactattccttcaacacctgaagtgccttccaagaaaccaatgtggaaaggagttgttgtagcttacataatcgtcatcatttgttacctttttgtggctatctccggctattgggcgtttggggctcatgttgaggatgatgttctcatttccttagagagaccagcttggcttatagcggctgctaacttcatggtttttatccatgtcataggaagttatcaggtttttgcgatgattgtgtttgacacgatcgagtcttatcttgtgaaaacactgaaattcactccttcaacaacactgcgtctagtcgcacgtagtacatatgttgcattgatttgtcttgtagcagtttgtatcccctttttcggaggtcttttagggttcttcggcggtcttgtcttctcatcaacctcgtacttcttgccttgcattatatggttgataatgaagcgaccaaaaagatttagcgcccattggtggtgttcttgggtagcaatagtcactggtatctcgatagcgattcttgcgcccattggaggaatgagacacattattctttcagcaagaacctacaagctcttctcatag

SEQ ID NO: 71027 - protein, 450 aa, Arabidopsis thaliana
  peptide (1)..(450): Ceres Seq. ID no. 3038951
MPKYLDQNDEENKGRSTDNNNHRQMDYNDWLPVTASREAKWYYSAFHNVTAMVGAGVLGLPFAMSQLGWGPGLVAIIMSWAITFYSLWQMVQLHEAVPGKRLDRYPELGQEAFGPKLGYWIVMPQQLLVQIASDIVYNVTGGKSLKKFVELLFPNLEHIRQTYYILGFAALQLVLSQSPDFNSIKIVSLLAALMSFLYSMIASVASIAKGTEHRPSTYGVRGDTVASMVFDAFNGIGTIAFAFAGHSVVLEIQATIPSTPEVPSKKPMWKGVVVAYIIVIICYLFVAISGYWAFGAHVEDDVLISLERPAWLIAAANFMVFIHVIGSYQVFAMIVFDTIESYLVKTLKFTPSTTLRLVARSTYVALICLVAVCIPFFGGLLGFFGGLVFSSTSYFLPCIIWLIMKRPKRFSAHWWCSWVAIVTGISIAILAPIGGMRHIILSARTYKLFS

SEQ ID NO: 71028 - protein, 426 aa, Arabidopsis thaliana
  peptide (1)..(426): Ceres Seq. ID no. 3038952
MDYNDWLPVTASREAKWYYSAFHNVTAMVGAGVLGLPFAMSQLGWGPGLVAIIMSWAITFYSLWQMVQLHEAVPGKRLDRYPELGQEAFGPKLGYWIVMPQQLLVQIASDIVYNVTGGKSLKKFVELLFPNLEHIRQTYYILGFAALQLVLSQSPDFNSIKIVSLLAALMSFLYSMIASVASIAKGTEHRPSTYGVRGDTVASMVFDAFNGIGTIAFAFAGHSVVLEIQATIPSTPEVPSKKPMWKGVVVAYIIVIICYLFVAISGYWAFGAHVEDDVLISLERPAWLIAAANFMVFIHVIGSYQVFAMIVFDTIESYLVKTLKFTPSTTLRLVARSTYVALICLVAVCIPFFGGLLGFFGGLVFSSTSYFLPCIIWLIMKRPKRFSAHWWCSWVAIVTGISIAILAPIGGMRHIILSARTYKLFS

SEQ ID NO: 71029 - protein, 399 aa, Arabidopsis thaliana
  peptide (1)..(399): Ceres Seq. ID no. 3038953
MVGAGVLGLPFAMSQLGWGPGLVAIIMSWAITFYSLWQMVQLHEAVPGKRLDRYPELGQEAFGPKLGYWIVMPQQLLVQIASDIVYNVTGGKSLKKFVELLFPNLEHIRQTYYILGFAALQLVLSQSPDFNSIKIVSLLAALMSFLYSMIASVASIAKGTEHRPSTYGVRGDTVASMVFDAFNGIGTIAFAFAGHSVVLEIQATIPSTPEVPSKKPMWKGVVVAYIIVIICYLFVAISGYWAFGAHVEDDVLISLERPAWLIAAANFMVFIHVIGSYQVFAMIVFDTIESYLVKTLKFTPSTTLRLVARSTYVALICLVAVCIPFFGGLLGFFGGLVFSSTSYFLPCIIWLIMKRPKRFSAHWWCSWVAIVTGISIAILAPIGGMRHIILSARTYKLFS

SEQ ID NO: 71030 - DNA, 1137 bp, Arabidopsis thaliana
  misc_feature (1)..(1137): Ceres Seq. ID no. 3039063
  misc_feature (1)..(1137): Ortholog of  Ceres SEQ ID NO 14304608 as cited in SEQ ID NO 53283
atggtgaagttcacactcgattactgtgtagaattcgatatagggcttaccggggagttctgctccggccttctgtgcggcgaatcagttcttcacgacggtgaacgaatcgaatcgtcttcctacgctttgctacaccggttttcaggtgttcctgattatcccttgtacaaggttctagctttaggtctgctgaaatcaattgattctggttctttctgtggaacctttgagaaaatttcgttggggaaggaagtaatccggttgaaggagaaagaagatgagtggagcaagctgataaatcaaaagggttctgagttagtcaatgccttgaaggatgtattttccgagcttcaagttcaagagcccttattctccctcatgaaagatggcatcaaaacagttgaagcaaggtgttttgaagaagagtatgatagaattcggagaggaggttcaatggttatgataaataaatgtctaatgtttgaagttctggaacttcaccaatatgcatccttttacgagctgttgaaagccgagagttcagagaaagtgtttcctggcactaaaacagtggaagaaggtatgcaaatgtttaggaagttatatgatacggatcaagagaatttcaatggtgttgtggcaatccatcttagtaaatcagttgctcagccttgtgttgctttggctcacatactgtctggcttgagttacactggcgtgcaaaaccttctcggtctatctcacacaactggatccatttttcatgctctgcctcctcctagatcgatgctactctcttcattcatgcttccatataagccaaagataaaaggttgtagattgagccatggagctagagcattagccaagcatgttgatcgaagtagcgatggattttggggtgttcttcagggaactgattcagataaaaatgagcgtgcaatggacataatcaatcggttcattggcaattgttgttggatgaacatacatatcgttccaccacatggtgaagtgttcgagataagagtagctcaaggctatggagcacgttggtctcgagatggaaccaaattcattggatttcttgagccttacatggaggatggtcactccatggcctggaagcattaa

SEQ ID NO: 71031 - protein, 378 aa, Arabidopsis thaliana
  peptide (1)..(378): Ceres Seq. ID no. 3039064
MVKFTLDYCVEFDIGLTGEFCSGLLCGESVLHDGERIESSSYALLHRFSGVPDYPLYKVLALGLLKSIDSGSFCGTFEKISLGKEVIRLKEKEDEWSKLINQKGSELVNALKDVFSELQVQEPLFSLMKDGIKTVEARCFEEEYDRIRRGGSMVMINKCLMFEVLELHQYASFYELLKAESSEKVFPGTKTVEEGMQMFRKLYDTDQENFNGVVAIHLSKSVAQPCVALAHILSGLSYTGVQNLLGLSHTTGSIFHALPPPRSMLLSSFMLPYKPKIKGCRLSHGARALAKHVDRSSDGFWGVLQGTDSDKNERAMDIINRFIGNCCWMNIHIVPPHGEVFEIRVAQGYGARWSRDGTKFIGFLEPYMEDGHSMAWKH

SEQ ID NO: 71032 - protein, 251 aa, Arabidopsis thaliana
  peptide (1)..(251): Ceres Seq. ID no. 3039065
MKDGIKTVEARCFEEEYDRIRRGGSMVMINKCLMFEVLELHQYASFYELLKAESSEKVFPGTKTVEEGMQMFRKLYDTDQENFNGVVAIHLSKSVAQPCVALAHILSGLSYTGVQNLLGLSHTTGSIFHALPPPRSMLLSSFMLPYKPKIKGCRLSHGARALAKHVDRSSDGFWGVLQGTDSDKNERAMDIINRFIGNCCWMNIHIVPPHGEVFEIRVAQGYGARWSRDGTKFIGFLEPYMEDGHSMAWKH

SEQ ID NO: 71033 - protein, 226 aa, Arabidopsis thaliana
  peptide (1)..(226): Ceres Seq. ID no. 3039066
MVMINKCLMFEVLELHQYASFYELLKAESSEKVFPGTKTVEEGMQMFRKLYDTDQENFNGVVAIHLSKSVAQPCVALAHILSGLSYTGVQNLLGLSHTTGSIFHALPPPRSMLLSSFMLPYKPKIKGCRLSHGARALAKHVDRSSDGFWGVLQGTDSDKNERAMDIINRFIGNCCWMNIHIVPPHGEVFEIRVAQGYGARWSRDGTKFIGFLEPYMEDGHSMAWKH

SEQ ID NO: 71034 - DNA, 1047 bp, Arabidopsis thaliana
  misc_feature (1)..(1047): Ceres Seq. ID no. 3039385
  misc_feature (1)..(1047): Ortholog of  Ceres SEQ ID NO 13654989 as cited in SEQ ID NO 63117
  misc_feature (1)..(1047): Ortholog of  Ceres SEQ ID NO 13657138 as cited in SEQ ID NO 65923
  misc_feature (1)..(1047): Ortholog of  Ceres SEQ ID NO 13584744 as cited in SEQ ID NO 69137
atgcgcaagtggatatgttgtgcgggtaaaaaaggagtttcagattcttcaaatgagaacacaaatcaaaagaatcaaaaaccacaagatcttgcaaagcctaaggagattcttcccattatagttccttccttgtcagtggatgaggttaatgaacagactgacaattttggaccaaattctctgattggtgagggatcttatggaagggtatactatgcaactctaaatgatggaaaagcagttgctttgaagaaactcgatcttgcacctgaagatgaaacaaacaccgagtttttaagccaggtttccatggtttcaagactaaagcatgagaatctcattcaactggtcggttattgtgttgatgaaaaccttcgtgttcttgcttatgagtttgcaacaatgggatcattgcacgatattctgcatggtaggaagggagttcaagatgcactaccaggtccaacacttgactggataacaagggtgaagatagccgttgaggcagctagaggtttagaataccttcatgagaaggttcagcctcaagtaatacatagagacataagatctagcaatatacttctttttgacgactatcaagcaaaaattgctgattttaatctttcaaatcaatctcctgataatgctgctcgtttacaatctacaagagttttgggcagctttggctattactctccagaatatgctatgactggagagttgacacataagagtgatgtatatggttttggggttgtacttctagagctcttgacagggaggaaaccagttgaccatacaatgccgcgaggccaacaaagtcttgtaacttgggctacaccgaaacttagtgaagatacagtagaggagtgtgttgatccaaagctaaagggagaatattctcctaaatcagtagctaagctagcagcggtggcagcattgtgtgtgcaatatgaatctaattgtagaccaaaaatgagtacagttgtgaaagctttgcaacaacttcttatagcgacaggctcaataccgcaattctaa

SEQ ID NO: 71035 - protein, 348 aa, Arabidopsis thaliana
  peptide (1)..(348): Ceres Seq. ID no. 3039386
MRKWICCAGKKGVSDSSNENTNQKNQKPQDLAKPKEILPIIVPSLSVDEVNEQTDNFGPNSLIGEGSYGRVYYATLNDGKAVALKKLDLAPEDETNTEFLSQVSMVSRLKHENLIQLVGYCVDENLRVLAYEFATMGSLHDILHGRKGVQDALPGPTLDWITRVKIAVEAARGLEYLHEKVQPQVIHRDIRSSNILLFDDYQAKIADFNLSNQSPDNAARLQSTRVLGSFGYYSPEYAMTGELTHKSDVYGFGVVLLELLTGRKPVDHTMPRGQQSLVTWATPKLSEDTVEECVDPKLKGEYSPKSVAKLAAVAALCVQYESNCRPKMSTVVKALQQLLIATGSIPQF

SEQ ID NO: 71036 - protein, 244 aa, Arabidopsis thaliana; identical to SEQ ID NO: 70265
  peptide (1)..(244): Ceres Seq. ID no. 3039387

SEQ ID NO: 71037 - protein, 213 aa, Arabidopsis thaliana; identical to SEQ ID NO: 70266
  peptide (1)..(213): Ceres Seq. ID no. 3039388

SEQ ID NO: 71038 - DNA, 792 bp, Arabidopsis thaliana
  misc_feature (1)..(792): Ceres Seq. ID no. 3039434
  misc_feature (1)..(792): Ortholog of  Ceres SEQ ID NO 13592859 as cited in SEQ ID NO 20479
atgggttctgggaatttgattaaggcaataattagattgaagaagagtaaacaaggaactgaaaagaaaaaaactagtgctgtgaaaccaaaaaaaggttccaagaagaagggtacatcactagttactcgtagtgaggattgggctgctactcggattcagactgcttttaaagcctataaggctagaaaaagcttacggcgtctaaaaggaattgcaagagcaaagttatcaactgagaaacaatctgtgaagaaccaagctgtggtcacattgaggtatcttcactcatggagtaaaatacagtcagagataaaggctcgccgagtttgcatggtaaccgaatggcgactgaagaataaaagattagagcatcagcaaaagcttgaggcaaagcttcatgatgttgaggttgaatggaatggtgggtcagagacaaaagatgaaatcttggagaggatacttcaaagggaagaagcgacgattaagcgagaaagagccttggcatatgctttctctcatcagtggaaagctgatggtaagactcagtggttgggaagttatgagctaggaaacactaattggggttggagctggaaagagcgttggatatctgctcggccttgggaagtaagatattcagtgactcctaagaaaccaaagagctcaaagacagactcaaattcaccagcaaagagaacagtgtcattatcatcagttccagccaaaactccgtttcctggagctagaaacacagtgaaaccgcggagattgtcatttccaggtgcttga

SEQ ID NO: 71039 - protein, 263 aa, Arabidopsis thaliana
  peptide (1)..(263): Ceres Seq. ID no. 3039435
MGSGNLIKAIIRLKKSKQGTEKKKTSAVKPKKGSKKKGTSLVTRSEDWAATRIQTAFKAYKARKSLRRLKGIARAKLSTEKQSVKNQAVVTLRYLHSWSKIQSEIKARRVCMVTEWRLKNKRLEHQQKLEAKLHDVEVEWNGGSETKDEILERILQREEATIKRERALAYAFSHQWKADGKTQWLGSYELGNTNWGWSWKERWISARPWEVRYSVTPKKPKSSKTDSNSPAKRTVSLSSVPAKTPFPGARNTVKPRRLSFPGA

SEQ ID NO: 71040 - protein, 152 aa, Arabidopsis thaliana; identical to SEQ ID NO: 20480
  peptide (1)..(152): Ceres Seq. ID no. 3039436

SEQ ID NO: 71041 - DNA, 2757 bp, Arabidopsis thaliana
  misc_feature (1)..(2757): Ceres Seq. ID no. 3039450
  misc_feature (1)..(2757): Ortholog of  Ceres SEQ ID NO 13657677 as cited in SEQ ID NO 66119
atggaacaatctcttgtgaaggctttgttgaagaacacgaacaatccgagattagcatggagaatcttcaagaggatattctcttctccttcagaagaaagccatggcatttctttagatgcgactcctacaatcgctcgtatcctggttcgagccaaaatgcacgaagaaatccaagagcttcacaatcttatactctcttcttcaatccaaaagacgaaactttcgtctcttctctctgttgtatccatcttcgcgaaatcgaatcacattgataaggcgtttccgcagtttcagttagtacggtcgcggtttcctgagaacaaacctagcgtttatctgtataatttgttgcttgaaagttgcataaaggaacgacgtgtggagttcgtttcgtggttgtataaagatatggttttgtgtgggattgctccacagacttatacttttaatctcttgatacgtgctttgtgtgattcaagttgtgttgatgctgctcgagagttgttcgacgaaatgcctgagaaaggttgtaagccaaatgagtttacttttgggattttggttcgtgggtattgtaaagctggtttgactgataaagggcttgaattgttgaatgcaatggaaagttttggggttttgcctaataaagttatctataacaccattgtttcgagcttctgtagagaaggtaggaatgatgattctgaaaagatggtggagaagatgcgggaggaaggtttggtgcctgatattgtcacttttaactctaggatatcagcgctttgtaaagaaggaaaggttttggatgcgtctagaattttcagtgatatggagctagatgagtatctgggtcttcctcgtcccaatagtataacatataacttgatgttgaaaggtttctgtaaggtagggttgctggaagatgccaagaccctctttgagtcgattagagaaaatgatgatctcgctagcttgcagagttacaatatttggctgcagggtttggtcagacatgggaagtttatagaggctgaaacagtcctgaagcaaatgactgataagggaataggaccaagtatttattcttacaatatcttgatggatggattgtgtaaattgggcatgctatccgatgcaaaaactattgttggtttgatgaaaagaaatggtgtttgcccggatgctgtaacttatggctgccttcttcatggttattgcagtgttgggaaagtcgatgcagctaaaagcttgttgcaggagatgatgaggaataattgtttaccaaatgcttatacttgcaatattttgctacatagcctttggaagatggggagaatatctgaagcggaagagttgctgcgaaagatgaatgagaaaggttatggactagacactgtcacctgcaacattatcgttgacggactctgtggaagcggggaattagataaagctattgagatagttaagggaatgcgggtgcatggaagtgctgctcttggtaacttaggcaattcatatatcggactggtggatgatagcttgatcgagaacaactgtttgcctgacctgatcacgtattcaactttacttaatggtttgtgcaaagctggaaggtttgctgaagcaaaaaatttgtttgccgagatgatgggagagaaactgcaaccggactcggtcgcatataacattttcattcatcatttctgcaaacaggggaaaatatcatctgcatttcgcgttctcaaagacatggagaagaaaggttgtcataagagcctagagacttataactcactgatcctgggcttaggcataaaaaaccagatttttgaaattcatggactgatggatgagatgaaagaaaagggcatttcaccaaatatatgcacctacaatactgcaatccagtatctttgtgagggagaaaaagttgaagatgcaactaacctccttgatgaaatgatgcaaaagaacatagccccaaatgtattttccttcaaatatttgattgaagcgttctgtaaggtccctgattttgatatggcccaagaagtctttgagactgctgtaagtatctgtggacagaaagaaggcctgtacagcttgatgttcaatgagttgcttgctgcagggcaactactaaaggctacggagttgctcgaagctgttttagatagaggttttgagttggggacttttctttataaagatcttgttgagagcttatgtaagaaggatgaactagaagtagctagtggaattttgcataagatgatagacagaggatatggatttgaccctgcagcattgatgcctgtgatagatggcttaggtaagatgggaaacaagaaagaggcaaacagttttgctgataagatgatggaaatggcttcagttggtgaagtagcaaacaaagtcgatccaaatgcaagggatatacaccagaaaaagcataataagaatggtggaaacaactggcagaatatattacacagagatgacggtagtggaattgcgttaaggtctctgtcaagagttaaaaaaggatggggtcaaggggatatatcaagctttcagcctccaagagttgactacttagactactgggaggacgatgatggcgcaagcaagtttttgaggtgcagctcatcaaggatgacagctaagctggtagaaccagacaagacgacatggctggacaaatatatccttgttagaacgacgtttaaacataagagctgcctgctttcataa

SEQ ID NO: 71042 - protein, 918 aa, Arabidopsis thaliana
  peptide (1)..(918): Ceres Seq. ID no. 3039451
MEQSLVKALLKNTNNPRLAWRIFKRIFSSPSEESHGISLDATPTIARILVRAKMHEEIQELHNLILSSSIQKTKLSSLLSVVSIFAKSNHIDKAFPQFQLVRSRFPENKPSVYLYNLLLESCIKERRVEFVSWLYKDMVLCGIAPQTYTFNLLIRALCDSSCVDAARELFDEMPEKGCKPNEFTFGILVRGYCKAGLTDKGLELLNAMESFGVLPNKVIYNTIVSSFCREGRNDDSEKMVEKMREEGLVPDIVTFNSRISALCKEGKVLDASRIFSDMELDEYLGLPRPNSITYNLMLKGFCKVGLLEDAKTLFESIRENDDLASLQSYNIWLQGLVRHGKFIEAETVLKQMTDKGIGPSIYSYNILMDGLCKLGMLSDAKTIVGLMKRNGVCPDAVTYGCLLHGYCSVGKVDAAKSLLQEMMRNNCLPNAYTCNILLHSLWKMGRISEAEELLRKMNEKGYGLDTVTCNIIVDGLCGSGELDKAIEIVKGMRVHGSAALGNLGNSYIGLVDDSLIENNCLPDLITYSTLLNGLCKAGRFAEAKNLFAEMMGEKLQPDSVAYNIFIHHFCKQGKISSAFRVLKDMEKKGCHKSLETYNSLILGLGIKNQIFEIHGLMDEMKEKGISPNICTYNTAIQYLCEGEKVEDATNLLDEMMQKNIAPNVFSFKYLIEAFCKVPDFDMAQEVFETAVSICGQKEGLYSLMFNELLAAGQLLKATELLEAVLDRGFELGTFLYKDLVESLCKKDELEVASGILHKMIDRGYGFDPAALMPVIDGLGKMGNKKEANSFADKMMEMASVGEVANKVDPNARDIHQKKHNKNGGNNWQNILHRDDGSGIALRSLSRVKKGWGQGDISSFQPPRVDYLDYWEDDDGASKFLRCSSSRMTAKLVEPDKTTWLDKYILVRTTFKHKSCLLS

SEQ ID NO: 71043 - protein, 865 aa, Arabidopsis thaliana
  peptide (1)..(865): Ceres Seq. ID no. 3039452
MHEEIQELHNLILSSSIQKTKLSSLLSVVSIFAKSNHIDKAFPQFQLVRSRFPENKPSVYLYNLLLESCIKERRVEFVSWLYKDMVLCGIAPQTYTFNLLIRALCDSSCVDAARELFDEMPEKGCKPNEFTFGILVRGYCKAGLTDKGLELLNAMESFGVLPNKVIYNTIVSSFCREGRNDDSEKMVEKMREEGLVPDIVTFNSRISALCKEGKVLDASRIFSDMELDEYLGLPRPNSITYNLMLKGFCKVGLLEDAKTLFESIRENDDLASLQSYNIWLQGLVRHGKFIEAETVLKQMTDKGIGPSIYSYNILMDGLCKLGMLSDAKTIVGLMKRNGVCPDAVTYGCLLHGYCSVGKVDAAKSLLQEMMRNNCLPNAYTCNILLHSLWKMGRISEAEELLRKMNEKGYGLDTVTCNIIVDGLCGSGELDKAIEIVKGMRVHGSAALGNLGNSYIGLVDDSLIENNCLPDLITYSTLLNGLCKAGRFAEAKNLFAEMMGEKLQPDSVAYNIFIHHFCKQGKISSAFRVLKDMEKKGCHKSLETYNSLILGLGIKNQIFEIHGLMDEMKEKGISPNICTYNTAIQYLCEGEKVEDATNLLDEMMQKNIAPNVFSFKYLIEAFCKVPDFDMAQEVFETAVSICGQKEGLYSLMFNELLAAGQLLKATELLEAVLDRGFELGTFLYKDLVESLCKKDELEVASGILHKMIDRGYGFDPAALMPVIDGLGKMGNKKEANSFADKMMEMASVGEVANKVDPNARDIHQKKHNKNGGNNWQNILHRDDGSGIALRSLSRVKKGWGQGDISSFQPPRVDYLDYWEDDDGASKFLRCSSSRMTAKLVEPDKTTWLDKYILVRTTFKHKSCLLS

SEQ ID NO: 71044 - protein, 781 aa, Arabidopsis thaliana
  peptide (1)..(781): Ceres Seq. ID no. 3039453
MVLCGIAPQTYTFNLLIRALCDSSCVDAARELFDEMPEKGCKPNEFTFGILVRGYCKAGLTDKGLELLNAMESFGVLPNKVIYNTIVSSFCREGRNDDSEKMVEKMREEGLVPDIVTFNSRISALCKEGKVLDASRIFSDMELDEYLGLPRPNSITYNLMLKGFCKVGLLEDAKTLFESIRENDDLASLQSYNIWLQGLVRHGKFIEAETVLKQMTDKGIGPSIYSYNILMDGLCKLGMLSDAKTIVGLMKRNGVCPDAVTYGCLLHGYCSVGKVDAAKSLLQEMMRNNCLPNAYTCNILLHSLWKMGRISEAEELLRKMNEKGYGLDTVTCNIIVDGLCGSGELDKAIEIVKGMRVHGSAALGNLGNSYIGLVDDSLIENNCLPDLITYSTLLNGLCKAGRFAEAKNLFAEMMGEKLQPDSVAYNIFIHHFCKQGKISSAFRVLKDMEKKGCHKSLETYNSLILGLGIKNQIFEIHGLMDEMKEKGISPNICTYNTAIQYLCEGEKVEDATNLLDEMMQKNIAPNVFSFKYLIEAFCKVPDFDMAQEVFETAVSICGQKEGLYSLMFNELLAAGQLLKATELLEAVLDRGFELGTFLYKDLVESLCKKDELEVASGILHKMIDRGYGFDPAALMPVIDGLGKMGNKKEANSFADKMMEMASVGEVANKVDPNARDIHQKKHNKNGGNNWQNILHRDDGSGIALRSLSRVKKGWGQGDISSFQPPRVDYLDYWEDDDGASKFLRCSSSRMTAKLVEPDKTTWLDKYILVRTTFKHKSCLLS

SEQ ID NO: 71045 - DNA, 2727 bp, Arabidopsis thaliana
  misc_feature (1)..(2727): Ceres Seq. ID no. 3039481
  misc_feature (1)..(2727): Ortholog of  Ceres SEQ ID NO 13593911 as cited in SEQ ID NO 52935
atggatttcagaaattccttcaaatctcatagctcatacaaacaaattcgaagccccggagatcaaagcgagccaagccctgaacatctgccaattctccacgatcaccatcctgatcattccggcatggtggtcgatgaccagaaacccgacagcactcgttctagcctcgacgatggtcgtaacgcgcctgtagaacgtgatgccagttacaaattctggcaagacaacactactggaacgtcaacggatcacacggcggtgagaacaagtgataaagatccaatcgctattagtcgaaaaggcgatagattaagcggtagtttcgatttcgtgcacgggaagctaccggttgatgaatctccaacgaaaatggtcgctggagagcctgtgaatcggcaatggagaggtagaaataatgaagagatcacacttgatgttgatcaagaaaatgatgatgtaagtcaccaaacaatgcctacgcctacatcaacggctcgaacctcgtttgatgcgtctagagaaatgcgagtctcttttaacgttcgtagagcgggtggtgcgtttgtcgctggttcggttccttcttcgtcttcccattcgtcttcttcttcgtccgcgacaatgcggacgaatcaggatcagccgcaactgcaggaggaagaggttgtgagatgtacttcgaacatgtcgtttcagaggaaatcagagcttatatctagagtgaagacaaggtctaggcttcaagatccgccacgtgaggaagaaacgccttactcgggttggagatcgggtcagttgaaatccgggttacttgcggatattgatgaagaggatgatccattagcggaagaagatgtaccagatgagtataaaagagggaagcttgacgccattacattgctccagtggcttagcttagtcgctattatagctgcattagcgtgtagtttgtcgattcagtcttggaagaaagttagagtttggaatcttcatctatggaaatgggaagtgttcttgttggttcttatatgtgggaggttggtttcgggttggggaatccgaatcgttgtcttcttcatcgagagaaacttccttttgcggaagcgggttctttacttcgtttacggtgtgcgtagagctgttcagaactgtctatggctaggcctagtccttctcgcttggcacttcttgttcgacaagaaagtacagagggagacaaggagcaggtttcttccttacgtaaccaagatcttggtgtgtttcttgctaagtactatcttgtggttgatcaagacactagtggttaaagttctggcctcttcgttccacgtcagtacttactttgatcggattcaagaagcgctctttaaccagtacgtgatcgagacgttatcgggtcctcccatgattgaaatgagcaggattgaggaagaggaagagcgggcgcaagacgagatattcaagatgcagaacgcaggtgctaatttaccaccagatctttgcgcggctgcgtttccaccgggaaaaagcgggagagtaatgaatccgaaactctccccgataatcccgaaatcaacaactgataatggaattagcatggaacatcttcacaggatgaatcataagaacatctctgcttggaacatgaagagactaatgaagattgtgagaaatgtttctctgaccacactggacgaacagatgctagaaagcacatacgaagatgaatccacccgccagatacgaagcgaaaaagaggctaaagcagctgcaaggaagattttcaagaacgttgagcaacgtggcgcaaagtacatttacctagaggatttgatgagatttttgcgggaagacgaggcgatgaagaccatgggcctcttcgaaggtgcaccggagaataaaaggatcagcaaatcagccttaaagaactggctggtcaatgctttcagagagcgacgagctcttgccctgacactcaacgacaccaagacagcagtgaacaagctccatcacatgattaatattgtcactgccatagtcattgttgtcatttggcttgtccttcttgaaattgcttcctccaaggtacttctctttgtaagttcacaagttgtactcttggccttcatctttgggaacactgtcaagaccgtcttcgagtccatcatcttcttattcatcgtacacccttacgatgttggtgatcggtgtgagattgacagtgtacagttggtggtggaggagatgaacatactcactaccgtgttcttacgatacgacaatctgaagattatgtatccgaatagtcttttgtggcagaaatcaatcaacaattactaccgcagtccggatatgggagatgcaatcgagttctgtgtccacattactactcctcttgaaaaaatctccgtgatcaaacagagaatatcgaactacatcgacaacaagccggagtattggtacccacaagccaaaatcattgtaaaagatttggaagatttgcacatagtaagactagcaatatggccatgtcacaggattaatcaccaagacatggctgaaagatggacaagaagagccgtcttagtcgaagaagtgattaagatactcctcgagctcgacattcaacaccggttttatccgctcgatatcaatgtccgaacaatgcctaccgttgtctctagcagagttccacctggctggtcacaaaaccaacctgcctga

SEQ ID NO: 71046 - protein, 908 aa, Arabidopsis thaliana
  peptide (1)..(908): Ceres Seq. ID no. 3039482
MDFRNSFKSHSSYKQIRSPGDQSEPSPEHLPILHDHHPDHSGMVVDDQKPDSTRSSLDDGRNAPVERDASYKFWQDNTTGTSTDHTAVRTSDKDPIAISRKGDRLSGSFDFVHGKLPVDESPTKMVAGEPVNRQWRGRNNEEITLDVDQENDDVSHQTMPTPTSTARTSFDASREMRVSFNVRRAGGAFVAGSVPSSSSHSSSSSSATMRTNQDQPQLQEEEVVRCTSNMSFQRKSELISRVKTRSRLQDPPREEETPYSGWRSGQLKSGLLADIDEEDDPLAEEDVPDEYKRGKLDAITLLQWLSLVAIIAALACSLSIQSWKKVRVWNLHLWKWEVFLLVLICGRLVSGWGIRIVVFFIERNFLLRKRVLYFVYGVRRAVQNCLWLGLVLLAWHFLFDKKVQRETRSRFLPYVTKILVCFLLSTILWLIKTLVVKVLASSFHVSTYFDRIQEALFNQYVIETLSGPPMIEMSRIEEEEERAQDEIFKMQNAGANLPPDLCAAAFPPGKSGRVMNPKLSPIIPKSTTDNGISMEHLHRMNHKNISAWNMKRLMKIVRNVSLTTLDEQMLESTYEDESTRQIRSEKEAKAAARKIFKNVEQRGAKYIYLEDLMRFLREDEAMKTMGLFEGAPENKRISKSALKNWLVNAFRERRALALTLNDTKTAVNKLHHMINIVTAIVIVVIWLVLLEIASSKVLLFVSSQVVLLAFIFGNTVKTVFESIIFLFIVHPYDVGDRCEIDSVQLVVEEMNILTTVFLRYDNLKIMYPNSLLWQKSINNYYRSPDMGDAIEFCVHITTPLEKISVIKQRISNYIDNKPEYWYPQAKIIVKDLEDLHIVRLAIWPCHRINHQDMAERWTRRAVLVEEVIKILLELDIQHRFYPLDINVRTMPTVVSSRVPPGWSQNQPA

SEQ ID NO: 71047 - protein, 866 aa, Arabidopsis thaliana
  peptide (1)..(866): Ceres Seq. ID no. 3039483
MVVDDQKPDSTRSSLDDGRNAPVERDASYKFWQDNTTGTSTDHTAVRTSDKDPIAISRKGDRLSGSFDFVHGKLPVDESPTKMVAGEPVNRQWRGRNNEEITLDVDQENDDVSHQTMPTPTSTARTSFDASREMRVSFNVRRAGGAFVAGSVPSSSSHSSSSSSATMRTNQDQPQLQEEEVVRCTSNMSFQRKSELISRVKTRSRLQDPPREEETPYSGWRSGQLKSGLLADIDEEDDPLAEEDVPDEYKRGKLDAITLLQWLSLVAIIAALACSLSIQSWKKVRVWNLHLWKWEVFLLVLICGRLVSGWGIRIVVFFIERNFLLRKRVLYFVYGVRRAVQNCLWLGLVLLAWHFLFDKKVQRETRSRFLPYVTKILVCFLLSTILWLIKTLVVKVLASSFHVSTYFDRIQEALFNQYVIETLSGPPMIEMSRIEEEEERAQDEIFKMQNAGANLPPDLCAAAFPPGKSGRVMNPKLSPIIPKSTTDNGISMEHLHRMNHKNISAWNMKRLMKIVRNVSLTTLDEQMLESTYEDESTRQIRSEKEAKAAARKIFKNVEQRGAKYIYLEDLMRFLREDEAMKTMGLFEGAPENKRISKSALKNWLVNAFRERRALALTLNDTKTAVNKLHHMINIVTAIVIVVIWLVLLEIASSKVLLFVSSQVVLLAFIFGNTVKTVFESIIFLFIVHPYDVGDRCEIDSVQLVVEEMNILTTVFLRYDNLKIMYPNSLLWQKSINNYYRSPDMGDAIEFCVHITTPLEKISVIKQRISNYIDNKPEYWYPQAKIIVKDLEDLHIVRLAIWPCHRINHQDMAERWTRRAVLVEEVIKILLELDIQHRFYPLDINVRTMPTVVSSRVPPGWSQNQPA

SEQ ID NO: 71048 - protein, 784 aa, Arabidopsis thaliana
  peptide (1)..(784): Ceres Seq. ID no. 3039484
MVAGEPVNRQWRGRNNEEITLDVDQENDDVSHQTMPTPTSTARTSFDASREMRVSFNVRRAGGAFVAGSVPSSSSHSSSSSSATMRTNQDQPQLQEEEVVRCTSNMSFQRKSELISRVKTRSRLQDPPREEETPYSGWRSGQLKSGLLADIDEEDDPLAEEDVPDEYKRGKLDAITLLQWLSLVAIIAALACSLSIQSWKKVRVWNLHLWKWEVFLLVLICGRLVSGWGIRIVVFFIERNFLLRKRVLYFVYGVRRAVQNCLWLGLVLLAWHFLFDKKVQRETRSRFLPYVTKILVCFLLSTILWLIKTLVVKVLASSFHVSTYFDRIQEALFNQYVIETLSGPPMIEMSRIEEEEERAQDEIFKMQNAGANLPPDLCAAAFPPGKSGRVMNPKLSPIIPKSTTDNGISMEHLHRMNHKNISAWNMKRLMKIVRNVSLTTLDEQMLESTYEDESTRQIRSEKEAKAAARKIFKNVEQRGAKYIYLEDLMRFLREDEAMKTMGLFEGAPENKRISKSALKNWLVNAFRERRALALTLNDTKTAVNKLHHMINIVTAIVIVVIWLVLLEIASSKVLLFVSSQVVLLAFIFGNTVKTVFESIIFLFIVHPYDVGDRCEIDSVQLVVEEMNILTTVFLRYDNLKIMYPNSLLWQKSINNYYRSPDMGDAIEFCVHITTPLEKISVIKQRISNYIDNKPEYWYPQAKIIVKDLEDLHIVRLAIWPCHRINHQDMAERWTRRAVLVEEVIKILLELDIQHRFYPLDINVRTMPTVVSSRVPPGWSQNQPA

SEQ ID NO: 71049 - DNA, 1074 bp, Arabidopsis thaliana
  misc_feature (1)..(1074): Ceres Seq. ID no. 3039612
  misc_feature (1)..(1074): Ortholog of  Ceres SEQ ID NO 12636774 as cited in SEQ ID NO 372
  misc_feature (1)..(1074): Ortholog of  Ceres SEQ ID NO 13596470 as cited in SEQ ID NO 62158
  misc_feature (1)..(1074): Ortholog of  Ceres SEQ ID NO 12615466 as cited in SEQ ID NO 62761
  misc_feature (1)..(1074): Ortholog of  Ceres SEQ ID NO 12615907 as cited in SEQ ID NO 62860
  misc_feature (1)..(1074): Ortholog of  Ceres SEQ ID NO 13597295 as cited in SEQ ID NO 63743
  misc_feature (1)..(1074): Ortholog of  Ceres SEQ ID NO 12617090 as cited in SEQ ID NO 64005
  misc_feature (1)..(1074): Ortholog of  Ceres SEQ ID NO 13597439 as cited in SEQ ID NO 64081
  misc_feature (1)..(1074): Ortholog of  Ceres SEQ ID NO 13597233 as cited in SEQ ID NO 64370
  misc_feature (1)..(1074): Ortholog of  Ceres SEQ ID NO 13600370 as cited in SEQ ID NO 0
atggaggaaacaaaaatgagtttgcttgatgattcttttacaagtgcaatgacacttaccaattcaggtgtgcctcaagtccctgatcgctacgttcttcctccttcgcaaaggccagctcttggttcaagcttaggcaccagcgagactacacttcctgtcattgatctctctcttttgcaccaacctttccttcgatccctcgcaatccacgagattagcatggcctgcaaggagtttggtttctttcaggttataaaccatggaataccatcatcagtggttaacgatgccttagatgcagcaacacagttcttcgacttacctgtggaagagaagatgcttctggtgtctgcaaacgttcatgagccagtcaggtatggcacaagccttaaccattcaacagacagagttcactactggagagatttcatcaagcattactctcatccactctcaaagtggatcgatatgtggccatcaaatcctccatgctacaaggataaagtgggcaagtatgcagaggcaacacatttgctacacaagcagttaatagaagctatctcagaaagcctgggactggagaaaaattacttacaagaagagatagaagaaggctcacaagtcatggcagtgaattgttatccagcatgcccggaacctgaaatggccttgggaatgccaccacactcagacttcagctcactgaccatcttacttcagagtagcaagggactccagataatggactgcaacaaaaactgggtttgtgtgccgtatatagaaggagctttgatagttcagctgggagatcaggtagaggtgatgagcaacggcatatacaagagcgtcattcatcgtgtaacagtgaacaaagaagtcaaaaggctatcttttgcaagtcttcacagtctacctctgcacaagaaaataagtccagcaccaaaactcgtcaacccaaacaatgcaccagcctatggagagtttagtttcaacgattttctgaactacatctcaagcaacgattttatacaagaaagattcattgacacaataaagaaaagcagttcctaa

SEQ ID NO: 71050 - protein, 357 aa, Arabidopsis thaliana
  peptide (1)..(357): Ceres Seq. ID no. 3039613
MEETKMSLLDDSFTSAMTLTNSGVPQVPDRYVLPPSQRPALGSSLGTSETTLPVIDLSLLHQPFLRSLAIHEISMACKEFGFFQVINHGIPSSVVNDALDAATQFFDLPVEEKMLLVSANVHEPVRYGTSLNHSTDRVHYWRDFIKHYSHPLSKWIDMWPSNPPCYKDKVGKYAEATHLLHKQLIEAISESLGLEKNYLQEEIEEGSQVMAVNCYPACPEPEMALGMPPHSDFSSLTILLQSSKGLQIMDCNKNWVCVPYIEGALIVQLGDQVEVMSNGIYKSVIHRVTVNKEVKRLSFASLHSLPLHKKISPAPKLVNPNNAPAYGEFSFNDFLNYISSNDFIQERFIDTIKKSSS

SEQ ID NO: 71051 - protein, 352 aa, Arabidopsis thaliana
  peptide (1)..(352): Ceres Seq. ID no. 3039614
MSLLDDSFTSAMTLTNSGVPQVPDRYVLPPSQRPALGSSLGTSETTLPVIDLSLLHQPFLRSLAIHEISMACKEFGFFQVINHGIPSSVVNDALDAATQFFDLPVEEKMLLVSANVHEPVRYGTSLNHSTDRVHYWRDFIKHYSHPLSKWIDMWPSNPPCYKDKVGKYAEATHLLHKQLIEAISESLGLEKNYLQEEIEEGSQVMAVNCYPACPEPEMALGMPPHSDFSSLTILLQSSKGLQIMDCNKNWVCVPYIEGALIVQLGDQVEVMSNGIYKSVIHRVTVNKEVKRLSFASLHSLPLHKKISPAPKLVNPNNAPAYGEFSFNDFLNYISSNDFIQERFIDTIKKSSS

SEQ ID NO: 71052 - protein, 341 aa, Arabidopsis thaliana
  peptide (1)..(341): Ceres Seq. ID no. 3039615
MTLTNSGVPQVPDRYVLPPSQRPALGSSLGTSETTLPVIDLSLLHQPFLRSLAIHEISMACKEFGFFQVINHGIPSSVVNDALDAATQFFDLPVEEKMLLVSANVHEPVRYGTSLNHSTDRVHYWRDFIKHYSHPLSKWIDMWPSNPPCYKDKVGKYAEATHLLHKQLIEAISESLGLEKNYLQEEIEEGSQVMAVNCYPACPEPEMALGMPPHSDFSSLTILLQSSKGLQIMDCNKNWVCVPYIEGALIVQLGDQVEVMSNGIYKSVIHRVTVNKEVKRLSFASLHSLPLHKKISPAPKLVNPNNAPAYGEFSFNDFLNYISSNDFIQERFIDTIKKSSS

SEQ ID NO: 71053 - DNA, 495 bp, Arabidopsis thaliana
  misc_feature (1)..(495): Ceres Seq. ID no. 3039824
  misc_feature (1)..(495): Ortholog of  Ceres SEQ ID NO 14307324 as cited in SEQ ID NO 54131
  misc_feature (1)..(495): Ortholog of  Ceres SEQ ID NO 14303336 as cited in SEQ ID NO 54567
  misc_feature (1)..(495): Ortholog of  Ceres SEQ ID NO 13599083 as cited in SEQ ID NO 0
atggctaactctgtgatggcaaccgaacagctctgctacatcccttgcaacttttgcaacataattcttgcggtgaatgtcccatgcagcagcctgttcgacatcgtgaccgtccgatgcggtcactgcaccaatctgtggtctgtaaacatggcagctgctcttcagtcgctttcacgccctaatttccaggcaacaaactatgcagtaccagagtatggatcctcctcaagaagccacacaaaaatcccttcaagaatttcaactcgtaccataactgagcaacggattgtaaaccgtcctccggagaagcggcagcgagtaccttctgcgtacaatcaattcataaaagaggaaattcagaggattaaggcgaataatccagacataagccacagagaagcattcagcactgctgccaagaattgggcacactttcctcatattcactttggtctaatgctggagagtaacaagcaagctaagatagcctaa

SEQ ID NO: 71054 - protein, 164 aa, Arabidopsis thaliana
  peptide (1)..(164): Ceres Seq. ID no. 3039825
MANSVMATEQLCYIPCNFCNIILAVNVPCSSLFDIVTVRCGHCTNLWSVNMAAALQSLSRPNFQATNYAVPEYGSSSRSHTKIPSRISTRTITEQRIVNRPPEKRQRVPSAYNQFIKEEIQRIKANNPDISHREAFSTAAKNWAHFPHIHFGLMLESNKQAKIA

SEQ ID NO: 71055 - protein, 159 aa, Arabidopsis thaliana
  peptide (1)..(159): Ceres Seq. ID no. 3039826
MATEQLCYIPCNFCNIILAVNVPCSSLFDIVTVRCGHCTNLWSVNMAAALQSLSRPNFQATNYAVPEYGSSSRSHTKIPSRISTRTITEQRIVNRPPEKRQRVPSAYNQFIKEEIQRIKANNPDISHREAFSTAAKNWAHFPHIHFGLMLESNKQAKIA

SEQ ID NO: 71056 - protein, 114 aa, Arabidopsis thaliana
  peptide (1)..(114): Ceres Seq. ID no. 3039827
MAAALQSLSRPNFQATNYAVPEYGSSSRSHTKIPSRISTRTITEQRIVNRPPEKRQRVPSAYNQFIKEEIQRIKANNPDISHREAFSTAAKNWAHFPHIHFGLMLESNKQAKIA

SEQ ID NO: 71057 - DNA, 1584 bp, Arabidopsis thaliana
  misc_feature (1)..(1584): Ceres Seq. ID no. 3040245
  misc_feature (1)..(1584): Ortholog of  Ceres SEQ ID NO 12613725 as cited in SEQ ID NO 68196
atggcgtcttttctccgagtcatcgttctgtcatgggcttttaccgttgcgtggtttaccctctggatgttgatgctatacttgacgaacgagatgaagctaaagttcacagacgcagctgcgattgtaaatgtgtttgctggtgtatcagctattggtcatcttggcatgcaatttcttgttgatgcatttattggtcacttttggatgctctgtctctctactttagcattcagtttcggtttcgggttcttggcaatatcagcgtcaccaatactttcaggcaatggacaaaagggcctgttctacgtagcgctaacggttatatccgttggtatatttggacggtctatctctttgggagtatttacagaagaccaactagaagacggtaggaacaagggaaaccccgccaagctcgttagctttgtcattggaaatgtggggaattttgtgttcttgttacttgctgctattgcaatgcctcagataagtccgtggtttgttaggttcacgatcccctcgggctgtgaggtattagcaatgctgatttttatttccggtgcgtgttcatacaaacgggttaaaccaggtgggagccctttgacaacggttttccgggtctttatggcttctgcttccaaaatgtcttgtgcatactcgaacaactcaagccagctctatgaaaaagctgagtgtgatcaagatattaagccccacacaagcagcttaaggtatctagatagagctgcaatgatactccaaacagagtctttggaacaacagaggaaaaacagatggaagctttgtcgggtgacagaagtggagcaaacgaaaagcgtcatacgcacggttcctttgtttgcgacatctctcatttcggggattgtcttctctcttggtaatactttcttccttgaacaagcaaaccatatggactccaagttcggatcatggaaccttcctctcccactcctcttactctttagtgaagctgcaaggctaggatcccgagaactatgtgtcatggctgcaaaacgccatgccattgacttccctgaatcacctaaacaaaccaaaacgccttatggtataccagtctccatcatcctatcgatattttgctgctccatcgctgcacatgttgagtctaggaggctcaaagtagttagtactcaaggtttactacatgaaactgtccccatgagtgtattctggctgctcccacagtacattctactcggttcaatcacaggaatctacgaaaacagctttgcgctttacctagaagaaacggtgcctgaagagttgagccaatacatggttctattaaacgtgggagtgtgcggggtcgggatcatgagcaacattgctcttgttagtttggtgggcagtgtaagcggaggcaaatggtttcaagacacaataaacaagagccgggtggataactattattgggttataacagtgttttgcatgttcaatctcttgttatatttcattgtaacctataggtacacagtgtgtaacaagaaagatggtgcaacacaagaaaatgatcgaaggataatcgcttctgtgtag

SEQ ID NO: 71058 - protein, 527 aa, Arabidopsis thaliana
  peptide (1)..(527): Ceres Seq. ID no. 3040246
MASFLRVIVLSWAFTVAWFTLWMLMLYLTNEMKLKFTDAAAIVNVFAGVSAIGHLGMQFLVDAFIGHFWMLCLSTLAFSFGFGFLAISASPILSGNGQKGLFYVALTVISVGIFGRSISLGVFTEDQLEDGRNKGNPAKLVSFVIGNVGNFVFLLLAAIAMPQISPWFVRFTIPSGCEVLAMLIFISGACSYKRVKPGGSPLTTVFRVFMASASKMSCAYSNNSSQLYEKAECDQDIKPHTSSLRYLDRAAMILQTESLEQQRKNRWKLCRVTEVEQTKSVIRTVPLFATSLISGIVFSLGNTFFLEQANHMDSKFGSWNLPLPLLLLFSEAARLGSRELCVMAAKRHAIDFPESPKQTKTPYGIPVSIILSIFCCSIAAHVESRRLKVVSTQGLLHETVPMSVFWLLPQYILLGSITGIYENSFALYLEETVPEELSQYMVLLNVGVCGVGIMSNIALVSLVGSVSGGKWFQDTINKSRVDNYYWVITVFCMFNLLLYFIVTYRYTVCNKKDGATQENDRRIIASV

SEQ ID NO: 71059 - protein, 505 aa, Arabidopsis thaliana; identical to SEQ ID NO: 70420
  peptide (1)..(505): Ceres Seq. ID no. 3040247

SEQ ID NO: 71060 - protein, 503 aa, Arabidopsis thaliana; identical to SEQ ID NO: 70421
  peptide (1)..(503): Ceres Seq. ID no. 3040248

SEQ ID NO: 71061 - DNA, 1032 bp, Arabidopsis thaliana
  misc_feature (1)..(1032): Ceres Seq. ID no. 3041857
  misc_feature (1)..(1032): Ortholog of  Ceres SEQ ID NO 15179743 as cited in SEQ ID NO 62336
atggtgattcaaacgaatctctcatatcgtttcttcatcttaattgtgtttttatttaccctagcgaatccaaaatcagattcagatctcaaaaacgaactagtctccctccgatcaaccgccgaatcaggcgtgatctccttcaacaacgacgacgtttccaaattcataacctccgtatccactcctagaccttactcactcatcatcttcttcgacgccgttcatctccacggcaatagccagctacgtcttccagagttccgccgcgaattcagactcgtctccgccactttcatcaccaacaacaacaatgaatctaacggcacaaagctcttcttctgcgagatcgaatcaactcactccgaggcttctttccgccgcttcgccgtcgagtcactaccacacatttccctcgttagccccacgacagagaatttaacagaatcagatcaaatggacggtggagatttcactggattagccgaatcaatggcagagttcgtcgaacgtcaaacaaaactcaccgtttgttcaatccaacgaccaccactcatatcaaagacacaaatcggaatcatcgttgctataatcataatctcgactccgattctcatcaagaagattctaaaaggagaaacacttctccatgaccatagaatctggttagttggcgcggttttcgtctacttcttcagcgtctcggggacaatgcataacatcattagagaaatgccaatgtatatcaaagattatgaagattcaagtaagtttgttttctttatagaagaatcagagatgcagcttggagcagaaggtttctttgtagggtttttgtatactgttgttggattgcttttggcgtttgttactaatgtagttgtacgagtcaagaaactcgatgagcaaaggatggctatgcttttggctctgtctatatcgttttgggctgtgaggaaagttgtttacttggataattggaagactggttatgaaatttacccatattggccatcgagttggcggggatga

SEQ ID NO: 71062 - protein, 343 aa, Arabidopsis thaliana
  peptide (1)..(343): Ceres Seq. ID no. 3041858
MVIQTNLSYRFFILIVFLFTLANPKSDSDLKNELVSLRSTAESGVISFNNDDVSKFITSVSTPRPYSLIIFFDAVHLHGNSQLRLPEFRREFRLVSATFITNNNNESNGTKLFFCEIESTHSEASFRRFAVESLPHISLVSPTTENLTESDQMDGGDFTGLAESMAEFVERQTKLTVCSIQRPPLISKTQIGIIVAIIIISTPILIKKILKGETLLHDHRIWLVGAVFVYFFSVSGTMHNIIREMPMYIKDYEDSSKFVFFIEESEMQLGAEGFFVGFLYTVVGLLLAFVTNVVVRVKKLDEQRMAMLLALSISFWAVRKVVYLDNWKTGYEIYPYWPSSWRG

SEQ ID NO: 71063 - protein, 191 aa, Arabidopsis thaliana
  peptide (1)..(191): Ceres Seq. ID no. 3041859
MDGGDFTGLAESMAEFVERQTKLTVCSIQRPPLISKTQIGIIVAIIIISTPILIKKILKGETLLHDHRIWLVGAVFVYFFSVSGTMHNIIREMPMYIKDYEDSSKFVFFIEESEMQLGAEGFFVGFLYTVVGLLLAFVTNVVVRVKKLDEQRMAMLLALSISFWAVRKVVYLDNWKTGYEIYPYWPSSWRG

SEQ ID NO: 71064 - protein, 179 aa, Arabidopsis thaliana
  peptide (1)..(179): Ceres Seq. ID no. 3041860
MAEFVERQTKLTVCSIQRPPLISKTQIGIIVAIIIISTPILIKKILKGETLLHDHRIWLVGAVFVYFFSVSGTMHNIIREMPMYIKDYEDSSKFVFFIEESEMQLGAEGFFVGFLYTVVGLLLAFVTNVVVRVKKLDEQRMAMLLALSISFWAVRKVVYLDNWKTGYEIYPYWPSSWRG

SEQ ID NO: 71065 - DNA, 1086 bp, Arabidopsis thaliana
  misc_feature (1)..(1086): Ceres Seq. ID no. 3042231
  misc_feature (1)..(1086): Ortholog of  Ceres SEQ ID NO 13594037 as cited in SEQ ID NO 55666
atgggatacacaaatgtgtccattttattaggcctgttgatggtctttgttacaccgatggtgttcgcagatgatgtgacaccaatcccagagggcaaaccccaagtggcgcagtggttcaatgccaacgttggtccattggctcaacgtaaaggcttagatcctgctcttgtagctgctgaggctgctccacgtatcatcaacgtgaatccaaagggtggtgaattcaaaacactaacggacgcaataaagagcgttcctgcagggaacacaaagcgggtgatcataaagatggctcctggtgaatacaaagagaaggtcactatcgacaggaacaaacccttcattacattgatgggacaacccaatgccatgcctgttatcacctatgacggtaccgccgccaagtatggaaccgttgatagcgcctctctcattatcttatccgactatttcatggccgttaacatcgtcgttaagaacactgcgccggcaccagatggtaaaactaagggagcacaagctttatccatgagaatctccggaaattttgctgctttctacaactgcaaattctacggtttccaagacacaatctgtgacgatacaggaaaccatttcttcaaggattgttacgttgaaggaacattcgatttcatcttcggaagtggaacctctatgtacttgggaacacaattgcacgtggttggagacggtattagagtgatagcagcgcatgcaggaaagagcgcagaagagaagagtggatactctttcgtgcactgcaaggtgactggaaccggtggaggaatttatttgggaagagcatggatgagccaccctaaggttgtttatgcctacaccgagatgaccagcgttgtcaaccccaccggatggcaagaaaacaagactcccgcacatgacaaaaccgtgttctacggagagtacaagtgttcaggaccaggatcacacaaagccaagagagtaccattcacacaagacattgacgacaaagaagctaaccgtttcctatccctcggctacatccaaggatccaagtggcttctcccaccacccgctttgtaa

SEQ ID NO: 71066 - protein, 361 aa, Arabidopsis thaliana
  peptide (1)..(361): Ceres Seq. ID no. 3042232
MGYTNVSILLGLLMVFVTPMVFADDVTPIPEGKPQVAQWFNANVGPLAQRKGLDPALVAAEAAPRIINVNPKGGEFKTLTDAIKSVPAGNTKRVIIKMAPGEYKEKVTIDRNKPFITLMGQPNAMPVITYDGTAAKYGTVDSASLIILSDYFMAVNIVVKNTAPAPDGKTKGAQALSMRISGNFAAFYNCKFYGFQDTICDDTGNHFFKDCYVEGTFDFIFGSGTSMYLGTQLHVVGDGIRVIAAHAGKSAEEKSGYSFVHCKVTGTGGGIYLGRAWMSHPKVVYAYTEMTSVVNPTGWQENKTPAHDKTVFYGEYKCSGPGSHKAKRVPFTQDIDDKEANRFLSLGYIQGSKWLLPPPAL

SEQ ID NO: 71067 - protein, 348 aa, Arabidopsis thaliana
  peptide (1)..(348): Ceres Seq. ID no. 3042233
MVFVTPMVFADDVTPIPEGKPQVAQWFNANVGPLAQRKGLDPALVAAEAAPRIINVNPKGGEFKTLTDAIKSVPAGNTKRVIIKMAPGEYKEKVTIDRNKPFITLMGQPNAMPVITYDGTAAKYGTVDSASLIILSDYFMAVNIVVKNTAPAPDGKTKGAQALSMRISGNFAAFYNCKFYGFQDTICDDTGNHFFKDCYVEGTFDFIFGSGTSMYLGTQLHVVGDGIRVIAAHAGKSAEEKSGYSFVHCKVTGTGGGIYLGRAWMSHPKVVYAYTEMTSVVNPTGWQENKTPAHDKTVFYGEYKCSGPGSHKAKRVPFTQDIDDKEANRFLSLGYIQGSKWLLPPPAL

SEQ ID NO: 71068 - protein, 342 aa, Arabidopsis thaliana; identical to SEQ ID NO: 49968
  peptide (1)..(342): Ceres Seq. ID no. 3042234

SEQ ID NO: 71069 - DNA, 783 bp, Arabidopsis thaliana
  misc_feature (1)..(783): Ceres Seq. ID no. 3042591
  misc_feature (1)..(783): Ortholog of  Ceres SEQ ID NO 14312166 as cited in SEQ ID NO 59253
atggatccgtctaagggaatccaagaacagaggattgtgattccaaacagacacaacgagaagctggttggtctgcttcatgaaactggttctacagacatcgtagtcttgtgccatggctttcgatcaaacaagagtaaccaaataatgaataatgtggctgctgctatacagaaagaagggatcagcgcttttcgttttgatttctccgggaatggagagagtgaaggcagtttctattatggtaactataaccatgaagctgatgatttacattctgttgtccaatacttctctaacaagaaccgtgtggttcctataatcctcggtcacagtaagggaggtgatgttgtcctcctctacgcctccaagtatcatgatgtccgcaatgtaatcaatctctcgggacgttatgatcttaaaaagggtataagagagcgtcttggagaagattttttggaaagaattaagcaacaaggattcatcgatgttggagatggaaaatcggggtatcgtgttactgagaagagcttaatggacaggttaagcactgatattcatgaagcttgcctcaagattgacaaagagtgcagggtcttgacggttcatggatcggaggacgaggtaatacctgtggaagatgcgaaggagtttgcgaagatcataccaaaccacaagctggagattgtggaaggagctaatcatggttatactgagcaccaaagtcaattagtttcaacagttatggagttcataaagacagtcattgtgaagaacaactag

SEQ ID NO: 71070 - protein, 260 aa, Arabidopsis thaliana
  peptide (1)..(260): Ceres Seq. ID no. 3042592
MDPSKGIQEQRIVIPNRHNEKLVGLLHETGSTDIVVLCHGFRSNKSNQIMNNVAAAIQKEGISAFRFDFSGNGESEGSFYYGNYNHEADDLHSVVQYFSNKNRVVPIILGHSKGGDVVLLYASKYHDVRNVINLSGRYDLKKGIRERLGEDFLERIKQQGFIDVGDGKSGYRVTEKSLMDRLSTDIHEACLKIDKECRVLTVHGSEDEVIPVEDAKEFAKIIPNHKLEIVEGANHGYTEHQSQLVSTVMEFIKTVIVKNN

SEQ ID NO: 71071 - protein, 211 aa, Arabidopsis thaliana
  peptide (1)..(211): Ceres Seq. ID no. 3042593
MNNVAAAIQKEGISAFRFDFSGNGESEGSFYYGNYNHEADDLHSVVQYFSNKNRVVPIILGHSKGGDVVLLYASKYHDVRNVINLSGRYDLKKGIRERLGEDFLERIKQQGFIDVGDGKSGYRVTEKSLMDRLSTDIHEACLKIDKECRVLTVHGSEDEVIPVEDAKEFAKIIPNHKLEIVEGANHGYTEHQSQLVSTVMEFIKTVIVKNN

SEQ ID NO: 71072 - DNA, 2166 bp, Arabidopsis thaliana
  misc_feature (1)..(2166): Ceres Seq. ID no. 3042945
  misc_feature (1)..(2166): Ortholog of  Ceres SEQ ID NO 12586556 as cited in SEQ ID NO 64667
  misc_feature (1)..(2166): Ortholog of  Ceres SEQ ID NO 13660894 as cited in SEQ ID NO 67475
atgaatcagacgccatggaagttcaaaacttttcgagaccttctactgaaatctgtagcggagagagatctcttcactgggaaatcacttcacgcgctctacgtgaaatccattgtagcttcgtccacttatctctcaaatcacttcgtgaatctctactccaaatgtggtcgcctttcctacgcacgagccgcgttctactccacggaagaacccaatgtcttctcttacaatgtaattgtcaaagcttacgcgaaagattcgaaaatccatattgcacgccagttgttcgacgaaattccccaaccagacactgtctcttacaatactcttatctcggggtacgctgatgctagagaaacttttgccgcaatggttctgtttaagagaatgagaaaattgggatttgaggttgatgggtttacgttatcagggttgatagcagcttgttgtgaccgtgttgatttgataaagcagcttcactgtttctctgtctcgggagggtttgattcgtactcgtctgtgaataacgcgtttgttacgtattatagtaaaggcgggcttttgagagaggcggtatcggtgttttatgggatggatgaattaagagatgaagtttcgtggaattcgatgattgtggcttatgggcagcacaaggaaggagcaaaggcattagctttgtataaagaaatgatctttaaaggattcaagattgatatgtttacattggcaagtgttttaaatgctctcactagcttggatcatttgatcggtggccgtcagttccacggtaagctgatcaaggctggatttcaccagaactcacatgtgggaagtggtttgattgatttttactcaaaatgcgggggttgtgatggtatgtatgatagtgagaaggtatttcaagagattctatcgccggatttggttgtttggaatacgatgatttctggatattcaatgaacgaggaactctctgaagaagctgtgaagagttttagacagatgcaacgtattggacatagacctgatgattgcagttttgtctgtgtcacaagcgcttgctcgaatctctcctctccttctcagtgcaagcagattcatggcttggcgatcaaatctcacatcccttcgaatagaatctctgtgaacaacgcgttgatttcgttgtattacaaaagcggaaacctgcaagacgcaaggtgggtatttgatagaatgccggaacttaatgcggtatctttcaattgtatgatcaaaggttatgcgcagcacgggcatggaacagaagctttgcttttataccaacggatgctggactcgggtattgcgcctaacaagataacctttgtagccgttctttctgcttgtgcgcactgtggtaaggtcgacgagggtcaggagtacttcaacaccatgaaggagacgttcaagatcgaaccagaggctgagcactattcttgtatgattgatcttttaggccgagcagggaagctagaagaggcagagagattcatagatgcaatgccttataagccaggctctgttgcttgggctgctttgctcggggcttgtaggaaacacaaaaacatggctcttgcagagagagcagctaatgagcttatggtgatgcaaccattagctgccacgccatatgtgatgctagcaaacatgtatgcagatgccaggaaatgggaagagatggcctcggtgaggaaatcaatgagggggaaaaggataaggaagaaaccgggatgtagttggatcgaagtgaagaagaaaaagcatgtattcgtcgcagaagattggtctcatccgatgatacgagaagtgaatgaatatctagaggagatgatgaagaagatgaagaaagttgggtatgtgatggataagaaatgggcaatggtaaaagaggatgaagcaggcgaaggggacgaagaaatgcggttaggacatcacagcgagaagctagcggtggcttttgggttgatgtcgactagagatggagaagaattagttgtagttaagaatttgaggatatgtggggattgtcacaatgctatcaagtttatgtctgcggttgcaggtagagagatcattgtaagagataaccttcggtttcattgcttcaaagatggcaagtgttcatgtggggattattggtga

SEQ ID NO: 71073 - protein, 721 aa, Arabidopsis thaliana
  peptide (1)..(721): Ceres Seq. ID no. 3042946
MNQTPWKFKTFRDLLLKSVAERDLFTGKSLHALYVKSIVASSTYLSNHFVNLYSKCGRLSYARAAFYSTEEPNVFSYNVIVKAYAKDSKIHIARQLFDEIPQPDTVSYNTLISGYADARETFAAMVLFKRMRKLGFEVDGFTLSGLIAACCDRVDLIKQLHCFSVSGGFDSYSSVNNAFVTYYSKGGLLREAVSVFYGMDELRDEVSWNSMIVAYGQHKEGAKALALYKEMIFKGFKIDMFTLASVLNALTSLDHLIGGRQFHGKLIKAGFHQNSHVGSGLIDFYSKCGGCDGMYDSEKVFQEILSPDLVVWNTMISGYSMNEELSEEAVKSFRQMQRIGHRPDDCSFVCVTSACSNLSSPSQCKQIHGLAIKSHIPSNRISVNNALISLYYKSGNLQDARWVFDRMPELNAVSFNCMIKGYAQHGHGTEALLLYQRMLDSGIAPNKITFVAVLSACAHCGKVDEGQEYFNTMKETFKIEPEAEHYSCMIDLLGRAGKLEEAERFIDAMPYKPGSVAWAALLGACRKHKNMALAERAANELMVMQPLAATPYVMLANMYADARKWEEMASVRKSMRGKRIRKKPGCSWIEVKKKKHVFVAEDWSHPMIREVNEYLEEMMKKMKKVGYVMDKKWAMVKEDEAGEGDEEMRLGHHSEKLAVAFGLMSTRDGEELVVVKNLRICGDCHNAIKFMSAVAGREIIVRDNLRFHCFKDGKCSCGDYW

SEQ ID NO: 71074 - protein, 597 aa, Arabidopsis thaliana
  peptide (1)..(597): Ceres Seq. ID no. 3042947
MVLFKRMRKLGFEVDGFTLSGLIAACCDRVDLIKQLHCFSVSGGFDSYSSVNNAFVTYYSKGGLLREAVSVFYGMDELRDEVSWNSMIVAYGQHKEGAKALALYKEMIFKGFKIDMFTLASVLNALTSLDHLIGGRQFHGKLIKAGFHQNSHVGSGLIDFYSKCGGCDGMYDSEKVFQEILSPDLVVWNTMISGYSMNEELSEEAVKSFRQMQRIGHRPDDCSFVCVTSACSNLSSPSQCKQIHGLAIKSHIPSNRISVNNALISLYYKSGNLQDARWVFDRMPELNAVSFNCMIKGYAQHGHGTEALLLYQRMLDSGIAPNKITFVAVLSACAHCGKVDEGQEYFNTMKETFKIEPEAEHYSCMIDLLGRAGKLEEAERFIDAMPYKPGSVAWAALLGACRKHKNMALAERAANELMVMQPLAATPYVMLANMYADARKWEEMASVRKSMRGKRIRKKPGCSWIEVKKKKHVFVAEDWSHPMIREVNEYLEEMMKKMKKVGYVMDKKWAMVKEDEAGEGDEEMRLGHHSEKLAVAFGLMSTRDGEELVVVKNLRICGDCHNAIKFMSAVAGREIIVRDNLRFHCFKDGKCSCGDYW

SEQ ID NO: 71075 - protein, 591 aa, Arabidopsis thaliana
  peptide (1)..(591): Ceres Seq. ID no. 3042948
MRKLGFEVDGFTLSGLIAACCDRVDLIKQLHCFSVSGGFDSYSSVNNAFVTYYSKGGLLREAVSVFYGMDELRDEVSWNSMIVAYGQHKEGAKALALYKEMIFKGFKIDMFTLASVLNALTSLDHLIGGRQFHGKLIKAGFHQNSHVGSGLIDFYSKCGGCDGMYDSEKVFQEILSPDLVVWNTMISGYSMNEELSEEAVKSFRQMQRIGHRPDDCSFVCVTSACSNLSSPSQCKQIHGLAIKSHIPSNRISVNNALISLYYKSGNLQDARWVFDRMPELNAVSFNCMIKGYAQHGHGTEALLLYQRMLDSGIAPNKITFVAVLSACAHCGKVDEGQEYFNTMKETFKIEPEAEHYSCMIDLLGRAGKLEEAERFIDAMPYKPGSVAWAALLGACRKHKNMALAERAANELMVMQPLAATPYVMLANMYADARKWEEMASVRKSMRGKRIRKKPGCSWIEVKKKKHVFVAEDWSHPMIREVNEYLEEMMKKMKKVGYVMDKKWAMVKEDEAGEGDEEMRLGHHSEKLAVAFGLMSTRDGEELVVVKNLRICGDCHNAIKFMSAVAGREIIVRDNLRFHCFKDGKCSCGDYW

SEQ ID NO: 71076 - DNA, 933 bp, Arabidopsis thaliana
  misc_feature (1)..(933): Ceres Seq. ID no. 3043944
  misc_feature (1)..(933): Ortholog of  Ceres SEQ ID NO 13654431 as cited in SEQ ID NO 67761
atgtctcaaagcggcggtgacttcaacctctccgacgagattctcgccgtgattcccaccgacccttatgatcaactcgacctcgccaggaagatcacttccatggctatcgcttcaagggtttcgaatctggaatctcaagtctccggcttgagacagaagcttcttgagaaggatcggcttgttcatgaacttgaagacagagtctcttcctttgaaagactttaccatgaagctgactcgagtttgaagaatgttgtcgatgaaaatatgaaactgactcaagaacgagattcactggcaatcactgcgaagaaactcggtcgtgattatgcaaagttggaagcattcaagagacaattgatgcagtcattgaatgatgataatccatctcaaactgagactgctgatgtcagaatggttcctcgaggcaaagatgagaattcaaatggatcctactcaaacaatgaaggtttaagtgaagcgaggcaaagacagtctatgactccgcagttctctcccgcgtttacaccaagcggaacaccaaagatcttatctactgctgcttctccgagaagctactctgctgcttcatcgccaaagctattctctggagctgcatctccaacatcttcacattatgatatacgtatgtggtcttcaactagccagcaatcttcagtagcaaactctcctccacgctcgcattctgtttcagctcggcatccgcggattgatgggaaagagttctttagacaagccaggagccgtttgtcttacgaacagttcagtgcattcctggctaacatcaaggaacttaacgcccggaagcagggccgcgaggaaacattacagaaagcagaggaaatatttggaaaggaaaacaatgatctttacatatcctttaagggacttctcacaagtgggcgttga

SEQ ID NO: 71077 - protein, 310 aa, Arabidopsis thaliana
  peptide (1)..(310): Ceres Seq. ID no. 3043945
MSQSGGDFNLSDEILAVIPTDPYDQLDLARKITSMAIASRVSNLESQVSGLRQKLLEKDRLVHELEDRVSSFERLYHEADSSLKNVVDENMKLTQERDSLAITAKKLGRDYAKLEAFKRQLMQSLNDDNPSQTETADVRMVPRGKDENSNGSYSNNEGLSEARQRQSMTPQFSPAFTPSGTPKILSTAASPRSYSAASSPKLFSGAASPTSSHYDIRMWSSTSQQSSVANSPPRSHSVSARHPRIDGKEFFRQARSRLSYEQFSAFLANIKELNARKQGREETLQKAEEIFGKENNDLYISFKGLLTSGR

SEQ ID NO: 71078 - protein, 276 aa, Arabidopsis thaliana
  peptide (1)..(276): Ceres Seq. ID no. 3043946
MAIASRVSNLESQVSGLRQKLLEKDRLVHELEDRVSSFERLYHEADSSLKNVVDENMKLTQERDSLAITAKKLGRDYAKLEAFKRQLMQSLNDDNPSQTETADVRMVPRGKDENSNGSYSNNEGLSEARQRQSMTPQFSPAFTPSGTPKILSTAASPRSYSAASSPKLFSGAASPTSSHYDIRMWSSTSQQSSVANSPPRSHSVSARHPRIDGKEFFRQARSRLSYEQFSAFLANIKELNARKQGREETLQKAEEIFGKENNDLYISFKGLLTSGR

SEQ ID NO: 71079 - protein, 220 aa, Arabidopsis thaliana
  peptide (1)..(220): Ceres Seq. ID no. 3043947
MKLTQERDSLAITAKKLGRDYAKLEAFKRQLMQSLNDDNPSQTETADVRMVPRGKDENSNGSYSNNEGLSEARQRQSMTPQFSPAFTPSGTPKILSTAASPRSYSAASSPKLFSGAASPTSSHYDIRMWSSTSQQSSVANSPPRSHSVSARHPRIDGKEFFRQARSRLSYEQFSAFLANIKELNARKQGREETLQKAEEIFGKENNDLYISFKGLLTSGR

SEQ ID NO: 71080 - DNA, 1134 bp, Arabidopsis thaliana
  misc_feature (1)..(1134): Ceres Seq. ID no. 3045591
  misc_feature (1)..(1134): Ortholog of  Ceres SEQ ID NO 14313893 as cited in SEQ ID NO 54646
  misc_feature (1)..(1134): Ortholog of  Ceres SEQ ID NO 13656797 as cited in SEQ ID NO 65756
  misc_feature (1)..(1134): Ortholog of  Ceres SEQ ID NO 13658498 as cited in SEQ ID NO 66557
  misc_feature (1)..(1134): Ortholog of  Ceres SEQ ID NO 15227053 as cited in SEQ ID NO 0
atgaagagcacgaacgacgaatctccttccttgggatacgacttcgccggagttagcatcaaggacggaaaatctaagccgccggcgccggtaatatgttacgatggcttgttcggagggagagacgtgattagaatcgtgctattggtcacgaccgtgacactttcttgtctattattctacaaatctgcaaacaatccactcaatatggtgttttctccatggaagaccgattgttatgcttccaaacttacaaacgagtcttcctcaaaaacggaaccaaagaaggagccggtttcagaactagagagagtattgatgaatgcggctatggaagataacacggtgatcataacggcgttaaaccaagcatgggccgaaccaaactctacattcgatgtgtttcgagagagttttaaagtcggaatagaaacggagaggttattgaagcatgtgatcgcggtttgcttggatatcaaggcatatgatcagtgcctaaaggttcatcctcattgctatttgatcaacgccacagattcagaccaactctcaggtccgaatcggtttatgacgcctggttacttgaaacttatttggcggcgaatggatcttcttaggcaagttattggtttagggtacaacttcatattcacggatgcagatatattatggcttcgagacccatttcctcgtttttttccggatgctgattttcaaataacatgcgatgattacaatggaagaccatcggacaaaaagaatcacgtgaactccggatttacatacgtcaaggcaaacaacaaaacttcaaaattttacaaatattggattagatcgagtcggaaatttcctggaaaacacgatcaagatgtgttcaacttcataaaaaacgatcttcacgtcgagaaacttgggataaagatgaggtttttcgataccgtttactttggagggttttgtcagccgagccgagacatcaatgtggtcaacacaatgcatgctaattgttgtattggcttggacaacaaagtgaataatcttaaggcagctctcgaagattggaaacgatatgtgtcactaaacacgaccgtgtccgagactaaatggaatattccgcctaggtgtggttattaa

SEQ ID NO: 71081 - protein, 377 aa, Arabidopsis thaliana
  peptide (1)..(377): Ceres Seq. ID no. 3045592
MKSTNDESPSLGYDFAGVSIKDGKSKPPAPVICYDGLFGGRDVIRIVLLVTTVTLSCLLFYKSANNPLNMVFSPWKTDCYASKLTNESSSKTEPKKEPVSELERVLMNAAMEDNTVIITALNQAWAEPNSTFDVFRESFKVGIETERLLKHVIAVCLDIKAYDQCLKVHPHCYLINATDSDQLSGPNRFMTPGYLKLIWRRMDLLRQVIGLGYNFIFTDADILWLRDPFPRFFPDADFQITCDDYNGRPSDKKNHVNSGFTYVKANNKTSKFYKYWIRSSRKFPGKHDQDVFNFIKNDLHVEKLGIKMRFFDTVYFGGFCQPSRDINVVNTMHANCCIGLDNKVNNLKAALEDWKRYVSLNTTVSETKWNIPPRCGY

SEQ ID NO: 71082 - protein, 308 aa, Arabidopsis thaliana
  peptide (1)..(308): Ceres Seq. ID no. 3045593
MVFSPWKTDCYASKLTNESSSKTEPKKEPVSELERVLMNAAMEDNTVIITALNQAWAEPNSTFDVFRESFKVGIETERLLKHVIAVCLDIKAYDQCLKVHPHCYLINATDSDQLSGPNRFMTPGYLKLIWRRMDLLRQVIGLGYNFIFTDADILWLRDPFPRFFPDADFQITCDDYNGRPSDKKNHVNSGFTYVKANNKTSKFYKYWIRSSRKFPGKHDQDVFNFIKNDLHVEKLGIKMRFFDTVYFGGFCQPSRDINVVNTMHANCCIGLDNKVNNLKAALEDWKRYVSLNTTVSETKWNIPPRCGY

SEQ ID NO: 71083 - protein, 271 aa, Arabidopsis thaliana
  peptide (1)..(271): Ceres Seq. ID no. 3045594
MNAAMEDNTVIITALNQAWAEPNSTFDVFRESFKVGIETERLLKHVIAVCLDIKAYDQCLKVHPHCYLINATDSDQLSGPNRFMTPGYLKLIWRRMDLLRQVIGLGYNFIFTDADILWLRDPFPRFFPDADFQITCDDYNGRPSDKKNHVNSGFTYVKANNKTSKFYKYWIRSSRKFPGKHDQDVFNFIKNDLHVEKLGIKMRFFDTVYFGGFCQPSRDINVVNTMHANCCIGLDNKVNNLKAALEDWKRYVSLNTTVSETKWNIPPRCGY

SEQ ID NO: 71084 - DNA, 2292 bp, Arabidopsis thaliana
  misc_feature (1)..(2292): Ceres Seq. ID no. 3047980
  misc_feature (1)..(2292): Ortholog of  Ceres SEQ ID NO 13654989 as cited in SEQ ID NO 63117
  misc_feature (1)..(2292): Ortholog of  Ceres SEQ ID NO 13584744 as cited in SEQ ID NO 69137
atgtggctaccaaaagcaaatggggcaaagaaagaaacaggaagtggttcagtagcagttgcaatagacaaagacaaaggaagccaacatgctcttaaatggacaatcgacaatcttgcttctcgtggccaaaccatttctcttattcatgtcctctgcagatctcattcttcttcagatcttgaagaaggaacgccacaacagaaacagcaaatggagaagatagctaaagatctctttgtatccttccactgctattgttcccgtaaagagataaattgtcgagacattttgctggaagacgcagacaaagttcgagccattaccgaatatgtttcatcttctgcaattgagaacttagtcgttggatctgcatcacgtaatggcttcatgagaagattcaagacggatttgccaacaacagtgtcaaaatcagctccagatttctgcaatgtttatgtcatttcaaaaggcaaaattgcttcagtacgaaatgcatcacgtcctgctccttaccaaaattcgatgcagcaatgtgaaattgacaatcatcacccacatactcctgacaaagcaccaaagtaccatgaccatcccaattctgcaggtagtacaccatctagaccgcgcaaatcagttgaagcagataggtataggaattggaagcttgttgtgatgtctttaagatcgccgttggtgaaaaggaagccatatggggacttctatgattcagatagtgacctttcgtttatcagtccgtcttctcatcgtgactctgacatttccttcatcagctcaggaagaccaagcgttgagcggtcttcctttagccttgattttcctgaatctgcaaggacttcaagaatgtcaacgagctcagagcaaagcattggctcaaatcgtttgggaattaagttcagtgatcctgatttccttaacgaatcctctacattctctgaagagagtggtagaacatcctcctattcatctcagagcttggatgatgttgaagctgaaatgaagaggctgcgtctagagctgaaacaaaccatggatatgtatagcacagcttgtaaagaagctttaagcgctagacaacaggcaacggagctgcaaaagctgagaaccgaagaggagagacggttggaagaagcaaaaagttcagaggaagcagcaatgtcaatagtggaaaaggagagagctaaagccaaagcagcgttggaagctgctgaagctgcaaagagattagcagaagtggaatctaaaagaaggttgactgcagagatgaagacaatgaaggaatcagattcattctctcgcggatttgttcggtataggaaatacacggttgacgaaatcgaagaagctacttcaaattttgcagagtctcaaaaggtaggagaaggaggctatggtcctgtctttagaggctttcttgatcacacaagtgttgctgttaaagttctacgcccagacgcagctcaagggagatcacagtttcagaaagaggttgaagtgttaagctgcataaggcatccaaacatggtgcttcttcttggagcttgtccagaatttgggattcttgtttatgaatacatggccaaaggaagtttagaagaccggcttttcatgcgaggaaacacaccgccgattacctggcagctacgtttcagaatcgctgctgagatcgccacgggactcctcttcctccaccagaccaaacctgaaccaattgtccacagagaccttaaaccaggaaatgttctgctcgattacaactatgtgagcaagatcagtgatgtcgggctagcgagattagtccctgcagtagcggaaaacgttacacagtacagagtcacttcagctgcaggaactttctgttacattgatcctgagtaccaacaaacaggaatgttgggtgtgaagtcagatgtttattctcttggaatcatgcttttgcagatcttaaccgcaaaacagccaatgggtttggcttattacgttgaacaagcgatcgaagaagggactcttaaggatatgcttgatccagcagtaccggactggcctatagaagaagctctatctttagcaaagctttcgcttcaatgcgcggaactaagaagaaaagatagacctgacctcgggaaagagatattgcctgagctcaatcggttaagagagataggtgaagagagtttagagagtgtgttttatgcaggaaatcaaggaaagtctccaaacactagccaagtctcgattccggaatctccagctgcagaatctcaatcctag

SEQ ID NO: 71085 - protein, 763 aa, Arabidopsis thaliana
  peptide (1)..(763): Ceres Seq. ID no. 3047981
MWLPKANGAKKETGSGSVAVAIDKDKGSQHALKWTIDNLASRGQTISLIHVLCRSHSSSDLEEGTPQQKQQMEKIAKDLFVSFHCYCSRKEINCRDILLEDADKVRAITEYVSSSAIENLVVGSASRNGFMRRFKTDLPTTVSKSAPDFCNVYVISKGKIASVRNASRPAPYQNSMQQCEIDNHHPHTPDKAPKYHDHPNSAGSTPSRPRKSVEADRYRNWKLVVMSLRSPLVKRKPYGDFYDSDSDLSFISPSSHRDSDISFISSGRPSVERSSFSLDFPESARTSRMSTSSEQSIGSNRLGIKFSDPDFLNESSTFSEESGRTSSYSSQSLDDVEAEMKRLRLELKQTMDMYSTACKEALSARQQATELQKLRTEEERRLEEAKSSEEAAMSIVEKERAKAKAALEAAEAAKRLAEVESKRRLTAEMKTMKESDSFSRGFVRYRKYTVDEIEEATSNFAESQKVGEGGYGPVFRGFLDHTSVAVKVLRPDAAQGRSQFQKEVEVLSCIRHPNMVLLLGACPEFGILVYEYMAKGSLEDRLFMRGNTPPITWQLRFRIAAEIATGLLFLHQTKPEPIVHRDLKPGNVLLDYNYVSKISDVGLARLVPAVAENVTQYRVTSAAGTFCYIDPEYQQTGMLGVKSDVYSLGIMLLQILTAKQPMGLAYYVEQAIEEGTLKDMLDPAVPDWPIEEALSLAKLSLQCAELRRKDRPDLGKEILPELNRLREIGEESLESVFYAGNQGKSPNTSQVSIPESPAAESQS

SEQ ID NO: 71086 - protein, 692 aa, Arabidopsis thaliana
  peptide (1)..(692): Ceres Seq. ID no. 3047982
MEKIAKDLFVSFHCYCSRKEINCRDILLEDADKVRAITEYVSSSAIENLVVGSASRNGFMRRFKTDLPTTVSKSAPDFCNVYVISKGKIASVRNASRPAPYQNSMQQCEIDNHHPHTPDKAPKYHDHPNSAGSTPSRPRKSVEADRYRNWKLVVMSLRSPLVKRKPYGDFYDSDSDLSFISPSSHRDSDISFISSGRPSVERSSFSLDFPESARTSRMSTSSEQSIGSNRLGIKFSDPDFLNESSTFSEESGRTSSYSSQSLDDVEAEMKRLRLELKQTMDMYSTACKEALSARQQATELQKLRTEEERRLEEAKSSEEAAMSIVEKERAKAKAALEAAEAAKRLAEVESKRRLTAEMKTMKESDSFSRGFVRYRKYTVDEIEEATSNFAESQKVGEGGYGPVFRGFLDHTSVAVKVLRPDAAQGRSQFQKEVEVLSCIRHPNMVLLLGACPEFGILVYEYMAKGSLEDRLFMRGNTPPITWQLRFRIAAEIATGLLFLHQTKPEPIVHRDLKPGNVLLDYNYVSKISDVGLARLVPAVAENVTQYRVTSAAGTFCYIDPEYQQTGMLGVKSDVYSLGIMLLQILTAKQPMGLAYYVEQAIEEGTLKDMLDPAVPDWPIEEALSLAKLSLQCAELRRKDRPDLGKEILPELNRLREIGEESLESVFYAGNQGKSPNTSQVSIPESPAAESQS

SEQ ID NO: 71087 - protein, 633 aa, Arabidopsis thaliana
  peptide (1)..(633): Ceres Seq. ID no. 3047983
MRRFKTDLPTTVSKSAPDFCNVYVISKGKIASVRNASRPAPYQNSMQQCEIDNHHPHTPDKAPKYHDHPNSAGSTPSRPRKSVEADRYRNWKLVVMSLRSPLVKRKPYGDFYDSDSDLSFISPSSHRDSDISFISSGRPSVERSSFSLDFPESARTSRMSTSSEQSIGSNRLGIKFSDPDFLNESSTFSEESGRTSSYSSQSLDDVEAEMKRLRLELKQTMDMYSTACKEALSARQQATELQKLRTEEERRLEEAKSSEEAAMSIVEKERAKAKAALEAAEAAKRLAEVESKRRLTAEMKTMKESDSFSRGFVRYRKYTVDEIEEATSNFAESQKVGEGGYGPVFRGFLDHTSVAVKVLRPDAAQGRSQFQKEVEVLSCIRHPNMVLLLGACPEFGILVYEYMAKGSLEDRLFMRGNTPPITWQLRFRIAAEIATGLLFLHQTKPEPIVHRDLKPGNVLLDYNYVSKISDVGLARLVPAVAENVTQYRVTSAAGTFCYIDPEYQQTGMLGVKSDVYSLGIMLLQILTAKQPMGLAYYVEQAIEEGTLKDMLDPAVPDWPIEEALSLAKLSLQCAELRRKDRPDLGKEILPELNRLREIGEESLESVFYAGNQGKSPNTSQVSIPESPAAESQS

SEQ ID NO: 71088 - DNA, 1107 bp, Arabidopsis thaliana
  misc_feature (1)..(1107): Ceres Seq. ID no. 3048784
  misc_feature (1)..(1107): Ortholog of  Ceres SEQ ID NO 12612408 as cited in SEQ ID NO 54155
atggcggatgttaaggactcagtgattaccaagtacggaatcgtagggattggtatgatgggaagagaacatctcatcaatcttcaccatctccgtgaccaaggcctcgccgtcgtttgcatcgccgatcctcaccctccttcacagctcctggccattgaactcgctcaatcttttggatgggagcttaaggttttctcaggacacgaggagttgctcaagagtgagctgtgtgacgttattgttgtctcttctccaaatatgactcatcatcagattcttatggacattatcaattattcaaaaccgcatcatgttcttgttgagaagcctttatgcaccacagttgcagattgcaaacaggttttggaggctgcaaagaaaaggtcagatatggtggtgcaagttgggttggagtacagatacatgccgccagttgctaagctaatagaacaagtaaaaggcagagactttggtaatgtcaagatggtagcaatccgagaacatagattccctttcttggttaaggtgaacaactggaatagattcaatgtgaacactggagggaccttagtggagaaatgctgccacttctttgatctaatgaggctctttgccggtgcaaatcctgtctgtgtgatggcttctggaggcatggatgtgaaccacaaggatgaagtttatggtggaaaggtgcctgatataattgataacgcatatgttattattgagtttgacaatggatgtcgtgggatgctcgatctttgcatgtttgctgaaggaagcaaaaacgagcaagaaatttctgttactggtgacattggaaagggggaggcacttgttccagagggtatagttcgatctggcagtcgtattggaggaagagaacacgttcaaacaataaaagcagaagatgaaagaataaaatatgaagggttgcatcacgggtcaagttacttggaacacctcaccttcttatcagcaatcagaggtgaaggaatagcagctgttgatttggaagacggattgatggctgttgccatgggagttgctgcacagctctccattcaggagcgccgctatgtaaccattgacgaggtcttgtga

SEQ ID NO: 71089 - protein, 368 aa, Arabidopsis thaliana
  peptide (1)..(368): Ceres Seq. ID no. 3048785
MADVKDSVITKYGIVGIGMMGREHLINLHHLRDQGLAVVCIADPHPPSQLLAIELAQSFGWELKVFSGHEELLKSELCDVIVVSSPNMTHHQILMDIINYSKPHHVLVEKPLCTTVADCKQVLEAAKKRSDMVVQVGLEYRYMPPVAKLIEQVKGRDFGNVKMVAIREHRFPFLVKVNNWNRFNVNTGGTLVEKCCHFFDLMRLFAGANPVCVMASGGMDVNHKDEVYGGKVPDIIDNAYVIIEFDNGCRGMLDLCMFAEGSKNEQEISVTGDIGKGEALVPEGIVRSGSRIGGREHVQTIKAEDERIKYEGLHHGSSYLEHLTFLSAIRGEGIAAVDLEDGLMAVAMGVAAQLSIQERRYVTIDEVL

SEQ ID NO: 71090 - protein, 350 aa, Arabidopsis thaliana
  peptide (1)..(350): Ceres Seq. ID no. 3048786
MMGREHLINLHHLRDQGLAVVCIADPHPPSQLLAIELAQSFGWELKVFSGHEELLKSELCDVIVVSSPNMTHHQILMDIINYSKPHHVLVEKPLCTTVADCKQVLEAAKKRSDMVVQVGLEYRYMPPVAKLIEQVKGRDFGNVKMVAIREHRFPFLVKVNNWNRFNVNTGGTLVEKCCHFFDLMRLFAGANPVCVMASGGMDVNHKDEVYGGKVPDIIDNAYVIIEFDNGCRGMLDLCMFAEGSKNEQEISVTGDIGKGEALVPEGIVRSGSRIGGREHVQTIKAEDERIKYEGLHHGSSYLEHLTFLSAIRGEGIAAVDLEDGLMAVAMGVAAQLSIQERRYVTIDEVL

SEQ ID NO: 71091 - protein, 349 aa, Arabidopsis thaliana
  peptide (1)..(349): Ceres Seq. ID no. 3048787
MGREHLINLHHLRDQGLAVVCIADPHPPSQLLAIELAQSFGWELKVFSGHEELLKSELCDVIVVSSPNMTHHQILMDIINYSKPHHVLVEKPLCTTVADCKQVLEAAKKRSDMVVQVGLEYRYMPPVAKLIEQVKGRDFGNVKMVAIREHRFPFLVKVNNWNRFNVNTGGTLVEKCCHFFDLMRLFAGANPVCVMASGGMDVNHKDEVYGGKVPDIIDNAYVIIEFDNGCRGMLDLCMFAEGSKNEQEISVTGDIGKGEALVPEGIVRSGSRIGGREHVQTIKAEDERIKYEGLHHGSSYLEHLTFLSAIRGEGIAAVDLEDGLMAVAMGVAAQLSIQERRYVTIDEVL

SEQ ID NO: 71092 - DNA, 1344 bp, Arabidopsis thaliana
  misc_feature (1)..(1344): Ceres Seq. ID no. 3049085
  misc_feature (1)..(1344): Ortholog of  Ceres SEQ ID NO 13594345 as cited in SEQ ID NO 58043
  misc_feature (1)..(1344): Ortholog of  Ceres SEQ ID NO 13597574 as cited in SEQ ID NO 64677
  misc_feature (1)..(1344): Ortholog of  Ceres SEQ ID NO 13597843 as cited in SEQ ID NO 64850
  misc_feature (1)..(1344): Ortholog of  Ceres SEQ ID NO 13662880 as cited in SEQ ID NO 65422
  misc_feature (1)..(1344): Ortholog of  Ceres SEQ ID NO 12779098 as cited in SEQ ID NO 67698
  misc_feature (1)..(1344): Ortholog of  Ceres SEQ ID NO 13591190 as cited in SEQ ID NO 68044
  misc_feature (1)..(1344): Ortholog of  Ceres SEQ ID NO 13595961 as cited in SEQ ID NO 68223
  misc_feature (1)..(1344): Ortholog of  Ceres SEQ ID NO 13596089 as cited in SEQ ID NO 68373
atggagaaaagagtagagaagagaaggatagtgttggttccacttccattactaggacatttcactccgatgatgcaactcggccaagcccttatcttgaagggattctcaattatagttcctcagggagaattcaatcgagtaaactcttcgcagaagttccctggttttcaatttatcaccataccagattctgaactcgaggcaaatggaccagtcgggtctctaacacagctcaacaaaattatggaggcaagcttcaaggactgtataaggcagttgttgaaacaacaaggcaatgatattgcatgtatcatctacgacgagttcatgtatttttgtggagccgtagctgaggagttgaagcttcccaatttcatcttcagtactcaaactgctacacataaagtttgctgcaatgttttaagcaaacttaatgccaagaagtacttgatcgacatggaagagcatgacgtgcaaaacaaggtagtggaaaatatgcatccattaagatacaaagacttaccaactgcaacatttggagaactagaaccttttttggagctctgtagagatgtagtcaacaaaagaacagcctctgctgttatcatcaacaccgtgacctgtctagagagctcgtctctcacaaggctgcaacaagaactccaaattccggtgtatccattaggccctcttcacattacagattcatcgacaggatttactgtgctgcaagaggataggagctgcgttgaatggctgaacaagcagaaaccaaggtctgtcatatacataagtttaggaagcatggttctcatggaaaccaaggagatgttagagatggcttggggaatgttgaatagcaaccaacctttcttatgggtcatccgacctggatctgtctcaggctccgaggggatagagtcattgccagaggaagtcagtaagatggttttagagaaaggatacattgtgaaatgggcaccacaaatagaagtactaggacatccctcagtgggaggcttttggagccactgtggatggaactcaacactcgagagcattgtggaaggagttccaatgatttgcaggccttatcaaggcgagcagatgttaaatgcaatatatctagagagtgtatggagaatagggattcaggtaggaggtgaactggaaagaggagccgtcgagagagctgtgaagaggttgattgtggataaagaaggtgcaagcatgagggagagaacccttgttttaaaagagaagctcaaagcctctattagaggtggaggctcctcatgcaatgcattagatgagcttgtcaagcacttgaagacagagtga

SEQ ID NO: 71093 - protein, 447 aa, Arabidopsis thaliana
  peptide (1)..(447): Ceres Seq. ID no. 3049086
MEKRVEKRRIVLVPLPLLGHFTPMMQLGQALILKGFSIIVPQGEFNRVNSSQKFPGFQFITIPDSELEANGPVGSLTQLNKIMEASFKDCIRQLLKQQGNDIACIIYDEFMYFCGAVAEELKLPNFIFSTQTATHKVCCNVLSKLNAKKYLIDMEEHDVQNKVVENMHPLRYKDLPTATFGELEPFLELCRDVVNKRTASAVIINTVTCLESSSLTRLQQELQIPVYPLGPLHITDSSTGFTVLQEDRSCVEWLNKQKPRSVIYISLGSMVLMETKEMLEMAWGMLNSNQPFLWVIRPGSVSGSEGIESLPEEVSKMVLEKGYIVKWAPQIEVLGHPSVGGFWSHCGWNSTLESIVEGVPMICRPYQGEQMLNAIYLESVWRIGIQVGGELERGAVERAVKRLIVDKEGASMRERTLVLKEKLKASIRGGGSSCNALDELVKHLKTE

SEQ ID NO: 71094 - protein, 424 aa, Arabidopsis thaliana
  peptide (1)..(424): Ceres Seq. ID no. 3049087
MMQLGQALILKGFSIIVPQGEFNRVNSSQKFPGFQFITIPDSELEANGPVGSLTQLNKIMEASFKDCIRQLLKQQGNDIACIIYDEFMYFCGAVAEELKLPNFIFSTQTATHKVCCNVLSKLNAKKYLIDMEEHDVQNKVVENMHPLRYKDLPTATFGELEPFLELCRDVVNKRTASAVIINTVTCLESSSLTRLQQELQIPVYPLGPLHITDSSTGFTVLQEDRSCVEWLNKQKPRSVIYISLGSMVLMETKEMLEMAWGMLNSNQPFLWVIRPGSVSGSEGIESLPEEVSKMVLEKGYIVKWAPQIEVLGHPSVGGFWSHCGWNSTLESIVEGVPMICRPYQGEQMLNAIYLESVWRIGIQVGGELERGAVERAVKRLIVDKEGASMRERTLVLKEKLKASIRGGGSSCNALDELVKHLKTE

SEQ ID NO: 71095 - protein, 423 aa, Arabidopsis thaliana
  peptide (1)..(423): Ceres Seq. ID no. 3049088
MQLGQALILKGFSIIVPQGEFNRVNSSQKFPGFQFITIPDSELEANGPVGSLTQLNKIMEASFKDCIRQLLKQQGNDIACIIYDEFMYFCGAVAEELKLPNFIFSTQTATHKVCCNVLSKLNAKKYLIDMEEHDVQNKVVENMHPLRYKDLPTATFGELEPFLELCRDVVNKRTASAVIINTVTCLESSSLTRLQQELQIPVYPLGPLHITDSSTGFTVLQEDRSCVEWLNKQKPRSVIYISLGSMVLMETKEMLEMAWGMLNSNQPFLWVIRPGSVSGSEGIESLPEEVSKMVLEKGYIVKWAPQIEVLGHPSVGGFWSHCGWNSTLESIVEGVPMICRPYQGEQMLNAIYLESVWRIGIQVGGELERGAVERAVKRLIVDKEGASMRERTLVLKEKLKASIRGGGSSCNALDELVKHLKTE

SEQ ID NO: 71096 - DNA, 1161 bp, Arabidopsis thaliana
  misc_feature (1)..(1161): Ceres Seq. ID no. 3049249
  misc_feature (1)..(1161): Ortholog of  Ceres SEQ ID NO 13596244 as cited in SEQ ID NO 69307
atgaagaagcaaaagattacaacctttgttaaagaactcaacttacggatgaattcgaagaaagaaccgataagtctccgatacattcacatccttggcaccgttgtcttcttctcctctgtctcctctctcgtcatcctccttgctttttaccttaaccaacgcctccaaacatcactcttcctcgtcgaagattatcacactctctcctcaaatcctctcacttctccttccctctctcctcctccttctccttctcctcgcagctctggtagtaatattgcagacgaagagctgatgtggcgagcagcgatggccccacgcagccccatgaagaatgagacccatccaaaggttgcgttcatgtttctaacgaggtggaatttgccgttgtcccctctttgggaaatgttcttcaaaggtcatgaagggttttattccatctacgttcatacctcgccggagttcactcaagagccgccggaatcttcagtattttacaagaaacggataccaagcaaggccgttgaatggggaaaatgttcgatgatggatgcagagaagcgtcttatatctcatgccctactagaaccttccaacgcacgcttcgtcctcctctccgagacttgtatccctctcttcaacttcaccacaatctacacttacctcacgcgctccactcgctctttcctcggctcattcgacgacccaaggcccatgggccgaggccgttacacccctaaaatgctcccacacgtgtcgctctctgactggcggaaaggaaaccaatggttcgaaatctcacgtagagtcgccgccgagatcgtctctgatcgccggtactacgccgtctttaaggatcactgccgaccgccgtgttatatcgacgagcattatcttccgacgttagttaacaagatttgtccggagatgaattcgaaccggacagtgacgtgggttgattggtcaagaggtgggtcccatccagcgaggtttgtgaggaaagatattcgggtcgggttcttggatcggatccggttcggttcgaattgtagctacgaaggtgaggtgacgaatgtgtgttttcttttcgggaggaagtttcatgtgagcaccctcgagcctctcatgaagattgctccatatttgtttggaatttaa

SEQ ID NO: 71097 - protein, 386 aa, Arabidopsis thaliana
  peptide (1)..(386): Ceres Seq. ID no. 3049250
MKKQKITTFVKELNLRMNSKKEPISLRYIHILGTVVFFSSVSSLVILLAFYLNQRLQTSLFLVEDYHTLSSNPLTSPSLSPPPSPSPRSSGSNIADEELMWRAAMAPRSPMKNETHPKVAFMFLTRWNLPLSPLWEMFFKGHEGFYSIYVHTSPEFTQEPPESSVFYKKRIPSKAVEWGKCSMMDAEKRLISHALLEPSNARFVLLSETCIPLFNFTTIYTYLTRSTRSFLGSFDDPRPMGRGRYTPKMLPHVSLSDWRKGNQWFEISRRVAAEIVSDRRYYAVFKDHCRPPCYIDEHYLPTLVNKICPEMNSNRTVTWVDWSRGGSHPARFVRKDIRVGFLDRIRFGSNCSYEGEVTNVCFLFGRKFHVSTLEPLMKIAPYLFGI

SEQ ID NO: 71098 - protein, 370 aa, Arabidopsis thaliana
  peptide (1)..(370): Ceres Seq. ID no. 3049251
MNSKKEPISLRYIHILGTVVFFSSVSSLVILLAFYLNQRLQTSLFLVEDYHTLSSNPLTSPSLSPPPSPSPRSSGSNIADEELMWRAAMAPRSPMKNETHPKVAFMFLTRWNLPLSPLWEMFFKGHEGFYSIYVHTSPEFTQEPPESSVFYKKRIPSKAVEWGKCSMMDAEKRLISHALLEPSNARFVLLSETCIPLFNFTTIYTYLTRSTRSFLGSFDDPRPMGRGRYTPKMLPHVSLSDWRKGNQWFEISRRVAAEIVSDRRYYAVFKDHCRPPCYIDEHYLPTLVNKICPEMNSNRTVTWVDWSRGGSHPARFVRKDIRVGFLDRIRFGSNCSYEGEVTNVCFLFGRKFHVSTLEPLMKIAPYLFGI

SEQ ID NO: 71099 - protein, 287 aa, Arabidopsis thaliana
  peptide (1)..(287): Ceres Seq. ID no. 3049252
MWRAAMAPRSPMKNETHPKVAFMFLTRWNLPLSPLWEMFFKGHEGFYSIYVHTSPEFTQEPPESSVFYKKRIPSKAVEWGKCSMMDAEKRLISHALLEPSNARFVLLSETCIPLFNFTTIYTYLTRSTRSFLGSFDDPRPMGRGRYTPKMLPHVSLSDWRKGNQWFEISRRVAAEIVSDRRYYAVFKDHCRPPCYIDEHYLPTLVNKICPEMNSNRTVTWVDWSRGGSHPARFVRKDIRVGFLDRIRFGSNCSYEGEVTNVCFLFGRKFHVSTLEPLMKIAPYLFGI

SEQ ID NO: 71100 - DNA, 2571 bp, Arabidopsis thaliana
  misc_feature (1)..(2571): Ceres Seq. ID no. 3049718
  misc_feature (1)..(2571): Ortholog of  Ceres SEQ ID NO 15168977 as cited in SEQ ID NO 20587
atggtgtcaagatcttgtgctaattttctagacttatcatcttgggaccttttagattttcctcaaactccacgaactcttccacgcgtcatgactgttccgggaatcatcaccgacgtagacggtgatacaacctccgaagtaacttctacctccggtggttcacgtgagaggaagatcattgtagctaacatgttaccactccaatctaaaagagatgcagaaactggtaaatggtgttttaactgggacgaagactctctccagttacaacttagagatgggttctcttcagaaacagagtttctctacgttggatcacttaacgtagacatcgaaactaacgaacaagaagaagtttcacagaagcttttagaggaatttaactgcgttgcaacgtttttgtctcaagagttgcaagaaatgttctatcttggtttctgtaaacatcagttatggccactctttcattacatgcttccaatgtttcctgatcatggtgatcgttttgatcgacgtctatggcaagcttatgtatcagccaacaagatattttcagatagagttatggaagttatcaaccctgaggatgattacgtttggattcaagattatcatcttatggttcttcctactttcttgaggaaacgttttaataggatcaaactcggtttcttccttcatagtccgtttccttcttcagagatttaccgcacattgcctgttcgtgacgagattttgagaggtttgttgaattgtgatctcattggtttccatacgtttgattacgcgaggcatttcttgtcttgttgtagtagaatgcttggtcttgattacgagtctaagcgcggtcacataggtcttgattactttggtaggactgtgtatatcaaaatacttcctgttggtgttcatatgggtagattggagtctgttttgagtcttgattctactgcggcgaagacgaaagagattcaagaacagtttaaagggaagaagcttgttcttggtatcgatgatatggatatatttaaagggataagcttaaagcttatagcaatggaacatctctttgagacttattggcatttgaaagggaaagttgttcttgttcagatagtgaaccctgcaagatcttctggtaaagatgttgaagaagcgaagagggagacgtatgagactgcgaggaggatcaatgagcgttacggtacttctgactataagccgatagttttgatcgatcgtcttgttccacgttctgagaaaaccgcgtattatgctgcagcagattgttgcttagtgaatgcagtgagagatggtatgaacttagttccttataagtatatcgtctgcaggcaggggactcgaagtaataaggccgttgtggattcatcgcctcgcacaagcactcttgtcgtgtctgagtttattggatgctcaccttctttgagtggtgccattagggtgaatccatgggatgtggatgctgttgctgaagcggtaaactcggctcttaaaatgagtgagactgagaagcaactacggcatgagaaacattatcattatattagcactcatgatgttggttattgggcaaagagctttatgcaggatcttgagagagcgtgccgagatcattatagtaaacgttgttgggggattggttttggtttggggttcagagttttgtcactctctccaagttttaggaagctatctgtggaacacattgttccagtttatagaaaaacacagagaagagctatatttcttgattatgatggtactcttgttcctgaaagctccattgttcaagatccaagcaacgaggttgtctctgttctgaaagctctctgtgaagatccgaataacacggtgtttattgttagtggaagaggtagagagtctctgagcaattggctatctccttgtgaaaatcttggaatagcagctgaacatggatacttcattagatggaagagcaaagatgagtgggagacttgttattcgcctacggatacagagtggaggtcaatggtggaaccggttatgagatcgtatatggaggcaacagatgggacgagtatagagtttaaagaaagtgctttggtgtggcaccatcaagacgcagatcctgactttggatcatgtcaagctaaggagatgcttgatcatctagagagtgttctcgccaatgagcctgtggttgtcaagagaggtcaacacatcgttgaagtcaaaccacaaggtgtaagcaaaggtctagctgcggagaaagtaatccgagaaatggtagaacgcggggagccaccggaaatggtgatgtgcataggagacgatagatcagacgaagacatgtttgagagcatattaagcacagtgacaaatccggaacttcttgtgcagccagaggtttttgcatgcacggttggaagaaaaccaagcaaagctaaatacttcttggacgatgaagccgacgtgcttaagctcctaagaggtcttggagactcatcatcgagcttaaaacctagttcttctcacacacaagttgcatttgaaagcatcgtttaa

SEQ ID NO: 71101 - protein, 856 aa, Arabidopsis thaliana
  peptide (1)..(856): Ceres Seq. ID no. 3049719
MVSRSCANFLDLSSWDLLDFPQTPRTLPRVMTVPGIITDVDGDTTSEVTSTSGGSRERKIIVANMLPLQSKRDAETGKWCFNWDEDSLQLQLRDGFSSETEFLYVGSLNVDIETNEQEEVSQKLLEEFNCVATFLSQELQEMFYLGFCKHQLWPLFHYMLPMFPDHGDRFDRRLWQAYVSANKIFSDRVMEVINPEDDYVWIQDYHLMVLPTFLRKRFNRIKLGFFLHSPFPSSEIYRTLPVRDEILRGLLNCDLIGFHTFDYARHFLSCCSRMLGLDYESKRGHIGLDYFGRTVYIKILPVGVHMGRLESVLSLDSTAAKTKEIQEQFKGKKLVLGIDDMDIFKGISLKLIAMEHLFETYWHLKGKVVLVQIVNPARSSGKDVEEAKRETYETARRINERYGTSDYKPIVLIDRLVPRSEKTAYYAAADCCLVNAVRDGMNLVPYKYIVCRQGTRSNKAVVDSSPRTSTLVVSEFIGCSPSLSGAIRVNPWDVDAVAEAVNSALKMSETEKQLRHEKHYHYISTHDVGYWAKSFMQDLERACRDHYSKRCWGIGFGLGFRVLSLSPSFRKLSVEHIVPVYRKTQRRAIFLDYDGTLVPESSIVQDPSNEVVSVLKALCEDPNNTVFIVSGRGRESLSNWLSPCENLGIAAEHGYFIRWKSKDEWETCYSPTDTEWRSMVEPVMRSYMEATDGTSIEFKESALVWHHQDADPDFGSCQAKEMLDHLESVLANEPVVVKRGQHIVEVKPQGVSKGLAAEKVIREMVERGEPPEMVMCIGDDRSDEDMFESILSTVTNPELLVQPEVFACTVGRKPSKAKYFLDDEADVLKLLRGLGDSSSSLKPSSSHTQVAFESIV

SEQ ID NO: 71102 - protein, 826 aa, Arabidopsis thaliana
  peptide (1)..(826): Ceres Seq. ID no. 3049720
MTVPGIITDVDGDTTSEVTSTSGGSRERKIIVANMLPLQSKRDAETGKWCFNWDEDSLQLQLRDGFSSETEFLYVGSLNVDIETNEQEEVSQKLLEEFNCVATFLSQELQEMFYLGFCKHQLWPLFHYMLPMFPDHGDRFDRRLWQAYVSANKIFSDRVMEVINPEDDYVWIQDYHLMVLPTFLRKRFNRIKLGFFLHSPFPSSEIYRTLPVRDEILRGLLNCDLIGFHTFDYARHFLSCCSRMLGLDYESKRGHIGLDYFGRTVYIKILPVGVHMGRLESVLSLDSTAAKTKEIQEQFKGKKLVLGIDDMDIFKGISLKLIAMEHLFETYWHLKGKVVLVQIVNPARSSGKDVEEAKRETYETARRINERYGTSDYKPIVLIDRLVPRSEKTAYYAAADCCLVNAVRDGMNLVPYKYIVCRQGTRSNKAVVDSSPRTSTLVVSEFIGCSPSLSGAIRVNPWDVDAVAEAVNSALKMSETEKQLRHEKHYHYISTHDVGYWAKSFMQDLERACRDHYSKRCWGIGFGLGFRVLSLSPSFRKLSVEHIVPVYRKTQRRAIFLDYDGTLVPESSIVQDPSNEVVSVLKALCEDPNNTVFIVSGRGRESLSNWLSPCENLGIAAEHGYFIRWKSKDEWETCYSPTDTEWRSMVEPVMRSYMEATDGTSIEFKESALVWHHQDADPDFGSCQAKEMLDHLESVLANEPVVVKRGQHIVEVKPQGVSKGLAAEKVIREMVERGEPPEMVMCIGDDRSDEDMFESILSTVTNPELLVQPEVFACTVGRKPSKAKYFLDDEADVLKLLRGLGDSSSSLKPSSSHTQVAFESIV

SEQ ID NO: 71103 - protein, 792 aa, Arabidopsis thaliana
  peptide (1)..(792): Ceres Seq. ID no. 3049721
MLPLQSKRDAETGKWCFNWDEDSLQLQLRDGFSSETEFLYVGSLNVDIETNEQEEVSQKLLEEFNCVATFLSQELQEMFYLGFCKHQLWPLFHYMLPMFPDHGDRFDRRLWQAYVSANKIFSDRVMEVINPEDDYVWIQDYHLMVLPTFLRKRFNRIKLGFFLHSPFPSSEIYRTLPVRDEILRGLLNCDLIGFHTFDYARHFLSCCSRMLGLDYESKRGHIGLDYFGRTVYIKILPVGVHMGRLESVLSLDSTAAKTKEIQEQFKGKKLVLGIDDMDIFKGISLKLIAMEHLFETYWHLKGKVVLVQIVNPARSSGKDVEEAKRETYETARRINERYGTSDYKPIVLIDRLVPRSEKTAYYAAADCCLVNAVRDGMNLVPYKYIVCRQGTRSNKAVVDSSPRTSTLVVSEFIGCSPSLSGAIRVNPWDVDAVAEAVNSALKMSETEKQLRHEKHYHYISTHDVGYWAKSFMQDLERACRDHYSKRCWGIGFGLGFRVLSLSPSFRKLSVEHIVPVYRKTQRRAIFLDYDGTLVPESSIVQDPSNEVVSVLKALCEDPNNTVFIVSGRGRESLSNWLSPCENLGIAAEHGYFIRWKSKDEWETCYSPTDTEWRSMVEPVMRSYMEATDGTSIEFKESALVWHHQDADPDFGSCQAKEMLDHLESVLANEPVVVKRGQHIVEVKPQGVSKGLAAEKVIREMVERGEPPEMVMCIGDDRSDEDMFESILSTVTNPELLVQPEVFACTVGRKPSKAKYFLDDEADVLKLLRGLGDSSSSLKPSSSHTQVAFESIV

SEQ ID NO: 71104 - DNA, 2334 bp, Arabidopsis thaliana
  misc_feature (1)..(2334): Ceres Seq. ID no. 3050398
  misc_feature (1)..(2334): Ortholog of  Ceres SEQ ID NO 13657677 as cited in SEQ ID NO 66119
atggctcaagaactcgatttggaattgggtttagctccatatgatccatgggttctaaagaagaatttaaccgagagtgatcttaataatggttttattattctacctaaacaagattttgaaaaaataattcggcagatggaacgtggtttggtcaagaatttgggaaacggtgttgaagtgaaagtccatattatagaggaaggtcctgaatctgatgattacacattaacactggtcaagtgcagaggcaactgtatgttcagaggaggatggtacaatatggcccatttaaacgaaaagattcatctcctttacctctcgagtttcaattcaactgaagagagaactcgtatccttctccgccgcaaaatgaagcttctccgccgccgtttcttcaactccgtcaatacaatcaccagacctaaccgacgtcactatgccacaaagtatgtcgccaaagtcacttcatcatctccctccggccgatctctctccgccgaagtttctcttcctaatcctcttcccgccgacgtacgtggctaccctctacctcgccgtcatctaatctgccgagccacaaatctcatcaccggagcctctaatctctccgatgctttctctgatctctctgattacctctcttctctctcactctcactcacacccgacgaagcttcagagattctcaaatccctaaattcacctctcctcgccgtggaatttttcaaattagtcccttctctttgcccttactcacaaaatgaccctttcctttacaatcgtatcatcttaatcctctcaaggtcaaatcttccagacagattcgatcgtgttcgttcgattctcgattccatggtgaaatcaaacgtccatggaaacatatcaactgtgaatatcttaataggtttctttggtaacacggaagatttacaaatgtgtttaagattggtgaagaaatgggatttaaagatgaactctttcacttacaagtgtctccttcaagcttacttaagatctcgtgattattctaaagcttttgatgtgtattgtgagattagaagaggaggacataaacttgacatctttgcttacaatatgttgcttgatgctttagctaaagatgaaaagattgatcaggcttgtcaagtttttgaagatatgaagaagaggcattgtagaagagatgagtatacttacacgattatgatcaggactatggggaggattgggaagtgtgatgaagctgttggtttatttaatgagatgattactgaagggcttacgcttaatgttgttggttataatactttgatgcaagttcttgcgaaaggcaaaatggttgataaggcgattcaggttttctctagaatggtggaaacgggttgtcggccgaatgagtatacgtatagtcttcttttgaatcttttagttgctgaaggtcagcttgtgaggttagatggagttgtggagatttcgaaaaggtatatgactcaggggatatattcttatttggttagaacgttgagcaagttagggcatgtaagtgaggctcacaggctgttttgtgatatgtggagcttccctgtgaaaggagagagagatagttacatgtcgatgcttgagagtttgtgtggtgcgggtaaaaccattgaagcgatagagatgttgagcaagattcatgagaaaggtgtggtaactgatactatgatgtataacactgtgttctcggcgctcgggaagctaaagcaaatatctcatattcatgatctctttgagaaaatgaaaaaggacggtccttctccggatatattcacctataatatacttatcgctagttttggccgggtaggagaagttgatgaggctattaacatatttgaggagcttgagaggagtgattgtaaacccgacattatttcttacaactctttgattaattgtttggggaagaacggtgatgttgatgaagcccatgtgagattcaaggagatgcaagaaaaaggattaaaccctgatgtggtcacatacagcactctgatggaatgttttgggaaaacagagagagtcgaaatggcgtatagtttgttcgaagagatgcttgttaaagggtgtcaaccaaacattgtaacgtacaacattttgcttgattgtctagagaagaacgggagaaccgcagaagcagttgatctatactcaaagatgaaacagcaaggactcacaccggattccattacctacactgtgcttgaacggttgcagtctgtctctcatggaaaatctcgtatccgtaggaagaatccgataacggggtgggttgtcagccctttgtag

SEQ ID NO: 71105 - protein, 777 aa, Arabidopsis thaliana
  peptide (1)..(777): Ceres Seq. ID no. 3050399
MAQELDLELGLAPYDPWVLKKNLTESDLNNGFIILPKQDFEKIIRQMERGLVKNLGNGVEVKVHIIEEGPESDDYTLTLVKCRGNCMFRGGWYNMAHLNEKIHLLYLSSFNSTEERTRILLRRKMKLLRRRFFNSVNTITRPNRRHYATKYVAKVTSSSPSGRSLSAEVSLPNPLPADVRGYPLPRRHLICRATNLITGASNLSDAFSDLSDYLSSLSLSLTPDEASEILKSLNSPLLAVEFFKLVPSLCPYSQNDPFLYNRIILILSRSNLPDRFDRVRSILDSMVKSNVHGNISTVNILIGFFGNTEDLQMCLRLVKKWDLKMNSFTYKCLLQAYLRSRDYSKAFDVYCEIRRGGHKLDIFAYNMLLDALAKDEKIDQACQVFEDMKKRHCRRDEYTYTIMIRTMGRIGKCDEAVGLFNEMITEGLTLNVVGYNTLMQVLAKGKMVDKAIQVFSRMVETGCRPNEYTYSLLLNLLVAEGQLVRLDGVVEISKRYMTQGIYSYLVRTLSKLGHVSEAHRLFCDMWSFPVKGERDSYMSMLESLCGAGKTIEAIEMLSKIHEKGVVTDTMMYNTVFSALGKLKQISHIHDLFEKMKKDGPSPDIFTYNILIASFGRVGEVDEAINIFEELERSDCKPDIISYNSLINCLGKNGDVDEAHVRFKEMQEKGLNPDVVTYSTLMECFGKTERVEMAYSLFEEMLVKGCQPNIVTYNILLDCLEKNGRTAEAVDLYSKMKQQGLTPDSITYTVLERLQSVSHGKSRIRRKNPITGWVVSPL

SEQ ID NO: 71106 - protein, 731 aa, Arabidopsis thaliana
  peptide (1)..(731): Ceres Seq. ID no. 3050400
MERGLVKNLGNGVEVKVHIIEEGPESDDYTLTLVKCRGNCMFRGGWYNMAHLNEKIHLLYLSSFNSTEERTRILLRRKMKLLRRRFFNSVNTITRPNRRHYATKYVAKVTSSSPSGRSLSAEVSLPNPLPADVRGYPLPRRHLICRATNLITGASNLSDAFSDLSDYLSSLSLSLTPDEASEILKSLNSPLLAVEFFKLVPSLCPYSQNDPFLYNRIILILSRSNLPDRFDRVRSILDSMVKSNVHGNISTVNILIGFFGNTEDLQMCLRLVKKWDLKMNSFTYKCLLQAYLRSRDYSKAFDVYCEIRRGGHKLDIFAYNMLLDALAKDEKIDQACQVFEDMKKRHCRRDEYTYTIMIRTMGRIGKCDEAVGLFNEMITEGLTLNVVGYNTLMQVLAKGKMVDKAIQVFSRMVETGCRPNEYTYSLLLNLLVAEGQLVRLDGVVEISKRYMTQGIYSYLVRTLSKLGHVSEAHRLFCDMWSFPVKGERDSYMSMLESLCGAGKTIEAIEMLSKIHEKGVVTDTMMYNTVFSALGKLKQISHIHDLFEKMKKDGPSPDIFTYNILIASFGRVGEVDEAINIFEELERSDCKPDIISYNSLINCLGKNGDVDEAHVRFKEMQEKGLNPDVVTYSTLMECFGKTERVEMAYSLFEEMLVKGCQPNIVTYNILLDCLEKNGRTAEAVDLYSKMKQQGLTPDSITYTVLERLQSVSHGKSRIRRKNPITGWVVSPL

SEQ ID NO: 71107 - protein, 691 aa, Arabidopsis thaliana
  peptide (1)..(691): Ceres Seq. ID no. 3050401
MFRGGWYNMAHLNEKIHLLYLSSFNSTEERTRILLRRKMKLLRRRFFNSVNTITRPNRRHYATKYVAKVTSSSPSGRSLSAEVSLPNPLPADVRGYPLPRRHLICRATNLITGASNLSDAFSDLSDYLSSLSLSLTPDEASEILKSLNSPLLAVEFFKLVPSLCPYSQNDPFLYNRIILILSRSNLPDRFDRVRSILDSMVKSNVHGNISTVNILIGFFGNTEDLQMCLRLVKKWDLKMNSFTYKCLLQAYLRSRDYSKAFDVYCEIRRGGHKLDIFAYNMLLDALAKDEKIDQACQVFEDMKKRHCRRDEYTYTIMIRTMGRIGKCDEAVGLFNEMITEGLTLNVVGYNTLMQVLAKGKMVDKAIQVFSRMVETGCRPNEYTYSLLLNLLVAEGQLVRLDGVVEISKRYMTQGIYSYLVRTLSKLGHVSEAHRLFCDMWSFPVKGERDSYMSMLESLCGAGKTIEAIEMLSKIHEKGVVTDTMMYNTVFSALGKLKQISHIHDLFEKMKKDGPSPDIFTYNILIASFGRVGEVDEAINIFEELERSDCKPDIISYNSLINCLGKNGDVDEAHVRFKEMQEKGLNPDVVTYSTLMECFGKTERVEMAYSLFEEMLVKGCQPNIVTYNILLDCLEKNGRTAEAVDLYSKMKQQGLTPDSITYTVLERLQSVSHGKSRIRRKNPITGWVVSPL

SEQ ID NO: 71108 - DNA, 1682 bp, Arabidopsis thaliana
  misc_feature (1)..(1682): Ceres Seq. ID no. 3051014
  misc_feature (1)..(1682): Ortholog of  Ceres SEQ ID NO 13646595 as cited in SEQ ID NO 20561
  misc_feature (1)..(1682): Ortholog of  Ceres SEQ ID NO 14314636 as cited in SEQ ID NO 56924
  misc_feature (1)..(1682): Ortholog of  Ceres SEQ ID NO 15171614 as cited in SEQ ID NO 60106
  misc_feature (1)..(1682): Ortholog of  Ceres SEQ ID NO 15168421 as cited in SEQ ID NO 60131
  misc_feature (1)..(1682): Ortholog of  Ceres SEQ ID NO 13597574 as cited in SEQ ID NO 64677
  misc_feature (1)..(1682): Ortholog of  Ceres SEQ ID NO 13597843 as cited in SEQ ID NO 64850
  misc_feature (1)..(1682): Ortholog of  Ceres SEQ ID NO 13597678 as cited in SEQ ID NO 65375
  misc_feature (1)..(1682): Ortholog of  Ceres SEQ ID NO 15176787 as cited in SEQ ID NO 66468
  misc_feature (1)..(1682): Ortholog of  Ceres SEQ ID NO 13596180 as cited in SEQ ID NO 67941
  misc_feature (1)..(1682): Ortholog of  Ceres SEQ ID NO 13591190 as cited in SEQ ID NO 68044
  misc_feature (1)..(1682): Ortholog of  Ceres SEQ ID NO 13595961 as cited in SEQ ID NO 68223
  misc_feature (1)..(1682): Ortholog of  Ceres SEQ ID NO 14313563 as cited in SEQ ID NO 68700
aatgattcacacaaactctctatataaagccattacttaataccacacaaattacaaaaaaaaaaagaaaaaaggagataataatcacaaactacaaaagtagaaagaagaaaaaagaacaaagtatcagttcttgaatatttgcatcaatggaggaatccaaaacacctcacgttgcgatcataccaagtccgggaatgggtcatctcataccactcgtcgagtttgctaaacgactcgtccatcttcacggcctcaccgttaccttcgtcatcgccggcgaaggtccaccatcaaaagctcagagaaccgtcctcgactctctcccttcttcaatctcctccgtctttctccctcctgttgatctcaccgatctctcttcgtccactcgcatcgaatctcggatctccctcaccgtgactcgttcaaacccggagctccggaaagtcttcgactcgttcgtggagggaggtcgtttgccaacggcgctcgtcgtcgatctcttcggtacggacgctttcgacgtggccgtagaatttcacgtgccaccgtatattttctacccaacaacggccaacgtcttgtcgttttttctccatttgcctaaactagacgaaacggtgtcgtgtgagttcagggaattaaccgaaccgcttatgcttcctggatgtgtaccggttgccgggaaagatttccttgacccggcccaagaccggaaagacgatgcatacaaatggcttctccataacaccaagaggtacaaagaagccgaaggtattcttgtgaataccttctttgagctagagccaaatgctataaaggccttgcaagaaccgggtcttgataaaccaccggtttatccggttggaccgttggttaacattggtaagcaagaggctaagcaaaccgaagagtctgaatgtttaaagtggttggataaccagccgctcggttcggttttatatgtgtcctttggtagtggcggtaccctcacatgtgagcagctcaatgagcttgctcttggtcttgcagatagtgagcaacggtttctttgggtcatacgaagtcctagtgggatcgctaattcgtcgtattttgattcacatagccaaacagatccattgacatttttaccaccgggatttttagagcggactaaaaaaagaggttttgtgatccctttttgggctccacaagcccaagtcttggcgcatccatccacgggaggatttttaactcattgtggatggaattcgactctagagagtgtagtaagcggtattccacttatagcatggccattatacgcagaacagaagatgaatgcggttttgttgagtgaagatattcgtgcggcacttaggccgcgtgccggggacgatgggttagttagaagagaagaggtggctagagtggtaaaaggattgatggaaggtgaagaaggcaaaggagtgaggaacaagatgaaggagttgaaggaagcagcttgtagggtgttgaaggatgatgggacttcgacaaaagcacttagtcttgtggccttaaagtggaaagcccacaaaaaagagttagagcaaaatggcaaccactaaatatttgatgttctaatatgatttgtataatcaacggtgggatttgtgcaaatgtgtttctgtatgtatatgtatgttctacttttcttt

SEQ ID NO: 71109 - protein, 480 aa, Arabidopsis thaliana; identical to SEQ ID NO: 25935
  peptide (1)..(480): Ceres Seq. ID no. 3051015

SEQ ID NO: 71110 - protein, 464 aa, Arabidopsis thaliana; identical to SEQ ID NO: 25936
  peptide (1)..(464): Ceres Seq. ID no. 3051016

SEQ ID NO: 71111 - protein, 311 aa, Arabidopsis thaliana; identical to SEQ ID NO: 25937
  peptide (1)..(311): Ceres Seq. ID no. 3051017

SEQ ID NO: 71112 - DNA, 1269 bp, Arabidopsis thaliana
  misc_feature (1)..(1269): Ceres Seq. ID no. 3057607
  misc_feature (1)..(1269): Ortholog of  Ceres SEQ ID NO 15180288 as cited in SEQ ID NO 0
atgcagttgtctccggaacgatgccgtccgatgtctgaaaacagagaggcttggtcagcgaattccgaggaaatggagctgcttcacggctccaacagattatcttcaccggaacatgttcgtagaagagtctccgggaattcttctgaggacggttcgcctcgaatttgccggcagcagtcgttcggtcgcgacataggccatgcagctgccgagacgtatctcattactcgacttagcttcaaccttcttggatatctcggggtaggttaccggtggatcacaagattacttgctcttgcttgttatgcaatgctccttatgcctggtttccttcaagttgcatatctttattttttctcatctcaagtcaggaggagtatagtttatggaggtcatccaaggaataggctggatttgtacataccgccaacgagtgatggcctgaagccggttgtagttttcgttactggtggagcttggattatcggttacaaagcttggggttctctcttgggactacagctagcagaaagggacataattgtggcatgtctagattacagaaactttcctcaggggacaattagtgatatggtaagtgatgcagctcaaggaatctcatttgtctgcaataacatctctgcatttggaggtgatcctaacagaatctatctgatggggcaatcggctggtgcacatatctcttcttgtgctctctttgaacaagctattaaagaatcaagaggggagagcatctcatggagtgtatctcagattaaagcttactttggtttatctggagggtacaatctctttaatctggttgaacacttccacaaccgaggcttgtatcgttcaattttcctaagcataatggaaggagaagagtcctttaaacaattctcccctgaagtaagattgaaagacctgaatgtaagaaaagctgcagccctcttacctcatattatactctttcatggatccgcagattattcaattccacctgaagcaagcaaaacttttacagatgctcttcaagctgctgaagtgaaagctgagctagttatgtacaagggtaaaactcataccgacctatttcttcaggatcctctgagaggcggtaaagatgagctatttgatcatatagtctctatgatacacgccgatgacagtgacgcattgagaaacgatgctgttgcgccaccgaggaaacggcttgttccagagttcttgctgaaactggctggcagggtcagccctttttga

SEQ ID NO: 71113 - protein, 422 aa, Arabidopsis thaliana
  peptide (1)..(422): Ceres Seq. ID no. 3057608
MQLSPERCRPMSENREAWSANSEEMELLHGSNRLSSPEHVRRRVSGNSSEDGSPRICRQQSFGRDIGHAAAETYLITRLSFNLLGYLGVGYRWITRLLALACYAMLLMPGFLQVAYLYFFSSQVRRSIVYGGHPRNRLDLYIPPTSDGLKPVVVFVTGGAWIIGYKAWGSLLGLQLAERDIIVACLDYRNFPQGTISDMVSDAAQGISFVCNNISAFGGDPNRIYLMGQSAGAHISSCALFEQAIKESRGESISWSVSQIKAYFGLSGGYNLFNLVEHFHNRGLYRSIFLSIMEGEESFKQFSPEVRLKDLNVRKAAALLPHIILFHGSADYSIPPEASKTFTDALQAAEVKAELVMYKGKTHTDLFLQDPLRGGKDELFDHIVSMIHADDSDALRNDAVAPPRKRLVPEFLLKLAGRVSPF

SEQ ID NO: 71114 - protein, 412 aa, Arabidopsis thaliana
  peptide (1)..(412): Ceres Seq. ID no. 3057609
MSENREAWSANSEEMELLHGSNRLSSPEHVRRRVSGNSSEDGSPRICRQQSFGRDIGHAAAETYLITRLSFNLLGYLGVGYRWITRLLALACYAMLLMPGFLQVAYLYFFSSQVRRSIVYGGHPRNRLDLYIPPTSDGLKPVVVFVTGGAWIIGYKAWGSLLGLQLAERDIIVACLDYRNFPQGTISDMVSDAAQGISFVCNNISAFGGDPNRIYLMGQSAGAHISSCALFEQAIKESRGESISWSVSQIKAYFGLSGGYNLFNLVEHFHNRGLYRSIFLSIMEGEESFKQFSPEVRLKDLNVRKAAALLPHIILFHGSADYSIPPEASKTFTDALQAAEVKAELVMYKGKTHTDLFLQDPLRGGKDELFDHIVSMIHADDSDALRNDAVAPPRKRLVPEFLLKLAGRVSPF

SEQ ID NO: 71115 - protein, 398 aa, Arabidopsis thaliana
  peptide (1)..(398): Ceres Seq. ID no. 3057610
MELLHGSNRLSSPEHVRRRVSGNSSEDGSPRICRQQSFGRDIGHAAAETYLITRLSFNLLGYLGVGYRWITRLLALACYAMLLMPGFLQVAYLYFFSSQVRRSIVYGGHPRNRLDLYIPPTSDGLKPVVVFVTGGAWIIGYKAWGSLLGLQLAERDIIVACLDYRNFPQGTISDMVSDAAQGISFVCNNISAFGGDPNRIYLMGQSAGAHISSCALFEQAIKESRGESISWSVSQIKAYFGLSGGYNLFNLVEHFHNRGLYRSIFLSIMEGEESFKQFSPEVRLKDLNVRKAAALLPHIILFHGSADYSIPPEASKTFTDALQAAEVKAELVMYKGKTHTDLFLQDPLRGGKDELFDHIVSMIHADDSDALRNDAVAPPRKRLVPEFLLKLAGRVSPF

SEQ ID NO: 71116 - DNA, 1218 bp, Arabidopsis thaliana
  misc_feature (1)..(1218): Ceres Seq. ID no. 3061811
  misc_feature (1)..(1218): Ortholog of  Ceres SEQ ID NO 13658153 as cited in SEQ ID NO 66326
atgttgagtgcctttttgggtcatgcgtcagctattgctatagcttcaccagtagtcagcattgtgggcatcaggcgacaaacatatggagagatgaaacacgtgggggtcgttgaaaaacaaagagaaatgccaacatttcctcaatcgtttcctatgaacggtggtgatggtccgcacagttacatccacaattcctcttatcaaaaagtagcgatagatggcgctaaagaaaagacaagtgaagccatcctaaaaaacctcgatctcgaactcttgaaccgtaattctgatgaaaatatcttaagaattgcggattttggttgttctattggacccaacacgttcgaagtagtccaaaatattatcgatacggtgaagcaaaaaaacctaaaagaaaacaatgcctatattggtgctcctctcgagttccaagtttgcttcaatgatcaaccaaacaatgattttaacacactttttagaacccaacctatctcttccaaacaagcatatttatcggttggagttccaggatctttccatggtagagtattaccaaaaaatagcctccatatcggtcacattacctatgcgctccactggctttctacagttccccaacatgtttgcgacaagaaatctccggcattgaataaaagctacattcaatgtaataatttagtagaggaagtgactgaagcttaccgggtccagtttaaaaaggacatgggagattttcttggggcaagagctgaagagcttgtttcgggcggattgatgatcctatcaggacaatgcttgcccgatggtgtccctaaggctttgacatggcaaggggttgtgatcgatatgattggagattgtcttatggatatggctaaacagggaattacgaccaaggaaaagatcgaactgttcagtttgcccatatatattccgcatattagtgaattcaaggcagaaatagagcgaaatgaaaactttagtatcgagacaatggagaagataagtcatcctatggattataagccactaaccaacgacttcatcacttccatgtttcgagccattctcaatacgattattgaagaacactttggagatggtgtggtcaatgagctattcgatcgatttgctaagaagctcaacaagtacccaattgatttcaaaaggtgtaaaaagtatgtgaattattttatcgtgcttaaaagaaaataa

SEQ ID NO: 71117 - protein, 405 aa, Arabidopsis thaliana
  peptide (1)..(405): Ceres Seq. ID no. 3061812
MLSAFLGHASAIAIASPVVSIVGIRRQTYGEMKHVGVVEKQREMPTFPQSFPMNGGDGPHSYIHNSSYQKVAIDGAKEKTSEAILKNLDLELLNRNSDENILRIADFGCSIGPNTFEVVQNIIDTVKQKNLKENNAYIGAPLEFQVCFNDQPNNDFNTLFRTQPISSKQAYLSVGVPGSFHGRVLPKNSLHIGHITYALHWLSTVPQHVCDKKSPALNKSYIQCNNLVEEVTEAYRVQFKKDMGDFLGARAEELVSGGLMILSGQCLPDGVPKALTWQGVVIDMIGDCLMDMAKQGITTKEKIELFSLPIYIPHISEFKAEIERNENFSIETMEKISHPMDYKPLTNDFITSMFRAILNTIIEEHFGDGVVNELFDRFAKKLNKYPIDFKRCKKYVNYFIVLKRK

SEQ ID NO: 71118 - protein, 374 aa, Arabidopsis thaliana
  peptide (1)..(374): Ceres Seq. ID no. 3061813
MKHVGVVEKQREMPTFPQSFPMNGGDGPHSYIHNSSYQKVAIDGAKEKTSEAILKNLDLELLNRNSDENILRIADFGCSIGPNTFEVVQNIIDTVKQKNLKENNAYIGAPLEFQVCFNDQPNNDFNTLFRTQPISSKQAYLSVGVPGSFHGRVLPKNSLHIGHITYALHWLSTVPQHVCDKKSPALNKSYIQCNNLVEEVTEAYRVQFKKDMGDFLGARAEELVSGGLMILSGQCLPDGVPKALTWQGVVIDMIGDCLMDMAKQGITTKEKIELFSLPIYIPHISEFKAEIERNENFSIETMEKISHPMDYKPLTNDFITSMFRAILNTIIEEHFGDGVVNELFDRFAKKLNKYPIDFKRCKKYVNYFIVLKRK

SEQ ID NO: 71119 - protein, 362 aa, Arabidopsis thaliana
  peptide (1)..(362): Ceres Seq. ID no. 3061814
MPTFPQSFPMNGGDGPHSYIHNSSYQKVAIDGAKEKTSEAILKNLDLELLNRNSDENILRIADFGCSIGPNTFEVVQNIIDTVKQKNLKENNAYIGAPLEFQVCFNDQPNNDFNTLFRTQPISSKQAYLSVGVPGSFHGRVLPKNSLHIGHITYALHWLSTVPQHVCDKKSPALNKSYIQCNNLVEEVTEAYRVQFKKDMGDFLGARAEELVSGGLMILSGQCLPDGVPKALTWQGVVIDMIGDCLMDMAKQGITTKEKIELFSLPIYIPHISEFKAEIERNENFSIETMEKISHPMDYKPLTNDFITSMFRAILNTIIEEHFGDGVVNELFDRFAKKLNKYPIDFKRCKKYVNYFIVLKRK

SEQ ID NO: 71120 - DNA, 921 bp, Arabidopsis thaliana
  misc_feature (1)..(921): Ceres Seq. ID no. 3061894
  misc_feature (1)..(921): Ortholog of  Ceres SEQ ID NO 13593855 as cited in SEQ ID NO 53838
  misc_feature (1)..(921): Ortholog of  Ceres SEQ ID NO 14302247 as cited in SEQ ID NO 62154
  misc_feature (1)..(921): Ortholog of  Ceres SEQ ID NO 13539874 as cited in SEQ ID NO 64069
atggagagaagcttgaagaagacgaagaacaattataacaactccataaagagcaatcttatgaaagatgatgaattgtttcatgtgattcacaaagttccctgtggagacactccttatgtcagagccaaacatgctcagttgatagagaagaacccggagatggcaatagtgtggttttggaaagccatcaacactggagacagagtagacagtgccctcaaggacatggctgttgtaatgaaacaacttgaccgttctgaagaagctattgaagctatcaaatctttccgtcctcgttgttccaagaattcccaagattcccttgacaatgtcctcatcgacttatacaagaaatgtgggagaatggaggagcaagttgagttgttgaagaggaaattaaggcagatctatcaaggagaagctttcaatggtaaacctaccaaaaccgctcgctcccacggaaaaaagtttcaagtgactgttcaacaagaaatctcaagattactgggtaacttggggtgggcatatatgcaacaagccaagtacttatcggccgaagcggtatacagaaaagcccagatggttgagccagatgctaacaaatcgtgcaaccttgcgatgtgccttatcaaacaaggcaggtttgaggagggaagattggttcttgacgatgttctcgagtatagggttttgggtgcggatgattgtagaacaaggcaacgggccgaagagcttctgagtgaattagagtcttcgctgccacggatgcgagatgctgagatggaggatgtcttgggaaatatcttagacgatgactttgttcttgggcttgaagagatgacatccactagttttaaatctaagagactcccaatcttcgaacagatctcgtcttttagaaatacattagtttgctag

SEQ ID NO: 71121 - protein, 306 aa, Arabidopsis thaliana
  peptide (1)..(306): Ceres Seq. ID no. 3061895
MERSLKKTKNNYNNSIKSNLMKDDELFHVIHKVPCGDTPYVRAKHAQLIEKNPEMAIVWFWKAINTGDRVDSALKDMAVVMKQLDRSEEAIEAIKSFRPRCSKNSQDSLDNVLIDLYKKCGRMEEQVELLKRKLRQIYQGEAFNGKPTKTARSHGKKFQVTVQQEISRLLGNLGWAYMQQAKYLSAEAVYRKAQMVEPDANKSCNLAMCLIKQGRFEEGRLVLDDVLEYRVLGADDCRTRQRAEELLSELESSLPRMRDAEMEDVLGNILDDDFVLGLEEMTSTSFKSKRLPIFEQISSFRNTLVC

SEQ ID NO: 71122 - protein, 286 aa, Arabidopsis thaliana
  peptide (1)..(286): Ceres Seq. ID no. 3061896
MKDDELFHVIHKVPCGDTPYVRAKHAQLIEKNPEMAIVWFWKAINTGDRVDSALKDMAVVMKQLDRSEEAIEAIKSFRPRCSKNSQDSLDNVLIDLYKKCGRMEEQVELLKRKLRQIYQGEAFNGKPTKTARSHGKKFQVTVQQEISRLLGNLGWAYMQQAKYLSAEAVYRKAQMVEPDANKSCNLAMCLIKQGRFEEGRLVLDDVLEYRVLGADDCRTRQRAEELLSELESSLPRMRDAEMEDVLGNILDDDFVLGLEEMTSTSFKSKRLPIFEQISSFRNTLVC

SEQ ID NO: 71123 - protein, 252 aa, Arabidopsis thaliana
  peptide (1)..(252): Ceres Seq. ID no. 3061897
MAIVWFWKAINTGDRVDSALKDMAVVMKQLDRSEEAIEAIKSFRPRCSKNSQDSLDNVLIDLYKKCGRMEEQVELLKRKLRQIYQGEAFNGKPTKTARSHGKKFQVTVQQEISRLLGNLGWAYMQQAKYLSAEAVYRKAQMVEPDANKSCNLAMCLIKQGRFEEGRLVLDDVLEYRVLGADDCRTRQRAEELLSELESSLPRMRDAEMEDVLGNILDDDFVLGLEEMTSTSFKSKRLPIFEQISSFRNTLVC

SEQ ID NO: 71124 - DNA, 1980 bp, Arabidopsis thaliana
  misc_feature (1)..(1980): Ceres Seq. ID no. 3063784
  misc_feature (1)..(1980): Ortholog of  Ceres SEQ ID NO 12586556 as cited in SEQ ID NO 64667
  misc_feature (1)..(1980): Ortholog of  Ceres SEQ ID NO 13660894 as cited in SEQ ID NO 67475
atgaaggttcggagtaaaaaagcactgttttgttccgtctctcgtcttctccacacggagagacacacagagagacaaaacctaacaacgctgttcaacagatatgtcgacaaaacagatgttttctcatggaactctgtcatcgccgacctcgctcgtagcggtgattctgctgaagctcttctcgctttttcctcaatgcggaagctttctctatacccaactcgctctagctttccttgcgccattaaagcatgttcgtctctttttgatatcttctccggcaaacagacccatcagcaagcttttgtcttcggttatcaatccgacatctttgtgtcttcggctttgatcgttatgtattcaacttgtgggaaactggaggatgcacggaaagtgttcgacgaaattcccaagagaaatattgtatcttggacttcgatgattcgagggtatgatcttaacggtaatgcccttgatgctgtttctcttttcaaggatctattggtcgatgaaaatgatgatgacgatgcaatgtttcttgattctatgggtttggtttcggtaatctctgcttgttctcgtgttcctgctaagggtttaacggaatctattcatagctttgtgattaagagaggttttgatagaggagtgagtgttggtaatactcttttggatgcttatgctaagggtggagaaggaggtgttgctgtggcgagaaaaatctttgatcagattgtggataaggatcgtgtttcgtataattcgattatgagtgtgtatgctcagagtgggatgtctaatgaggcttttgaggtttttcgtagacttgttaagaataaagttgtgacctttaacgccattacattgtctactgtgttgttggcggtctcgcattcaggtgctctgcgtattggaaagtgtatacatgatcaggtaataaggatgggtcttgaggatgatgtgatagtggggacgtcgataattgatatgtattgcaaatgcggaagagttgagacggcgagaaaagcatttgatcgaatgaaaaacaagaatgttaggtcgtggaccgccatgattgctggatatggaatgcacggccacgcggctaaagcgttagagttattccctgctatgatcgattcaggggttcgaccaaattacattacttttgtatcagtgttagctgcttgcagtcatgcgggtcttcatgtggaaggctggcgctggtttaacgcaatgaaggggagatttggtgtggaaccagggttagaacactacggttgtatggttgatcttctaggtagagctgggtttcttcagaaagcttatgatttgattcagagaatgaagatgaagccggactctatcatctggagctcacttcttgcagcttgtagaattcacaagaacgtggagctagctgagatatccgtggcgcgtttgtttgaattggactcttcgaattgcggttactacatgctgctttcgcatatctacgctgatgcgggtcgttggaaagatgttgagagggtgagaatgatcatgaagaatcgcggattggtgaaaccgccaggttttagtctactcgagttgaatggtgaggttcatgtgttcttgatcggagacgaagagcatcctcagcgtgagaagatttacgagtttttagcagaactgaacaggaagctgttagaggcaggttacgtatcgaacacgtcatctgtatgtcatgatgttgatgaggaagagaaagagatgacactgagagttcacagcgagaaactagcgattgcgtttgggatcatgaacacggttcctggctcgacggttaatgtggtcaagaatctgagagtttgcagcgattgtcacaatgtgatcaagttgatttcaaagattgttgatagagagtttgtggttagagatgcgaagaggtttcaccatttcaaagatggtggatgttcctgtggagattactggtga

SEQ ID NO: 71125 - protein, 659 aa, Arabidopsis thaliana
  peptide (1)..(659): Ceres Seq. ID no. 3063785
MKVRSKKALFCSVSRLLHTERHTERQNLTTLFNRYVDKTDVFSWNSVIADLARSGDSAEALLAFSSMRKLSLYPTRSSFPCAIKACSSLFDIFSGKQTHQQAFVFGYQSDIFVSSALIVMYSTCGKLEDARKVFDEIPKRNIVSWTSMIRGYDLNGNALDAVSLFKDLLVDENDDDDAMFLDSMGLVSVISACSRVPAKGLTESIHSFVIKRGFDRGVSVGNTLLDAYAKGGEGGVAVARKIFDQIVDKDRVSYNSIMSVYAQSGMSNEAFEVFRRLVKNKVVTFNAITLSTVLLAVSHSGALRIGKCIHDQVIRMGLEDDVIVGTSIIDMYCKCGRVETARKAFDRMKNKNVRSWTAMIAGYGMHGHAAKALELFPAMIDSGVRPNYITFVSVLAACSHAGLHVEGWRWFNAMKGRFGVEPGLEHYGCMVDLLGRAGFLQKAYDLIQRMKMKPDSIIWSSLLAACRIHKNVELAEISVARLFELDSSNCGYYMLLSHIYADAGRWKDVERVRMIMKNRGLVKPPGFSLLELNGEVHVFLIGDEEHPQREKIYEFLAELNRKLLEAGYVSNTSSVCHDVDEEEKEMTLRVHSEKLAIAFGIMNTVPGSTVNVVKNLRVCSDCHNVIKLISKIVDREFVVRDAKRFHHFKDGGCSCGDYW

SEQ ID NO: 71126 - protein, 593 aa, Arabidopsis thaliana
  peptide (1)..(593): Ceres Seq. ID no. 3063786
MRKLSLYPTRSSFPCAIKACSSLFDIFSGKQTHQQAFVFGYQSDIFVSSALIVMYSTCGKLEDARKVFDEIPKRNIVSWTSMIRGYDLNGNALDAVSLFKDLLVDENDDDDAMFLDSMGLVSVISACSRVPAKGLTESIHSFVIKRGFDRGVSVGNTLLDAYAKGGEGGVAVARKIFDQIVDKDRVSYNSIMSVYAQSGMSNEAFEVFRRLVKNKVVTFNAITLSTVLLAVSHSGALRIGKCIHDQVIRMGLEDDVIVGTSIIDMYCKCGRVETARKAFDRMKNKNVRSWTAMIAGYGMHGHAAKALELFPAMIDSGVRPNYITFVSVLAACSHAGLHVEGWRWFNAMKGRFGVEPGLEHYGCMVDLLGRAGFLQKAYDLIQRMKMKPDSIIWSSLLAACRIHKNVELAEISVARLFELDSSNCGYYMLLSHIYADAGRWKDVERVRMIMKNRGLVKPPGFSLLELNGEVHVFLIGDEEHPQREKIYEFLAELNRKLLEAGYVSNTSSVCHDVDEEEKEMTLRVHSEKLAIAFGIMNTVPGSTVNVVKNLRVCSDCHNVIKLISKIVDREFVVRDAKRFHHFKDGGCSCGDYW

SEQ ID NO: 71127 - protein, 540 aa, Arabidopsis thaliana
  peptide (1)..(540): Ceres Seq. ID no. 3063787
MYSTCGKLEDARKVFDEIPKRNIVSWTSMIRGYDLNGNALDAVSLFKDLLVDENDDDDAMFLDSMGLVSVISACSRVPAKGLTESIHSFVIKRGFDRGVSVGNTLLDAYAKGGEGGVAVARKIFDQIVDKDRVSYNSIMSVYAQSGMSNEAFEVFRRLVKNKVVTFNAITLSTVLLAVSHSGALRIGKCIHDQVIRMGLEDDVIVGTSIIDMYCKCGRVETARKAFDRMKNKNVRSWTAMIAGYGMHGHAAKALELFPAMIDSGVRPNYITFVSVLAACSHAGLHVEGWRWFNAMKGRFGVEPGLEHYGCMVDLLGRAGFLQKAYDLIQRMKMKPDSIIWSSLLAACRIHKNVELAEISVARLFELDSSNCGYYMLLSHIYADAGRWKDVERVRMIMKNRGLVKPPGFSLLELNGEVHVFLIGDEEHPQREKIYEFLAELNRKLLEAGYVSNTSSVCHDVDEEEKEMTLRVHSEKLAIAFGIMNTVPGSTVNVVKNLRVCSDCHNVIKLISKIVDREFVVRDAKRFHHFKDGGCSCGDYW

SEQ ID NO: 71128 - DNA, 1200 bp, Arabidopsis thaliana
  misc_feature (1)..(1200): Ceres Seq. ID no. 3063788
  misc_feature (1)..(1200): Ortholog of  Ceres SEQ ID NO 14310259 as cited in SEQ ID NO 20662
atgggttcttcacaatctacgcaaatggaagacgaagaagaagaagaagaggaaactgacaatgaagaagaagaagaagaagataatggcagatcaaacacaagacaattagacaatctcctagtaaagaaagttctagaacaagagcctgagatgttaccatgtcacgcttcagcttcaccactctcaccacaactatcatctctcggtactccaaggcttggaccatcgattaaagtctgggatccttacaacgtcctctctccgccgccgcaaccgccgtctatcttctctcgaatcgtgtctggtgatgaagatcgagctgtgacagaggtttatctgattagccatggtgagtctgatcttaatcttaaacctgatttgattggtgggagatgtcatgtagctgctcttactgctaatggtaaacgtcaagctagggctcttgctgttttcttcaaatctcaaggtgttcggtttaattcggtttattcgtcacctctagatcgagctagatccatggctgtttctgtttgtcaggaaatgagttttccggaggagcatgtacaatcttcggatgctgttattgagatgagtttaggggattgggaaggctgtaatcaagcagagatttatagtcctgaaactttgagtttgattgaaaggtgccaacctgatttcacagctccatctggagaatcactgaggcaagtagagtttcgaatggttcagtttctaaacgggacagtctcaggagttgcagagaagcttaggtcagattattcttccactacgaatcacaatgaaactcatgagcgtgatggtggtgtgtcacttgcttcgactaactgggacttactacacaagcatcgtcccagtcttacaaggaagaaatctggtaaaagcaggcttcaagtgatgactaatcacgaacctgacgatggaaactccccaagggaagaagttaatcataatcacactgacctaagtgattcgtcttccttaatctcgaattgtgtcggggttttcacgcattctttgcctataaagtgtcttttaaccggaatcctcggttgcagtccggtaatgactcataagatctgtgtagaagactcttcagtgactgtgttacaacattcatggagaaacgggtggcagatcaaacgaatgaatgatactgctcatcttagattgttgtaa

SEQ ID NO: 71129 - protein, 399 aa, Arabidopsis thaliana
  peptide (1)..(399): Ceres Seq. ID no. 3063789
MGSSQSTQMEDEEEEEEETDNEEEEEEDNGRSNTRQLDNLLVKKVLEQEPEMLPCHASASPLSPQLSSLGTPRLGPSIKVWDPYNVLSPPPQPPSIFSRIVSGDEDRAVTEVYLISHGESDLNLKPDLIGGRCHVAALTANGKRQARALAVFFKSQGVRFNSVYSSPLDRARSMAVSVCQEMSFPEEHVQSSDAVIEMSLGDWEGCNQAEIYSPETLSLIERCQPDFTAPSGESLRQVEFRMVQFLNGTVSGVAEKLRSDYSSTTNHNETHERDGGVSLASTNWDLLHKHRPSLTRKKSGKSRLQVMTNHEPDDGNSPREEVNHNHTDLSDSSSLISNCVGVFTHSLPIKCLLTGILGCSPVMTHKICVEDSSVTVLQHSWRNGWQIKRMNDTAHLRLL

SEQ ID NO: 71130 - protein, 391 aa, Arabidopsis thaliana
  peptide (1)..(391): Ceres Seq. ID no. 3063790
MEDEEEEEEETDNEEEEEEDNGRSNTRQLDNLLVKKVLEQEPEMLPCHASASPLSPQLSSLGTPRLGPSIKVWDPYNVLSPPPQPPSIFSRIVSGDEDRAVTEVYLISHGESDLNLKPDLIGGRCHVAALTANGKRQARALAVFFKSQGVRFNSVYSSPLDRARSMAVSVCQEMSFPEEHVQSSDAVIEMSLGDWEGCNQAEIYSPETLSLIERCQPDFTAPSGESLRQVEFRMVQFLNGTVSGVAEKLRSDYSSTTNHNETHERDGGVSLASTNWDLLHKHRPSLTRKKSGKSRLQVMTNHEPDDGNSPREEVNHNHTDLSDSSSLISNCVGVFTHSLPIKCLLTGILGCSPVMTHKICVEDSSVTVLQHSWRNGWQIKRMNDTAHLRLL

SEQ ID NO: 71131 - protein, 348 aa, Arabidopsis thaliana
  peptide (1)..(348): Ceres Seq. ID no. 3063791
MLPCHASASPLSPQLSSLGTPRLGPSIKVWDPYNVLSPPPQPPSIFSRIVSGDEDRAVTEVYLISHGESDLNLKPDLIGGRCHVAALTANGKRQARALAVFFKSQGVRFNSVYSSPLDRARSMAVSVCQEMSFPEEHVQSSDAVIEMSLGDWEGCNQAEIYSPETLSLIERCQPDFTAPSGESLRQVEFRMVQFLNGTVSGVAEKLRSDYSSTTNHNETHERDGGVSLASTNWDLLHKHRPSLTRKKSGKSRLQVMTNHEPDDGNSPREEVNHNHTDLSDSSSLISNCVGVFTHSLPIKCLLTGILGCSPVMTHKICVEDSSVTVLQHSWRNGWQIKRMNDTAHLRLL

SEQ ID NO: 71132 - DNA, 2007 bp, Arabidopsis thaliana
  misc_feature (1)..(2007): Ceres Seq. ID no. 3063838
  misc_feature (1)..(2007): Ortholog of  Ceres SEQ ID NO 13655640 as cited in SEQ ID NO 63844
atggctggagttctaagatcactgaggttctggatgataatatgtgtccaggtgttgtctttggtgctagctcaagaccgggatgaatttgtgtaccatgacttcagtcaagcagacctgcatcttgacggcatggcaagtatcgatgatggccgattgcatcttacaaataatacaactaagagcaccggtcatgctttctggaaaattccaatgaacttcacaacatcaccttccagttcactttctttttcgacagagtttgtcttcgcaatctttccattgctaggtgacggtcaaggaatggcgtttgtggtagctcctttcatggacatcaggtatagtggtgatgcagcctcatacttaggacttttcaatagaaaaaatgataacaaaacagaaaaccatatcctggctgtagagcttgatactaattcaagccctgaagcaattgaagatagtgataaccatgtggggattgatattaacagtatcatctcagaagactctgccaatgctagttactttagcggtacggagggaaagaacataagcttccggctagctagtgaaaaaagtattctggtatggatagattataatggaacagagaaactactaaatgtaacggtagctccagtgccaactccaaaaccagcattgccttacttgtcaagctccatcaaaccaagaaagcctctcttgtcaagattcatcaatatttcagaaattttcaatgggacaatgtttgtagaaagccttgacttgtcaaagattttggatcctcctaatcgacctccaccaccatcctctccaccaccacctcctccgccacctcccactccgccaacctcaaggtctaaagactctaagaatattattatcatatgtgttactgtaacatcaattgcttttctgttgatgttggggggatttttgtatctttacaaaaaaaagaagtatgcagaggtgcttgaacattgggaaaatgaatacagtccccaaaggtactcctttaggaacctctacaaagcaataaggggtttcagggagaatcggctacttggggcaggaggttttggaaaagtctataaaggagaacttccttcaggtacacagattgcggttaagagagtctaccataatgcagaacaagggatgaaacagtatgccgcagagattgctagtatgggaaggttaaggcacaagaacttagtgcagcttcttggttactgcagaaggaaaggtgaattgcttttggtttatgactacatgccaaatggaagccttgatgactacttgttcaataaaaacaagctgaaagatcttacttggtctcagagagtaaatataatcaagggagtagcctctgcccttctgtatcttcatgaagaatgggaacaagttgtactacatcgagatattaaagctagcaacattcttttagatgcggatctaaatggaaggttgggagatttcgggcttgcaagattccatgatcgtggcgagaatcttcaagcaacgcgtgtggtaggaaccattggctacatggcaccagagcttacagcaatgggagtggccactactaaaaccgatatctatgcttttggatctttcatccttgaggtggtttgcgggagaaggcctgtagaacctgatagaccacctgagcaaatgcatttacttaagtgggttgccacttgtgggaaaagagatactttgatggatgttgttgacagtaaactaggagactttaaagctaaggaagccaagctgcttctgaagctaggcatgctttgttcacagagtaacccggaaagtagacctagtatgaggcacatcatacaatatctggaaggaaatgccactattccaagcatatcatttgatacagcagggtttggtattcccaatataagcaatgaaacgataacacagatgacagccacctcctcatcggccaatttctcttttgaagatgttacaatactatttggcggtcgttga

SEQ ID NO: 71133 - protein, 668 aa, Arabidopsis thaliana
  peptide (1)..(668): Ceres Seq. ID no. 3063839
MAGVLRSLRFWMIICVQVLSLVLAQDRDEFVYHDFSQADLHLDGMASIDDGRLHLTNNTTKSTGHAFWKIPMNFTTSPSSSLSFSTEFVFAIFPLLGDGQGMAFVVAPFMDIRYSGDAASYLGLFNRKNDNKTENHILAVELDTNSSPEAIEDSDNHVGIDINSIISEDSANASYFSGTEGKNISFRLASEKSILVWIDYNGTEKLLNVTVAPVPTPKPALPYLSSSIKPRKPLLSRFINISEIFNGTMFVESLDLSKILDPPNRPPPPSSPPPPPPPPPTPPTSRSKDSKNIIIICVTVTSIAFLLMLGGFLYLYKKKKYAEVLEHWENEYSPQRYSFRNLYKAIRGFRENRLLGAGGFGKVYKGELPSGTQIAVKRVYHNAEQGMKQYAAEIASMGRLRHKNLVQLLGYCRRKGELLLVYDYMPNGSLDDYLFNKNKLKDLTWSQRVNIIKGVASALLYLHEEWEQVVLHRDIKASNILLDADLNGRLGDFGLARFHDRGENLQATRVVGTIGYMAPELTAMGVATTKTDIYAFGSFILEVVCGRRPVEPDRPPEQMHLLKWVATCGKRDTLMDVVDSKLGDFKAKEAKLLLKLGMLCSQSNPESRPSMRHIIQYLEGNATIPSISFDTAGFGIPNISNETITQMTATSSSANFSFEDVTILFGGR

SEQ ID NO: 71134 - protein, 657 aa, Arabidopsis thaliana
  peptide (1)..(657): Ceres Seq. ID no. 3063840
MIICVQVLSLVLAQDRDEFVYHDFSQADLHLDGMASIDDGRLHLTNNTTKSTGHAFWKIPMNFTTSPSSSLSFSTEFVFAIFPLLGDGQGMAFVVAPFMDIRYSGDAASYLGLFNRKNDNKTENHILAVELDTNSSPEAIEDSDNHVGIDINSIISEDSANASYFSGTEGKNISFRLASEKSILVWIDYNGTEKLLNVTVAPVPTPKPALPYLSSSIKPRKPLLSRFINISEIFNGTMFVESLDLSKILDPPNRPPPPSSPPPPPPPPPTPPTSRSKDSKNIIIICVTVTSIAFLLMLGGFLYLYKKKKYAEVLEHWENEYSPQRYSFRNLYKAIRGFRENRLLGAGGFGKVYKGELPSGTQIAVKRVYHNAEQGMKQYAAEIASMGRLRHKNLVQLLGYCRRKGELLLVYDYMPNGSLDDYLFNKNKLKDLTWSQRVNIIKGVASALLYLHEEWEQVVLHRDIKASNILLDADLNGRLGDFGLARFHDRGENLQATRVVGTIGYMAPELTAMGVATTKTDIYAFGSFILEVVCGRRPVEPDRPPEQMHLLKWVATCGKRDTLMDVVDSKLGDFKAKEAKLLLKLGMLCSQSNPESRPSMRHIIQYLEGNATIPSISFDTAGFGIPNISNETITQMTATSSSANFSFEDVTILFGGR

SEQ ID NO: 71135 - protein, 624 aa, Arabidopsis thaliana
  peptide (1)..(624): Ceres Seq. ID no. 3063841
MASIDDGRLHLTNNTTKSTGHAFWKIPMNFTTSPSSSLSFSTEFVFAIFPLLGDGQGMAFVVAPFMDIRYSGDAASYLGLFNRKNDNKTENHILAVELDTNSSPEAIEDSDNHVGIDINSIISEDSANASYFSGTEGKNISFRLASEKSILVWIDYNGTEKLLNVTVAPVPTPKPALPYLSSSIKPRKPLLSRFINISEIFNGTMFVESLDLSKILDPPNRPPPPSSPPPPPPPPPTPPTSRSKDSKNIIIICVTVTSIAFLLMLGGFLYLYKKKKYAEVLEHWENEYSPQRYSFRNLYKAIRGFRENRLLGAGGFGKVYKGELPSGTQIAVKRVYHNAEQGMKQYAAEIASMGRLRHKNLVQLLGYCRRKGELLLVYDYMPNGSLDDYLFNKNKLKDLTWSQRVNIIKGVASALLYLHEEWEQVVLHRDIKASNILLDADLNGRLGDFGLARFHDRGENLQATRVVGTIGYMAPELTAMGVATTKTDIYAFGSFILEVVCGRRPVEPDRPPEQMHLLKWVATCGKRDTLMDVVDSKLGDFKAKEAKLLLKLGMLCSQSNPESRPSMRHIIQYLEGNATIPSISFDTAGFGIPNISNETITQMTATSSSANFSFEDVTILFGGR

SEQ ID NO: 71136 - DNA, 1176 bp, Arabidopsis thaliana
  misc_feature (1)..(1176): Ceres Seq. ID no. 3064164
  misc_feature (1)..(1176): Ortholog of  Ceres SEQ ID NO 13597376 as cited in SEQ ID NO 64002
  misc_feature (1)..(1176): Ortholog of  Ceres SEQ ID NO 13503573 as cited in SEQ ID NO 65402
  misc_feature (1)..(1176): Ortholog of  Ceres SEQ ID NO 13659615 as cited in SEQ ID NO 67248
atggattgcttagaacccaaaacaaagaacaatctcactggaaagcttctcttagtagcttcactcttaattttagccattattgtgatcagtcaatcttcaagtttcacatctccaagcgcgttttctcaaagagaggaaggagtgactcatgtgttagtcactggtggtgctggttatatcgggtcacatgcggctttaagacttcttagagattcataccgcgtaaccattgtggacaatctttcgcgtggaaatcttggtgcggttaagactttacagcaattattcccgcagacaggaagacttcagttcatttatgctgacttaggagatcccttagcggtcgagaaaatcttctcggagaatgcttttgacgctgtaatgcattttgctgcggtagcttatgtcggagaaagcactctttatcctctaaaatattaccataacattacatcaaacacgttaggagttcttgaagctatggctagacataaagtaaagaaactgatatattctagcacttgtgctacatatggagagcctgaaaaaatgccgattactgaagacactccacaggtaccgattaatccatacggaaaagctaaaaagatggcagaggatatgatcttggatttctcaaagaactctgacatggcggttatgatcttaagatacttcaatgtgattggttcagatccaggaggtagattaggagaagcgccaagacccgaacttcgtgagcaaggaaggatttctggtgcttgtttcgatgcagctcgtggtttcattcccggactacaagtgaaaggaacggattacaaaacatcggacggtacttgcattagagactatatagatgttactgacctcgtggatgctcacgtgaaggctctcgagaaagctcagcctcgaaaagtcggtatctacaatgttggaaccggaaaagggagatcggttaaagaattcgttgaggcatgtaagaaggcgacaggagttgagatcaaagtagatttcttgcctcgacgaccgggagattacgcagaggtttacagtgatccaacaaagattttgaaagatttgaattggactgctcgattcactaatcttcaagatagtcttcaagttgcttggagatggcaaaaaattcatcctcatggatataattcttattaa

SEQ ID NO: 71137 - protein, 391 aa, Arabidopsis thaliana
  peptide (1)..(391): Ceres Seq. ID no. 3064165
MDCLEPKTKNNLTGKLLLVASLLILAIIVISQSSSFTSPSAFSQREEGVTHVLVTGGAGYIGSHAALRLLRDSYRVTIVDNLSRGNLGAVKTLQQLFPQTGRLQFIYADLGDPLAVEKIFSENAFDAVMHFAAVAYVGESTLYPLKYYHNITSNTLGVLEAMARHKVKKLIYSSTCATYGEPEKMPITEDTPQVPINPYGKAKKMAEDMILDFSKNSDMAVMILRYFNVIGSDPGGRLGEAPRPELREQGRISGACFDAARGFIPGLQVKGTDYKTSDGTCIRDYIDVTDLVDAHVKALEKAQPRKVGIYNVGTGKGRSVKEFVEACKKATGVEIKVDFLPRRPGDYAEVYSDPTKILKDLNWTARFTNLQDSLQVAWRWQKIHPHGYNSY

SEQ ID NO: 71138 - protein, 263 aa, Arabidopsis thaliana
  peptide (1)..(263): Ceres Seq. ID no. 3064167
MHFAAVAYVGESTLYPLKYYHNITSNTLGVLEAMARHKVKKLIYSSTCATYGEPEKMPITEDTPQVPINPYGKAKKMAEDMILDFSKNSDMAVMILRYFNVIGSDPGGRLGEAPRPELREQGRISGACFDAARGFIPGLQVKGTDYKTSDGTCIRDYIDVTDLVDAHVKALEKAQPRKVGIYNVGTGKGRSVKEFVEACKKATGVEIKVDFLPRRPGDYAEVYSDPTKILKDLNWTARFTNLQDSLQVAWRWQKIHPHGYNSY

SEQ ID NO: 71139 - protein, 230 aa, Arabidopsis thaliana
  peptide (1)..(230): Ceres Seq. ID no. 3064168
MARHKVKKLIYSSTCATYGEPEKMPITEDTPQVPINPYGKAKKMAEDMILDFSKNSDMAVMILRYFNVIGSDPGGRLGEAPRPELREQGRISGACFDAARGFIPGLQVKGTDYKTSDGTCIRDYIDVTDLVDAHVKALEKAQPRKVGIYNVGTGKGRSVKEFVEACKKATGVEIKVDFLPRRPGDYAEVYSDPTKILKDLNWTARFTNLQDSLQVAWRWQKIHPHGYNSY

SEQ ID NO: 71140 - DNA, 660 bp, Arabidopsis thaliana
  misc_feature (1)..(660): Ceres Seq. ID no. 3065961
  misc_feature (1)..(660): Ortholog of  Ceres SEQ ID NO 14313088 as cited in SEQ ID NO 58870
  misc_feature (1)..(660): Ortholog of  Ceres SEQ ID NO 14314571 as cited in SEQ ID NO 59360
atgaacccatctctcttccaaaattacacttggaacaacatcatcaacagcagcaacaacaacaacaagaatgatgatcatcatcatcaacataataatgatccaatcggtatggccatggaccagtacacacagctccatatcttcaatcctttctcttcttctcatttccctcctctctcttcttccctcacaaccaccactcttctctccggagatcaagaagacgacgaagacgaagaagaacctctagaggaactcggtgctatgaaggaaatgatgtacaagatcgcagccatgcaatcggttgacatcgacccagcaaccgtcaagaaacccaaacgccgtaacgtgaggatctccgacgaccctcagagtgtggcggctagacatcgccgtgagagaatcagtgagaggatcagaattcttcagagactcgtgccaggtggcactaaaatggatacggcttcaatgctcgatgaagctatacgctatgtcaagttcttgaaacggcagatccggctactcaataataataccggatatactcctccgccgccgcaagatcaagcttctcaggcggtgacgacgtcatgggtttcaccgccaccaccgccaagtttcggccgtgggggaagaggagtaggagaattaatctag

SEQ ID NO: 71141 - protein, 219 aa, Arabidopsis thaliana; identical to SEQ ID NO: 48806
  peptide (1)..(219): Ceres Seq. ID no. 3065962

SEQ ID NO: 71142 - protein, 182 aa, Arabidopsis thaliana; identical to SEQ ID NO: 48807
  peptide (1)..(182): Ceres Seq. ID no. 3065963

SEQ ID NO: 71143 - protein, 180 aa, Arabidopsis thaliana
  peptide (1)..(180): Ceres Seq. ID no. 3065964
MDQYTQLHIFNPFSSSHFPPLSSSLTTTTLLSGDQEDDEDEEEPLEELGAMKEMMYKIAAMQSVDIDPATVKKPKRRNVRISDDPQSVAARHRRERISERIRILQRLVPGGTKMDTASMLDEAIRYVKFLKRQIRLLNNNTGYTPPPPQDQASQAVTTSWVSPPPPPSFGRGGRGVGELI

SEQ ID NO: 71144 - DNA, 1521 bp, Arabidopsis thaliana
  misc_feature (1)..(1521): Ceres Seq. ID no. 3066605
  misc_feature (1)..(1521): Ortholog of  Ceres SEQ ID NO 13594213 as cited in SEQ ID NO 57038
  misc_feature (1)..(1521): Ortholog of  Ceres SEQ ID NO 13654989 as cited in SEQ ID NO 63117
  misc_feature (1)..(1521): Ortholog of  Ceres SEQ ID NO 13584744 as cited in SEQ ID NO 69137
atggcggtgaagaagaaatcatcttggagatcattgatggttttgtgtttccaagatccagacaacatatattctcccaagaagacaaagaaagatgatggtgaacgtgtgattaccaaacagaaatcgtttcttggattgtcgattctagacataagtaatccaagttccactaccttgtccgaagatctctcaatctccctcgccggctcggatctccacgtgttcacacaagcagagcttagagtcataacacaaagcttctcttctagcaactttcttggtgaaggagggtttggtccggttcataaagggttcatcgatgacaagctccgtcctggtcttaaggctcagcccgttgccgttaaacttcttgatcttgatggtcttcaaggtcaccgtgagtttatgacggaggttatgtgtttgggaaaactaaagcatccgaatctggtgaagctgatcggatattgctgcgaggaagcacatagacttcttgtttatgagttcatgcctcgtggaagtttggagtctcaactcttcagaaggtgctccctaccgctgccatggacaacgaggttgaacatcgcttatgaagctgcaaagggtctacagtttctacatgaagccgagaagcccatcatctatcgcgatttcaaggcctctaatatcttgttagattctgattatacagcgaaactctcggacttcgggctagcaaaagacggaccacaaggcgatgatacacatgtgtcgactcgcgtgatgggcacacaagggtacgcggcgccagagtacataatgacaggtcatttaacggctaagagtgatgtgtacagctttggagtggtgttgcttgagctgttgacaggtcggaaatcggtggacatagcgagatcatcaagaaaagaaaccctcgttgagtgggctcgtccaatgctcaacgacgcacgtaaactcgggagaataatggacccgaggcttgaagatcagtactcagagaccggagcacgaaaggcagcaactctagcttatcaatgcctaaggtaccgaccaaagacaaggccagacattagcactgttgtctccgttctccaagacatcaaagattacaaagatgatattcccattgggatattcacttacaccgttcctaccaagccacgccgggaagttaaagagacaagtcttcaaaactttgacaagccacgccgtgaaactaaagtgacaagtcttcaaaacttcgacaaaacacgccgtgaagttaaagatacaagtcttcaaaacttcgacaaaacacgccgtgaagttaaagagacaagtcttcaaaacttcgacaaaacacgccgtgaagttaaagagacaagtcttcaaaacttcgacaagcctcgcaacgtttccacgactgataaccatcaaaagttccggtcgcccgcacacacggcaagaaaccaccggataactttgagaaacggatataattcaccaatgcgtaacgaggccggaggggaacggtactga

SEQ ID NO: 71145 - protein, 506 aa, Arabidopsis thaliana
  peptide (1)..(506): Ceres Seq. ID no. 3066606
MAVKKKSSWRSLMVLCFQDPDNIYSPKKTKKDDGERVITKQKSFLGLSILDISNPSSTTLSEDLSISLAGSDLHVFTQAELRVITQSFSSSNFLGEGGFGPVHKGFIDDKLRPGLKAQPVAVKLLDLDGLQGHREFMTEVMCLGKLKHPNLVKLIGYCCEEAHRLLVYEFMPRGSLESQLFRRCSLPLPWTTRLNIAYEAAKGLQFLHEAEKPIIYRDFKASNILLDSDYTAKLSDFGLAKDGPQGDDTHVSTRVMGTQGYAAPEYIMTGHLTAKSDVYSFGVVLLELLTGRKSVDIARSSRKETLVEWARPMLNDARKLGRIMDPRLEDQYSETGARKAATLAYQCLRYRPKTRPDISTVVSVLQDIKDYKDDIPIGIFTYTVPTKPRREVKETSLQNFDKPRRETKVTSLQNFDKTRREVKDTSLQNFDKTRREVKETSLQNFDKTRREVKETSLQNFDKPRNVSTTDNHQKFRSPAHTARNHRITLRNGYNSPMRNEAGGERY

SEQ ID NO: 71146 - protein, 494 aa, Arabidopsis thaliana
  peptide (1)..(494): Ceres Seq. ID no. 3066607
MVLCFQDPDNIYSPKKTKKDDGERVITKQKSFLGLSILDISNPSSTTLSEDLSISLAGSDLHVFTQAELRVITQSFSSSNFLGEGGFGPVHKGFIDDKLRPGLKAQPVAVKLLDLDGLQGHREFMTEVMCLGKLKHPNLVKLIGYCCEEAHRLLVYEFMPRGSLESQLFRRCSLPLPWTTRLNIAYEAAKGLQFLHEAEKPIIYRDFKASNILLDSDYTAKLSDFGLAKDGPQGDDTHVSTRVMGTQGYAAPEYIMTGHLTAKSDVYSFGVVLLELLTGRKSVDIARSSRKETLVEWARPMLNDARKLGRIMDPRLEDQYSETGARKAATLAYQCLRYRPKTRPDISTVVSVLQDIKDYKDDIPIGIFTYTVPTKPRREVKETSLQNFDKPRRETKVTSLQNFDKTRREVKDTSLQNFDKTRREVKETSLQNFDKTRREVKETSLQNFDKPRNVSTTDNHQKFRSPAHTARNHRITLRNGYNSPMRNEAGGERY

SEQ ID NO: 71147 - protein, 370 aa, Arabidopsis thaliana
  peptide (1)..(370): Ceres Seq. ID no. 3066608
MTEVMCLGKLKHPNLVKLIGYCCEEAHRLLVYEFMPRGSLESQLFRRCSLPLPWTTRLNIAYEAAKGLQFLHEAEKPIIYRDFKASNILLDSDYTAKLSDFGLAKDGPQGDDTHVSTRVMGTQGYAAPEYIMTGHLTAKSDVYSFGVVLLELLTGRKSVDIARSSRKETLVEWARPMLNDARKLGRIMDPRLEDQYSETGARKAATLAYQCLRYRPKTRPDISTVVSVLQDIKDYKDDIPIGIFTYTVPTKPRREVKETSLQNFDKPRRETKVTSLQNFDKTRREVKDTSLQNFDKTRREVKETSLQNFDKTRREVKETSLQNFDKPRNVSTTDNHQKFRSPAHTARNHRITLRNGYNSPMRNEAGGERY

SEQ ID NO: 71148 - DNA, 3657 bp, Arabidopsis thaliana
  misc_feature (1)..(3657): Ceres Seq. ID no. 3066975
  misc_feature (1)..(3657): Ortholog of  Ceres SEQ ID NO 13581195 as cited in SEQ ID NO 50955
atggcaggaactccgatcgtgatctttgatggatcaggagatttttctttgtggaaaacaaggattatggcacatctaagcgtcattggacttaaggatgttgtcatcggaacatcgtctccgccgctcactgcagaagaagaagaagatccggagaaaaagaagaaacgagatgcagatgatgcagcaaggcttgagcgatgtgataaagcgaagaatgtgatcttccttaatgttgcagataaggtcttaagaaagatcgagctatgtcaaactgcagcagaagcttggggaactctagatcgattgttcatgattcgatctctacctcatagagtctttactcagctaagtttctatacttttaagatgcaagaaaacaagaaaatcgatgagaatattgatgatttcttaaagattgtggctgatttgaatcatttgcagattgaggtgactgatgaggttcaagcaattctgttgctaagttcgttgccttcaagatatgatggtttagttgaaaccatgaagtatagtaatagccgagaaaagttgaggttagatgatgtgatggttgcagctcgagacaaagaaagagagttgtcacagagtaatcgatctgtatcagaaggaaattttgctagaggaagacaagaaggatcttccaacaataaccaaagaaataagggtaaagggagatcaagatctaagtctcgagatggtaagcgagtatgctggatatgtggtaaagagggacactttaagaaacagtgtttcaaatggcttgaaagaaacaaagataaaggatcaggatcaagttcagacaaaggagaagcgagtatagctaaagctgaatatgatccagcaatggttcttatggcagaagaagagaatctatttgtttcagggaatactgcagacgaatgggttctagatacaggctgttcttttcacatgacaccaaggagagattggttttcagattttagagaagtaaaaggaattggaaacataagaatcaagaactctgatgggacacatattactttaacagaagtgagatacatgccaacaatgtctaggaacctaatttctttaggaaccttagaagacaaaggatgctggttcaagtctcaagatgaaaatcatagagtcagtttcccatctgctcagcatgttacaaaggagaagctagcttatatccattcagatttatggggatctcctcataatccagcatctttgggaaactgtcaatacttcatctccttcattgatgactattccaggaaagtgtggatatattttctgaagaagaaagatgaagcttttgagaaatttgttgaatggaagaaaatggtggaaaatcagtctgataagaaggttaagaaactcagaactgataatggcttagagtactgtaatcattactttgagaagttttgtaaagaggaaggcattgtaaggcacaagactgttgcttacacacctcaacagaacggtgtcgctgagagactcaatcgaactataatggataaagttcgcagcatgttaagtgaaagtggtatggaaaagagattttgggcagaagctgctgctacagcagtgtatttaataaatcgatctccctctactgcaacgaactttgagctgccagaagaaagatggacaggagcgttaccggatatgagttcattgagaaggtttggttgtttggcttatgtacacgcagatcaagggaagttgaatcctagagcaaagaagggaatattcacgagctatcctgagggtgttaaaggatataaagtttggctacttgaagaaaagaagtgtgtcattagtagaaacgtgatattcagagaggaaatgatgtacaaagaccttaaaactgattctcagaacagtttctatgaagaagtcatggagaacataggagaagaacagattattaatgaacagaatcaagtgcagacagaaacttatgaagaagaagaaagcagtagtgataattctactgaagaagtggatctcagtaactacctactagtaagagacagggagaaaaggactgttaagttgaacagaagatataatgagtctaatatggttgggtttgcctacaatacagaagatgggggtaagtctaagcctaaaacataccaagaggcattaagtgatcaagattgggagttatggaatggagctatgaaagaagagatatcatccatgggaaaaaaccacacgtgggacttagtagataaactagtaaatgcgaaaatcattggttgcagatgggtcttcacaaggaaagctggtattcccggagtggaagcacctagatttaaagctcggctggtagccaaaggttttacacagaaagaaggtgtagattataatgaaatcttctcaccagttgttaaacatgtgtctatcaggtttatgctctcaatggtggctcaatttgacatggagctacatcagatggacgttaaaacagcgttcctacatggatttcttgatgaagagatattgatggctcaacctgaaggttttgaagataagaaataccctgaaaaggtatgtttactgaaaagatccctatatggtctaaagcaatctcctagacagtggaatctgagatttgatgagtttataaagagtattgatttcactaggagcgcttatgacagctgtgtatacttgaagcagcaaactgctaaagaaaagtcaagtatcatggagttaaaacagttactgggtaaagagtttgagatgaaggatttgggtgaagctcagaaaattttaggcatggagattgctaaagatagagctgcaggtgtgttgactctgtcacaggaaggttatgtgaagaaagttttgagatctagtcagatggatcaggctaaacctgtgtcaacaccattaggaatccatttcaagctccgagcagctactgaaaaagagtatcaagaacaatttgacagaatgaagattgtaccttactcaaacactgttggaagcatcatgtattcaatgataggcacgaggccagatcttgcttatccagttggagtgatcagtcactacatgagtagaccattaaaggatcattggcaagcggctaagtgggtcttgaggtacatgaaggggacagagaaaaagaagctttgcttcagaaagaataaagacttcttattaagaggttactgtgactctgactatggtggtgattatgataaccggaggtcaatcacaggttatgttttcactattggtgtaaacaccattagctggaaatcacggcaacagaaggtggtagctatatctactacagaggcagaatatatggcattaactgatgctgttaaagaggctttgtggctgagaggtttttctgaagaacttggttttgcacaggaaagtgtagaggtgaattgtgattcagagagtgctattgctttggcaaagaactctgtacatcacgaaagaacaaagcatattgatatcaggttacatttcattcgggatatcataaatgcaggtctggttaaagtggtgaagattgcaagtgaatgcaatcctgcagatattttttcaaaggtattgcccgtggagaagtttgaaggagcattgcatatgctccgagttactgagaactga

SEQ ID NO: 71149 - protein, 1218 aa, Arabidopsis thaliana
  peptide (1)..(1218): Ceres Seq. ID no. 3066976
MAGTPIVIFDGSGDFSLWKTRIMAHLSVIGLKDVVIGTSSPPLTAEEEEDPEKKKKRDADDAARLERCDKAKNVIFLNVADKVLRKIELCQTAAEAWGTLDRLFMIRSLPHRVFTQLSFYTFKMQENKKIDENIDDFLKIVADLNHLQIEVTDEVQAILLLSSLPSRYDGLVETMKYSNSREKLRLDDVMVAARDKERELSQSNRSVSEGNFARGRQEGSSNNNQRNKGKGRSRSKSRDGKRVCWICGKEGHFKKQCFKWLERNKDKGSGSSSDKGEASIAKAEYDPAMVLMAEEENLFVSGNTADEWVLDTGCSFHMTPRRDWFSDFREVKGIGNIRIKNSDGTHITLTEVRYMPTMSRNLISLGTLEDKGCWFKSQDENHRVSFPSAQHVTKEKLAYIHSDLWGSPHNPASLGNCQYFISFIDDYSRKVWIYFLKKKDEAFEKFVEWKKMVENQSDKKVKKLRTDNGLEYCNHYFEKFCKEEGIVRHKTVAYTPQQNGVAERLNRTIMDKVRSMLSESGMEKRFWAEAAATAVYLINRSPSTATNFELPEERWTGALPDMSSLRRFGCLAYVHADQGKLNPRAKKGIFTSYPEGVKGYKVWLLEEKKCVISRNVIFREEMMYKDLKTDSQNSFYEEVMENIGEEQIINEQNQVQTETYEEEESSSDNSTEEVDLSNYLLVRDREKRTVKLNRRYNESNMVGFAYNTEDGGKSKPKTYQEALSDQDWELWNGAMKEEISSMGKNHTWDLVDKLVNAKIIGCRWVFTRKAGIPGVEAPRFKARLVAKGFTQKEGVDYNEIFSPVVKHVSIRFMLSMVAQFDMELHQMDVKTAFLHGFLDEEILMAQPEGFEDKKYPEKVCLLKRSLYGLKQSPRQWNLRFDEFIKSIDFTRSAYDSCVYLKQQTAKEKSSIMELKQLLGKEFEMKDLGEAQKILGMEIAKDRAAGVLTLSQEGYVKKVLRSSQMDQAKPVSTPLGIHFKLRAATEKEYQEQFDRMKIVPYSNTVGSIMYSMIGTRPDLAYPVGVISHYMSRPLKDHWQAAKWVLRYMKGTEKKKLCFRKNKDFLLRGYCDSDYGGDYDNRRSITGYVFTIGVNTISWKSRQQKVVAISTTEAEYMALTDAVKEALWLRGFSEELGFAQESVEVNCDSESAIALAKNSVHHERTKHIDIRLHFIRDIINAGLVKVVKIASECNPADIFSKVLPVEKFEGALHMLRVTEN

SEQ ID NO: 71150 - protein, 1196 aa, Arabidopsis thaliana
  peptide (1)..(1196): Ceres Seq. ID no. 3066977
MAHLSVIGLKDVVIGTSSPPLTAEEEEDPEKKKKRDADDAARLERCDKAKNVIFLNVADKVLRKIELCQTAAEAWGTLDRLFMIRSLPHRVFTQLSFYTFKMQENKKIDENIDDFLKIVADLNHLQIEVTDEVQAILLLSSLPSRYDGLVETMKYSNSREKLRLDDVMVAARDKERELSQSNRSVSEGNFARGRQEGSSNNNQRNKGKGRSRSKSRDGKRVCWICGKEGHFKKQCFKWLERNKDKGSGSSSDKGEASIAKAEYDPAMVLMAEEENLFVSGNTADEWVLDTGCSFHMTPRRDWFSDFREVKGIGNIRIKNSDGTHITLTEVRYMPTMSRNLISLGTLEDKGCWFKSQDENHRVSFPSAQHVTKEKLAYIHSDLWGSPHNPASLGNCQYFISFIDDYSRKVWIYFLKKKDEAFEKFVEWKKMVENQSDKKVKKLRTDNGLEYCNHYFEKFCKEEGIVRHKTVAYTPQQNGVAERLNRTIMDKVRSMLSESGMEKRFWAEAAATAVYLINRSPSTATNFELPEERWTGALPDMSSLRRFGCLAYVHADQGKLNPRAKKGIFTSYPEGVKGYKVWLLEEKKCVISRNVIFREEMMYKDLKTDSQNSFYEEVMENIGEEQIINEQNQVQTETYEEEESSSDNSTEEVDLSNYLLVRDREKRTVKLNRRYNESNMVGFAYNTEDGGKSKPKTYQEALSDQDWELWNGAMKEEISSMGKNHTWDLVDKLVNAKIIGCRWVFTRKAGIPGVEAPRFKARLVAKGFTQKEGVDYNEIFSPVVKHVSIRFMLSMVAQFDMELHQMDVKTAFLHGFLDEEILMAQPEGFEDKKYPEKVCLLKRSLYGLKQSPRQWNLRFDEFIKSIDFTRSAYDSCVYLKQQTAKEKSSIMELKQLLGKEFEMKDLGEAQKILGMEIAKDRAAGVLTLSQEGYVKKVLRSSQMDQAKPVSTPLGIHFKLRAATEKEYQEQFDRMKIVPYSNTVGSIMYSMIGTRPDLAYPVGVISHYMSRPLKDHWQAAKWVLRYMKGTEKKKLCFRKNKDFLLRGYCDSDYGGDYDNRRSITGYVFTIGVNTISWKSRQQKVVAISTTEAEYMALTDAVKEALWLRGFSEELGFAQESVEVNCDSESAIALAKNSVHHERTKHIDIRLHFIRDIINAGLVKVVKIASECNPADIFSKVLPVEKFEGALHMLRVTEN

SEQ ID NO: 71151 - protein, 1114 aa, Arabidopsis thaliana
  peptide (1)..(1114): Ceres Seq. ID no. 3066978
MIRSLPHRVFTQLSFYTFKMQENKKIDENIDDFLKIVADLNHLQIEVTDEVQAILLLSSLPSRYDGLVETMKYSNSREKLRLDDVMVAARDKERELSQSNRSVSEGNFARGRQEGSSNNNQRNKGKGRSRSKSRDGKRVCWICGKEGHFKKQCFKWLERNKDKGSGSSSDKGEASIAKAEYDPAMVLMAEEENLFVSGNTADEWVLDTGCSFHMTPRRDWFSDFREVKGIGNIRIKNSDGTHITLTEVRYMPTMSRNLISLGTLEDKGCWFKSQDENHRVSFPSAQHVTKEKLAYIHSDLWGSPHNPASLGNCQYFISFIDDYSRKVWIYFLKKKDEAFEKFVEWKKMVENQSDKKVKKLRTDNGLEYCNHYFEKFCKEEGIVRHKTVAYTPQQNGVAERLNRTIMDKVRSMLSESGMEKRFWAEAAATAVYLINRSPSTATNFELPEERWTGALPDMSSLRRFGCLAYVHADQGKLNPRAKKGIFTSYPEGVKGYKVWLLEEKKCVISRNVIFREEMMYKDLKTDSQNSFYEEVMENIGEEQIINEQNQVQTETYEEEESSSDNSTEEVDLSNYLLVRDREKRTVKLNRRYNESNMVGFAYNTEDGGKSKPKTYQEALSDQDWELWNGAMKEEISSMGKNHTWDLVDKLVNAKIIGCRWVFTRKAGIPGVEAPRFKARLVAKGFTQKEGVDYNEIFSPVVKHVSIRFMLSMVAQFDMELHQMDVKTAFLHGFLDEEILMAQPEGFEDKKYPEKVCLLKRSLYGLKQSPRQWNLRFDEFIKSIDFTRSAYDSCVYLKQQTAKEKSSIMELKQLLGKEFEMKDLGEAQKILGMEIAKDRAAGVLTLSQEGYVKKVLRSSQMDQAKPVSTPLGIHFKLRAATEKEYQEQFDRMKIVPYSNTVGSIMYSMIGTRPDLAYPVGVISHYMSRPLKDHWQAAKWVLRYMKGTEKKKLCFRKNKDFLLRGYCDSDYGGDYDNRRSITGYVFTIGVNTISWKSRQQKVVAISTTEAEYMALTDAVKEALWLRGFSEELGFAQESVEVNCDSESAIALAKNSVHHERTKHIDIRLHFIRDIINAGLVKVVKIASECNPADIFSKVLPVEKFEGALHMLRVTEN

SEQ ID NO: 71152 - DNA, 1377 bp, Arabidopsis thaliana
  misc_feature (1)..(1377): Ceres Seq. ID no. 3067643
  misc_feature (1)..(1377): Ortholog of  Ceres SEQ ID NO 13594209 as cited in SEQ ID NO 59089
  misc_feature (1)..(1377): Ortholog of  Ceres SEQ ID NO 13502874 as cited in SEQ ID NO 66298
  misc_feature (1)..(1377): Ortholog of  Ceres SEQ ID NO 12614124 as cited in SEQ ID NO 68392
atgagaggaaataaaattgttgatctagaaaaagttgaagagcttgtgcttatcaaacgatctaaatggaattttcctcccagccctcctaagtttccggtcatcggaaacttacatcaacttggagaattgcctcacaggtcacttcaacgtctagccgaaaaaaccggagatgttatgcttattcacttagggtttgtccctgtaactgttatctcatcgaaagaagcagctgaagaagtgcttagaactcatgacctaaactgttgcagcaggcctaatcttgttgggacgaggctactttctcggggttttaaagatgttggttttactccatacggtgaagagtggaaggagcggcgtaagttcttggtgcgtgagtttttctctttgaaaaaggttcagtctttcggttatatcagagaggaagaatgtaactttcttgtcaagaaactgttggaatcagccgtggatcaatctccggttgatttgagcaaaacccttttttggctaaccgcgagtgtcatgtttagagttgcttttggacagagtttccacgagagcgagttcatcgataaagacaaggtcgatgagcttgtgtttgaagccgagaccgctcaagctagtttcacttgctctgatttcttccctattgctggacttggttggctcgttgactgtatttccgggcaacacaagaggctcaaagatgttttcttcaagctggatgctctgtttcaatgttggatgtcatgcagaaacaacaatatatttctcggagggatagacaccggagctcttactatgatatgggcaatgacggagctcgctagaaacccggaagtgatgaagaaagttcaaggcgagatccgagaccgccttggcagaaataaagagagaatcaccgaagaagatatcaataaagttccttacttgaacctagtgatcaaggaaacattcagattacaccatccagttcctcttcttctcccaagggaaacaatggctcacatcaaggttcaaggctatgatattcctcccaagagacggatcttggtcaacgcttgggcgataggaagagatccaaaactctggactaacccggaagagtttaaccccgagagatttatcaatagtcctgtggattataggggacaacatttcgagctcttaccgtttgggtctggacgaaggatatgtcccgggatatcgatgggtatggctactgtagaattgggactcttgaacttactttacttcttcgactggaagttgcctgatgggatgacacataaagatatcgatactgaagaagttggcactcttacaatcgtcaagaaagtaccactaaaacttcttccagttcgatttcagtga

SEQ ID NO: 71153 - protein, 458 aa, Arabidopsis thaliana
  peptide (1)..(458): Ceres Seq. ID no. 3067644
MRGNKIVDLEKVEELVLIKRSKWNFPPSPPKFPVIGNLHQLGELPHRSLQRLAEKTGDVMLIHLGFVPVTVISSKEAAEEVLRTHDLNCCSRPNLVGTRLLSRGFKDVGFTPYGEEWKERRKFLVREFFSLKKVQSFGYIREEECNFLVKKLLESAVDQSPVDLSKTLFWLTASVMFRVAFGQSFHESEFIDKDKVDELVFEAETAQASFTCSDFFPIAGLGWLVDCISGQHKRLKDVFFKLDALFQCWMSCRNNNIFLGGIDTGALTMIWAMTELARNPEVMKKVQGEIRDRLGRNKERITEEDINKVPYLNLVIKETFRLHHPVPLLLPRETMAHIKVQGYDIPPKRRILVNAWAIGRDPKLWTNPEEFNPERFINSPVDYRGQHFELLPFGSGRRICPGISMGMATVELGLLNLLYFFDWKLPDGMTHKDIDTEEVGTLTIVKKVPLKLLPVRFQ

SEQ ID NO: 71154 - protein, 399 aa, Arabidopsis thaliana
  peptide (1)..(399): Ceres Seq. ID no. 3067645
MLIHLGFVPVTVISSKEAAEEVLRTHDLNCCSRPNLVGTRLLSRGFKDVGFTPYGEEWKERRKFLVREFFSLKKVQSFGYIREEECNFLVKKLLESAVDQSPVDLSKTLFWLTASVMFRVAFGQSFHESEFIDKDKVDELVFEAETAQASFTCSDFFPIAGLGWLVDCISGQHKRLKDVFFKLDALFQCWMSCRNNNIFLGGIDTGALTMIWAMTELARNPEVMKKVQGEIRDRLGRNKERITEEDINKVPYLNLVIKETFRLHHPVPLLLPRETMAHIKVQGYDIPPKRRILVNAWAIGRDPKLWTNPEEFNPERFINSPVDYRGQHFELLPFGSGRRICPGISMGMATVELGLLNLLYFFDWKLPDGMTHKDIDTEEVGTLTIVKKVPLKLLPVRFQ

SEQ ID NO: 71155 - protein, 283 aa, Arabidopsis thaliana
  peptide (1)..(283): Ceres Seq. ID no. 3067646
MFRVAFGQSFHESEFIDKDKVDELVFEAETAQASFTCSDFFPIAGLGWLVDCISGQHKRLKDVFFKLDALFQCWMSCRNNNIFLGGIDTGALTMIWAMTELARNPEVMKKVQGEIRDRLGRNKERITEEDINKVPYLNLVIKETFRLHHPVPLLLPRETMAHIKVQGYDIPPKRRILVNAWAIGRDPKLWTNPEEFNPERFINSPVDYRGQHFELLPFGSGRRICPGISMGMATVELGLLNLLYFFDWKLPDGMTHKDIDTEEVGTLTIVKKVPLKLLPVRFQ

SEQ ID NO: 71156 - DNA, 777 bp, Arabidopsis thaliana
  misc_feature (1)..(777): Ceres Seq. ID no. 3067976
  misc_feature (1)..(777): Ortholog of  Ceres SEQ ID NO 13599585 as cited in SEQ ID NO 988
  misc_feature (1)..(777): Ortholog of  Ceres SEQ ID NO 13594624 as cited in SEQ ID NO 55765
  misc_feature (1)..(777): Ortholog of  Ceres SEQ ID NO 15177682 as cited in SEQ ID NO 0
atgtctatatccatggcgttattctctccgccgatctcttcctcacttcagaaccctaatctcatccccaagatctcaacctctcttctctccaccaagcgtttctctctaatctccgtccctagagcttcctccgacaatggtacgacttcccccgtcgtggagattccgaagcctgcttctgtggctgtagaggaagttccagttaaatctccagccgaaagctcctccgcttctgaaaacggcgccgttggaggtgaagcgactgattcgagtactgagacggtaatcaaatatcagaatgcgaagtgggttaatggaacttgggatctgaaacagttcgagaaagatggcaaaactgattgggattctgttatcgtttctgaggcaaagaggagaaaatggcttgaagataacccggaaacaacgagtaacgacgagcttgttgtcttcgatacttcgattattccatggtgggcatggatgaagagataccatctacctgaagctgaacttctcaatggtcgtgctgcgatgatagggttcttcatggcttactttgttgatagtcttaccggagtaggacttgttgatcaaatgggaaatttcttctgcaaaacactcttgtttgtggctgtagctggagttctcttcatccgtaagaatgaagatttagacaaacttaaggatctgttcgatgagactacgttatatgacaaacaatggcaagctgcatggaaagagccagattcatcaacagtttcttcaaagaagtga

SEQ ID NO: 71157 - protein, 258 aa, Arabidopsis thaliana
  peptide (1)..(258): Ceres Seq. ID no. 3067977
MSISMALFSPPISSSLQNPNLIPKISTSLLSTKRFSLISVPRASSDNGTTSPVVEIPKPASVAVEEVPVKSPAESSSASENGAVGGEATDSSTETVIKYQNAKWVNGTWDLKQFEKDGKTDWDSVIVSEAKRRKWLEDNPETTSNDELVVFDTSIIPWWAWMKRYHLPEAELLNGRAAMIGFFMAYFVDSLTGVGLVDQMGNFFCKTLLFVAVAGVLFIRKNEDLDKLKDLFDETTLYDKQWQAAWKEPDSSTVSSKK

SEQ ID NO: 71158 - protein, 254 aa, Arabidopsis thaliana
  peptide (1)..(254): Ceres Seq. ID no. 3067978
MALFSPPISSSLQNPNLIPKISTSLLSTKRFSLISVPRASSDNGTTSPVVEIPKPASVAVEEVPVKSPAESSSASENGAVGGEATDSSTETVIKYQNAKWVNGTWDLKQFEKDGKTDWDSVIVSEAKRRKWLEDNPETTSNDELVVFDTSIIPWWAWMKRYHLPEAELLNGRAAMIGFFMAYFVDSLTGVGLVDQMGNFFCKTLLFVAVAGVLFIRKNEDLDKLKDLFDETTLYDKQWQAAWKEPDSSTVSSKK

SEQ ID NO: 71159 - DNA, 1440 bp, Arabidopsis thaliana
  misc_feature (1)..(1440): Ceres Seq. ID no. 3068637
  misc_feature (1)..(1440): Ortholog of  Ceres SEQ ID NO 14315257 as cited in SEQ ID NO 52552
  misc_feature (1)..(1440): Ortholog of  Ceres SEQ ID NO 13597574 as cited in SEQ ID NO 64677
  misc_feature (1)..(1440): Ortholog of  Ceres SEQ ID NO 13597843 as cited in SEQ ID NO 64850
  misc_feature (1)..(1440): Ortholog of  Ceres SEQ ID NO 13597678 as cited in SEQ ID NO 65375
  misc_feature (1)..(1440): Ortholog of  Ceres SEQ ID NO 13596180 as cited in SEQ ID NO 67941
  misc_feature (1)..(1440): Ortholog of  Ceres SEQ ID NO 13591190 as cited in SEQ ID NO 68044
  misc_feature (1)..(1440): Ortholog of  Ceres SEQ ID NO 13595961 as cited in SEQ ID NO 68223
atgaaaatagagctagtattcattccctctccggcaattagtcatctcatggcgacggtagagatggcggagcaactagttgataaaaacgacaacctctctatcaccgtaatcatcatatcttttagttctaaaaatacatccatgatcacctctcttacatccaacaaccgcctccggtacgaaataatctccggaggagatcaacaaccaacggagctcaaagcaactgattcccacatccaaagtctaaagccactggtgagagacgcggttgctaaactcgtagattccactctaccagacgcgcctcgtcttgcgggattcgttgttgacatgtactgcacgtcgatgatcgatgtcgctaacgaatttggcgtccctagttacttgttttacacctctaacgctggatttcttggacttttgcttcacattcagttcatgtacgatgcagaggatatctatgacatgagcgaattagaagactctgacgtagagttggtggttccgagtttgactagtccttatccgttgaaatgtcttccttacattttcaaatcaaaagagtggctcactttttttgtaactcaagcgagaagattcagagaaactaagggcattttggtaaacacggttcctgacttggaacctcaagcgttgacgtttctttccaatggtaacattccacgtgcttacccagtaggaccattgttgcatctcaaaaacgtaaattgtgattacgtggacaagaagcaatcggagattttacggtggctagacgagcaaccgccaagatctgtagtgttcctctgtttcgggagcatgggagggttcagtgaggaacaagtgagagaaaccgcattagctctcgatcgaagcggccaccggtttctttggtctctccgtcgtgcatctccgaatatattgagagagcctcccggagaattcacaaacctagaggagattctcccagaagggtttttcgatcggacggctaacagaggaaaggttatcggatgggctgaacaggtggccatattggcgaagccggcgatcggaggttttgtttctcacggcggatggaattcgacgttggagagtttgtggtttggtgttccgatggcgatttggccgctttacgctgaacagaagtttaacgctttcgagatggtggaagagcttggtttggctgtggagatcaagaagcattggcgaggagatcttttgttggggaggtcggagattgtgacggcggaggagattgagaaaggaatcatatgtttgatggagcaagacagtgacgtcaggaagagagtgaatgagatcagcgagaagtgccacgtggctttaatggacggtggatcgtcagaaactgctttgaaaagatttattcaagacgtaacggagaatattgcttggtcggaaactgaaagctag

SEQ ID NO: 71160 - protein, 479 aa, Arabidopsis thaliana
  peptide (1)..(479): Ceres Seq. ID no. 3068638
MKIELVFIPSPAISHLMATVEMAEQLVDKNDNLSITVIIISFSSKNTSMITSLTSNNRLRYEIISGGDQQPTELKATDSHIQSLKPLVRDAVAKLVDSTLPDAPRLAGFVVDMYCTSMIDVANEFGVPSYLFYTSNAGFLGLLLHIQFMYDAEDIYDMSELEDSDVELVVPSLTSPYPLKCLPYIFKSKEWLTFFVTQARRFRETKGILVNTVPDLEPQALTFLSNGNIPRAYPVGPLLHLKNVNCDYVDKKQSEILRWLDEQPPRSVVFLCFGSMGGFSEEQVRETALALDRSGHRFLWSLRRASPNILREPPGEFTNLEEILPEGFFDRTANRGKVIGWAEQVAILAKPAIGGFVSHGGWNSTLESLWFGVPMAIWPLYAEQKFNAFEMVEELGLAVEIKKHWRGDLLLGRSEIVTAEEIEKGIICLMEQDSDVRKRVNEISEKCHVALMDGGSSETALKRFIQDVTENIAWSETES

SEQ ID NO: 71161 - protein, 463 aa, Arabidopsis thaliana
  peptide (1)..(463): Ceres Seq. ID no. 3068639
MATVEMAEQLVDKNDNLSITVIIISFSSKNTSMITSLTSNNRLRYEIISGGDQQPTELKATDSHIQSLKPLVRDAVAKLVDSTLPDAPRLAGFVVDMYCTSMIDVANEFGVPSYLFYTSNAGFLGLLLHIQFMYDAEDIYDMSELEDSDVELVVPSLTSPYPLKCLPYIFKSKEWLTFFVTQARRFRETKGILVNTVPDLEPQALTFLSNGNIPRAYPVGPLLHLKNVNCDYVDKKQSEILRWLDEQPPRSVVFLCFGSMGGFSEEQVRETALALDRSGHRFLWSLRRASPNILREPPGEFTNLEEILPEGFFDRTANRGKVIGWAEQVAILAKPAIGGFVSHGGWNSTLESLWFGVPMAIWPLYAEQKFNAFEMVEELGLAVEIKKHWRGDLLLGRSEIVTAEEIEKGIICLMEQDSDVRKRVNEISEKCHVALMDGGSSETALKRFIQDVTENIAWSETES

SEQ ID NO: 71162 - protein, 458 aa, Arabidopsis thaliana
  peptide (1)..(458): Ceres Seq. ID no. 3068640
MAEQLVDKNDNLSITVIIISFSSKNTSMITSLTSNNRLRYEIISGGDQQPTELKATDSHIQSLKPLVRDAVAKLVDSTLPDAPRLAGFVVDMYCTSMIDVANEFGVPSYLFYTSNAGFLGLLLHIQFMYDAEDIYDMSELEDSDVELVVPSLTSPYPLKCLPYIFKSKEWLTFFVTQARRFRETKGILVNTVPDLEPQALTFLSNGNIPRAYPVGPLLHLKNVNCDYVDKKQSEILRWLDEQPPRSVVFLCFGSMGGFSEEQVRETALALDRSGHRFLWSLRRASPNILREPPGEFTNLEEILPEGFFDRTANRGKVIGWAEQVAILAKPAIGGFVSHGGWNSTLESLWFGVPMAIWPLYAEQKFNAFEMVEELGLAVEIKKHWRGDLLLGRSEIVTAEEIEKGIICLMEQDSDVRKRVNEISEKCHVALMDGGSSETALKRFIQDVTENIAWSETES

SEQ ID NO: 71163 - DNA, 2154 bp, Arabidopsis thaliana
  misc_feature (1)..(2154): Ceres Seq. ID no. 3070337
  misc_feature (1)..(2154): Ortholog of  Ceres SEQ ID NO 14307164 as cited in SEQ ID NO 54775
  misc_feature (1)..(2154): Ortholog of  Ceres SEQ ID NO 13654989 as cited in SEQ ID NO 63117
  misc_feature (1)..(2154): Ortholog of  Ceres SEQ ID NO 13655640 as cited in SEQ ID NO 63844
  misc_feature (1)..(2154): Ortholog of  Ceres SEQ ID NO 13657138 as cited in SEQ ID NO 65923
  misc_feature (1)..(2154): Ortholog of  Ceres SEQ ID NO 13584744 as cited in SEQ ID NO 69137
atgtcatcggcgccgcctcccggtggtactccgtcacctcctccacagcctctcccaattcctcctccgcctcagcctctgcccgttactcctccacctccacctactgcccttcctcccgcccttccccctccacctccgcctactgcccttccacccgcccttcctcctccacctccacctaccaccgttcctcctatacctccctctacgccttctcccccacctcccttgaccccttctcctctgcctccatctcccacaactccttcacctcccttgacgccttctcccacaactccttcacctcccttgactccttctcctccacctgccatcactccttcacctcctttgacaccatctcctctgcctccgtctcccaccaccccttcacctccgcctccatctccaagcattccttcacctcccttgacgccttcccctccaccgtcttctcccttgaggccttcttctcctccaccgccctctcccgccactccttcaactccgccaagatctccgccacctccctcaacacccactcctcctcctcgggtaggcagtctgagccctccacctccagcgagtccctctggcgggagatctcctagtactccatctaccactccaggctcttctccaccggcacaatcttccaaagaattatcaaagggagctatggtcgggatcgccataggaggaggatttgtgcttcttgtggcattggctttgatatttttcctttgtaagaagaaacgacgaagagacaatgaagcaccccctgctcccatagatggagtcccttacggtggtcagcaacaacaaaatgcatcacgacgatcagatcacgtggtgatgtcagtgccaccaccgaagtctccctcctctgcaccaccacgtccaccgcatttcatgagcagcggcagcagcggagactacgactcaaactactcggatcaatcagttcttcctccaccatcaccagggcttgcattaggcttaggcatatatcaaggcactttcaattacgaggagctatctagagccaccaatggattctctgaggccaatttgttaggacaaggcggtttcggatacgtgttcaaaggtatgttacgtaatgggaaagaagttgctgtgaaacaattgaaagaagggagttctcaaggagaaagagagtttcaagcagaggttgggatcattagccgagtacatcatagacatttggttgctcttgtcggttattgcatcgccgatgctcaaagattgcttgtctatgagtttgttcccaacaacactctcgagtttcacctccatggaaagggacggcctacgatggaatggagttcaagattgaagattgctgttggttctgccaaaggattgtcttatcttcatgaaaattgcaatcctaaaattattcaccgtgatatcaaggcgtcaaacatattgatagatttcaaatttgaagcaaaggttgctgattttggtcttgccaagattgcttctgatacaaatactcatgtatctacacgtgtgatgggaacttttgggtatttggctccggaatatgcttcaagcggaaaactcacggaaaagtctgacgttttctcatttggcgttgtacttctggagctaataactggacgtcgccctattgatgtaaacaatgtccatgcagataacagcttggttgattgggcacgacctttgcttaaccaagtatctgaattaggaaactttgaggttgtggttgataaaaaactgaataatgagtatgacaaagaagagatggctcgcatggttgcttgtgccgcagcttgtgttcggtccacagctccacgtagacctcgcatggatcaggttgcacgtgtgctagaaggaaacatatcaccatcagatctaaaccaaggaatcacaccgggacacagcaatgtgtatggctcatctggaggaagcacagattatgactcgagccaagacaatgaaggcatgaacaagtttaggaaagtgggacttgagactcaagatttatatagtaacccaattagtgaatatgatttgtacccgtcctggtcgagcactgacggtcagaccacacagggaaaggcgaccggcaatattaaaagacccggtcaaggttatggttaa

SEQ ID NO: 71164 - protein, 717 aa, Arabidopsis thaliana
  peptide (1)..(717): Ceres Seq. ID no. 3070338
MSSAPPPGGTPSPPPQPLPIPPPPQPLPVTPPPPPTALPPALPPPPPPTALPPALPPPPPPTTVPPIPPSTPSPPPPLTPSPLPPSPTTPSPPLTPSPTTPSPPLTPSPPPAITPSPPLTPSPLPPSPTTPSPPPPSPSIPSPPLTPSPPPSSPLRPSSPPPPSPATPSTPPRSPPPPSTPTPPPRVGSLSPPPPASPSGGRSPSTPSTTPGSSPPAQSSKELSKGAMVGIAIGGGFVLLVALALIFFLCKKKRRRDNEAPPAPIDGVPYGGQQQQNASRRSDHVVMSVPPPKSPSSAPPRPPHFMSSGSSGDYDSNYSDQSVLPPPSPGLALGLGIYQGTFNYEELSRATNGFSEANLLGQGGFGYVFKGMLRNGKEVAVKQLKEGSSQGEREFQAEVGIISRVHHRHLVALVGYCIADAQRLLVYEFVPNNTLEFHLHGKGRPTMEWSSRLKIAVGSAKGLSYLHENCNPKIIHRDIKASNILIDFKFEAKVADFGLAKIASDTNTHVSTRVMGTFGYLAPEYASSGKLTEKSDVFSFGVVLLELITGRRPIDVNNVHADNSLVDWARPLLNQVSELGNFEVVVDKKLNNEYDKEEMARMVACAAACVRSTAPRRPRMDQVARVLEGNISPSDLNQGITPGHSNVYGSSGGSTDYDSSQDNEGMNKFRKVGLETQDLYSNPISEYDLYPSWSSTDGQTTQGKATGNIKRPGQGYG

SEQ ID NO: 71165 - protein, 490 aa, Arabidopsis thaliana
  peptide (1)..(490): Ceres Seq. ID no. 3070339
MVGIAIGGGFVLLVALALIFFLCKKKRRRDNEAPPAPIDGVPYGGQQQQNASRRSDHVVMSVPPPKSPSSAPPRPPHFMSSGSSGDYDSNYSDQSVLPPPSPGLALGLGIYQGTFNYEELSRATNGFSEANLLGQGGFGYVFKGMLRNGKEVAVKQLKEGSSQGEREFQAEVGIISRVHHRHLVALVGYCIADAQRLLVYEFVPNNTLEFHLHGKGRPTMEWSSRLKIAVGSAKGLSYLHENCNPKIIHRDIKASNILIDFKFEAKVADFGLAKIASDTNTHVSTRVMGTFGYLAPEYASSGKLTEKSDVFSFGVVLLELITGRRPIDVNNVHADNSLVDWARPLLNQVSELGNFEVVVDKKLNNEYDKEEMARMVACAAACVRSTAPRRPRMDQVARVLEGNISPSDLNQGITPGHSNVYGSSGGSTDYDSSQDNEGMNKFRKVGLETQDLYSNPISEYDLYPSWSSTDGQTTQGKATGNIKRPGQGYG

SEQ ID NO: 71166 - protein, 431 aa, Arabidopsis thaliana
  peptide (1)..(431): Ceres Seq. ID no. 3070340
MSVPPPKSPSSAPPRPPHFMSSGSSGDYDSNYSDQSVLPPPSPGLALGLGIYQGTFNYEELSRATNGFSEANLLGQGGFGYVFKGMLRNGKEVAVKQLKEGSSQGEREFQAEVGIISRVHHRHLVALVGYCIADAQRLLVYEFVPNNTLEFHLHGKGRPTMEWSSRLKIAVGSAKGLSYLHENCNPKIIHRDIKASNILIDFKFEAKVADFGLAKIASDTNTHVSTRVMGTFGYLAPEYASSGKLTEKSDVFSFGVVLLELITGRRPIDVNNVHADNSLVDWARPLLNQVSELGNFEVVVDKKLNNEYDKEEMARMVACAAACVRSTAPRRPRMDQVARVLEGNISPSDLNQGITPGHSNVYGSSGGSTDYDSSQDNEGMNKFRKVGLETQDLYSNPISEYDLYPSWSSTDGQTTQGKATGNIKRPGQGYG

SEQ ID NO: 71167 - DNA, 1128 bp, Arabidopsis thaliana
  misc_feature (1)..(1128): Ceres Seq. ID no. 3070626
  misc_feature (1)..(1128): Ortholog of  Ceres SEQ ID NO 14310520 as cited in SEQ ID NO 58736
acaacaatctcactttgtctttttttctctctctctctctctctcatagaaaaggaagtggtggaagatgccgaggccagggccaagaccgtacgactgtatcagaagagcttggcatagtgacagacaccaacccatgaggggtttgctcatccaagagattttcaggtcatcatcatcatctctctctcactttggatatctatctgtgtatctataggtttgtgtgtgtgcatgtctttctttagctcaattgttctttgaactatttgtaggattgtttgtgagattcacagccaatccaccaggaaaaacacagaatggcaagagaagctccctgttgttgtcttgagagctgaagaaatcatgtattccaaagccaattctgaggctgagtatatggacatgaagacccttttagaccgtacaaacgacgccatcaacacaatcatacgacttgatgagaccaccgaaacaggggaatttcttcagccttgtattgaagctgcattgcatttggggtgcacaccaaggagagcttcaaggagccaacggaacattaacccgagatgttatcttagccaagactcaactaacttggacaacatgttgtcccaagtattcatgaaaccaaacaactttgctccaaagaatcttgcagtagcacaagagaattgccctgtctccaagtactctgcctaccctttatgctattcattccggccaatcagtgactcgtgtaagtccaagaacagtagaccggcgagtctcattgacgcaacaaatggcattacctttggtgggtgtgaatgtgatctatctctgcgcttaggtcctcttggacctcctactcaaaaacgaagtaagataagcagcaacaataacaactgaaaaggagagcaagattgggttttgattagcaagtcttgtgttagaagaatgtgtgcttagttaggccttttagtctcctctctagaccctaggtttaggtttgtgaacatgtaaatagagagacgaagtaacaaaacaggagatgaagtcgttttcttctacctgcatcaatctcgaatcatcagacttcacgaatgtatttttacattgcaacactgttcgagaaatatccattcc

SEQ ID NO: 71168 - protein, 174 aa, Arabidopsis thaliana; identical to SEQ ID NO: 40462
  peptide (1)..(174): Ceres Seq. ID no. 3070627

SEQ ID NO: 71169 - protein, 163 aa, Arabidopsis thaliana; identical to SEQ ID NO: 40463
  peptide (1)..(163): Ceres Seq. ID no. 3070628

SEQ ID NO: 71170 - protein, 161 aa, Arabidopsis thaliana; identical to SEQ ID NO: 40464
  peptide (1)..(161): Ceres Seq. ID no. 3070629

SEQ ID NO: 71171 - DNA, 693 bp, Arabidopsis thaliana
  misc_feature (1)..(693): Ceres Seq. ID no. 3071019
  misc_feature (1)..(693): Ortholog of  Ceres SEQ ID NO 13505291 as cited in SEQ ID NO 56614
  misc_feature (1)..(693): Ortholog of  Ceres SEQ ID NO 13596535 as cited in SEQ ID NO 62321
  misc_feature (1)..(693): Ortholog of  Ceres SEQ ID NO 13597394 as cited in SEQ ID NO 63457
atggatccagatgcagtcaaatcgactctctcgaatctagcatttggaaatgtaatggcggctgctgcaagaaattatcaaaaggaagttcttgcaaatgagaaggcgcaaggatcaaatcctgttaatgaagaggttgatcttgatgaacttatggatgatccagagctagaaagattgcacgcagataggattgcagcactaaagagagaggttgagaagagagaatcgtttaaaagacaagggcatggtgaatatcgagaggtgagtgaaggagatttcttgggtgaagtcaccaggagtgagaaagtgatatgtcatttctaccataaggaattttaccggtgcaagattatggacaagcatctgaaaactcttgcacctagacatgtggacacaaagttcattaaagtggacgcagagaatgctcctttctttgtcacgaagcttgcaataaagactttgccttgcgttgtgcttttcagcaagggagttgcgatggataggctagttgggttccaggatctgggaaccaaggacgatttcacaacgaataaactagagaacgttcttcttaaaaagggaatgctcagcaagaagaagaaagaggaagatgatgaagacgccgaatatcaagagagcatacggaggtctgttaggtcttcagagaatctggactctgattctgactga

SEQ ID NO: 71172 - protein, 230 aa, Arabidopsis thaliana
  peptide (1)..(230): Ceres Seq. ID no. 3071020
MDPDAVKSTLSNLAFGNVMAAAARNYQKEVLANEKAQGSNPVNEEVDLDELMDDPELERLHADRIAALKREVEKRESFKRQGHGEYREVSEGDFLGEVTRSEKVICHFYHKEFYRCKIMDKHLKTLAPRHVDTKFIKVDAENAPFFVTKLAIKTLPCVVLFSKGVAMDRLVGFQDLGTKDDFTTNKLENVLLKKGMLSKKKKEEDDEDAEYQESIRRSVRSSENLDSDSD

SEQ ID NO: 71173 - protein, 212 aa, Arabidopsis thaliana
  peptide (1)..(212): Ceres Seq. ID no. 3071021
MAAAARNYQKEVLANEKAQGSNPVNEEVDLDELMDDPELERLHADRIAALKREVEKRESFKRQGHGEYREVSEGDFLGEVTRSEKVICHFYHKEFYRCKIMDKHLKTLAPRHVDTKFIKVDAENAPFFVTKLAIKTLPCVVLFSKGVAMDRLVGFQDLGTKDDFTTNKLENVLLKKGMLSKKKKEEDDEDAEYQESIRRSVRSSENLDSDSD

SEQ ID NO: 71174 - protein, 179 aa, Arabidopsis thaliana
  peptide (1)..(179): Ceres Seq. ID no. 3071022
MDDPELERLHADRIAALKREVEKRESFKRQGHGEYREVSEGDFLGEVTRSEKVICHFYHKEFYRCKIMDKHLKTLAPRHVDTKFIKVDAENAPFFVTKLAIKTLPCVVLFSKGVAMDRLVGFQDLGTKDDFTTNKLENVLLKKGMLSKKKKEEDDEDAEYQESIRRSVRSSENLDSDSD

SEQ ID NO: 71175 - DNA, 282 bp, Arabidopsis thaliana
  misc_feature (1)..(282): Ceres Seq. ID no. 3071450
  misc_feature (1)..(282): Ortholog of  Ceres SEQ ID NO 12578784 as cited in SEQ ID NO 20729
atgggattctctggcttagctccgattcttcacaagctgataatcttttgggaccaacctgaagcccttcacacgacaggttatgagattttgatgggtttgctttatgggttaggagctctggtttatgcaactaggatcccagagagatggatgccgggtaaattcgatatagcaggacatagccatcagttgtttcatgttctggtagttgctggtgcgttcacgcactatagagctgggctagtgtatcttaagtggagagatattgaaggatgttga

SEQ ID NO: 71176 - protein, 93 aa, Arabidopsis thaliana
  peptide (1)..(93): Ceres Seq. ID no. 3071451
MGFSGLAPILHKLIIFWDQPEALHTTGYEILMGLLYGLGALVYATRIPERWMPGKFDIAGHSHQLFHVLVVAGAFTHYRAGLVYLKWRDIEGC

SEQ ID NO: 71177 - protein, 62 aa, Arabidopsis thaliana; identical to SEQ ID NO: 69645
  peptide (1)..(62): Ceres Seq. ID no. 3071452

SEQ ID NO: 71178 - DNA, 804 bp, Arabidopsis thaliana
  misc_feature (1)..(804): Ceres Seq. ID no. 3073080
  misc_feature (1)..(804): Ortholog of  Ceres SEQ ID NO 12617391 as cited in SEQ ID NO 64114
  misc_feature (1)..(804): Ortholog of  Ceres SEQ ID NO 13595922 as cited in SEQ ID NO 69293
  misc_feature (1)..(804): Ortholog of  Ceres SEQ ID NO 12635496 as cited in SEQ ID NO 0
atggataccaacgcaaaaacaattttcttcatggctatgtgtttcatctatctatctttccctaatatttcacacgctcattctgaagtcgacgacgaaactccatttacttacgaacaaaaaacggaaaagggaccagagggatggggcaaaataaatccgcactggaaagtttgtaacaccggaagatatcaatccccgatcgatcttactaacgaaagagtcagtcttattcatgatcaagcatggacaagacaatataaaccagctccggctgtaattacaaacagaggccatgacattatggtatcatggaaaggagatgctgggaagatgacaatacggaaaacggattttaatttggtgcaatgccattggcattcaccttctgagcataccgttaacggaactaggtacgacctagagcttcacatggttcacacgagtgcacgaggcagaactgcggttatcggagttctttacaaattaggcgaacctaatgaattcctcaccaagctactaaatggaataaaagcagtgggaaataaagagataaatctagggatgattgatccacgagagattaggtttcaaacaagaaaattctatagatacattggctctctcactgttcctccttgcactgaaggcgtcatttggactgtcgtcaaaagggtgaacacaatatcaatggagcaaattacagctcttaggcaagccgttgacgatggatttgagacaaattcaagaccggttcaagactcaaagggaagatcagtttggttctatgatccaaatgtttga

SEQ ID NO: 71179 - protein, 267 aa, Arabidopsis thaliana
  peptide (1)..(267): Ceres Seq. ID no. 3073081
MDTNAKTIFFMAMCFIYLSFPNISHAHSEVDDETPFTYEQKTEKGPEGWGKINPHWKVCNTGRYQSPIDLTNERVSLIHDQAWTRQYKPAPAVITNRGHDIMVSWKGDAGKMTIRKTDFNLVQCHWHSPSEHTVNGTRYDLELHMVHTSARGRTAVIGVLYKLGEPNEFLTKLLNGIKAVGNKEINLGMIDPREIRFQTRKFYRYIGSLTVPPCTEGVIWTVVKRVNTISMEQITALRQAVDDGFETNSRPVQDSKGRSVWFYDPNV

SEQ ID NO: 71180 - protein, 257 aa, Arabidopsis thaliana
  peptide (1)..(257): Ceres Seq. ID no. 3073082
MAMCFIYLSFPNISHAHSEVDDETPFTYEQKTEKGPEGWGKINPHWKVCNTGRYQSPIDLTNERVSLIHDQAWTRQYKPAPAVITNRGHDIMVSWKGDAGKMTIRKTDFNLVQCHWHSPSEHTVNGTRYDLELHMVHTSARGRTAVIGVLYKLGEPNEFLTKLLNGIKAVGNKEINLGMIDPREIRFQTRKFYRYIGSLTVPPCTEGVIWTVVKRVNTISMEQITALRQAVDDGFETNSRPVQDSKGRSVWFYDPNV

SEQ ID NO: 71181 - protein, 255 aa, Arabidopsis thaliana
  peptide (1)..(255): Ceres Seq. ID no. 3073083
MCFIYLSFPNISHAHSEVDDETPFTYEQKTEKGPEGWGKINPHWKVCNTGRYQSPIDLTNERVSLIHDQAWTRQYKPAPAVITNRGHDIMVSWKGDAGKMTIRKTDFNLVQCHWHSPSEHTVNGTRYDLELHMVHTSARGRTAVIGVLYKLGEPNEFLTKLLNGIKAVGNKEINLGMIDPREIRFQTRKFYRYIGSLTVPPCTEGVIWTVVKRVNTISMEQITALRQAVDDGFETNSRPVQDSKGRSVWFYDPNV

SEQ ID NO: 71182 - DNA, 732 bp, Arabidopsis thaliana
  misc_feature (1)..(732): Ceres Seq. ID no. 3074320
  misc_feature (1)..(732): Ortholog of  Ceres SEQ ID NO 13595658 as cited in SEQ ID NO 59888
  misc_feature (1)..(732): Ortholog of  Ceres SEQ ID NO 13661330 as cited in SEQ ID NO 61614
  misc_feature (1)..(732): Ortholog of  Ceres SEQ ID NO 13596025 as cited in SEQ ID NO 62024
  misc_feature (1)..(732): Ortholog of  Ceres SEQ ID NO 13662324 as cited in SEQ ID NO 62162
  misc_feature (1)..(732): Ortholog of  Ceres SEQ ID NO 12625713 as cited in SEQ ID NO 64160
atggcgaaaaggctgccattgattttcctccttacttcacattttttagtatcgggagtgttgtccatgagtatccttaccatagagaacaagtgcaatcacacagtttggccagttatcttctcatggaacgttgactcacaagtctccccaacaggctttgctctcagaagaggggaggctcgagccctacaggcgccatcttcatggtacggtcttatctcggctaggacgctatgctccatcgactcaacaggaacattctcttgcgccacaggagactgcgaatcgggtacgatcgagtgtcctggcaattacggttgggctccggtgacttatgtctactttagaatgaacagctacaccatcagtgttgagtacggttacaaccttccactaatggtggtcccttcacagcgtagccggacatgtatcagcgctggttgcgttgttgaactgaaaaagacttgtccaaaagatcttatgaaaatgtccagagaaaatctagtcgcctgtagtagcacgtgcatggagtttgatactccggaggcttgttgcacccgagacttcaagtcaaagcaaaactgcaagccgacagtgtacacgcagaactttgagcgagcttgcccactcgctcatatctacgcctatgatgataacaatagcaccgttacatgcctaaactctactgactacgtcatcacgttttgtccttcaaacaaaactaattag

SEQ ID NO: 71183 - protein, 243 aa, Arabidopsis thaliana
  peptide (1)..(243): Ceres Seq. ID no. 3074321
MAKRLPLIFLLTSHFLVSGVLSMSILTIENKCNHTVWPVIFSWNVDSQVSPTGFALRRGEARALQAPSSWYGLISARTLCSIDSTGTFSCATGDCESGTIECPGNYGWAPVTYVYFRMNSYTISVEYGYNLPLMVVPSQRSRTCISAGCVVELKKTCPKDLMKMSRENLVACSSTCMEFDTPEACCTRDFKSKQNCKPTVYTQNFERACPLAHIYAYDDNNSTVTCLNSTDYVITFCPSNKTN

SEQ ID NO: 71184 - protein, 221 aa, Arabidopsis thaliana
  peptide (1)..(221): Ceres Seq. ID no. 3074322
MSILTIENKCNHTVWPVIFSWNVDSQVSPTGFALRRGEARALQAPSSWYGLISARTLCSIDSTGTFSCATGDCESGTIECPGNYGWAPVTYVYFRMNSYTISVEYGYNLPLMVVPSQRSRTCISAGCVVELKKTCPKDLMKMSRENLVACSSTCMEFDTPEACCTRDFKSKQNCKPTVYTQNFERACPLAHIYAYDDNNSTVTCLNSTDYVITFCPSNKTN

SEQ ID NO: 71185 - protein, 126 aa, Arabidopsis thaliana
  peptide (1)..(126): Ceres Seq. ID no. 3074323
MNSYTISVEYGYNLPLMVVPSQRSRTCISAGCVVELKKTCPKDLMKMSRENLVACSSTCMEFDTPEACCTRDFKSKQNCKPTVYTQNFERACPLAHIYAYDDNNSTVTCLNSTDYVITFCPSNKTN

SEQ ID NO: 71186 - DNA, 864 bp, Arabidopsis thaliana
  misc_feature (1)..(864): Ceres Seq. ID no. 3074433
  misc_feature (1)..(864): Ortholog of  Ceres SEQ ID NO 14312324 as cited in SEQ ID NO 60453
  misc_feature (1)..(864): Ortholog of  Ceres SEQ ID NO 12624791 as cited in SEQ ID NO 63574
  misc_feature (1)..(864): Ortholog of  Ceres SEQ ID NO 12780574 as cited in SEQ ID NO 65624
atggtgactgtaaaccctagccaagctcattgtttgcctatgaaaatgagtctaccgggtttcaatactcttccccacacggcaacaacgataccggtttccatacggagcaataggacgatgtcgttttttgaggatccaacaaagaaggttagaaagccttacactatcaccaaatctagagagaactggacggagcaagaacacgacaagttccttgaagcccttcatctatttgaccgggattggaagaaaataaaggcctttgttggatcaaaaacagtgatacagatacgaagccacgcacagaagtactttctcaaagttcagaagaatgggactaaagaacatctcccacctcctcgaccaaagaggaaagccaatcacccatatccacaaaaagctcctaaatttactctttcttcttcaaacgcattatttcaacatgactacttatacaacactaattcacatccggtgattagcaccacccgtaagcatggattagtgcattgcgatgttagtataccaagttctgttatcaaagaggaatttggtgtctcagagaactgttgcagcactagtagtagtagagataagcagaggactagaatcgttacagagacaaatgaccaagaaagttgtggaaagccacatagagtggcgccaaatttcgctgaagtttacaattttataggaagtgtgtttgatcctaaaacaacaggtcatgtcaagagattaaaggaaatggatccaataaatcttgagacggttctcttactgatgaaaaatttatctgtaaacctgacgagtcccgagtttgatgaacaacggaagttgatatcatcttacaacgccagttag

SEQ ID NO: 71187 - protein, 287 aa, Arabidopsis thaliana
  peptide (1)..(287): Ceres Seq. ID no. 3074434
MVTVNPSQAHCLPMKMSLPGFNTLPHTATTIPVSIRSNRTMSFFEDPTKKVRKPYTITKSRENWTEQEHDKFLEALHLFDRDWKKIKAFVGSKTVIQIRSHAQKYFLKVQKNGTKEHLPPPRPKRKANHPYPQKAPKFTLSSSNALFQHDYLYNTNSHPVISTTRKHGLVHCDVSIPSSVIKEEFGVSENCCSTSSSRDKQRTRIVTETNDQESCGKPHRVAPNFAEVYNFIGSVFDPKTTGHVKRLKEMDPINLETVLLLMKNLSVNLTSPEFDEQRKLISSYNAS

SEQ ID NO: 71188 - protein, 274 aa, Arabidopsis thaliana
  peptide (1)..(274): Ceres Seq. ID no. 3074435
MKMSLPGFNTLPHTATTIPVSIRSNRTMSFFEDPTKKVRKPYTITKSRENWTEQEHDKFLEALHLFDRDWKKIKAFVGSKTVIQIRSHAQKYFLKVQKNGTKEHLPPPRPKRKANHPYPQKAPKFTLSSSNALFQHDYLYNTNSHPVISTTRKHGLVHCDVSIPSSVIKEEFGVSENCCSTSSSRDKQRTRIVTETNDQESCGKPHRVAPNFAEVYNFIGSVFDPKTTGHVKRLKEMDPINLETVLLLMKNLSVNLTSPEFDEQRKLISSYNAS

SEQ ID NO: 71189 - protein, 272 aa, Arabidopsis thaliana
  peptide (1)..(272): Ceres Seq. ID no. 3074436
MSLPGFNTLPHTATTIPVSIRSNRTMSFFEDPTKKVRKPYTITKSRENWTEQEHDKFLEALHLFDRDWKKIKAFVGSKTVIQIRSHAQKYFLKVQKNGTKEHLPPPRPKRKANHPYPQKAPKFTLSSSNALFQHDYLYNTNSHPVISTTRKHGLVHCDVSIPSSVIKEEFGVSENCCSTSSSRDKQRTRIVTETNDQESCGKPHRVAPNFAEVYNFIGSVFDPKTTGHVKRLKEMDPINLETVLLLMKNLSVNLTSPEFDEQRKLISSYNAS

SEQ ID NO: 71190 - DNA, 2277 bp, Arabidopsis thaliana
  misc_feature (1)..(2277): Ceres Seq. ID no. 3075485
  misc_feature (1)..(2277): Ortholog of  Ceres SEQ ID NO 14313151 as cited in SEQ ID NO 54664
atggtaggaggaagaagattagggaagagaggaagccctttgttgagatggagtgtgaaacaagaaagcttcagccatggattctcaaaatctgacctccaagctctctcttccatttgcgacgctattatgcctcctgttccattagagagcttaaatcttgagatgaagttgaaggttttgcgcaacgatgcactcttatctttcttcaagtcttcttcttctgagtctcatgttcgaccagatgaggtggcagagctactggcgaccaaggcaataccattgacagttttagtggtgagaatagttttgagaatactcacattcagactggggacgttactgctttgcgggttagtctgtcttgacaagaagcattggccttttcttctcaagttctctgaaatgtccctggagaagagggaaaaggttcttcagagatggaacacacagtggtataacccactagcgagaatcggctttatgatgatcaaagccatcttcttgttctactacttcacatggacaaatgaaaattcagaaaacccagtatgggatgcaattaattatagcgtggaaattggtgaaaatgaggacatggaacaaaaggaaagacctctagatgaagggatcatcgagactgcaaaagaagatgagatgaccatcaagcaacgtatgatcaacaaaggcctcaaagtcacagaagacagagaaagggacacttacaagatcgagtgtgatgcagtggtagtgggttctggctgtggcggaggggttgcagctgcaattctagcaaagtcgggccttagggtggtagttatcgagaaggggaactactttgcccccagagactactcagctctcgagggcccttccatgtttgagctgtttgagtccaatagcttgatgatgactcatgatggcaggttccggttcatggcaggatcaacagtcggtggtggctctgtggtaaactgggcagcgtccttaaaaacacctgatgctatcatcgaagaatggtcagtacatcgagggatttcaatatattctagtgagaaatataaggcggcgatgggtattgtctgcaagaggttaggtgtcactgagaaaatcatcagagaagggtttcagaaccagattctgcggaaaggttgcgagaagcttggtttggatgtgacaatagtgccaaggaattcaacagagaaacattattgcggtagttgctcgtatggatgcccaaccggagagaagagagggacagattcaacctggctggttgatgcagttaacaacaatgctgtgatcctaacacagtgcaaggctgagaaactaatcttggcggataacgatgctaacaaaagagaggagagcggacgaagaaaaagatgtttgggagtcgcagcctctctatcccaccaaaccagaaagaagcttcagatcaatgccaaagtgacaattgtggcttgcggctcgcttaagacaccaggattgttggcttcaagcgggttgaagaattcaaacatcagtcgcggtctccatatccaccctatcatgatggcttggggctacttcccagaaaagaattcagaattggaaggagcggctcatgagggagagatcgtcacttcattgcattatgtgcatccaatggactccactacacctaacatcacactggagactcctgctataggaccaggtacgttcgcagctctgaccccgtgggtctctgggtcagacatgaaagaaagaatggccaaatacgcaagaacagctcatatttttgccatggtgagagatgaaggagttggagaggtgaaaggagacattgtcaaatacagattaaccaaagcggacgaagagaatctgacaattgggttaaagcaagcactgaggatcctagtagcagcaggagcagcggaggtaggcacatacaggagcgacgggcagagaatgaagtgtgatggaatcaaacagaaagatctagaggcatttttagataccgtaaacgcgccacctggagttgtgtccatgagtaagcattggactcaatcctttacagcgcatcaaataggatgttgccgtatgggtgccacagaaaaggaaggagccattgatggaaaaggagagagctgggaggcagaagatttgtatgtctgtgatgcaagtgttctgcctacagctcttggtgttaatcccatgatcaccgttcagtccactgcttactgcatatccaacagaatagccgagttaatgaagaagaggaagaaagactga

SEQ ID NO: 71191 - protein, 758 aa, Arabidopsis thaliana
  peptide (1)..(758): Ceres Seq. ID no. 3075486
MVGGRRLGKRGSPLLRWSVKQESFSHGFSKSDLQALSSICDAIMPPVPLESLNLEMKLKVLRNDALLSFFKSSSSESHVRPDEVAELLATKAIPLTVLVVRIVLRILTFRLGTLLLCGLVCLDKKHWPFLLKFSEMSLEKREKVLQRWNTQWYNPLARIGFMMIKAIFLFYYFTWTNENSENPVWDAINYSVEIGENEDMEQKERPLDEGIIETAKEDEMTIKQRMINKGLKVTEDRERDTYKIECDAVVVGSGCGGGVAAAILAKSGLRVVVIEKGNYFAPRDYSALEGPSMFELFESNSLMMTHDGRFRFMAGSTVGGGSVVNWAASLKTPDAIIEEWSVHRGISIYSSEKYKAAMGIVCKRLGVTEKIIREGFQNQILRKGCEKLGLDVTIVPRNSTEKHYCGSCSYGCPTGEKRGTDSTWLVDAVNNNAVILTQCKAEKLILADNDANKREESGRRKRCLGVAASLSHQTRKKLQINAKVTIVACGSLKTPGLLASSGLKNSNISRGLHIHPIMMAWGYFPEKNSELEGAAHEGEIVTSLHYVHPMDSTTPNITLETPAIGPGTFAALTPWVSGSDMKERMAKYARTAHIFAMVRDEGVGEVKGDIVKYRLTKADEENLTIGLKQALRILVAAGAAEVGTYRSDGQRMKCDGIKQKDLEAFLDTVNAPPGVVSMSKHWTQSFTAHQIGCCRMGATEKEGAIDGKGESWEAEDLYVCDASVLPTALGVNPMITVQSTAYCISNRIAELMKKRKKD

SEQ ID NO: 71192 - protein, 715 aa, Arabidopsis thaliana
  peptide (1)..(715): Ceres Seq. ID no. 3075487
MPPVPLESLNLEMKLKVLRNDALLSFFKSSSSESHVRPDEVAELLATKAIPLTVLVVRIVLRILTFRLGTLLLCGLVCLDKKHWPFLLKFSEMSLEKREKVLQRWNTQWYNPLARIGFMMIKAIFLFYYFTWTNENSENPVWDAINYSVEIGENEDMEQKERPLDEGIIETAKEDEMTIKQRMINKGLKVTEDRERDTYKIECDAVVVGSGCGGGVAAAILAKSGLRVVVIEKGNYFAPRDYSALEGPSMFELFESNSLMMTHDGRFRFMAGSTVGGGSVVNWAASLKTPDAIIEEWSVHRGISIYSSEKYKAAMGIVCKRLGVTEKIIREGFQNQILRKGCEKLGLDVTIVPRNSTEKHYCGSCSYGCPTGEKRGTDSTWLVDAVNNNAVILTQCKAEKLILADNDANKREESGRRKRCLGVAASLSHQTRKKLQINAKVTIVACGSLKTPGLLASSGLKNSNISRGLHIHPIMMAWGYFPEKNSELEGAAHEGEIVTSLHYVHPMDSTTPNITLETPAIGPGTFAALTPWVSGSDMKERMAKYARTAHIFAMVRDEGVGEVKGDIVKYRLTKADEENLTIGLKQALRILVAAGAAEVGTYRSDGQRMKCDGIKQKDLEAFLDTVNAPPGVVSMSKHWTQSFTAHQIGCCRMGATEKEGAIDGKGESWEAEDLYVCDASVLPTALGVNPMITVQSTAYCISNRIAELMKKRKKD

SEQ ID NO: 71193 - protein, 703 aa, Arabidopsis thaliana
  peptide (1)..(703): Ceres Seq. ID no. 3075488
MKLKVLRNDALLSFFKSSSSESHVRPDEVAELLATKAIPLTVLVVRIVLRILTFRLGTLLLCGLVCLDKKHWPFLLKFSEMSLEKREKVLQRWNTQWYNPLARIGFMMIKAIFLFYYFTWTNENSENPVWDAINYSVEIGENEDMEQKERPLDEGIIETAKEDEMTIKQRMINKGLKVTEDRERDTYKIECDAVVVGSGCGGGVAAAILAKSGLRVVVIEKGNYFAPRDYSALEGPSMFELFESNSLMMTHDGRFRFMAGSTVGGGSVVNWAASLKTPDAIIEEWSVHRGISIYSSEKYKAAMGIVCKRLGVTEKIIREGFQNQILRKGCEKLGLDVTIVPRNSTEKHYCGSCSYGCPTGEKRGTDSTWLVDAVNNNAVILTQCKAEKLILADNDANKREESGRRKRCLGVAASLSHQTRKKLQINAKVTIVACGSLKTPGLLASSGLKNSNISRGLHIHPIMMAWGYFPEKNSELEGAAHEGEIVTSLHYVHPMDSTTPNITLETPAIGPGTFAALTPWVSGSDMKERMAKYARTAHIFAMVRDEGVGEVKGDIVKYRLTKADEENLTIGLKQALRILVAAGAAEVGTYRSDGQRMKCDGIKQKDLEAFLDTVNAPPGVVSMSKHWTQSFTAHQIGCCRMGATEKEGAIDGKGESWEAEDLYVCDASVLPTALGVNPMITVQSTAYCISNRIAELMKKRKKD

SEQ ID NO: 71194 - DNA, 318 bp, Arabidopsis thaliana
  misc_feature (1)..(318): Ceres Seq. ID no. 3075564
  misc_feature (1)..(318): Ortholog of  Ceres SEQ ID NO 14304823 as cited in SEQ ID NO 54902
atgtcggctcattggacgtttaagacaaaggaattagaagatcaggtggagaatcaaaggagaattgatcaggagctgaagaagaaggtgctgaagttagaattttgcctacgcgaaacacgcatccaaactcgaaaacttcaaaagatgggagagcgaaacgatatggcaatacaagaagtactcaacgagcaattggctgcaaaaaaacagcatgaagctgatctttctagcaaccaaaacttgtgggacaaatcaggtttcaagattattgtctccatgtcgatgctgatattagttgccttttctaggcgttga

SEQ ID NO: 71195 - protein, 105 aa, Arabidopsis thaliana
  peptide (1)..(105): Ceres Seq. ID no. 3075565
MSAHWTFKTKELEDQVENQRRIDQELKKKVLKLEFCLRETRIQTRKLQKMGERNDMAIQEVLNEQLAAKKQHEADLSSNQNLWDKSGFKIIVSMSMLILVAFSRR

SEQ ID NO: 71196 - protein, 56 aa, Arabidopsis thaliana
  peptide (1)..(56): Ceres Seq. ID no. 3075566
MGERNDMAIQEVLNEQLAAKKQHEADLSSNQNLWDKSGFKIIVSMSMLILVAFSRR

SEQ ID NO: 71197 - DNA, 870 bp, Arabidopsis thaliana
  misc_feature (1)..(870): Ceres Seq. ID no. 3077477
  misc_feature (1)..(870): Ortholog of  Ceres SEQ ID NO 13595569 as cited in SEQ ID NO 56778
  misc_feature (1)..(870): Ortholog of  Ceres SEQ ID NO 12611159 as cited in SEQ ID NO 59821
aacccacaaattgatctcttctctcttctcttacaccatcttcttcattcaccatgggaagatctccttgttgtgaaaaagctcacacaaacaaaggagcttggactaaagaagaagatcaacgtctcgtagattatatccgtaatcacggtgaaggttgttggcgttctcttcctaaatccgctggattgttgcgttgtggtaaaagttgtagattgagatggattaattaccttcgtcctgatcttaaacgtggtaattttactgatgatgaagatcaaatcatcatcaaactccatagcttactcggtaacaaatggtcattgatagctggaagattaccaggaagaacagataacgaaataaagaattattggaacactcatattaagaggaagcttcttagtcacggtattgatccacaaactcatcgtcagattaacgaatccaaaacggtgtcgtctcaagttgttgttcctattcaaaacgatgccgttgagtattctttttccaatttagccgttaaaccgaagacggaaaattcctccgataacggagcttcgactagcggcacgacgacggacgaggatctccggcagaatggggagtgttattatagtgataattcaggacatataaagctgaatttggatttaactcttgggtttggatcctggtcgggtcggatagtcggagtcgggtcatcggctgattctaaaccgtggtgcgacccggtgatggaggcgcgtttgtcactgttgtaataatttgtcaaaaaaatcccaaaaaatgggttttgttacttcatttttttttttgcttgagtccttttggataaatatagaaattctttacttcagtttctttggt

SEQ ID NO: 71198 - protein, 236 aa, Arabidopsis thaliana; identical to SEQ ID NO: 20987
  peptide (1)..(236): Ceres Seq. ID no. 3077478

SEQ ID NO: 71199 - DNA, 798 bp, Arabidopsis thaliana
  misc_feature (1)..(798): Ceres Seq. ID no. 3081646
  misc_feature (1)..(798): Ortholog of  Ceres SEQ ID NO 15179622 as cited in SEQ ID NO 61057
atggctgcaacagtgctcggccatttcagtccaattacatcgtccctaaaaccaccgtcacgccaccggcgattcctacaccacaatttgtcccccaaaacaccccttcaatcttctcttatcaaattcggcgccgaaaactccgaacctcaacctccacggccgttgccggaaactgattgtcccgttccgccggagcagcagccaatcaacgagtatcaatctctctccacctctttccctttctcctgggcttcaggagatctaatcgagtactctaccagacttttcttaaccggcgcttctttcgcatttttcgtcgggttacccgtttcctggttcggatccatcggacccgaatatgaacctgttaagaggattctcgccgccagctctagcgggatcttcgttgtcacgcttgctgtcgtaaggatgtatcttggttgggcttatgtcggtaatcgtcttcttagcgccaccgtcgagtatgaagaaactggttggtacgatggtcaggtatgggtgaaaacaccagaagtcttggcacgagaccgtcttcttggatctttctcggtaaagccagttcttgcgagactgaaaaacacgctagttattctcggattatcgctcattcttgttataaaccttggtgattctccaattgcaacgtcttatagaacatacagggatcctagggacagatcctcgctgccaatcccaggagcgtacaatgatgaaaccgcaagaactttcgaaccagaagctttctgcggtgaaccatcttccgatcttctttga

SEQ ID NO: 71200 - protein, 265 aa, Arabidopsis thaliana
  peptide (1)..(265): Ceres Seq. ID no. 3081647
MAATVLGHFSPITSSLKPPSRHRRFLHHNLSPKTPLQSSLIKFGAENSEPQPPRPLPETDCPVPPEQQPINEYQSLSTSFPFSWASGDLIEYSTRLFLTGASFAFFVGLPVSWFGSIGPEYEPVKRILAASSSGIFVVTLAVVRMYLGWAYVGNRLLSATVEYEETGWYDGQVWVKTPEVLARDRLLGSFSVKPVLARLKNTLVILGLSLILVINLGDSPIATSYRTYRDPRDRSSLPIPGAYNDETARTFEPEAFCGEPSSDLL

SEQ ID NO: 71201 - DNA, 1491 bp, Arabidopsis thaliana
  misc_feature (1)..(1491): Ceres Seq. ID no. 3081676
  misc_feature (1)..(1491): Ortholog of  Ceres SEQ ID NO 15174599 as cited in SEQ ID NO 53646
  misc_feature (1)..(1491): Ortholog of  Ceres SEQ ID NO 15174646 as cited in SEQ ID NO 54499
atggaactcaattgtgttcaatttcttcgaaacaagacgattcttgtcaccggagctaccggtttccttgcgaaggtttttgtggagaaaattctgagagtgcaaccaaatgtgaagaagctgtaccttttggtgagagcatctgacaatgaagctgccactaaacgcttacgcacagaggtatttgagaaagaactttttaaggtattgagacagaatcttggcgatgagaaattaaatacattgttgtacgaaaaagttgtttcggtcccgggtgatatagcgactgatcaattaggcataaatgactctcatcttagagaacgtatgcaaaaagaaatagatattgttgtcaatgttgcagccacaacaaactttgacgaaagatatgatgttgggcttgggatcaatacatttggagctctcaacgtccttaactttgccaaaaaatgtgttaaagttcaattgcttctccatgtctcaactgcttatgtttgtggagaaaagccaggtctcatacctgaaaaaccattcatcatggaagagattcgtaacgagaatggtcttcaattggatattaaccttgaaagggagcttatgaagcaaagattgaaagaactcaatgaacaagattgttccgaagaagacattactctttccatgaaagaactcggaatggaaagggccaagcttcatggatggcctaacacatatgttttcaccaaatcaatgggagaaatgcttcttggtaagcataaagaaaatctccccctcgtcatcatccgtcccacgatgatcactagtactctttcggaaccttttcctggttggatcgaaggcttgagaactgtcgacagcgtgattattgcatatggaaagggagtgctcaagtgttttcttgtcgatgttaactcggtctgcgatatgataccagtggatatggtggcaaacgcaatgatcacggctgcagccaaacacgctggaggttcaggggttcacatggtgtaccatgtcggctcatctcaccagaacccagtcacatttggagagattcatgagattgcggttcgttactttacgaaaaaccctttgcgaagtcgcaatggctcactcataaccgtctcaaaagtgaggttcataccaaccatggctttgttcagcctctacatgaccctacgttacaaactacctctccagttattaaaactagttgacataatatatccttggagaaacggagataaatatggagacaagaaccgcaaaatcgagttggtgatgagattggtagagctttatgagccttatgtactcttcaagggaatattcgacgatagaaatacaaagagtttatgcgcaaaccagaaggaagaggagatcaaaaatacagaaaaattgatgtttgatttcgacccaaaaggaattaattggggagattatctcacaaatatacacatttctggactcgtcacacacgtgcttaagaagtga

SEQ ID NO: 71202 - protein, 496 aa, Arabidopsis thaliana
  peptide (1)..(496): Ceres Seq. ID no. 3081677
MELNCVQFLRNKTILVTGATGFLAKVFVEKILRVQPNVKKLYLLVRASDNEAATKRLRTEVFEKELFKVLRQNLGDEKLNTLLYEKVVSVPGDIATDQLGINDSHLRERMQKEIDIVVNVAATTNFDERYDVGLGINTFGALNVLNFAKKCVKVQLLLHVSTAYVCGEKPGLIPEKPFIMEEIRNENGLQLDINLERELMKQRLKELNEQDCSEEDITLSMKELGMERAKLHGWPNTYVFTKSMGEMLLGKHKENLPLVIIRPTMITSTLSEPFPGWIEGLRTVDSVIIAYGKGVLKCFLVDVNSVCDMIPVDMVANAMITAAAKHAGGSGVHMVYHVGSSHQNPVTFGEIHEIAVRYFTKNPLRSRNGSLITVSKVRFIPTMALFSLYMTLRYKLPLQLLKLVDIIYPWRNGDKYGDKNRKIELVMRLVELYEPYVLFKGIFDDRNTKSLCANQKEEEIKNTEKLMFDFDPKGINWGDYLTNIHISGLVTHVLKK

SEQ ID NO: 71203 - protein, 387 aa, Arabidopsis thaliana
  peptide (1)..(387): Ceres Seq. ID no. 3081678
MQKEIDIVVNVAATTNFDERYDVGLGINTFGALNVLNFAKKCVKVQLLLHVSTAYVCGEKPGLIPEKPFIMEEIRNENGLQLDINLERELMKQRLKELNEQDCSEEDITLSMKELGMERAKLHGWPNTYVFTKSMGEMLLGKHKENLPLVIIRPTMITSTLSEPFPGWIEGLRTVDSVIIAYGKGVLKCFLVDVNSVCDMIPVDMVANAMITAAAKHAGGSGVHMVYHVGSSHQNPVTFGEIHEIAVRYFTKNPLRSRNGSLITVSKVRFIPTMALFSLYMTLRYKLPLQLLKLVDIIYPWRNGDKYGDKNRKIELVMRLVELYEPYVLFKGIFDDRNTKSLCANQKEEEIKNTEKLMFDFDPKGINWGDYLTNIHISGLVTHVLKK

SEQ ID NO: 71204 - protein, 317 aa, Arabidopsis thaliana
  peptide (1)..(317): Ceres Seq. ID no. 3081679
MEEIRNENGLQLDINLERELMKQRLKELNEQDCSEEDITLSMKELGMERAKLHGWPNTYVFTKSMGEMLLGKHKENLPLVIIRPTMITSTLSEPFPGWIEGLRTVDSVIIAYGKGVLKCFLVDVNSVCDMIPVDMVANAMITAAAKHAGGSGVHMVYHVGSSHQNPVTFGEIHEIAVRYFTKNPLRSRNGSLITVSKVRFIPTMALFSLYMTLRYKLPLQLLKLVDIIYPWRNGDKYGDKNRKIELVMRLVELYEPYVLFKGIFDDRNTKSLCANQKEEEIKNTEKLMFDFDPKGINWGDYLTNIHISGLVTHVLKK

SEQ ID NO: 71205 - DNA, 978 bp, Arabidopsis thaliana
  misc_feature (1)..(978): Ceres Seq. ID no. 3081688
  misc_feature (1)..(978): Ortholog of  Ceres SEQ ID NO 13585342 as cited in SEQ ID NO 63601
atggaggaacatcttcaaggaagaatcaaacttcacgatggtagatacttggcctacaaggaaagaggtgtccccaaggatgatgcaaagttcacgatcgttcttgttcatggatttggtagctccaaggatatgaacttcaatgtctcacaagagcttgtgaatgaaattggtatatactttgtgctatatgatcgagctggttacggagagagcgacccgaatcctaaacgttcgttgaagagtgaagcctacgatgttcaggaactggcggatggtttagagatcggatccaggttttatttgattggaatttcaatgggttcctacactgtttggagctgccttaaacatattcctcaaaggttagcaggagtggcaatggtggctccggtggtgaatttccggtggccgtctattccaaagagtctgatgccaaaagactacagaagagaagtggcgaaatggtctgtttggatagctaactattttccgggacttttgcaatggttggtgactcagaacatgttctctacaacttccatgctagagaaaaaccctgtctacttcaacgaccaagacattgaagtccttaagcacatcaaaggcttcccaatgctcactaaggagaagttacgggagcgcggcgtcttcgggacgctgagaagcgattttttggtagcattcggcgactgggacttcgatccggcagacctacctgacccgtctctgtctggaccggaaaagggctcttcttctgttcacatatggcaaggctacgaagacaaagtgatgccatttcagctgcaaagatgtttgtgccgcaagctaccatggattaggtaccatgaggtccctaaaggaggccacctgatcgtgcactacgacggcatatgtgatgcgattttgaaatcacttcttttaggagaagatctcccaatgtacaaaccaaaagctgtgatcactgagccagcttag

SEQ ID NO: 71206 - protein, 325 aa, Arabidopsis thaliana
  peptide (1)..(325): Ceres Seq. ID no. 3081689
MEEHLQGRIKLHDGRYLAYKERGVPKDDAKFTIVLVHGFGSSKDMNFNVSQELVNEIGIYFVLYDRAGYGESDPNPKRSLKSEAYDVQELADGLEIGSRFYLIGISMGSYTVWSCLKHIPQRLAGVAMVAPVVNFRWPSIPKSLMPKDYRREVAKWSVWIANYFPGLLQWLVTQNMFSTTSMLEKNPVYFNDQDIEVLKHIKGFPMLTKEKLRERGVFGTLRSDFLVAFGDWDFDPADLPDPSLSGPEKGSSSVHIWQGYEDKVMPFQLQRCLCRKLPWIRYHEVPKGGHLIVHYDGICDAILKSLLLGEDLPMYKPKAVITEPA

SEQ ID NO: 71207 - protein, 281 aa, Arabidopsis thaliana
  peptide (1)..(281): Ceres Seq. ID no. 3081690
MNFNVSQELVNEIGIYFVLYDRAGYGESDPNPKRSLKSEAYDVQELADGLEIGSRFYLIGISMGSYTVWSCLKHIPQRLAGVAMVAPVVNFRWPSIPKSLMPKDYRREVAKWSVWIANYFPGLLQWLVTQNMFSTTSMLEKNPVYFNDQDIEVLKHIKGFPMLTKEKLRERGVFGTLRSDFLVAFGDWDFDPADLPDPSLSGPEKGSSSVHIWQGYEDKVMPFQLQRCLCRKLPWIRYHEVPKGGHLIVHYDGICDAILKSLLLGEDLPMYKPKAVITEPA

SEQ ID NO: 71208 - protein, 219 aa, Arabidopsis thaliana
  peptide (1)..(219): Ceres Seq. ID no. 3081691
MGSYTVWSCLKHIPQRLAGVAMVAPVVNFRWPSIPKSLMPKDYRREVAKWSVWIANYFPGLLQWLVTQNMFSTTSMLEKNPVYFNDQDIEVLKHIKGFPMLTKEKLRERGVFGTLRSDFLVAFGDWDFDPADLPDPSLSGPEKGSSSVHIWQGYEDKVMPFQLQRCLCRKLPWIRYHEVPKGGHLIVHYDGICDAILKSLLLGEDLPMYKPKAVITEPA

SEQ ID NO: 71209 - DNA, 2031 bp, Arabidopsis thaliana
  misc_feature (1)..(2031): Ceres Seq. ID no. 3081922
  misc_feature (1)..(2031): Ortholog of  Ceres SEQ ID NO 13659840 as cited in SEQ ID NO 66970
  misc_feature (1)..(2031): Ortholog of  Ceres SEQ ID NO 13660544 as cited in SEQ ID NO 67401
atgtctttcttctggctttttccttttctccttcatctttcatttgccgattccttatctcctctttcagctccagttcaaaattttattcacctaaaccattcttgtccaagtagtatattaacgtattcaagaaacagcacttacttcaccaatctcaaaacacttttgtcctctctctcttcccggaacgcttcatactctaccggattccaaactgccacggcgggacaagctcccgaccgtgtcaccggacttttcctttgtcgcggagacgtctcacaagaagtttgccgtaactgcgtcgccttttccgtcaaggagactttatattggtgtccgtataacaaagaagtcgtgctttattacgatgagtgtatgcttagatactctcaccgaaatattctctcgaccgttacatacgatggaagtgctatcttgttgaacggcgctaatatttcatcaagtaatcaaaatcaagtagatgagtttagggatttggtgtcgtccacgttgaacctagctgccgttgaagcagcgaatagttctaaaaaattttatacgagaaaggtcatcacaccccagcctttgtacttgttagttcagtgcacacctgatcttacaagacaagactgtttacgttgcctacaaaaatccatcaagggaatgtctctttacagaattggaggaagatttttttaccctagttgtaattcaaggtacgagaattactcgttctacaatgaaaccgccactagatcatcatcaccaccgtctcttccgcctcgctctactcctcaacagcagctgaagttagctcccccaccgctgatttcagaacgtggaaaaggccggaactcctctgtaatcatcgttgttgttgttccaatcattgctctcctgcttctgttcgtagctttctttagtctccgggctaagaaaacaaggacgaattatgagagggaaccacttaccgaagaaagtgatgatattaccactgcgggctcacttcagtttgattttaaagcaattgaggcagcaacaaataagttttgtgagactaacaaacttggtcaaggtggtttcggcgaagtttacaagggtatatttcctagtggagtacaagttgcagtgaagaggttatccaagacatcaggacaaggtgaaagagagttcgcaaacgaagttattgttgtggcaaagcttcaacatagaaatttggtaagattgctagggttttgtttggaaagagatgagaggatacttgtctatgagtttgttcccaacaaaagtctcgactacttcatttttgactctaccatgcaaagcctgctggactggactagacggtacaaaatcattggaggaattgctagagggattctttatcttcatcaagattcacgactcacaatcatacatcgtgatctcaaagcaggtaatatcctccttggtgatgatatgaatgcaaaaatcgccgactttggaatggcgagaattttcggaatggaccaaacggaagccaatactaggagaatagttggaacatatggctatatgtctcccgagtatgcgatgtatggccaattctccatgaaatcagatgtgtatagcttcggggtcttggttctcgaaattataagtgggaaaaagaacagcaatgtctatcaaatggatggtactagtgctggcaatttggttacatatacttggagactatggagcaatgggtcaccgttagagctagtggatccatcctttcgtgataactatcgaataaatgaagtttcgagatgcatccatatcgctttactatgtgttcaagaagaagctgaagatcgtccaaccatgtcagctattgtccagatgctcactactagctcaattgctctcgcagttcctcaacgacctggttttttcttccggagtagtaaacatgaacaagtaggattagtggatcgtctatctatcaatacgtccgctctttgttcagtcgatgatgcttccattactaatgtaactcctcgttga

SEQ ID NO: 71210 - protein, 676 aa, Arabidopsis thaliana
  peptide (1)..(676): Ceres Seq. ID no. 3081923
MSFFWLFPFLLHLSFADSLSPLSAPVQNFIHLNHSCPSSILTYSRNSTYFTNLKTLLSSLSSRNASYSTGFQTATAGQAPDRVTGLFLCRGDVSQEVCRNCVAFSVKETLYWCPYNKEVVLYYDECMLRYSHRNILSTVTYDGSAILLNGANISSSNQNQVDEFRDLVSSTLNLAAVEAANSSKKFYTRKVITPQPLYLLVQCTPDLTRQDCLRCLQKSIKGMSLYRIGGRFFYPSCNSRYENYSFYNETATRSSSPPSLPPRSTPQQQLKLAPPPLISERGKGRNSSVIIVVVVPIIALLLLFVAFFSLRAKKTRTNYEREPLTEESDDITTAGSLQFDFKAIEAATNKFCETNKLGQGGFGEVYKGIFPSGVQVAVKRLSKTSGQGEREFANEVIVVAKLQHRNLVRLLGFCLERDERILVYEFVPNKSLDYFIFDSTMQSLLDWTRRYKIIGGIARGILYLHQDSRLTIIHRDLKAGNILLGDDMNAKIADFGMARIFGMDQTEANTRRIVGTYGYMSPEYAMYGQFSMKSDVYSFGVLVLEIISGKKNSNVYQMDGTSAGNLVTYTWRLWSNGSPLELVDPSFRDNYRINEVSRCIHIALLCVQEEAEDRPTMSAIVQMLTTSSIALAVPQRPGFFFRSSKHEQVGLVDRLSINTSALCSVDDASITNVTPR

SEQ ID NO: 71211 - protein, 550 aa, Arabidopsis thaliana
  peptide (1)..(550): Ceres Seq. ID no. 3081924
MLRYSHRNILSTVTYDGSAILLNGANISSSNQNQVDEFRDLVSSTLNLAAVEAANSSKKFYTRKVITPQPLYLLVQCTPDLTRQDCLRCLQKSIKGMSLYRIGGRFFYPSCNSRYENYSFYNETATRSSSPPSLPPRSTPQQQLKLAPPPLISERGKGRNSSVIIVVVVPIIALLLLFVAFFSLRAKKTRTNYEREPLTEESDDITTAGSLQFDFKAIEAATNKFCETNKLGQGGFGEVYKGIFPSGVQVAVKRLSKTSGQGEREFANEVIVVAKLQHRNLVRLLGFCLERDERILVYEFVPNKSLDYFIFDSTMQSLLDWTRRYKIIGGIARGILYLHQDSRLTIIHRDLKAGNILLGDDMNAKIADFGMARIFGMDQTEANTRRIVGTYGYMSPEYAMYGQFSMKSDVYSFGVLVLEIISGKKNSNVYQMDGTSAGNLVTYTWRLWSNGSPLELVDPSFRDNYRINEVSRCIHIALLCVQEEAEDRPTMSAIVQMLTTSSIALAVPQRPGFFFRSSKHEQVGLVDRLSINTSALCSVDDASITNVTPR

SEQ ID NO: 71212 - protein, 454 aa, Arabidopsis thaliana
  peptide (1)..(454): Ceres Seq. ID no. 3081925
MSLYRIGGRFFYPSCNSRYENYSFYNETATRSSSPPSLPPRSTPQQQLKLAPPPLISERGKGRNSSVIIVVVVPIIALLLLFVAFFSLRAKKTRTNYEREPLTEESDDITTAGSLQFDFKAIEAATNKFCETNKLGQGGFGEVYKGIFPSGVQVAVKRLSKTSGQGEREFANEVIVVAKLQHRNLVRLLGFCLERDERILVYEFVPNKSLDYFIFDSTMQSLLDWTRRYKIIGGIARGILYLHQDSRLTIIHRDLKAGNILLGDDMNAKIADFGMARIFGMDQTEANTRRIVGTYGYMSPEYAMYGQFSMKSDVYSFGVLVLEIISGKKNSNVYQMDGTSAGNLVTYTWRLWSNGSPLELVDPSFRDNYRINEVSRCIHIALLCVQEEAEDRPTMSAIVQMLTTSSIALAVPQRPGFFFRSSKHEQVGLVDRLSINTSALCSVDDASITNVTPR

SEQ ID NO: 71213 - DNA, 2739 bp, Arabidopsis thaliana
  misc_feature (1)..(2739): Ceres Seq. ID no. 3081939
  misc_feature (1)..(2739): Ortholog of  Ceres SEQ ID NO 13581686 as cited in SEQ ID NO 57695
atgaaaaacaacaaaaaggttgggaccgaagattcaacgaaatggatgctagagagcgtcgagatagatccaaaaggcgatagttctgtgaaacaacccgaaagcacaatcaatagcaataatcctgagagtagtggtgctggtggtgggatcttgaagaatgtgtctaagaatctcgccgtgggatcaataatcaggtccatgagcgtaaacaaatggagaaagagcggtaatctcgggtccccgagcacgaggaagagtggaaacctggggcctccactccctgtgtcccaagtaaaaagaccggggccacaaagagtcgagaggactacatctagcgcggctagaggactacaaagtctccggttccttgatcggaccgtcacgggaagagaacgagattcgtggagatcaatcgaaaaccggttcaatcaatttgctgttgacgggaggcttcccaaggataaattcggcgtttgcattggaatgggagatacattggagtttgcggcaaaagtatacgaagcattgggtaggagaagacaaataaaaacagaaaatgggattgacaaggaacaactcaagcttttttgggaagacatgatcaagaaggatctcgactgtcgcctccaaatcttcttcgacatgtgtgataaggacggagacgggaagttaacagaagaggaggttaaagaagtcatagtcttaagtgcatccgcgaacaggctcgtgaatctgaagaagaatgctgcgtcttatgcttctttgatcatggaagagctcgaccccaatgagcagggttacattgagatgtggcaactcgaggtgctactaacaggaattgtatcaaacgccgactcacataaggtcgtgaggaaatcgcaacagctaacgcgagccatgatcccaaaacgttacagaacaccgactagtaaatacgttgtagtgaccgcagagctaatgtacgagcactggaagaagatttgggtcgtcacattgtggctcgcagtaaacgtcgtcctcttcatgtggaaatacgaagagttcaccacaagccctctttacaacatcactggacgctgcctttgcgccgctaaaggaacggcagaaatactaaaactcaacatggctttgattttggtccctgttttaagaagaaccctaacgttcctcagatcgactttcttgaaccacttgatcccattcgacgataacatcaacttccataagttgatagccgtggcgatagcagttatttccttgcttcacacggcattacacatgctatgcaactaccctaggctaagttcttgcccctacaatttctactccgactatgcggggaatctcttgggagccaagcaaccgacctatttaggcctaatgctgaccccggtttcggtcacaggagttctaatgatcatcttcatgggtatctcattcacccttgctatgcattacttcagaagaaacatagtgaaattgcctataccatttaaccgtcttgctggatttaattcgttttggtatgctcatcatttgctggttattgcctacgctcttcttatcatccatggttacattcttatcatcgagaaaccttggtaccaaaagacgacgtggatgtacgtggccataccaatggtgttgtacgcgagcgagaggcttttctcacgagttcaagaacacaaccatcgtgtccacattatcaaagctattgtatattcaggcaatgttcttgcactctatatgaccaaacctcaagggttcaagtacaaaagtggcatgtacatgtttgtcaagtgccctgatatctccaaattcgaatggcatccattctccatcacttctgcacccggagatgaatatttgagcgttcacataagagcattaggagattggacttctgaacttaggaacagatttgcagagacatgtgagcctcatcaaaaatcgaaacctagtccaaatgatcttattaggatggaaacaagagcgagaggtgcaaatcctcatgttgaagaatcccaagccttatttccaagaatatttatcaaaggaccatatggggctccggcacaaagctatcagaagtttgatatccttttgttgattgggctagggatcggggcaaccccatttataagtatcctaaaagatatgttgaataatctcaaacctggtattccaaaaaccgggcaaaagtatgaaggaagtgtaggaggtgagagcttaggaggatcaagtgtatatggaggatcgagtgtaaatggaggaggtagtgtaaatggaggaggtagtgtaagtggaggaggtagaaagtttccacaaagagcatatttttattgggtgacaagagaacaagcttctttcgaatggttcaaaggagttatggatgatattgcagtgtatgacaaaaccaatgtgatagagatgcataactacttaacaagtatgtacgaagcaggagatgcgagatctgctctaattgctatggtccagaaacttcaacatgccaaaaatggtgttgacattgtttccgagagccgaatacgaacccatttcgcaagacctaattggaggaaggttttttctgaattgtcaaacaagcacgagacttctcgcataggtgtgttctactgtggaagtccaacgcttgttcgaccgctaaaatcactttgtcaggagttcagtctcgagtcgtccacccgctttacttttcacaaagagaatttctga

SEQ ID NO: 71214 - protein, 912 aa, Arabidopsis thaliana
  peptide (1)..(912): Ceres Seq. ID no. 3081940
MKNNKKVGTEDSTKWMLESVEIDPKGDSSVKQPESTINSNNPESSGAGGGILKNVSKNLAVGSIIRSMSVNKWRKSGNLGSPSTRKSGNLGPPLPVSQVKRPGPQRVERTTSSAARGLQSLRFLDRTVTGRERDSWRSIENRFNQFAVDGRLPKDKFGVCIGMGDTLEFAAKVYEALGRRRQIKTENGIDKEQLKLFWEDMIKKDLDCRLQIFFDMCDKDGDGKLTEEEVKEVIVLSASANRLVNLKKNAASYASLIMEELDPNEQGYIEMWQLEVLLTGIVSNADSHKVVRKSQQLTRAMIPKRYRTPTSKYVVVTAELMYEHWKKIWVVTLWLAVNVVLFMWKYEEFTTSPLYNITGRCLCAAKGTAEILKLNMALILVPVLRRTLTFLRSTFLNHLIPFDDNINFHKLIAVAIAVISLLHTALHMLCNYPRLSSCPYNFYSDYAGNLLGAKQPTYLGLMLTPVSVTGVLMIIFMGISFTLAMHYFRRNIVKLPIPFNRLAGFNSFWYAHHLLVIAYALLIIHGYILIIEKPWYQKTTWMYVAIPMVLYASERLFSRVQEHNHRVHIIKAIVYSGNVLALYMTKPQGFKYKSGMYMFVKCPDISKFEWHPFSITSAPGDEYLSVHIRALGDWTSELRNRFAETCEPHQKSKPSPNDLIRMETRARGANPHVEESQALFPRIFIKGPYGAPAQSYQKFDILLLIGLGIGATPFISILKDMLNNLKPGIPKTGQKYEGSVGGESLGGSSVYGGSSVNGGGSVNGGGSVSGGGRKFPQRAYFYWVTREQASFEWFKGVMDDIAVYDKTNVIEMHNYLTSMYEAGDARSALIAMVQKLQHAKNGVDIVSESRIRTHFARPNWRKVFSELSNKHETSRIGVFYCGSPTLVRPLKSLCQEFSLESSTRFTFHKENF

SEQ ID NO: 71215 - protein, 897 aa, Arabidopsis thaliana
  peptide (1)..(897): Ceres Seq. ID no. 3081941
MLESVEIDPKGDSSVKQPESTINSNNPESSGAGGGILKNVSKNLAVGSIIRSMSVNKWRKSGNLGSPSTRKSGNLGPPLPVSQVKRPGPQRVERTTSSAARGLQSLRFLDRTVTGRERDSWRSIENRFNQFAVDGRLPKDKFGVCIGMGDTLEFAAKVYEALGRRRQIKTENGIDKEQLKLFWEDMIKKDLDCRLQIFFDMCDKDGDGKLTEEEVKEVIVLSASANRLVNLKKNAASYASLIMEELDPNEQGYIEMWQLEVLLTGIVSNADSHKVVRKSQQLTRAMIPKRYRTPTSKYVVVTAELMYEHWKKIWVVTLWLAVNVVLFMWKYEEFTTSPLYNITGRCLCAAKGTAEILKLNMALILVPVLRRTLTFLRSTFLNHLIPFDDNINFHKLIAVAIAVISLLHTALHMLCNYPRLSSCPYNFYSDYAGNLLGAKQPTYLGLMLTPVSVTGVLMIIFMGISFTLAMHYFRRNIVKLPIPFNRLAGFNSFWYAHHLLVIAYALLIIHGYILIIEKPWYQKTTWMYVAIPMVLYASERLFSRVQEHNHRVHIIKAIVYSGNVLALYMTKPQGFKYKSGMYMFVKCPDISKFEWHPFSITSAPGDEYLSVHIRALGDWTSELRNRFAETCEPHQKSKPSPNDLIRMETRARGANPHVEESQALFPRIFIKGPYGAPAQSYQKFDILLLIGLGIGATPFISILKDMLNNLKPGIPKTGQKYEGSVGGESLGGSSVYGGSSVNGGGSVNGGGSVSGGGRKFPQRAYFYWVTREQASFEWFKGVMDDIAVYDKTNVIEMHNYLTSMYEAGDARSALIAMVQKLQHAKNGVDIVSESRIRTHFARPNWRKVFSELSNKHETSRIGVFYCGSPTLVRPLKSLCQEFSLESSTRFTFHKENF

SEQ ID NO: 71216 - protein, 845 aa, Arabidopsis thaliana
  peptide (1)..(845): Ceres Seq. ID no. 3081942
MSVNKWRKSGNLGSPSTRKSGNLGPPLPVSQVKRPGPQRVERTTSSAARGLQSLRFLDRTVTGRERDSWRSIENRFNQFAVDGRLPKDKFGVCIGMGDTLEFAAKVYEALGRRRQIKTENGIDKEQLKLFWEDMIKKDLDCRLQIFFDMCDKDGDGKLTEEEVKEVIVLSASANRLVNLKKNAASYASLIMEELDPNEQGYIEMWQLEVLLTGIVSNADSHKVVRKSQQLTRAMIPKRYRTPTSKYVVVTAELMYEHWKKIWVVTLWLAVNVVLFMWKYEEFTTSPLYNITGRCLCAAKGTAEILKLNMALILVPVLRRTLTFLRSTFLNHLIPFDDNINFHKLIAVAIAVISLLHTALHMLCNYPRLSSCPYNFYSDYAGNLLGAKQPTYLGLMLTPVSVTGVLMIIFMGISFTLAMHYFRRNIVKLPIPFNRLAGFNSFWYAHHLLVIAYALLIIHGYILIIEKPWYQKTTWMYVAIPMVLYASERLFSRVQEHNHRVHIIKAIVYSGNVLALYMTKPQGFKYKSGMYMFVKCPDISKFEWHPFSITSAPGDEYLSVHIRALGDWTSELRNRFAETCEPHQKSKPSPNDLIRMETRARGANPHVEESQALFPRIFIKGPYGAPAQSYQKFDILLLIGLGIGATPFISILKDMLNNLKPGIPKTGQKYEGSVGGESLGGSSVYGGSSVNGGGSVNGGGSVSGGGRKFPQRAYFYWVTREQASFEWFKGVMDDIAVYDKTNVIEMHNYLTSMYEAGDARSALIAMVQKLQHAKNGVDIVSESRIRTHFARPNWRKVFSELSNKHETSRIGVFYCGSPTLVRPLKSLCQEFSLESSTRFTFHKENF

SEQ ID NO: 71217 - DNA, 2781 bp, Arabidopsis thaliana
  misc_feature (1)..(2781): Ceres Seq. ID no. 3082085
  misc_feature (1)..(2781): Ortholog of  Ceres SEQ ID NO 14303959 as cited in SEQ ID NO 53709
atgggttcatttgccggaaagtgtgaaatagttgaagaaaaagaagaccgtcaaaactcgattggttactcagcgaaatcaaccactattccacattctagatcaagcattgtcgacgacaaggatctggagcgaccggtactgaaattaggttacagaggttcactagaagatgacataaaccaacttttcgagtctataagcattcgaacatcaggaatgattccttcttaccaagttggtgcaactagtagcagtagaaacaacactcctttacaacggaatgctttgaagagtcccgcgaatcccgcaggacctcgatcgcctagcaagagaaatgcggaaccagcgacgttaaaacaagctttgagagatttatgcgtcactaaggcatcggaaaccgcagctaccaaacggattcctaagagtactagtactggaggctcagtttatggttcggttttggttgaaccgggaagtggagctagcgaagaagggaaagcggttcttgtcgagttactcggcgaggatcaaagcagttcatcggatagtatatcgcagcagcttcgtcttctgaagatacattcttctagccaaaactctcagacatcaaagcggtattgcgatgagatgacaatacttaaaaaacacaagaacctgtctcttgacgaccaagaaatgagtatcgagaacaagaacttcggttcatcatcgcccggatcaggaaacaacaagaccgtggttggactgaaatcagttagaaaagtgaggttgttgtatgccaatacaccgagttccaccatagttaacgggaagagagtggctaagttaaccagaaccattccaagaggaggaggagctaaacctgcactaaggaacaaaggttccatgaagaagaaggctacaaatgtgtatgatgaagtagatggcttctatgatcccattgcaaaggaacttctctgccatagatgccatttctctttgaagaacactgcagctaaggaagatccctctaaagattcacttgtagaaccacatgagatctgtgctaaagatgaattggcttctgatttctccagctcaagctatgagagctcgcatgagatcagtgctagtgcagagaccaaacttgataagataagaagctctctggatttgatgaattcagagacctctcacgtttctttaacatctgcattccgtaataagaacatcaaagatgtttctgaatacggcaacaatgagatcatggaggaagattctctatctggcaaagaagttgatcagaaagattctgtctttatgtcggaacagagcgtggagattggttctttcagtgagaaatctgttgtgatgaatccagatagtcctccaaacaaactcagtttaggcggagcagccattgaagatgtcaacgaaaactcagaaatcataaacaaaggcgacggatacaacagttcaaccacgagtatcagcgaggaagaagtacaacaacagagtaataatataatgacaaggtctagctttggaaacagacctcatatgtctaaggatgtgagatgggaagctattcagcatataagggcacaacacgggcttggttcattgggtcttaggcatttcaatcttctgaagaagctcggctgcggagatattggaacggtttatctcgctgagctcacgggaacaaactgtttgtttgctataaaagtgatggataatgaattcttggagagaaggaacaagatgtctagggctcaaactgagaaagatattctcaaaatgcttgatcacccgtttcttccaacgttatacgctcacttcacttcggataacttatcttgtttggtcatggaatgttgtccgggaggtgatttacatgtcttaaggcagaagcagcccggaaggtggtttcccgagccagcagctaggttctatgtcgcggaggtgcttcttgcattggagtatttgcatatgctcggggtaatataccgagatttgaagcccgagaacattttggtacgtgatgatggacatatcatggtgacagattttgatctctctttgaggtgtaccgtgagcccaacgcttctaaactcatcatctccactccatgcggatgcaatgagactctcttcgggtagccgcactggatctaactgcatcgagccatcgtgtttccgccctaaactctcccgcggatcagggcccaagaaaaaaggcaaacaacaccgcatgatgatgaaaaaactcaagaaatctgacctaatcgcgcggttcaaatcattgccacagctcgtggcagaaccaacagatgcgagatcaaactcttttgttggaacacacgagtatctcgcgcccgagatcattaaaggagaaggtcacggtgctgcggttgactggtggacatttgggatctttctatatgagcttctttacgggaaaactccattcaaaggagctactaatgaggagactatagctaatgtggtgcttcagagcttgaagtttcctgataaccctaatgtgagtttccaagctaaggatcttataagaggtttgttggtcaaggaacctgagaaccggttagggacagagaaaggagcagcggagataaaacggcatgcgttcttcgaaggcttgaactgggcgttgatccggtgtgcgatcccgcctgagcttccggatttctatgactatggagttcctaatcaagaagggaaaagcaattacttagattgcaaggcagttggggaacatcttgagtttgagttattctag

SEQ ID NO: 71218 - protein, 926 aa, Arabidopsis thaliana
  peptide (1)..(926): Ceres Seq. ID no. 3082086
MGSFAGKCEIVEEKEDRQNSIGYSAKSTTIPHSRSSIVDDKDLERPVLKLGYRGSLEDDINQLFESISIRTSGMIPSYQVGATSSSRNNTPLQRNALKSPANPAGPRSPSKRNAEPATLKQALRDLCVTKASETAATKRIPKSTSTGGSVYGSVLVEPGSGASEEGKAVLVELLGEDQSSSSDSISQQLRLLKIHSSSQNSQTSKRYCDEMTILKKHKNLSLDDQEMSIENKNFGSSSPGSGNNKTVVGLKSVRKVRLLYANTPSSTIVNGKRVAKLTRTIPRGGGAKPALRNKGSMKKKATNVYDEVDGFYDPIAKELLCHRCHFSLKNTAAKEDPSKDSLVEPHEICAKDELASDFSSSSYESSHEISASAETKLDKIRSSLDLMNSETSHVSLTSAFRNKNIKDVSEYGNNEIMEEDSLSGKEVDQKDSVFMSEQSVEIGSFSEKSVVMNPDSPPNKLSLGGAAIEDVNENSEIINKGDGYNSSTTSISEEEVQQQSNNIMTRSSFGNRPHMSKDVRWEAIQHIRAQHGLGSLGLRHFNLLKKLGCGDIGTVYLAELTGTNCLFAIKVMDNEFLERRNKMSRAQTEKDILKMLDHPFLPTLYAHFTSDNLSCLVMECCPGGDLHVLRQKQPGRWFPEPAARFYVAEVLLALEYLHMLGVIYRDLKPENILVRDDGHIMVTDFDLSLRCTVSPTLLNSSSPLHADAMRLSSGSRTGSNCIEPSCFRPKLSRGSGPKKKGKQHRMMMKKLKKSDLIARFKSLPQLVAEPTDARSNSFVGTHEYLAPEIIKGEGHGAAVDWWTFGIFLYELLYGKTPFKGATNEETIANVVLQSLKFPDNPNVSFQAKDLIRGLLVKEPENRLGTEKGAAEIKRHAFFEGLNWALIRCAIPPELPDFYDYGVPNQEGKSNYLDCKAVGEHLEFELF

SEQ ID NO: 71219 - protein, 853 aa, Arabidopsis thaliana
  peptide (1)..(853): Ceres Seq. ID no. 3082087
MIPSYQVGATSSSRNNTPLQRNALKSPANPAGPRSPSKRNAEPATLKQALRDLCVTKASETAATKRIPKSTSTGGSVYGSVLVEPGSGASEEGKAVLVELLGEDQSSSSDSISQQLRLLKIHSSSQNSQTSKRYCDEMTILKKHKNLSLDDQEMSIENKNFGSSSPGSGNNKTVVGLKSVRKVRLLYANTPSSTIVNGKRVAKLTRTIPRGGGAKPALRNKGSMKKKATNVYDEVDGFYDPIAKELLCHRCHFSLKNTAAKEDPSKDSLVEPHEICAKDELASDFSSSSYESSHEISASAETKLDKIRSSLDLMNSETSHVSLTSAFRNKNIKDVSEYGNNEIMEEDSLSGKEVDQKDSVFMSEQSVEIGSFSEKSVVMNPDSPPNKLSLGGAAIEDVNENSEIINKGDGYNSSTTSISEEEVQQQSNNIMTRSSFGNRPHMSKDVRWEAIQHIRAQHGLGSLGLRHFNLLKKLGCGDIGTVYLAELTGTNCLFAIKVMDNEFLERRNKMSRAQTEKDILKMLDHPFLPTLYAHFTSDNLSCLVMECCPGGDLHVLRQKQPGRWFPEPAARFYVAEVLLALEYLHMLGVIYRDLKPENILVRDDGHIMVTDFDLSLRCTVSPTLLNSSSPLHADAMRLSSGSRTGSNCIEPSCFRPKLSRGSGPKKKGKQHRMMMKKLKKSDLIARFKSLPQLVAEPTDARSNSFVGTHEYLAPEIIKGEGHGAAVDWWTFGIFLYELLYGKTPFKGATNEETIANVVLQSLKFPDNPNVSFQAKDLIRGLLVKEPENRLGTEKGAAEIKRHAFFEGLNWALIRCAIPPELPDFYDYGVPNQEGKSNYLDCKAVGEHLEFELF

SEQ ID NO: 71220 - protein, 716 aa, Arabidopsis thaliana
  peptide (1)..(716): Ceres Seq. ID no. 3082088
MTILKKHKNLSLDDQEMSIENKNFGSSSPGSGNNKTVVGLKSVRKVRLLYANTPSSTIVNGKRVAKLTRTIPRGGGAKPALRNKGSMKKKATNVYDEVDGFYDPIAKELLCHRCHFSLKNTAAKEDPSKDSLVEPHEICAKDELASDFSSSSYESSHEISASAETKLDKIRSSLDLMNSETSHVSLTSAFRNKNIKDVSEYGNNEIMEEDSLSGKEVDQKDSVFMSEQSVEIGSFSEKSVVMNPDSPPNKLSLGGAAIEDVNENSEIINKGDGYNSSTTSISEEEVQQQSNNIMTRSSFGNRPHMSKDVRWEAIQHIRAQHGLGSLGLRHFNLLKKLGCGDIGTVYLAELTGTNCLFAIKVMDNEFLERRNKMSRAQTEKDILKMLDHPFLPTLYAHFTSDNLSCLVMECCPGGDLHVLRQKQPGRWFPEPAARFYVAEVLLALEYLHMLGVIYRDLKPENILVRDDGHIMVTDFDLSLRCTVSPTLLNSSSPLHADAMRLSSGSRTGSNCIEPSCFRPKLSRGSGPKKKGKQHRMMMKKLKKSDLIARFKSLPQLVAEPTDARSNSFVGTHEYLAPEIIKGEGHGAAVDWWTFGIFLYELLYGKTPFKGATNEETIANVVLQSLKFPDNPNVSFQAKDLIRGLLVKEPENRLGTEKGAAEIKRHAFFEGLNWALIRCAIPPELPDFYDYGVPNQEGKSNYLDCKAVGEHLEFELF

SEQ ID NO: 71221 - DNA, 1740 bp, Arabidopsis thaliana
  misc_feature (1)..(1740): Ceres Seq. ID no. 3082487
  misc_feature (1)..(1740): Ortholog of  Ceres SEQ ID NO 13574398 as cited in SEQ ID NO 0
atggaggataatagctgtatcgggtttgagggatcgaaaagatttggtgagactagtaaacgtatcattggtttgattgactcagtgactgagtcaacgactgattcaagtcttagcagctcaagttctggtgttggatcgagctccgggaggtcttctgtagctgagagatctgtttcatcacctccgacgaaatcgcagattcttggatggccgttaggacaaggttcatggaggaagagttctggtaaaatgaagaagaaaactccgacaaagatcgatgattttgggtttaagagagttggaacagagacttcagagattgagttgttgaaagagagaatggcgaagttgttgcttggtgaagacatgtctggttctggtgaaggagtttgtcctgctttggctatttctaatgccattaccaatctctatgctgcaatattgggacaacaatggaggctagagccaatccctagtgagaaaaaattaatgtggagaagagaaatcgaagttcttctttctgttagtgatcacattgttgaattggtaccttcctttcagaatttccccaatggaaacaagattgaggtgatgaactgcagaccaagatcagatctctttacttgtcttcctgctcttaggaagctagacaatatgcttattgaaatattagatagttttggagaaacagagttctggtacgttgatcaagggattgtagctgcggaatctgcaaggtctaactctttccgtgaagacggagacaaatggtggcttccgctgccgcgtgtgccatccgatggacttaccgaacaaactaggaagaaactggatcatactcgcgaattcaccaaccaaatcttgaaagcttgtatgtcaatcaacagcattgctttagctgaaatggaagttccacaatcataccttgaagcccttccaaagaacggaagatcttgtcttggagattttctatatagaaacatcacatcggataacttctctgcggatcacttgctagaatcaatagatctttcatctgagcttgcggttgtagaaatggcgaaccgagtagaagcatcaatgtacgtttggaggagaagagctcactcgaggcatctgatatctctgtatcgatccacaagtacaagatgggggatgatagtgaaggagatgatgatgcatcaaaccgatggtgacaaaagggaaatatttgcggagagagcagaaagcttattgatccgtctcaagcaacgtttcccgggacttagacaaacagctttagacacaagcaagatccaatacaacaaggatgtaggaaagtctatacttgagagctactcaagggtattagagagtttagcgtatagcattggtgtacgcatagaggaagtgttgttcatggatgacatcagcaaagatgatggtgatggtgatgatgattcttgttcagacaagttgagattgttgtctaaagaagcagctagtggtggttcaggctctctaagggagaaactttctgctccatcgctgttctctgtgtcattctcaggcacgtcaactccgtacagaactctatctttctctgcatcgactccaagttattcaccaatgccgttgataagccccatcaacggaggaagaggaggagaaagagctccgtttctctctgggaggaacattagagaacgttgcgggtttggtccaaagaaagcattggccaattatctccggggttga

SEQ ID NO: 71222 - protein, 579 aa, Arabidopsis thaliana
  peptide (1)..(579): Ceres Seq. ID no. 3082488
MEDNSCIGFEGSKRFGETSKRIIGLIDSVTESTTDSSLSSSSSGVGSSSGRSSVAERSVSSPPTKSQILGWPLGQGSWRKSSGKMKKKTPTKIDDFGFKRVGTETSEIELLKERMAKLLLGEDMSGSGEGVCPALAISNAITNLYAAILGQQWRLEPIPSEKKLMWRREIEVLLSVSDHIVELVPSFQNFPNGNKIEVMNCRPRSDLFTCLPALRKLDNMLIEILDSFGETEFWYVDQGIVAAESARSNSFREDGDKWWLPLPRVPSDGLTEQTRKKLDHTREFTNQILKACMSINSIALAEMEVPQSYLEALPKNGRSCLGDFLYRNITSDNFSADHLLESIDLSSELAVVEMANRVEASMYVWRRRAHSRHLISLYRSTSTRWGMIVKEMMMHQTDGDKREIFAERAESLLIRLKQRFPGLRQTALDTSKIQYNKDVGKSILESYSRVLESLAYSIGVRIEEVLFMDDISKDDGDGDDDSCSDKLRLLSKEAASGGSGSLREKLSAPSLFSVSFSGTSTPYRTLSFSASTPSYSPMPLISPINGGRGGERAPFLSGRNIRERCGFGPKKALANYLRG

SEQ ID NO: 71223 - protein, 495 aa, Arabidopsis thaliana
  peptide (1)..(495): Ceres Seq. ID no. 3082489
MKKKTPTKIDDFGFKRVGTETSEIELLKERMAKLLLGEDMSGSGEGVCPALAISNAITNLYAAILGQQWRLEPIPSEKKLMWRREIEVLLSVSDHIVELVPSFQNFPNGNKIEVMNCRPRSDLFTCLPALRKLDNMLIEILDSFGETEFWYVDQGIVAAESARSNSFREDGDKWWLPLPRVPSDGLTEQTRKKLDHTREFTNQILKACMSINSIALAEMEVPQSYLEALPKNGRSCLGDFLYRNITSDNFSADHLLESIDLSSELAVVEMANRVEASMYVWRRRAHSRHLISLYRSTSTRWGMIVKEMMMHQTDGDKREIFAERAESLLIRLKQRFPGLRQTALDTSKIQYNKDVGKSILESYSRVLESLAYSIGVRIEEVLFMDDISKDDGDGDDDSCSDKLRLLSKEAASGGSGSLREKLSAPSLFSVSFSGTSTPYRTLSFSASTPSYSPMPLISPINGGRGGERAPFLSGRNIRERCGFGPKKALANYLRG

SEQ ID NO: 71224 - protein, 465 aa, Arabidopsis thaliana
  peptide (1)..(465): Ceres Seq. ID no. 3082490
MAKLLLGEDMSGSGEGVCPALAISNAITNLYAAILGQQWRLEPIPSEKKLMWRREIEVLLSVSDHIVELVPSFQNFPNGNKIEVMNCRPRSDLFTCLPALRKLDNMLIEILDSFGETEFWYVDQGIVAAESARSNSFREDGDKWWLPLPRVPSDGLTEQTRKKLDHTREFTNQILKACMSINSIALAEMEVPQSYLEALPKNGRSCLGDFLYRNITSDNFSADHLLESIDLSSELAVVEMANRVEASMYVWRRRAHSRHLISLYRSTSTRWGMIVKEMMMHQTDGDKREIFAERAESLLIRLKQRFPGLRQTALDTSKIQYNKDVGKSILESYSRVLESLAYSIGVRIEEVLFMDDISKDDGDGDDDSCSDKLRLLSKEAASGGSGSLREKLSAPSLFSVSFSGTSTPYRTLSFSASTPSYSPMPLISPINGGRGGERAPFLSGRNIRERCGFGPKKALANYLRG

SEQ ID NO: 71225 - DNA, 1863 bp, Arabidopsis thaliana
  misc_feature (1)..(1863): Ceres Seq. ID no. 3083111
  misc_feature (1)..(1863): Ortholog of  Ceres SEQ ID NO 12613725 as cited in SEQ ID NO 68196
atggagcacaacaaggttgatacagaacctcaagattcatatgatgatcaacaaaaatgggttctcgattcttcgaccgatagtagaggagagattccgcttcgggctcaaaccggagcttggagagctgcactcttcatcattggtatcgaattcagcgagaggctaagttactttgggatctccacgaacttagtggtctacttgactaccattcttcaccaagatctcaagatggctgtaaaaaatacgaactactggtctggtgtcactactttgatgcctcttcttggaggcttcgtcgcagatgcttatctcggccgttatggaactgtcctacttgcaaccaccatttaccttatgggcttgattctgttaacattgtcttggtttataccgggattgaaagcatgtcatgaagacatgtgtgttgagccaaggaaagcccacgagatagccttcttcattgcaatctacttgatctccataggcactggaggtcataagccatcccttgagagctttggagctgaccaattcgaagatggccatccggaagaacgaaaaatgaaaatgtcttactttaactggtggaatgctggtctatgcgctggtattttaaccgcggtgactgtaattgtctatatcgaagaccggattggttggggtgtggctagcatcatactcacaatagttatggctacttcgttttttatcttccgtatcggcaaaccgttttaccgttatagagcaccttctggtagcccattgaccccaatgttgcaagtctttgtcgccgccattgccaaaagaaatcttccttgtcccagtgattcttctcttcttcatgagttaactaatgaagagtatactaaaggccggcttctttccagctcaaagaatcttaaatttctagacaaagcagcagttattgaggaccgaaacgagaacactaaagccgagaagcagagtccatggcgactcgcaacggttacgaaagtggaagaagttaagctactcatcaacatgattccaatctggttctttacattagcctttggagtatgcgccactcaaagctcaacactctttatcaaacaagccataataatggaccgacacatcacagggacaagcttcatagttcctccagcttcattgttctctctcatagctctctccataatcatcaccgtaacaatctacgagaaactcctcgttcctcttttgagacgtgccacaggaaacgaaagaggcattagcattctacaaagaatcggggtcggtatggttttctccttattcgctatgatcattgctgctctgattgagaagaaaagattagattatgctaaggaacaccacatgaataagaccatgaccttgagtgctatatggttagctcctcaattcctagtcttaggagttgcggatgcttttacccttgtcggtcttcaagaatatttctacgaccaagtcccagattctatgagaagcttaggcatagcgttttacctcagcgtgcttggagcggctagctttgtcaacaatcttttgataacggttagtgatcatttagccgaggaaatttccgggaagggctggtttgggaaagaccttaatagcagccgcttggaccgcttttactggatgctagccgccttgaccgctgcaaatatatgctgctttgtgatcgtggccatgagatacacttacaagactgtgcagccgagtctggctgttgttgctgacggcggtgatgacgttgagacagccacggggacgaataacacgtccaagtttacggctggttcgggaaagaccttaatagcagctgcatggaccgcttttactggatgctag

SEQ ID NO: 71226 - protein, 620 aa, Arabidopsis thaliana
  peptide (1)..(620): Ceres Seq. ID no. 3083112
MEHNKVDTEPQDSYDDQQKWVLDSSTDSRGEIPLRAQTGAWRAALFIIGIEFSERLSYFGISTNLVVYLTTILHQDLKMAVKNTNYWSGVTTLMPLLGGFVADAYLGRYGTVLLATTIYLMGLILLTLSWFIPGLKACHEDMCVEPRKAHEIAFFIAIYLISIGTGGHKPSLESFGADQFEDGHPEERKMKMSYFNWWNAGLCAGILTAVTVIVYIEDRIGWGVASIILTIVMATSFFIFRIGKPFYRYRAPSGSPLTPMLQVFVAAIAKRNLPCPSDSSLLHELTNEEYTKGRLLSSSKNLKFLDKAAVIEDRNENTKAEKQSPWRLATVTKVEEVKLLINMIPIWFFTLAFGVCATQSSTLFIKQAIIMDRHITGTSFIVPPASLFSLIALSIIITVTIYEKLLVPLLRRATGNERGISILQRIGVGMVFSLFAMIIAALIEKKRLDYAKEHHMNKTMTLSAIWLAPQFLVLGVADAFTLVGLQEYFYDQVPDSMRSLGIAFYLSVLGAASFVNNLLITVSDHLAEEISGKGWFGKDLNSSRLDRFYWMLAALTAANICCFVIVAMRYTYKTVQPSLAVVADGGDDVETATGTNNTSKFTAGSGKTLIAAAWTAFTGC

SEQ ID NO: 71227 - protein, 542 aa, Arabidopsis thaliana
  peptide (1)..(542): Ceres Seq. ID no. 3083113
MAVKNTNYWSGVTTLMPLLGGFVADAYLGRYGTVLLATTIYLMGLILLTLSWFIPGLKACHEDMCVEPRKAHEIAFFIAIYLISIGTGGHKPSLESFGADQFEDGHPEERKMKMSYFNWWNAGLCAGILTAVTVIVYIEDRIGWGVASIILTIVMATSFFIFRIGKPFYRYRAPSGSPLTPMLQVFVAAIAKRNLPCPSDSSLLHELTNEEYTKGRLLSSSKNLKFLDKAAVIEDRNENTKAEKQSPWRLATVTKVEEVKLLINMIPIWFFTLAFGVCATQSSTLFIKQAIIMDRHITGTSFIVPPASLFSLIALSIIITVTIYEKLLVPLLRRATGNERGISILQRIGVGMVFSLFAMIIAALIEKKRLDYAKEHHMNKTMTLSAIWLAPQFLVLGVADAFTLVGLQEYFYDQVPDSMRSLGIAFYLSVLGAASFVNNLLITVSDHLAEEISGKGWFGKDLNSSRLDRFYWMLAALTAANICCFVIVAMRYTYKTVQPSLAVVADGGDDVETATGTNNTSKFTAGSGKTLIAAAWTAFTGC

SEQ ID NO: 71228 - protein, 527 aa, Arabidopsis thaliana
  peptide (1)..(527): Ceres Seq. ID no. 3083114
MPLLGGFVADAYLGRYGTVLLATTIYLMGLILLTLSWFIPGLKACHEDMCVEPRKAHEIAFFIAIYLISIGTGGHKPSLESFGADQFEDGHPEERKMKMSYFNWWNAGLCAGILTAVTVIVYIEDRIGWGVASIILTIVMATSFFIFRIGKPFYRYRAPSGSPLTPMLQVFVAAIAKRNLPCPSDSSLLHELTNEEYTKGRLLSSSKNLKFLDKAAVIEDRNENTKAEKQSPWRLATVTKVEEVKLLINMIPIWFFTLAFGVCATQSSTLFIKQAIIMDRHITGTSFIVPPASLFSLIALSIIITVTIYEKLLVPLLRRATGNERGISILQRIGVGMVFSLFAMIIAALIEKKRLDYAKEHHMNKTMTLSAIWLAPQFLVLGVADAFTLVGLQEYFYDQVPDSMRSLGIAFYLSVLGAASFVNNLLITVSDHLAEEISGKGWFGKDLNSSRLDRFYWMLAALTAANICCFVIVAMRYTYKTVQPSLAVVADGGDDVETATGTNNTSKFTAGSGKTLIAAAWTAFTGC

SEQ ID NO: 71229 - DNA, 1185 bp, Arabidopsis thaliana
  misc_feature (1)..(1185): Ceres Seq. ID no. 3083154
  misc_feature (1)..(1185): Ortholog of  Ceres SEQ ID NO 15225703 as cited in SEQ ID NO 59527
  misc_feature (1)..(1185): Ortholog of  Ceres SEQ ID NO 12615972 as cited in SEQ ID NO 62455
  misc_feature (1)..(1185): Ortholog of  Ceres SEQ ID NO 13596229 as cited in SEQ ID NO 68800
  misc_feature (1)..(1185): Ortholog of  Ceres SEQ ID NO 15179393 as cited in SEQ ID NO 0
atgggtgagaaagattcagaaacagctccgatttgggggaaaactcgagagagagagaggagcaacaacaacaatatacagccaatggatttagagtcgtcctcttctgtatctgggcaacaacgatcgttgactcagagtcgaagttcttatgaagaacgaggtagaggagttaaagagtttcggagttggtttccttggctcattccttgtttcgttgttgctaacgttgccgtcttcgtgatcaccatgtatgtcaacaattgtcctaagaaatctggagattgttttgctgatttcttgggtcgtttctcgtttcagaacaccagagaaaatcctcttctgggtccttcctctctcacgttacaaacaatgggtggattagatgttaaaaaagtggttaaaggagatgaaggatggcgtctactttcttgcaattggttacatggaggagttgttcatttactgatgaacatgttgactcttttattcatcggtatacgtatggaacgtgaatttggttttattcggattggattgctttatttgatatcagggtttggaggaagcatattgtcagctcttttcctccgttcaaacatctctgttggagcatctggtgccgtgtttggtttacttggaggaatgctctctgagatctttatcaactggacaatctattctaacaaggttgtgacgattgtaactcttgtattgattgtggcggtgaacttggggctcggtgtgctccctggagtagataactttgctcatatcggagggtttgctacaggttttcttcttggatttgtgctcttaatccgtccccattacggatggatcaaccaaagaaacggtcctggagctaaaccccacaggttcaagatatatcagggcatattatggactatctctcttctcatcttggtcgctgggttcattgttggattgatctctctcttcaacaatgtcgatggaaacgaacattgttcgtggtgtcattatctttcatgtgttccaacatctaaatggagctgtaaccgagaaccagcctcttgcacgacgactcaattaggtaaccaattgagcatgacttgtttgaggaatgggaaatcagcatcttacattttggcaaatccctcggattcacggattaatagcttatgtgttcagctttgccgttga

SEQ ID NO: 71230 - protein, 394 aa, Arabidopsis thaliana
  peptide (1)..(394): Ceres Seq. ID no. 3083155
MGEKDSETAPIWGKTRERERSNNNNIQPMDLESSSSVSGQQRSLTQSRSSYEERGRGVKEFRSWFPWLIPCFVVANVAVFVITMYVNNCPKKSGDCFADFLGRFSFQNTRENPLLGPSSLTLQTMGGLDVKKVVKGDEGWRLLSCNWLHGGVVHLLMNMLTLLFIGIRMEREFGFIRIGLLYLISGFGGSILSALFLRSNISVGASGAVFGLLGGMLSEIFINWTIYSNKVVTIVTLVLIVAVNLGLGVLPGVDNFAHIGGFATGFLLGFVLLIRPHYGWINQRNGPGAKPHRFKIYQGILWTISLLILVAGFIVGLISLFNNVDGNEHCSWCHYLSCVPTSKWSCNREPASCTTTQLGNQLSMTCLRNGKSASYILANPSDSRINSLCVQLCR

SEQ ID NO: 71231 - protein, 366 aa, Arabidopsis thaliana
  peptide (1)..(366): Ceres Seq. ID no. 3083156
MDLESSSSVSGQQRSLTQSRSSYEERGRGVKEFRSWFPWLIPCFVVANVAVFVITMYVNNCPKKSGDCFADFLGRFSFQNTRENPLLGPSSLTLQTMGGLDVKKVVKGDEGWRLLSCNWLHGGVVHLLMNMLTLLFIGIRMEREFGFIRIGLLYLISGFGGSILSALFLRSNISVGASGAVFGLLGGMLSEIFINWTIYSNKVVTIVTLVLIVAVNLGLGVLPGVDNFAHIGGFATGFLLGFVLLIRPHYGWINQRNGPGAKPHRFKIYQGILWTISLLILVAGFIVGLISLFNNVDGNEHCSWCHYLSCVPTSKWSCNREPASCTTTQLGNQLSMTCLRNGKSASYILANPSDSRINSLCVQLCR

SEQ ID NO: 71232 - protein, 311 aa, Arabidopsis thaliana
  peptide (1)..(311): Ceres Seq. ID no. 3083157
MYVNNCPKKSGDCFADFLGRFSFQNTRENPLLGPSSLTLQTMGGLDVKKVVKGDEGWRLLSCNWLHGGVVHLLMNMLTLLFIGIRMEREFGFIRIGLLYLISGFGGSILSALFLRSNISVGASGAVFGLLGGMLSEIFINWTIYSNKVVTIVTLVLIVAVNLGLGVLPGVDNFAHIGGFATGFLLGFVLLIRPHYGWINQRNGPGAKPHRFKIYQGILWTISLLILVAGFIVGLISLFNNVDGNEHCSWCHYLSCVPTSKWSCNREPASCTTTQLGNQLSMTCLRNGKSASYILANPSDSRINSLCVQLCR

SEQ ID NO: 71233 - DNA, 2067 bp, Arabidopsis thaliana
  misc_feature (1)..(2067): Ceres Seq. ID no. 3083243
  misc_feature (1)..(2067): Ortholog of  Ceres SEQ ID NO 13655640 as cited in SEQ ID NO 63844
atgctcgtgctcttcttgcttttgaccatccctactcgagctcaaagaacaacaacggagactccaaaaacagagtttattttccgaggttttagcggaaaccaatcaaatattgtgacaacgggagctgcgacgatcaaactcgacggactattgaggctcactgaccgaaactcaaacgttaccggtacatctttctaccacaaacctgtgagattgctggagactaatacaagttccacaaactccacaatccgttcttttagcacttccttcgtatttgtcatcatccctacaagctctagcaacggaggttttggcttcaccttcacgctatctccaacccctgatcgtaccggagccgaatccgcacagtacttgggacttctcaacaaagcaaacgacgggaattcgacgaatcacgtttttgctgtggaattcgacacagtgcaaggttttaaagacggtgccgatagaacaggcaatcacatcggtctgaatttcaacagtttaacatctgatgtccaagaaccggtcgtgtattacgacaacgaagatcctaaccggaaagaggatttcccactacagagtggcgatccaatccgagcaattttggattacgatgggccaactcaaacgctaaacttaactgtctacccggctaacttgaagtctagacccgtaaggcctttgatctcgcgacctgttccaaagttgtcgcaaatcgtgcaagaagaaatgtatgttggattcacagcagctacagggagagatcagtcgagtgctcactacgtcatgggctggagtttttctagcggcggtgatcttctaactgaagatacgcttgacctcttggaacttcctcgtccgcctccgaacacggcgaagaagagaggttacaattctcaagtactcgctctgatcgtagctctatcgggagtaacagtgatcttgcttgcgttactcttctttttcgtgatgtacaagaaacgattgcaacaaggagaggttcttgaagactgggaaatcaatcatcctcatagacttagatataaagatctctacgctgctacggatggattcaaggagaataggattgtcggaactggaggatttggaaccgttttccgaggaaacttatcgtcaccttcgtctgatcaaatcgccgtgaagaagataactccgaatagtatgcaaggtgttcgagaattcatcgcagagatcgagagtttggggagattaaggcataagaatctggtcaaccttcaaggatggtgcaagcaaaaaaacgatctcttgttaatttatgattatatccctaacggaagcttagactcgctgctctacagtagaccaagacagagcggtgttgttttgtcgtggaacgcacgttttaagattgctaaaggaatcgcgtctggtttgttgtatctccatgaagaatgggaaaaggttgtgattcacagagacataaaacctagcaacgttttgattgaggacgatatgaatcctaggttgggagattttggactcgcgaggctttacgaacgcggatcgcaatcgaacacgaccgtagtcgtgggcacaattgggtacatggcaccagagctagcacgcaacggcaaatcttcgtctgcgtctgatgtttttgcgtttggcgttttgttattagagatagtctccgggagaagaccgactgactcagggacattcttcttggccgattgggttatggaattgcacgcgagaggagagattctccatgcggtggatccgagacttggatttggttacgacggcgttgaggcacggcttgctcttgttgtgggattgctctgttgccatcaaagaccgacgtctcggccgtccatgagaacggtgcttaggtatttgaacggagatgatgatgtacctgaaattgataacgattggggatactcggattcttcaagaagcgatttaggatccaactttgaaggatatgtttcatcggatagggcttcgagctcagtcccatctttctccgttacaagggtttcttctagttctgttatcagtggtagatag

SEQ ID NO: 71234 - protein, 688 aa, Arabidopsis thaliana
  peptide (1)..(688): Ceres Seq. ID no. 3083244
MLVLFLLLTIPTRAQRTTTETPKTEFIFRGFSGNQSNIVTTGAATIKLDGLLRLTDRNSNVTGTSFYHKPVRLLETNTSSTNSTIRSFSTSFVFVIIPTSSSNGGFGFTFTLSPTPDRTGAESAQYLGLLNKANDGNSTNHVFAVEFDTVQGFKDGADRTGNHIGLNFNSLTSDVQEPVVYYDNEDPNRKEDFPLQSGDPIRAILDYDGPTQTLNLTVYPANLKSRPVRPLISRPVPKLSQIVQEEMYVGFTAATGRDQSSAHYVMGWSFSSGGDLLTEDTLDLLELPRPPPNTAKKRGYNSQVLALIVALSGVTVILLALLFFFVMYKKRLQQGEVLEDWEINHPHRLRYKDLYAATDGFKENRIVGTGGFGTVFRGNLSSPSSDQIAVKKITPNSMQGVREFIAEIESLGRLRHKNLVNLQGWCKQKNDLLLIYDYIPNGSLDSLLYSRPRQSGVVLSWNARFKIAKGIASGLLYLHEEWEKVVIHRDIKPSNVLIEDDMNPRLGDFGLARLYERGSQSNTTVVVGTIGYMAPELARNGKSSSASDVFAFGVLLLEIVSGRRPTDSGTFFLADWVMELHARGEILHAVDPRLGFGYDGVEARLALVVGLLCCHQRPTSRPSMRTVLRYLNGDDDVPEIDNDWGYSDSSRSDLGSNFEGYVSSDRASSSVPSFSVTRVSSSSVISGR

SEQ ID NO: 71235 - protein, 442 aa, Arabidopsis thaliana
  peptide (1)..(442): Ceres Seq. ID no. 3083245
MYVGFTAATGRDQSSAHYVMGWSFSSGGDLLTEDTLDLLELPRPPPNTAKKRGYNSQVLALIVALSGVTVILLALLFFFVMYKKRLQQGEVLEDWEINHPHRLRYKDLYAATDGFKENRIVGTGGFGTVFRGNLSSPSSDQIAVKKITPNSMQGVREFIAEIESLGRLRHKNLVNLQGWCKQKNDLLLIYDYIPNGSLDSLLYSRPRQSGVVLSWNARFKIAKGIASGLLYLHEEWEKVVIHRDIKPSNVLIEDDMNPRLGDFGLARLYERGSQSNTTVVVGTIGYMAPELARNGKSSSASDVFAFGVLLLEIVSGRRPTDSGTFFLADWVMELHARGEILHAVDPRLGFGYDGVEARLALVVGLLCCHQRPTSRPSMRTVLRYLNGDDDVPEIDNDWGYSDSSRSDLGSNFEGYVSSDRASSSVPSFSVTRVSSSSVISGR

SEQ ID NO: 71236 - protein, 423 aa, Arabidopsis thaliana
  peptide (1)..(423): Ceres Seq. ID no. 3083246
MGWSFSSGGDLLTEDTLDLLELPRPPPNTAKKRGYNSQVLALIVALSGVTVILLALLFFFVMYKKRLQQGEVLEDWEINHPHRLRYKDLYAATDGFKENRIVGTGGFGTVFRGNLSSPSSDQIAVKKITPNSMQGVREFIAEIESLGRLRHKNLVNLQGWCKQKNDLLLIYDYIPNGSLDSLLYSRPRQSGVVLSWNARFKIAKGIASGLLYLHEEWEKVVIHRDIKPSNVLIEDDMNPRLGDFGLARLYERGSQSNTTVVVGTIGYMAPELARNGKSSSASDVFAFGVLLLEIVSGRRPTDSGTFFLADWVMELHARGEILHAVDPRLGFGYDGVEARLALVVGLLCCHQRPTSRPSMRTVLRYLNGDDDVPEIDNDWGYSDSSRSDLGSNFEGYVSSDRASSSVPSFSVTRVSSSSVISGR

SEQ ID NO: 71237 - DNA, 894 bp, Arabidopsis thaliana
  misc_feature (1)..(894): Ceres Seq. ID no. 3083434
  misc_feature (1)..(894): Ortholog of  Ceres SEQ ID NO 14305363 as cited in SEQ ID NO 1276
  misc_feature (1)..(894): Ortholog of  Ceres SEQ ID NO 14314743 as cited in SEQ ID NO 56854
atgacaaagatcttctactacttcttcatcatcatttttcttcaatctccaccgcatcttcaatcccaaaccatcacaaggaacatcagcattttcatcttggccgggcaaagcaacatggcgggtcgaggcggtgtttataacgacactgccacaaacaccaccgtgtgggacggtgtaattccgccagaatgccgatcaaacccttcgatcctccgtctcacgagtaaactcgagtggaaagaggctaaagagccacttcacgttgacattgacattaataagactaatggtgttggaccggggatgccctttgctaaccgggtggttaaccggtttggtcaggtgggtttggttccgtgctctatcggtgggactaaactaagccaatggcaaaaaggtgagtttctttacgaggagacggtgaagagggctaaagcggcgatggctagtggtggtggtggctcgtaccgggcggttttgtggtatcagggtgagtctgatacggttgatatggtcgatgcttcggtatataagaagagactagtgaagtttttcagtgatcttcgaaatgatttacaacacccaaatcttcctattatccaggtggctctagcgacaggagcaggaccatatcttgacgcggtgagaaaagctcaactgaagactgatcttgagaacgtgtattgcgttgacgccagaggcctacctcttgaaccggacggtttgcatctgaccacttcctctcaggtccagctcggtcacatgatagccgagagtttcttggctattccaaattcagctcgaccatcactctacatgcattttttctccttgttctgttccctttatgtttctttaaatatttttggaactatctttcattttctttag

SEQ ID NO: 71238 - protein, 297 aa, Arabidopsis thaliana
  peptide (1)..(297): Ceres Seq. ID no. 3083436
MTKIFYYFFIIIFLQSPPHLQSQTITRNISIFILAGQSNMAGRGGVYNDTATNTTVWDGVIPPECRSNPSILRLTSKLEWKEAKEPLHVDIDINKTNGVGPGMPFANRVVNRFGQVGLVPCSIGGTKLSQWQKGEFLYEETVKRAKAAMASGGGGSYRAVLWYQGESDTVDMVDASVYKKRLVKFFSDLRNDLQHPNLPIIQVALATGAGPYLDAVRKAQLKTDLENVYCVDARGLPLEPDGLHLTTSSQVQLGHMIAESFLAIPNSARPSLYMHFFSLFCSLYVSLNIFGTIFHFL

SEQ ID NO: 71239 - protein, 258 aa, Arabidopsis thaliana
  peptide (1)..(258): Ceres Seq. ID no. 3083437
MAGRGGVYNDTATNTTVWDGVIPPECRSNPSILRLTSKLEWKEAKEPLHVDIDINKTNGVGPGMPFANRVVNRFGQVGLVPCSIGGTKLSQWQKGEFLYEETVKRAKAAMASGGGGSYRAVLWYQGESDTVDMVDASVYKKRLVKFFSDLRNDLQHPNLPIIQVALATGAGPYLDAVRKAQLKTDLENVYCVDARGLPLEPDGLHLTTSSQVQLGHMIAESFLAIPNSARPSLYMHFFSLFCSLYVSLNIFGTIFHFL

SEQ ID NO: 71240 - protein, 195 aa, Arabidopsis thaliana
  peptide (1)..(195): Ceres Seq. ID no. 3083438
MPFANRVVNRFGQVGLVPCSIGGTKLSQWQKGEFLYEETVKRAKAAMASGGGGSYRAVLWYQGESDTVDMVDASVYKKRLVKFFSDLRNDLQHPNLPIIQVALATGAGPYLDAVRKAQLKTDLENVYCVDARGLPLEPDGLHLTTSSQVQLGHMIAESFLAIPNSARPSLYMHFFSLFCSLYVSLNIFGTIFHFL

SEQ ID NO: 71241 - DNA, 2676 bp, Arabidopsis thaliana
  misc_feature (1)..(2676): Ceres Seq. ID no. 3083884
  misc_feature (1)..(2676): Ortholog of  Ceres SEQ ID NO 15179011 as cited in SEQ ID NO 1042
  misc_feature (1)..(2676): Ortholog of  Ceres SEQ ID NO 13582264 as cited in SEQ ID NO 51010
atggatgatttcaatcttcgtagcgaaaaccctaattcatcatccaccacttcctcatcctcttcctctttccaccgtcacaagagcgaaaccggaaacacaaaacggtcaaggtcaacgtccacgttatcgacggaccctcagagcgtggcggctcgcgacagacggcaccgaattagcgaccgtttcaagattttacaaagcatggtccctggtggtgcgaagatggacactgtatctatgcttgacgaagccattagctacgtcaagttcttgaaggctcagatctggtatcaccaaaacatgcttctcttcataaacgaccacgaaactacatcatcttgtacttactctcccggcgctggagaatttggaccgaaactctttggttatgatgacgattatgcccctataatggacacatattcacaaggcgtgccacttacggttgcggactcgaagcgtgccacacgacacgcattacgagggcactgcaattgtataatcggagaaacagaggaattcgccgatcaacgagagaagatggaagtgcaaattgaagaatctggtaaaaatcaaacctctccggaatcaattgaagcagacaaagcgaagcagatagtggtgcttctgattggtccaccaggaagcggcaaatcgacgttttgtgacaccgcaatgcgttcctctcaccgcccttggtctcgtatctgccaggacattgttaacaatggcaaagctggaacaaaggctcagtgtttaaagatggctacagattctcttagggaaggcaagagcgtctttatagacagatgcaatcttgacagggagcaacgttcagagtttattaagcttggtggtcctgagttcgaagttcatgcagtggttctggagcttcctgctcaggtttgtatatctagatcagttaaaagaactggtcatgaaggaaatctacaaggtggaagagctgcagctgttgtgaataagatgcttcagagtaaggaacttcccaaagtgaatgaagggttttctcggattatgttttgttacagtgacgctgatgttgataatgctgttaacatgtataacaagcttggtccaatggatacccttccttctggctgttttggcgaaaaaaaattagatactaaaagccaacccggtataatgaagttctttaagaaagtcagtgctctgcctgcttcatcttctaatgaagctactaacacaactcggaaagctgatgaaatgacagcaaatgtccgagtttcgccagtcaagcttggttctgctgatattgtacctacactggcattcccatcaatttcgactgcggattttcagtttgatcttgaaaaggcttctgatatcattgtggagaaagcagaggagttcttgtctaaacttgggactgcgcgtctcgtcttggtggacttgagccgcgggtcaaagattctatctctggtcaaggctaaggcttctcagaagaacattgattcagcgaaattcttcacatttgttggggacataactaagcttcgttctgaaggtggtctacactgtaatgtcatagctaatgctactaactggcggcttaaacctggaggtggaggtgtgaatgcagcaatattcaaagctgctggtccagatcttgagactgcgacaagagtacgagcaaacactcttcttcctggaaaagccgtggtagttcctcttccttctacttgtccattacacaatgcagaaggaattacacatgtcatacatgttctaggaccaaacatgaacccaaaccgaccagacaaccttaacaacgactacaccaaggggtgcaaaactctccgggaagcttacacatctctatttgaaggttttctatcagtagtacaggatcaatcgaagttgcccaaacgaagcagtcaaacagctgtgtcagattctggtgaggatattaaggaagactctgagagaaacaaaaagtacaaaggatcacaagataaggccgtaactaataatttggaatcagagtctctggaggacacaagaggcagtggaaagaagatgagtaaaggatggaacacatgggcattggctctccacagcatcgcgatgcacccagagagacacgagaatgtcgtgcttgaatatttagacaacatcgttgtcataaacgaccagtacccaaaggcgcggaaacacgtgctagtactggcgagacaggagagtctagatgggctagaagatgttcgcaaagagaatcttcaacttctgcaggaaatgcacaatgttggtctgaaatgggttgatagattccagaacgaggatgcatctcttatcttccgccttggatatcactcggttccctcgatgcgacaactacacttacacgttataagccaagactttaattcagatagtttgaagaacaagaaacactggaactctttcacgacctcgttcttccgtgactcagttgatgtacttgaagaggtcaacagccaaggcaaggccaatgtggcgagcgaagatctgttgaaaggtgagctgcgttgcaatcggtgtagaagcgcacacccaaatattccaaaacttaaatcacatgtcagaagctgccattctcaatttccagaccatttactccaaaacaatcgccttgtggctagagcagagacgtag

SEQ ID NO: 71242 - protein, 891 aa, Arabidopsis thaliana
  peptide (1)..(891): Ceres Seq. ID no. 3083885
MDDFNLRSENPNSSSTTSSSSSSFHRHKSETGNTKRSRSTSTLSTDPQSVAARDRRHRISDRFKILQSMVPGGAKMDTVSMLDEAISYVKFLKAQIWYHQNMLLFINDHETTSSCTYSPGAGEFGPKLFGYDDDYAPIMDTYSQGVPLTVADSKRATRHALRGHCNCIIGETEEFADQREKMEVQIEESGKNQTSPESIEADKAKQIVVLLIGPPGSGKSTFCDTAMRSSHRPWSRICQDIVNNGKAGTKAQCLKMATDSLREGKSVFIDRCNLDREQRSEFIKLGGPEFEVHAVVLELPAQVCISRSVKRTGHEGNLQGGRAAAVVNKMLQSKELPKVNEGFSRIMFCYSDADVDNAVNMYNKLGPMDTLPSGCFGEKKLDTKSQPGIMKFFKKVSALPASSSNEATNTTRKADEMTANVRVSPVKLGSADIVPTLAFPSISTADFQFDLEKASDIIVEKAEEFLSKLGTARLVLVDLSRGSKILSLVKAKASQKNIDSAKFFTFVGDITKLRSEGGLHCNVIANATNWRLKPGGGGVNAAIFKAAGPDLETATRVRANTLLPGKAVVVPLPSTCPLHNAEGITHVIHVLGPNMNPNRPDNLNNDYTKGCKTLREAYTSLFEGFLSVVQDQSKLPKRSSQTAVSDSGEDIKEDSERNKKYKGSQDKAVTNNLESESLEDTRGSGKKMSKGWNTWALALHSIAMHPERHENVVLEYLDNIVVINDQYPKARKHVLVLARQESLDGLEDVRKENLQLLQEMHNVGLKWVDRFQNEDASLIFRLGYHSVPSMRQLHLHVISQDFNSDSLKNKKHWNSFTTSFFRDSVDVLEEVNSQGKANVASEDLLKGELRCNRCRSAHPNIPKLKSHVRSCHSQFPDHLLQNNRLVARAET

SEQ ID NO: 71243 - protein, 823 aa, Arabidopsis thaliana
  peptide (1)..(823): Ceres Seq. ID no. 3083886
MVPGGAKMDTVSMLDEAISYVKFLKAQIWYHQNMLLFINDHETTSSCTYSPGAGEFGPKLFGYDDDYAPIMDTYSQGVPLTVADSKRATRHALRGHCNCIIGETEEFADQREKMEVQIEESGKNQTSPESIEADKAKQIVVLLIGPPGSGKSTFCDTAMRSSHRPWSRICQDIVNNGKAGTKAQCLKMATDSLREGKSVFIDRCNLDREQRSEFIKLGGPEFEVHAVVLELPAQVCISRSVKRTGHEGNLQGGRAAAVVNKMLQSKELPKVNEGFSRIMFCYSDADVDNAVNMYNKLGPMDTLPSGCFGEKKLDTKSQPGIMKFFKKVSALPASSSNEATNTTRKADEMTANVRVSPVKLGSADIVPTLAFPSISTADFQFDLEKASDIIVEKAEEFLSKLGTARLVLVDLSRGSKILSLVKAKASQKNIDSAKFFTFVGDITKLRSEGGLHCNVIANATNWRLKPGGGGVNAAIFKAAGPDLETATRVRANTLLPGKAVVVPLPSTCPLHNAEGITHVIHVLGPNMNPNRPDNLNNDYTKGCKTLREAYTSLFEGFLSVVQDQSKLPKRSSQTAVSDSGEDIKEDSERNKKYKGSQDKAVTNNLESESLEDTRGSGKKMSKGWNTWALALHSIAMHPERHENVVLEYLDNIVVINDQYPKARKHVLVLARQESLDGLEDVRKENLQLLQEMHNVGLKWVDRFQNEDASLIFRLGYHSVPSMRQLHLHVISQDFNSDSLKNKKHWNSFTTSFFRDSVDVLEEVNSQGKANVASEDLLKGELRCNRCRSAHPNIPKLKSHVRSCHSQFPDHLLQNNRLVARAET

SEQ ID NO: 71244 - protein, 816 aa, Arabidopsis thaliana
  peptide (1)..(816): Ceres Seq. ID no. 3083887
MDTVSMLDEAISYVKFLKAQIWYHQNMLLFINDHETTSSCTYSPGAGEFGPKLFGYDDDYAPIMDTYSQGVPLTVADSKRATRHALRGHCNCIIGETEEFADQREKMEVQIEESGKNQTSPESIEADKAKQIVVLLIGPPGSGKSTFCDTAMRSSHRPWSRICQDIVNNGKAGTKAQCLKMATDSLREGKSVFIDRCNLDREQRSEFIKLGGPEFEVHAVVLELPAQVCISRSVKRTGHEGNLQGGRAAAVVNKMLQSKELPKVNEGFSRIMFCYSDADVDNAVNMYNKLGPMDTLPSGCFGEKKLDTKSQPGIMKFFKKVSALPASSSNEATNTTRKADEMTANVRVSPVKLGSADIVPTLAFPSISTADFQFDLEKASDIIVEKAEEFLSKLGTARLVLVDLSRGSKILSLVKAKASQKNIDSAKFFTFVGDITKLRSEGGLHCNVIANATNWRLKPGGGGVNAAIFKAAGPDLETATRVRANTLLPGKAVVVPLPSTCPLHNAEGITHVIHVLGPNMNPNRPDNLNNDYTKGCKTLREAYTSLFEGFLSVVQDQSKLPKRSSQTAVSDSGEDIKEDSERNKKYKGSQDKAVTNNLESESLEDTRGSGKKMSKGWNTWALALHSIAMHPERHENVVLEYLDNIVVINDQYPKARKHVLVLARQESLDGLEDVRKENLQLLQEMHNVGLKWVDRFQNEDASLIFRLGYHSVPSMRQLHLHVISQDFNSDSLKNKKHWNSFTTSFFRDSVDVLEEVNSQGKANVASEDLLKGELRCNRCRSAHPNIPKLKSHVRSCHSQFPDHLLQNNRLVARAET

SEQ ID NO: 71245 - DNA, 1284 bp, Arabidopsis thaliana
  misc_feature (1)..(1284): Ceres Seq. ID no. 3084009
  misc_feature (1)..(1284): Ortholog of  Ceres SEQ ID NO 14315275 as cited in SEQ ID NO 52556
  misc_feature (1)..(1284): Ortholog of  Ceres SEQ ID NO 13597260 as cited in SEQ ID NO 63885
atgaagaagcgcttaaccacttccacttgttcttcttctccatcttcctctgtttcttcttctactactacttcctctcctattcagtcggaggctccaaggcctaaacgagccaaaagggctaagaaatcttctccttctggtgataaatctcataacccgacaagccctgcttctacccgacgcagctctatctacagaggagtcactagacatagatggactgggagattcgaggctcatctttgggacaaaagctcttggaattcgattcagaacaagaaaggcaaacaaggagcatatgacagtgaagaagcagcagcacatacgtacgatctggctgctctcaagtactggggacccgacaccatcttgaattttccggcagagacgtacacaaaggaattggaagaaatgcagagagtgacaaaggaagaatatttggcttctctccgccgccagagcagtggtttctccagaggcgtctctaaatatcgcggcgtcgctaggcatcaccacaacggaagatgggaggctcggatcggaagagtgtttgggaacaagtacttgtacctcggcacctataatacgcaggaggaagctgctgcagcatatgacatggctgcgattgagtatcgaggcgcaaacgcggttactaatttcgacattagtaattacattgaccggttaaagaagaaaggtgttttcccgttccctgtgaaccaagctaaccatcaagagggtattcttgttgaagccaaacaagaagttgaaacgagagaagcgaaggaagagcctagagaagaagtgaaacaacagtacgtggaagaaccaccgcaagaagaagaagagaaggaagaagagaaagcagagcaacaagaagcagagattgtaggatattcagaagaagcagcagtggtcaattgctgcatagactcttcaaccataatggaaatggatcgttgtggggacaacaatgagctggcttggaacttctgtatgatggatacagggttttctccgtttttgactgatcagaatctcgcgaatgagaatcccatagagtatccggagctattcaatgagttagcatttgaggacaacatcgacttcatgttcgatgatgggaagcacgagtgcttgaacttggaaaatctggattgttgcgtggtgggaagagagagcccaccctcttcttcttcaccattgtcttgcttatctactgactctgcttcatcaacaacaacaacaacaacctcggtttcttgtaactatttggtctga

SEQ ID NO: 71246 - protein, 427 aa, Arabidopsis thaliana
  peptide (1)..(427): Ceres Seq. ID no. 3084010
MKKRLTTSTCSSSPSSSVSSSTTTSSPIQSEAPRPKRAKRAKKSSPSGDKSHNPTSPASTRRSSIYRGVTRHRWTGRFEAHLWDKSSWNSIQNKKGKQGAYDSEEAAAHTYDLAALKYWGPDTILNFPAETYTKELEEMQRVTKEEYLASLRRQSSGFSRGVSKYRGVARHHHNGRWEARIGRVFGNKYLYLGTYNTQEEAAAAYDMAAIEYRGANAVTNFDISNYIDRLKKKGVFPFPVNQANHQEGILVEAKQEVETREAKEEPREEVKQQYVEEPPQEEEEKEEEKAEQQEAEIVGYSEEAAVVNCCIDSSTIMEMDRCGDNNELAWNFCMMDTGFSPFLTDQNLANENPIEYPELFNELAFEDNIDFMFDDGKHECLNLENLDCCVVGRESPPSSSSPLSCLSTDSASSTTTTTTSVSCNYLV

SEQ ID NO: 71247 - protein, 289 aa, Arabidopsis thaliana
  peptide (1)..(289): Ceres Seq. ID no. 3084011
MQRVTKEEYLASLRRQSSGFSRGVSKYRGVARHHHNGRWEARIGRVFGNKYLYLGTYNTQEEAAAAYDMAAIEYRGANAVTNFDISNYIDRLKKKGVFPFPVNQANHQEGILVEAKQEVETREAKEEPREEVKQQYVEEPPQEEEEKEEEKAEQQEAEIVGYSEEAAVVNCCIDSSTIMEMDRCGDNNELAWNFCMMDTGFSPFLTDQNLANENPIEYPELFNELAFEDNIDFMFDDGKHECLNLENLDCCVVGRESPPSSSSPLSCLSTDSASSTTTTTTSVSCNYLV

SEQ ID NO: 71248 - protein, 221 aa, Arabidopsis thaliana
  peptide (1)..(221): Ceres Seq. ID no. 3084012
MAAIEYRGANAVTNFDISNYIDRLKKKGVFPFPVNQANHQEGILVEAKQEVETREAKEEPREEVKQQYVEEPPQEEEEKEEEKAEQQEAEIVGYSEEAAVVNCCIDSSTIMEMDRCGDNNELAWNFCMMDTGFSPFLTDQNLANENPIEYPELFNELAFEDNIDFMFDDGKHECLNLENLDCCVVGRESPPSSSSPLSCLSTDSASSTTTTTTSVSCNYLV

SEQ ID NO: 71249 - DNA, 1161 bp, Arabidopsis thaliana
  misc_feature (1)..(1161): Ceres Seq. ID no. 3084650
  misc_feature (1)..(1161): Ortholog of  Ceres SEQ ID NO 13654989 as cited in SEQ ID NO 63117
  misc_feature (1)..(1161): Ortholog of  Ceres SEQ ID NO 13584744 as cited in SEQ ID NO 69137
atggagacagacgaagcataccaaaagaaagagcgagctgcattagtagccatcgttgtccttgcttgtcttgctttatcttctttgttcgtcgcctttagctactactgctatattcgtaacaaggaaaaaggcgattgtcagaaagtacaagatgttactgaaaatgggttgcaaattttcacctttaagcaattgcattcagcaactggtggatttagcaagtctaatgtggttgggaatggtgggtttggcttggtttatcgtggtgtgcttaacgatggcagaaaagttgctatcaagctcatggatcatgcaggaaagcaaggggaagaagaattcaagatggaggttgagttactgagccgtctgcgttcaccatacttgttggcacttcttggttattgctcagacaatagtcataagctgcttgtgtatgagttcatggcaaatggtggtctgcaggaacacctgtatcttcccaacaggtctggttctgtcccaccaagattagattgggaaactaggatgagaatagctgtggaagctgcaaaaggcttggaatatctccatgaacaagtatcacccccggtgattcatagagactttaagagcagcaatattctgctggacagaaacttcaatgccaaagtttcagattttggattggctaaagtcggatcagataaagctggtggacacgtttctacccgtgtattaggcacacaaggatatgtagctcctgagtacgctttaactggtcacttgacaacaaagtcggatgtctatagctacggtgttgtcctgttagagttactaaccggtagagttccagtagatatgaagagagctacaggagaaggtgttcttgtctcttgggctttgcctcaattggctgatagagacaaagtagtagacataatggatccaacactcgaaggacaatactctacgaaagaagttgttcaagttgcagcaatagcagcaatgtgtgttcaagcagaagctgactacagacccttaatggcagatgtggtgcagtcactggttccattagtgagaaaccgtaggtcagcttcaaagcttagtggctgctctagtagctttagcttggctcggtctcctaactctccgggtaaagcaagcataggttctcaatga

SEQ ID NO: 71250 - protein, 386 aa, Arabidopsis thaliana
  peptide (1)..(386): Ceres Seq. ID no. 3084651
METDEAYQKKERAALVAIVVLACLALSSLFVAFSYYCYIRNKEKGDCQKVQDVTENGLQIFTFKQLHSATGGFSKSNVVGNGGFGLVYRGVLNDGRKVAIKLMDHAGKQGEEEFKMEVELLSRLRSPYLLALLGYCSDNSHKLLVYEFMANGGLQEHLYLPNRSGSVPPRLDWETRMRIAVEAAKGLEYLHEQVSPPVIHRDFKSSNILLDRNFNAKVSDFGLAKVGSDKAGGHVSTRVLGTQGYVAPEYALTGHLTTKSDVYSYGVVLLELLTGRVPVDMKRATGEGVLVSWALPQLADRDKVVDIMDPTLEGQYSTKEVVQVAAIAAMCVQAEADYRPLMADVVQSLVPLVRNRRSASKLSGCSSSFSLARSPNSPGKASIGSQ

SEQ ID NO: 71251 - protein, 284 aa, Arabidopsis thaliana; identical to SEQ ID NO: 47640
  peptide (1)..(284): Ceres Seq. ID no. 3084652

SEQ ID NO: 71252 - protein, 271 aa, Arabidopsis thaliana; identical to SEQ ID NO: 47641
  peptide (1)..(271): Ceres Seq. ID no. 3084653

SEQ ID NO: 71253 - DNA, 2019 bp, Arabidopsis thaliana
  misc_feature (1)..(2019): Ceres Seq. ID no. 3084854
  misc_feature (1)..(2019): Ortholog of  Ceres SEQ ID NO 15177463 as cited in SEQ ID NO 0
atgtttttatctcctcgtagtgctcaccaaaaggttggactctctatgctaattgaccctcttcctgaaaaaaataccaaatctggcaactcatccacaattttacgccaccgaacatttcgccaaaccacacattttgtctgctttctacttcgccagggaaagtggccagagctcatctacttcgcaagaactaagcaatctcttgtaagtcaaaaggcagcacaagcaatcatgttgccaaagttcgatccaacagaccaaaaagcttgtctgtctcttcttgaggatgtgactaccaacgtaaagcagattcaagattctgtcttggaagcaatactttcacgtaatgctcataccgagtatcttagtggtttcctcaacggtcaagctgataagaaaagcttcaagaagaatgtacccgttgtaacctacgaagatattaagccttatatcgatcgtatcgccaatggagagccgtctgatctcatctgtgatcgacccatcagtgtactcttgactagctcaggtacttcaggaggagttccgaagctgattcctttgacaacagaggagttggaacagaggatttcgtttgcttctctctatagacctctactctacaagtacatcgagggtattagagaaagaaaatctttcatgttatatttcgtgactcgagaaagcgagactgcttctgggatactggtcaggactatgataacttgtgttttgaaaagcgtgacgccagctaactcttttatctgggatcaatcacagataagcccgcatgcgattacgacttgttcagacactactcagagcatgtactgccaactgctttgtgggcttctacaacgagataatgtaggtcgccttggtgcaccatttgcttcatcctttctcaaaataatcaagttcttggaggatcactggcctgagttttgctcaaacataaggactggttgtctcagtgactggattacagacccccaatgtgtttcagggatcggtaagttcctcactgctcctaatccggaactagcgagccttatcgagcaagaatgcagtcaaacatcatgggaagcaatagtgaagagactatggccaaaagcaaaatgcatcgaagccattgttacaggaaccatggcacagtacaatccattactggaattctatagcggtggtcttcctgtgatttcaacgttttatggcagctctgaatgtttcttcggtctcaatctcaatcctctgtctaagcctaatgaggtgtcgtacaccatcattccatgtatggcttatttcgagttcttagaggttgagaaagactatgaaagtggtcatgatcccgcagagaatcctgttgtagtcgatcttgtcgatgttaaaatcggtcatgattatgaacctgttgtcacaacgtttgctggtttgtataggtaccgtttaggggacgttttaagagtgactggtttctacaacaatgcgccacagtttcatttcgtgggaagacagaaagttgttctgagcatcgacatggacaagacctacgacgaagacctcctcaaggcagtgactaacgcgagtctcctgcttgagccacatgacctaatgctcatggatttcactagccgtgtggattcctcctcgtatccaggtcactacgtgctctactgggaactcgggagaaaagtcaaggacgccaagcttgagcttgaccagaatgttttggaggaatgctgcttcaccattgaggagtctctggacgcggtttacagaaaaggacgaaagaatgataagaacattggaccacttgagattaaggttgttaagcctggcgctttcgacaagctcatgaacttctttctgtctagaggctcttctgtgagtcagtataagacaccgaggtcggtgacgaatgaagaagccttgaagatattggaggccaacgttgtgtccgagtttcttagccagaaaactccgtcgtgggagctacatgagctgcattccagccgataa

SEQ ID NO: 71254 - protein, 672 aa, Arabidopsis thaliana
  peptide (1)..(672): Ceres Seq. ID no. 3084855
MFLSPRSAHQKVGLSMLIDPLPEKNTKSGNSSTILRHRTFRQTTHFVCFLLRQGKWPELIYFARTKQSLVSQKAAQAIMLPKFDPTDQKACLSLLEDVTTNVKQIQDSVLEAILSRNAHTEYLSGFLNGQADKKSFKKNVPVVTYEDIKPYIDRIANGEPSDLICDRPISVLLTSSGTSGGVPKLIPLTTEELEQRISFASLYRPLLYKYIEGIRERKSFMLYFVTRESETASGILVRTMITCVLKSVTPANSFIWDQSQISPHAITTCSDTTQSMYCQLLCGLLQRDNVGRLGAPFASSFLKIIKFLEDHWPEFCSNIRTGCLSDWITDPQCVSGIGKFLTAPNPELASLIEQECSQTSWEAIVKRLWPKAKCIEAIVTGTMAQYNPLLEFYSGGLPVISTFYGSSECFFGLNLNPLSKPNEVSYTIIPCMAYFEFLEVEKDYESGHDPAENPVVVDLVDVKIGHDYEPVVTTFAGLYRYRLGDVLRVTGFYNNAPQFHFVGRQKVVLSIDMDKTYDEDLLKAVTNASLLLEPHDLMLMDFTSRVDSSSYPGHYVLYWELGRKVKDAKLELDQNVLEECCFTIEESLDAVYRKGRKNDKNIGPLEIKVVKPGAFDKLMNFFLSRGSSVSQYKTPRSVTNEEALKILEANVVSEFLSQKTPSWELHELHSSR

SEQ ID NO: 71255 - protein, 657 aa, Arabidopsis thaliana
  peptide (1)..(657): Ceres Seq. ID no. 3084856
MLIDPLPEKNTKSGNSSTILRHRTFRQTTHFVCFLLRQGKWPELIYFARTKQSLVSQKAAQAIMLPKFDPTDQKACLSLLEDVTTNVKQIQDSVLEAILSRNAHTEYLSGFLNGQADKKSFKKNVPVVTYEDIKPYIDRIANGEPSDLICDRPISVLLTSSGTSGGVPKLIPLTTEELEQRISFASLYRPLLYKYIEGIRERKSFMLYFVTRESETASGILVRTMITCVLKSVTPANSFIWDQSQISPHAITTCSDTTQSMYCQLLCGLLQRDNVGRLGAPFASSFLKIIKFLEDHWPEFCSNIRTGCLSDWITDPQCVSGIGKFLTAPNPELASLIEQECSQTSWEAIVKRLWPKAKCIEAIVTGTMAQYNPLLEFYSGGLPVISTFYGSSECFFGLNLNPLSKPNEVSYTIIPCMAYFEFLEVEKDYESGHDPAENPVVVDLVDVKIGHDYEPVVTTFAGLYRYRLGDVLRVTGFYNNAPQFHFVGRQKVVLSIDMDKTYDEDLLKAVTNASLLLEPHDLMLMDFTSRVDSSSYPGHYVLYWELGRKVKDAKLELDQNVLEECCFTIEESLDAVYRKGRKNDKNIGPLEIKVVKPGAFDKLMNFFLSRGSSVSQYKTPRSVTNEEALKILEANVVSEFLSQKTPSWELHELHSSR

SEQ ID NO: 71256 - protein, 594 aa, Arabidopsis thaliana
  peptide (1)..(594): Ceres Seq. ID no. 3084857
MLPKFDPTDQKACLSLLEDVTTNVKQIQDSVLEAILSRNAHTEYLSGFLNGQADKKSFKKNVPVVTYEDIKPYIDRIANGEPSDLICDRPISVLLTSSGTSGGVPKLIPLTTEELEQRISFASLYRPLLYKYIEGIRERKSFMLYFVTRESETASGILVRTMITCVLKSVTPANSFIWDQSQISPHAITTCSDTTQSMYCQLLCGLLQRDNVGRLGAPFASSFLKIIKFLEDHWPEFCSNIRTGCLSDWITDPQCVSGIGKFLTAPNPELASLIEQECSQTSWEAIVKRLWPKAKCIEAIVTGTMAQYNPLLEFYSGGLPVISTFYGSSECFFGLNLNPLSKPNEVSYTIIPCMAYFEFLEVEKDYESGHDPAENPVVVDLVDVKIGHDYEPVVTTFAGLYRYRLGDVLRVTGFYNNAPQFHFVGRQKVVLSIDMDKTYDEDLLKAVTNASLLLEPHDLMLMDFTSRVDSSSYPGHYVLYWELGRKVKDAKLELDQNVLEECCFTIEESLDAVYRKGRKNDKNIGPLEIKVVKPGAFDKLMNFFLSRGSSVSQYKTPRSVTNEEALKILEANVVSEFLSQKTPSWELHELHSSR

SEQ ID NO: 71257 - DNA, 1245 bp, Arabidopsis thaliana
  misc_feature (1)..(1245): Ceres Seq. ID no. 3085045
  misc_feature (1)..(1245): Ortholog of  Ceres SEQ ID NO 14310713 as cited in SEQ ID NO 53582
atggattaccgaccttctgatagtagtggtacagatgatgacctgcctccatctcatcaaggtagatatcaaagaaacgccagacctaccgggaatggaaggccttcagttctcaattctgctcctttatcacgggtgcacaatgaaatggaaactcaaattcatctcattgagcaagaagcttatagctcgatactccgcgcatttaaagcccagtccgatgctattacctgggagaaagaaagtttgatcactgaactcagaaaagaacttcgagtgtctgatgaggaacacagagagctgttatcaagggttaacgctgatgaaatgatcaggcgaataagggaatggagaaaggcaaacagccttcagtctagtgttcctcagctggttcatgatgctccgagtccggctgtatcaggatcacgtaagaagcaaaagacatcacaatcaatcgcctcattagcgatgggcccaccatctccttctttgcacccttcaatgcaaccatcgtcatctgcactaagaaggggaggtcctccaccaggtccaaagaccaagaagccaaagacatcgatgcagtacccatctacaggcattgctggaaggccccaggctggcgctttaacaaatgaaccaggtgaatcgggatcatatgacccgttggttggaaggaaggtatggacgaagtggcctgatgacaaccaatactacgaagctgttataactgactacaaccctgttgaggggcgtcatgctttagtgtatgatattaactctgcgaatgaaacctgggaatgggtaaatcttaaagagatatctccgggagatatcagatgggaaggtgaagatcctgggatttctcgtaaaggaggacatcctgggcaaggccgtggaacaaaaaccatggctcgtggtggtcctgcaagcaatgcgggtggtagaggtaggggaagcatgaggatgcagcaacctaagacacagaatggcatcggaaagaaagctttaggcgaaatcgaaattctccacactgagacattgttaaaagaggtggaaaaagtttttgggtcagttaaccccaacccagcagaggtagagaaggcaaagagagtgctgagagatcatgaactagctcttatggatgccatcgcaaagcttgaagaaatatcagatggagaaagcgatgatggagccggagcattagagttgcaaaaaggtgttgtagatggtggtggcaaaatgtga

SEQ ID NO: 71258 - protein, 414 aa, Arabidopsis thaliana
  peptide (1)..(414): Ceres Seq. ID no. 3085046
MDYRPSDSSGTDDDLPPSHQGRYQRNARPTGNGRPSVLNSAPLSRVHNEMETQIHLIEQEAYSSILRAFKAQSDAITWEKESLITELRKELRVSDEEHRELLSRVNADEMIRRIREWRKANSLQSSVPQLVHDAPSPAVSGSRKKQKTSQSIASLAMGPPSPSLHPSMQPSSSALRRGGPPPGPKTKKPKTSMQYPSTGIAGRPQAGALTNEPGESGSYDPLVGRKVWTKWPDDNQYYEAVITDYNPVEGRHALVYDINSANETWEWVNLKEISPGDIRWEGEDPGISRKGGHPGQGRGTKTMARGGPASNAGGRGRGSMRMQQPKTQNGIGKKALGEIEILHTETLLKEVEKVFGSVNPNPAEVEKAKRVLRDHELALMDAIAKLEEISDGESDDGAGALELQKGVVDGGGKM

SEQ ID NO: 71259 - protein, 365 aa, Arabidopsis thaliana
  peptide (1)..(365): Ceres Seq. ID no. 3085047
METQIHLIEQEAYSSILRAFKAQSDAITWEKESLITELRKELRVSDEEHRELLSRVNADEMIRRIREWRKANSLQSSVPQLVHDAPSPAVSGSRKKQKTSQSIASLAMGPPSPSLHPSMQPSSSALRRGGPPPGPKTKKPKTSMQYPSTGIAGRPQAGALTNEPGESGSYDPLVGRKVWTKWPDDNQYYEAVITDYNPVEGRHALVYDINSANETWEWVNLKEISPGDIRWEGEDPGISRKGGHPGQGRGTKTMARGGPASNAGGRGRGSMRMQQPKTQNGIGKKALGEIEILHTETLLKEVEKVFGSVNPNPAEVEKAKRVLRDHELALMDAIAKLEEISDGESDDGAGALELQKGVVDGGGKM

SEQ ID NO: 71260 - protein, 305 aa, Arabidopsis thaliana
  peptide (1)..(305): Ceres Seq. ID no. 3085048
MIRRIREWRKANSLQSSVPQLVHDAPSPAVSGSRKKQKTSQSIASLAMGPPSPSLHPSMQPSSSALRRGGPPPGPKTKKPKTSMQYPSTGIAGRPQAGALTNEPGESGSYDPLVGRKVWTKWPDDNQYYEAVITDYNPVEGRHALVYDINSANETWEWVNLKEISPGDIRWEGEDPGISRKGGHPGQGRGTKTMARGGPASNAGGRGRGSMRMQQPKTQNGIGKKALGEIEILHTETLLKEVEKVFGSVNPNPAEVEKAKRVLRDHELALMDAIAKLEEISDGESDDGAGALELQKGVVDGGGKM

SEQ ID NO: 71261 - DNA, 1341 bp, Arabidopsis thaliana
  misc_feature (1)..(1341): Ceres Seq. ID no. 3085140
  misc_feature (1)..(1341): Ortholog of  Ceres SEQ ID NO 14313268 as cited in SEQ ID NO 66794
atgatccgttcttcgattgtaattttatctctgttactaatttcacacttggtttctgcaaaagttctgttgatcggtaacagcacatctctctccttcgacgacgtcgaagccactttcactccgatgattaagagatcggatcaaggcggtgtgttgtatgtagcagagccactcgatgcttgttcggatttggtgaatacggtgaatgtgaaaaatggaactactgtgtctcctccgtatgtgttgattatccgcggtggttgtagtttcgaagataagattaggaatgctcaaaaggctggttataaagctgctattgtttatgactatgaagattttgggttcttagtatcaagaaacccctctggtgtacttatttatggtacgtttgtctccaaagcaactggggaagtacttaaagagtatgcgggtcgtaccgattttgaagtgtggctcatgccaagtttcgagacttcagcatggtcaatcatggctatttctttcatatctctcctcgccatgtcggctgtgctcgctacttgcttctttgtccgtaggcatcgagttaggcgtcggcgtattctggctcttaatggcaatgactttcatcgtatgcccaaaagcatgataatacgtatgcctactaccatatttaacggtatttgtgatgaagcaactacatctatattgtgctgcatatgccttgagaattatgagaaaggggacaagctaaggatcctaccttgccatcacaaatttcatgttgcttgtgtagacttgtggcttggccagaggaaatccttttgcccggtttgcaaacgcgatgcaagaagcatcagtaccgacaagcccccatcagagcacacaccctttctttctcggactcctagcatgaccccgacgtcatcgtttctcttatcatcatcctccacaaccccattgcagtcatctcatgagctaccaatatccatcagagtagacccttctttaccatccacctcaatgcagccacacacagttcctatgtatctctcccactctcgctcccacacaagcttccaaaatggatcaaaccgattttcccggcctataccagttagccggagttcagcagatctcaggaacgccgtttcccaaagatcttacaactcaccccaccaggtttctttgcctcgtttcctccactcaagatatacgcacatacttggcccgggaaatgcatcaagaagccaggttgttgggttgttaacaagccagcgcgagcattcacttcatcaaaatgactcgcgcaggtctttcattcactttgcatctgcgagctccttaccaggctggtaa

SEQ ID NO: 71262 - protein, 446 aa, Arabidopsis thaliana
  peptide (1)..(446): Ceres Seq. ID no. 3085141
MIRSSIVILSLLLISHLVSAKVLLIGNSTSLSFDDVEATFTPMIKRSDQGGVLYVAEPLDACSDLVNTVNVKNGTTVSPPYVLIIRGGCSFEDKIRNAQKAGYKAAIVYDYEDFGFLVSRNPSGVLIYGTFVSKATGEVLKEYAGRTDFEVWLMPSFETSAWSIMAISFISLLAMSAVLATCFFVRRHRVRRRRILALNGNDFHRMPKSMIIRMPTTIFNGICDEATTSILCCICLENYEKGDKLRILPCHHKFHVACVDLWLGQRKSFCPVCKRDARSISTDKPPSEHTPFLSRTPSMTPTSSFLLSSSSTTPLQSSHELPISIRVDPSLPSTSMQPHTVPMYLSHSRSHTSFQNGSNRFSRPIPVSRSSADLRNAVSQRSYNSPHQVSLPRFLHSRYTHILGPGNASRSQVVGLLTSQREHSLHQNDSRRSFIHFASASSLPGW

SEQ ID NO: 71263 - protein, 404 aa, Arabidopsis thaliana
  peptide (1)..(404): Ceres Seq. ID no. 3085142
MIKRSDQGGVLYVAEPLDACSDLVNTVNVKNGTTVSPPYVLIIRGGCSFEDKIRNAQKAGYKAAIVYDYEDFGFLVSRNPSGVLIYGTFVSKATGEVLKEYAGRTDFEVWLMPSFETSAWSIMAISFISLLAMSAVLATCFFVRRHRVRRRRILALNGNDFHRMPKSMIIRMPTTIFNGICDEATTSILCCICLENYEKGDKLRILPCHHKFHVACVDLWLGQRKSFCPVCKRDARSISTDKPPSEHTPFLSRTPSMTPTSSFLLSSSSTTPLQSSHELPISIRVDPSLPSTSMQPHTVPMYLSHSRSHTSFQNGSNRFSRPIPVSRSSADLRNAVSQRSYNSPHQVSLPRFLHSRYTHILGPGNASRSQVVGLLTSQREHSLHQNDSRRSFIHFASASSLPGW

SEQ ID NO: 71264 - protein, 293 aa, Arabidopsis thaliana; identical to SEQ ID NO: 70777
  peptide (1)..(293): Ceres Seq. ID no. 3085143

SEQ ID NO: 71265 - DNA, 1086 bp, Arabidopsis thaliana
  misc_feature (1)..(1086): Ceres Seq. ID no. 3085402
  misc_feature (1)..(1086): Ortholog of  Ceres SEQ ID NO 13648081 as cited in SEQ ID NO 165
  misc_feature (1)..(1086): Ortholog of  Ceres SEQ ID NO 15224803 as cited in SEQ ID NO 56572
  misc_feature (1)..(1086): Ortholog of  Ceres SEQ ID NO 13502952 as cited in SEQ ID NO 62271
  misc_feature (1)..(1086): Ortholog of  Ceres SEQ ID NO 13502973 as cited in SEQ ID NO 68052
  misc_feature (1)..(1086): Ortholog of  Ceres SEQ ID NO 13596000 as cited in SEQ ID NO 68188
  misc_feature (1)..(1086): Ortholog of  Ceres SEQ ID NO 15179420 as cited in SEQ ID NO 0
atgaagaaacttcttttgatatttctcttttctcttgtcattctccaaactgcttgtggattcgattacgacgacaaggaaatagaaagcgaagagggcttatcaacgctttatgatagatggaggagccaccactccgttcctaggagtctaaatgaaagggagaagagattcaacgttttcagacacaatgtcatgcatgtccacaataccaacaagaagaaccgatcctacaaacttaagctcaacaagtttgcagatttaacaattaatgagttcaagaatgcatacaccggttccaacatcaagcatcacagaatgttgcaaggaccaaaacgcggctcaaaacagttcatgtatgatcatgagaatttatccaaattaccgtcctccgttgattggagaaagaaaggtgctgtcactgaaatcaagaatcaaggaaaatgtggaagttgttgggcattctctaccgtagcagctgttgagggaatcaacaagatcaagactaacaaactggtctcactgtctgaacaagaactagtggattgtgatactaagcagaatgaaggttgtaacggaggtcttatggagattgcatttgaattcatcaagaagaacggtggtatcaccactgaagatagctatccttatgaaggtatcgatggaaaatgcgacgcttcaaaggataacggcgtgcttgtgacgatagatgggcatgaagatgtacccgaaaacgacgaaaatgctcttcttaaggctgttgcaaaccaacctgtatctgttgcaattgatgctggaagttcagatttccagttttattcagagggagtgtttacgggatcttgtggaacagagctgaaccatggtgtggcagcggtcgggtatggatctgagagggggaaaaagtattggatagtgagaaactcatggggagctgaatggggagagggaggctatataaagattgaaagagagattgatgaaccggaagggcgttgcggtattgcgatggaggcatcgtatccgatcaagctatcgtcgtctaatcctaccccgaaagacggtgatgtcaaagatgagctctag

SEQ ID NO: 71266 - protein, 361 aa, Arabidopsis thaliana
  peptide (1)..(361): Ceres Seq. ID no. 3085403
MKKLLLIFLFSLVILQTACGFDYDDKEIESEEGLSTLYDRWRSHHSVPRSLNEREKRFNVFRHNVMHVHNTNKKNRSYKLKLNKFADLTINEFKNAYTGSNIKHHRMLQGPKRGSKQFMYDHENLSKLPSSVDWRKKGAVTEIKNQGKCGSCWAFSTVAAVEGINKIKTNKLVSLSEQELVDCDTKQNEGCNGGLMEIAFEFIKKNGGITTEDSYPYEGIDGKCDASKDNGVLVTIDGHEDVPENDENALLKAVANQPVSVAIDAGSSDFQFYSEGVFTGSCGTELNHGVAAVGYGSERGKKYWIVRNSWGAEWGEGGYIKIEREIDEPEGRCGIAMEASYPIKLSSSNPTPKDGDVKDEL

SEQ ID NO: 71267 - protein, 296 aa, Arabidopsis thaliana
  peptide (1)..(296): Ceres Seq. ID no. 3085404
MHVHNTNKKNRSYKLKLNKFADLTINEFKNAYTGSNIKHHRMLQGPKRGSKQFMYDHENLSKLPSSVDWRKKGAVTEIKNQGKCGSCWAFSTVAAVEGINKIKTNKLVSLSEQELVDCDTKQNEGCNGGLMEIAFEFIKKNGGITTEDSYPYEGIDGKCDASKDNGVLVTIDGHEDVPENDENALLKAVANQPVSVAIDAGSSDFQFYSEGVFTGSCGTELNHGVAAVGYGSERGKKYWIVRNSWGAEWGEGGYIKIEREIDEPEGRCGIAMEASYPIKLSSSNPTPKDGDVKDEL

SEQ ID NO: 71268 - protein, 255 aa, Arabidopsis thaliana
  peptide (1)..(255): Ceres Seq. ID no. 3085405
MLQGPKRGSKQFMYDHENLSKLPSSVDWRKKGAVTEIKNQGKCGSCWAFSTVAAVEGINKIKTNKLVSLSEQELVDCDTKQNEGCNGGLMEIAFEFIKKNGGITTEDSYPYEGIDGKCDASKDNGVLVTIDGHEDVPENDENALLKAVANQPVSVAIDAGSSDFQFYSEGVFTGSCGTELNHGVAAVGYGSERGKKYWIVRNSWGAEWGEGGYIKIEREIDEPEGRCGIAMEASYPIKLSSSNPTPKDGDVKDEL

SEQ ID NO: 71269 - DNA, 2259 bp, Arabidopsis thaliana
  misc_feature (1)..(2259): Ceres Seq. ID no. 3085597
  misc_feature (1)..(2259): Ortholog of  Ceres SEQ ID NO 12586556 as cited in SEQ ID NO 64667
  misc_feature (1)..(2259): Ortholog of  Ceres SEQ ID NO 13660894 as cited in SEQ ID NO 67475
atgacgattctcactgtacagtcttcgtttagctcttctcgagttccggttataaagaacgcgaatttcgatcaaattccgtcgtgggtttctctgaagtcgagcacttcttctccgtctgttaaaatctcgcataagcaaggacaagtagagaatcttcatttggtttcgttgtcgaagcataggaagctcaacgaagcatttgagtttttgcaagaaatggataaggctggtgtctccgttagctcgtattcttaccaatgtctctttgaggcttgcagagaattgaggtctttatctcatgggagactcttgcacgatcgcatgcggatgggtatcgagaatccttctgtgcttcttcagaactgtgtgcttcaaatgtactgtgagtgtcggagcttggaagatgcagataagctgttcgatgaaatgtctgagttaaatgcagtttctcgtacaacgatgatatctgcttacgccgaacaaggaattttggataaagctgttggtttgttctcgggaatgctagcgtcaggcgacaagcctccttcttccatgtatacgacactcttgaaatctttggtaaaccccagggctttagactttggtagacagattcatgctcatgttatacgtgctgggttatgtagcaacacatctatagagaccgggatcgtgaacatgtacgtgaaatgtggttggttagtgggtgctaagcgagtgttcgatcagatggcagtgaagaaaccagtggcttgtacgggattgatggtaggttatactcaagctggaagagcaagagatgctttgaaactatttgtggatttggtaacggaaggtgttgaatgggacagttttgtgttttcagttgttcttaaagcgtgtgcttctcttgaagagcttaatcttggcaagcaaattcatgcctgtgtcgctaagcttggattggaatctgaagtctcggttggaactccacttgttgatttttacatcaaatgttccagcttcgagtctgcttgtcgtgcatttcaagaaatccgtgagccaaacgatgtttcctggagcgcaatcatctccggatactgtcaaatgagtcaatttgaggaggctgttaaaaccttcaagtctttgagaagcaaaaacgcatcgattctaaattcattcacatatactagcatattccaagcatgctcggtacttgcagattgcaacattggtggccaagtccatgcagatgctataaaaagaagtctgattggatctcagtatggagaaagcgctcttattacgatgtattcaaaatgtggatgcttagatgatgcaaatgaagtctttgagtccatggacaaccccgatattgttgcatggactgcttttatatcaggtcatgcttactatggaaatgcctctgaagctttgagattgtttgagaaaatggtgagttgtggtatgaagccaaactcagttacatttattgcggttttaaccgcgtgcagccatgcaggcctagttgaacagggaaagcattgcttggacacgatgcttcgaaaatataatgtggctccgactattgatcattatgattgtatgatcgacatttatgcccgttcgggactattagacgaagctctcaaatttatgaagaatatgccttttgaacctgatgcaatgagctggaaatgctttctaagtggatgttggactcataagaatcttgaactgggcgaaattgctggtgaggaacttcgccaactcgatccagaagatacagctggatatgtgctaccgtttaatctgtacacctgggctggaaaatgggaagaagctgctgaaatgatgaaactaatgaatgagaggatgttaaagaaggaactgagctgcagctggatccaagaaaagggtaagattcatcggtttatagtgggtgataaacaccatccacaaactcaggagatctatgagaagcttaaggagtttgatggtttcatggaaggtgatatgtttcagtgtaatatgacagagagaagagaacagcttcttgatcatagtgagagacttgccattgcatttgggctgatatcggtgcatggcaatgcccctgcacctattaaggtgttcaagaatcttcgggcatgcccagattgtcatgagtttgcaaagcatgtatctttggttacaggacatgaaatcgtcatccgagattccaggaggtttcaccatttcaaggagggaaagtgttcttgcaacgattactggtga

SEQ ID NO: 71270 - protein, 752 aa, Arabidopsis thaliana
  peptide (1)..(752): Ceres Seq. ID no. 3085598
MTILTVQSSFSSSRVPVIKNANFDQIPSWVSLKSSTSSPSVKISHKQGQVENLHLVSLSKHRKLNEAFEFLQEMDKAGVSVSSYSYQCLFEACRELRSLSHGRLLHDRMRMGIENPSVLLQNCVLQMYCECRSLEDADKLFDEMSELNAVSRTTMISAYAEQGILDKAVGLFSGMLASGDKPPSSMYTTLLKSLVNPRALDFGRQIHAHVIRAGLCSNTSIETGIVNMYVKCGWLVGAKRVFDQMAVKKPVACTGLMVGYTQAGRARDALKLFVDLVTEGVEWDSFVFSVVLKACASLEELNLGKQIHACVAKLGLESEVSVGTPLVDFYIKCSSFESACRAFQEIREPNDVSWSAIISGYCQMSQFEEAVKTFKSLRSKNASILNSFTYTSIFQACSVLADCNIGGQVHADAIKRSLIGSQYGESALITMYSKCGCLDDANEVFESMDNPDIVAWTAFISGHAYYGNASEALRLFEKMVSCGMKPNSVTFIAVLTACSHAGLVEQGKHCLDTMLRKYNVAPTIDHYDCMIDIYARSGLLDEALKFMKNMPFEPDAMSWKCFLSGCWTHKNLELGEIAGEELRQLDPEDTAGYVLPFNLYTWAGKWEEAAEMMKLMNERMLKKELSCSWIQEKGKIHRFIVGDKHHPQTQEIYEKLKEFDGFMEGDMFQCNMTERREQLLDHSERLAIAFGLISVHGNAPAPIKVFKNLRACPDCHEFAKHVSLVTGHEIVIRDSRRFHHFKEGKCSCNDYW

SEQ ID NO: 71271 - protein, 679 aa, Arabidopsis thaliana
  peptide (1)..(679): Ceres Seq. ID no. 3085599
MDKAGVSVSSYSYQCLFEACRELRSLSHGRLLHDRMRMGIENPSVLLQNCVLQMYCECRSLEDADKLFDEMSELNAVSRTTMISAYAEQGILDKAVGLFSGMLASGDKPPSSMYTTLLKSLVNPRALDFGRQIHAHVIRAGLCSNTSIETGIVNMYVKCGWLVGAKRVFDQMAVKKPVACTGLMVGYTQAGRARDALKLFVDLVTEGVEWDSFVFSVVLKACASLEELNLGKQIHACVAKLGLESEVSVGTPLVDFYIKCSSFESACRAFQEIREPNDVSWSAIISGYCQMSQFEEAVKTFKSLRSKNASILNSFTYTSIFQACSVLADCNIGGQVHADAIKRSLIGSQYGESALITMYSKCGCLDDANEVFESMDNPDIVAWTAFISGHAYYGNASEALRLFEKMVSCGMKPNSVTFIAVLTACSHAGLVEQGKHCLDTMLRKYNVAPTIDHYDCMIDIYARSGLLDEALKFMKNMPFEPDAMSWKCFLSGCWTHKNLELGEIAGEELRQLDPEDTAGYVLPFNLYTWAGKWEEAAEMMKLMNERMLKKELSCSWIQEKGKIHRFIVGDKHHPQTQEIYEKLKEFDGFMEGDMFQCNMTERREQLLDHSERLAIAFGLISVHGNAPAPIKVFKNLRACPDCHEFAKHVSLVTGHEIVIRDSRRFHHFKEGKCSCNDYW

SEQ ID NO: 71272 - protein, 644 aa, Arabidopsis thaliana
  peptide (1)..(644): Ceres Seq. ID no. 3085600
MRMGIENPSVLLQNCVLQMYCECRSLEDADKLFDEMSELNAVSRTTMISAYAEQGILDKAVGLFSGMLASGDKPPSSMYTTLLKSLVNPRALDFGRQIHAHVIRAGLCSNTSIETGIVNMYVKCGWLVGAKRVFDQMAVKKPVACTGLMVGYTQAGRARDALKLFVDLVTEGVEWDSFVFSVVLKACASLEELNLGKQIHACVAKLGLESEVSVGTPLVDFYIKCSSFESACRAFQEIREPNDVSWSAIISGYCQMSQFEEAVKTFKSLRSKNASILNSFTYTSIFQACSVLADCNIGGQVHADAIKRSLIGSQYGESALITMYSKCGCLDDANEVFESMDNPDIVAWTAFISGHAYYGNASEALRLFEKMVSCGMKPNSVTFIAVLTACSHAGLVEQGKHCLDTMLRKYNVAPTIDHYDCMIDIYARSGLLDEALKFMKNMPFEPDAMSWKCFLSGCWTHKNLELGEIAGEELRQLDPEDTAGYVLPFNLYTWAGKWEEAAEMMKLMNERMLKKELSCSWIQEKGKIHRFIVGDKHHPQTQEIYEKLKEFDGFMEGDMFQCNMTERREQLLDHSERLAIAFGLISVHGNAPAPIKVFKNLRACPDCHEFAKHVSLVTGHEIVIRDSRRFHHFKEGKCSCNDYW

SEQ ID NO: 71273 - DNA, 1947 bp, Arabidopsis thaliana
  misc_feature (1)..(1947): Ceres Seq. ID no. 3085829
  misc_feature (1)..(1947): Ortholog of  Ceres SEQ ID NO 14303680 as cited in SEQ ID NO 66019
atgggagagactgaggatgaaaaagatgcttctttggctgatatcgagaaggagtgtctctcggtttataagcgaaaggtcgaggaggctagtcggggtaaagcgaatttgctgaaagaaatcgctgttggcagagcagaaattgcagctattggctcttctatgggtggacaagagattcattctaacagcaggttaggagaaaacttgaaagaggagcttgagaatgttaatgtgcaattggatggactgcgcaaaaggaaagctgagagaatgattcggtttaatgaagttatcgatcagttactgaagttgtcactgcaacttggaaatccaacagattatctgaagaagtttgctgctgaagagaccgatctttcgcttcagaggttggaggaattgcgtagccagttgggtgagctccaaaatgaaaagagcaaaagattggaagaggtagagtgtttgctgaaaacgcttaactcgttgtgctcggttcttggtgaagatttcaaaggcatgataagagggatacattcatctctggttgattccaacactagggatgtgagcagaagtactcttgataagttggatatgatgattgtgaatttacgagaggccaagttacagcgaatgcagaaggttcaagatcttgcagtgtccttgttggagctctggaatctgctggacacgcctgcggaagagcaaaagatatttcacaatgtcacatgtagcatcgctttgactgagtctgaaataactgaggccaacatactttctgttgcttccattaaacgcgttgaggatgaagtcattaggcttagcaagatcaaaataactaagatcaaagaggtgatactgaggaagaggcttgagcttgaggaaatatcaaggaagatgcacatggccaccgaagttcttaaatcagaaaacttttcagttgaagctatagaatctggtgtcaaggatcctgagcagttgttagagcaaattgattccgagattgcaaaggtcaaagaggaagcttcaagcaggaaggagattcttgaaaaagtggagaaatggatgtcagcttgtgaagaagagtcttggctggaagagtacaatcgggatgataaccggtacaacgctggaagaggagctcatcttacattgaagcgtgcagaaaaagcccgtttacttgtcaataaacttcctgggatggtggaagctttgaccgccaaagtcactgcttgggagaatgaaagaggaaatgaattcttatatgatggggtccgagtcttatcgatgcttggtcagtacaagactgtatgggaagagaaagagcatgaaaaacagagacagagagatatgaagaaacttcatggacaactcataacagagcaagaagctctttatgggtctaaaccaagcccaaataaaagcggaaagaaaccactgagaacaccagtaaatgctgccatgaacagaaaactctcccttggtggtgccatgcttcatcaaagcttaaagcatgagaaggcaacactcaatagcaaaaggacgaagtactatgaccagaacgctactagtagaagagattcagctcttccaactctttcagggaggagaaactcagagcttcctggtcgtatcagatcaaagaacgttccggttgcaggaaaagctgcgagatctccaatgcttaggaagcctctttcacctgtcacttccaatatcttgaattccccagaagatcatcacaaggatgcttacacaacaaaggagagaatcttgacacctaaaaccaacgaagaaaagaaaagagctgttccaacaactcctgcagcttcagtcgctatgacagaggcaacaacgccgttcactcctgctgtggagaagagaatggatgaggaagacgttattgttgagtattcgtttgaagaggttagggccggtttttgctaa

SEQ ID NO: 71274 - protein, 648 aa, Arabidopsis thaliana
  peptide (1)..(648): Ceres Seq. ID no. 3085830
MGETEDEKDASLADIEKECLSVYKRKVEEASRGKANLLKEIAVGRAEIAAIGSSMGGQEIHSNSRLGENLKEELENVNVQLDGLRKRKAERMIRFNEVIDQLLKLSLQLGNPTDYLKKFAAEETDLSLQRLEELRSQLGELQNEKSKRLEEVECLLKTLNSLCSVLGEDFKGMIRGIHSSLVDSNTRDVSRSTLDKLDMMIVNLREAKLQRMQKVQDLAVSLLELWNLLDTPAEEQKIFHNVTCSIALTESEITEANILSVASIKRVEDEVIRLSKIKITKIKEVILRKRLELEEISRKMHMATEVLKSENFSVEAIESGVKDPEQLLEQIDSEIAKVKEEASSRKEILEKVEKWMSACEEESWLEEYNRDDNRYNAGRGAHLTLKRAEKARLLVNKLPGMVEALTAKVTAWENERGNEFLYDGVRVLSMLGQYKTVWEEKEHEKQRQRDMKKLHGQLITEQEALYGSKPSPNKSGKKPLRTPVNAAMNRKLSLGGAMLHQSLKHEKATLNSKRTKYYDQNATSRRDSALPTLSGRRNSELPGRIRSKNVPVAGKAARSPMLRKPLSPVTSNILNSPEDHHKDAYTTKERILTPKTNEEKKRAVPTTPAASVAMTEATTPFTPAVEKRMDEEDVIVEYSFEEVRAGFC

SEQ ID NO: 71275 - protein, 594 aa, Arabidopsis thaliana
  peptide (1)..(594): Ceres Seq. ID no. 3085831
MGGQEIHSNSRLGENLKEELENVNVQLDGLRKRKAERMIRFNEVIDQLLKLSLQLGNPTDYLKKFAAEETDLSLQRLEELRSQLGELQNEKSKRLEEVECLLKTLNSLCSVLGEDFKGMIRGIHSSLVDSNTRDVSRSTLDKLDMMIVNLREAKLQRMQKVQDLAVSLLELWNLLDTPAEEQKIFHNVTCSIALTESEITEANILSVASIKRVEDEVIRLSKIKITKIKEVILRKRLELEEISRKMHMATEVLKSENFSVEAIESGVKDPEQLLEQIDSEIAKVKEEASSRKEILEKVEKWMSACEEESWLEEYNRDDNRYNAGRGAHLTLKRAEKARLLVNKLPGMVEALTAKVTAWENERGNEFLYDGVRVLSMLGQYKTVWEEKEHEKQRQRDMKKLHGQLITEQEALYGSKPSPNKSGKKPLRTPVNAAMNRKLSLGGAMLHQSLKHEKATLNSKRTKYYDQNATSRRDSALPTLSGRRNSELPGRIRSKNVPVAGKAARSPMLRKPLSPVTSNILNSPEDHHKDAYTTKERILTPKTNEEKKRAVPTTPAASVAMTEATTPFTPAVEKRMDEEDVIVEYSFEEVRAGFC

SEQ ID NO: 71276 - protein, 557 aa, Arabidopsis thaliana
  peptide (1)..(557): Ceres Seq. ID no. 3085832
MIRFNEVIDQLLKLSLQLGNPTDYLKKFAAEETDLSLQRLEELRSQLGELQNEKSKRLEEVECLLKTLNSLCSVLGEDFKGMIRGIHSSLVDSNTRDVSRSTLDKLDMMIVNLREAKLQRMQKVQDLAVSLLELWNLLDTPAEEQKIFHNVTCSIALTESEITEANILSVASIKRVEDEVIRLSKIKITKIKEVILRKRLELEEISRKMHMATEVLKSENFSVEAIESGVKDPEQLLEQIDSEIAKVKEEASSRKEILEKVEKWMSACEEESWLEEYNRDDNRYNAGRGAHLTLKRAEKARLLVNKLPGMVEALTAKVTAWENERGNEFLYDGVRVLSMLGQYKTVWEEKEHEKQRQRDMKKLHGQLITEQEALYGSKPSPNKSGKKPLRTPVNAAMNRKLSLGGAMLHQSLKHEKATLNSKRTKYYDQNATSRRDSALPTLSGRRNSELPGRIRSKNVPVAGKAARSPMLRKPLSPVTSNILNSPEDHHKDAYTTKERILTPKTNEEKKRAVPTTPAASVAMTEATTPFTPAVEKRMDEEDVIVEYSFEEVRAGFC

SEQ ID NO: 71277 - DNA, 1596 bp, Arabidopsis thaliana
  misc_feature (1)..(1596): Ceres Seq. ID no. 3085952
  misc_feature (1)..(1596): Ortholog of  Ceres SEQ ID NO 14313131 as cited in SEQ ID NO 54934
atggccacaaggagattaagagcattcaagagatggatgcaagctaacggcgttgattgcagcgaagctctcaacctcgtcgacgacgaaaacgatggtgtctctgtgagagcattctgcgatttgaaggaaggagatgttgttgccaatatctcaaaaactgcttgtctcactatcaaaaccagtggagctcgtgagatgatcgaatctgctgatttagatggaagtttaggtctctctgtggctctcatgtacgagagaagcttaggtgaagaatctccttgggctggttatcttcagattcttcctattcaagaagatttgcctcttgtttggtctcttgaagacttagattctctcttatctggaactgagcttcataagttggtgaaggaagatcatgttcttatatatgaggattggaaagaaaacattttgccgcttacctcttcactgcctcagaatgttgattctgattcgtttggaatcaaagagtatcttgctgctaagagtttaattgcttcacggtctttcgaaatcgatgattaccatggatccgggatggttcctcttgcagacctctttaatcataaaactggggcagaagacgttcacttcactcatgaatccgattctgaagctgatgaatctgacaacgatgatgctgcaaatgagaccactgatgaagacgagccttccagtaaaatttcttcctcgcctgagcagtcttttgaggaagttcctggtgaaaacactgatgacgaagccaaagaagaagaagaagaagaagaagaagaagaagaaggagaagaagaagaagaaggagaagaggaagaagaaaactcttcaatgctgcaaaatgatcaatccggtctaaaaatgattatggtgaaggatgtctcagctggagctgaggtattcaatacatacggtttgatgggtaatgctgcattactccacaggtacggatttacagagctcgataatccatatgacatagtaaacatagatctagaattagtaaccgaatggagcacatcctcattcacaagccggtacactcgagctagactggccttgtggagaaaactaggttacacaggatgcgagagtcaaaactcagaatactttgaggtatcttcaaccggagaaccccaaaccgagctcctgatcctactctatatactgctcttaccagacgacacatacaataaactggatctagctgaatcaacaacaggagcttctccctcgaaagaaggaaaaagatcttcttcttacgagataacaattgggaaacacaagtttgtgtatggagaaagcggaaatgatattcttctgacagatggtgtttgtgaagctcttctaactattgtggataagcgagagagtttatatggatcattgagctcattggaagatgacattgttagggtgaagacttgttgtcttccgagagacaggagactatatcattcgcttgtgttgcgtgtgagtgagaggaagattctaaagaagcttaggagctacatccatacccagaccaatgagtcttccagcggaaagcgccggaagaagatggttccaaaatcctag

SEQ ID NO: 71278 - protein, 531 aa, Arabidopsis thaliana
  peptide (1)..(531): Ceres Seq. ID no. 3085953
MATRRLRAFKRWMQANGVDCSEALNLVDDENDGVSVRAFCDLKEGDVVANISKTACLTIKTSGAREMIESADLDGSLGLSVALMYERSLGEESPWAGYLQILPIQEDLPLVWSLEDLDSLLSGTELHKLVKEDHVLIYEDWKENILPLTSSLPQNVDSDSFGIKEYLAAKSLIASRSFEIDDYHGSGMVPLADLFNHKTGAEDVHFTHESDSEADESDNDDAANETTDEDEPSSKISSSPEQSFEEVPGENTDDEAKEEEEEEEEEEEGEEEEEGEEEEENSSMLQNDQSGLKMIMVKDVSAGAEVFNTYGLMGNAALLHRYGFTELDNPYDIVNIDLELVTEWSTSSFTSRYTRARLALWRKLGYTGCESQNSEYFEVSSTGEPQTELLILLYILLLPDDTYNKLDLAESTTGASPSKEGKRSSSYEITIGKHKFVYGESGNDILLTDGVCEALLTIVDKRESLYGSLSSLEDDIVRVKTCCLPRDRRLYHSLVLRVSERKILKKLRSYIHTQTNESSSGKRRKKMVPKS

SEQ ID NO: 71279 - protein, 519 aa, Arabidopsis thaliana
  peptide (1)..(519): Ceres Seq. ID no. 3085954
MQANGVDCSEALNLVDDENDGVSVRAFCDLKEGDVVANISKTACLTIKTSGAREMIESADLDGSLGLSVALMYERSLGEESPWAGYLQILPIQEDLPLVWSLEDLDSLLSGTELHKLVKEDHVLIYEDWKENILPLTSSLPQNVDSDSFGIKEYLAAKSLIASRSFEIDDYHGSGMVPLADLFNHKTGAEDVHFTHESDSEADESDNDDAANETTDEDEPSSKISSSPEQSFEEVPGENTDDEAKEEEEEEEEEEEGEEEEEGEEEEENSSMLQNDQSGLKMIMVKDVSAGAEVFNTYGLMGNAALLHRYGFTELDNPYDIVNIDLELVTEWSTSSFTSRYTRARLALWRKLGYTGCESQNSEYFEVSSTGEPQTELLILLYILLLPDDTYNKLDLAESTTGASPSKEGKRSSSYEITIGKHKFVYGESGNDILLTDGVCEALLTIVDKRESLYGSLSSLEDDIVRVKTCCLPRDRRLYHSLVLRVSERKILKKLRSYIHTQTNESSSGKRRKKMVPKS

SEQ ID NO: 71280 - protein, 465 aa, Arabidopsis thaliana
  peptide (1)..(465): Ceres Seq. ID no. 3085955
MIESADLDGSLGLSVALMYERSLGEESPWAGYLQILPIQEDLPLVWSLEDLDSLLSGTELHKLVKEDHVLIYEDWKENILPLTSSLPQNVDSDSFGIKEYLAAKSLIASRSFEIDDYHGSGMVPLADLFNHKTGAEDVHFTHESDSEADESDNDDAANETTDEDEPSSKISSSPEQSFEEVPGENTDDEAKEEEEEEEEEEEGEEEEEGEEEEENSSMLQNDQSGLKMIMVKDVSAGAEVFNTYGLMGNAALLHRYGFTELDNPYDIVNIDLELVTEWSTSSFTSRYTRARLALWRKLGYTGCESQNSEYFEVSSTGEPQTELLILLYILLLPDDTYNKLDLAESTTGASPSKEGKRSSSYEITIGKHKFVYGESGNDILLTDGVCEALLTIVDKRESLYGSLSSLEDDIVRVKTCCLPRDRRLYHSLVLRVSERKILKKLRSYIHTQTNESSSGKRRKKMVPKS

SEQ ID NO: 71281 - DNA, 795 bp, Arabidopsis thaliana
  misc_feature (1)..(795): Ceres Seq. ID no. 3086207
  misc_feature (1)..(795): Ortholog of  Ceres SEQ ID NO 14314068 as cited in SEQ ID NO 52242
  misc_feature (1)..(795): Ortholog of  Ceres SEQ ID NO 14314999 as cited in SEQ ID NO 52342
  misc_feature (1)..(795): Ortholog of  Ceres SEQ ID NO 15177057 as cited in SEQ ID NO 55817
  misc_feature (1)..(795): Ortholog of  Ceres SEQ ID NO 13585458 as cited in SEQ ID NO 60907
  misc_feature (1)..(795): Ortholog of  Ceres SEQ ID NO 13598678 as cited in SEQ ID NO 61508
  misc_feature (1)..(795): Ortholog of  Ceres SEQ ID NO 12625392 as cited in SEQ ID NO 63315
  misc_feature (1)..(795): Ortholog of  Ceres SEQ ID NO 13598319 as cited in SEQ ID NO 68758
  misc_feature (1)..(795): Ortholog of  Ceres SEQ ID NO 12589816 as cited in SEQ ID NO 0
atggcttcctcatctctcaaatgtttttcttttatcgttgttcttacaactttctttgcaatctcattgaagccatgttattgccacaataaaacccactggaacaccgccggcatcacgtggtatggcgaccgagaaggtcctggcaccacaggaggagcttgtggatatggtgatgcagtggcaaaacacccgtacagatgtatggtttcagccggaggaccttcattgttcaaagacggaaagggttgtggggcttgttacaggcttaaatgcgaccatccgttgtgcacgaaaaagccgatcaaggtgatgatatcggatgagtgtcccggctgcacgaaggagtctgtccattttgatcttagcggtaaggcctttggtgcattggccaaacgtggcaagggagatcaactacgcaaccttggagaactaaaagttagttacaaacgtgcatgttgcaaacacccgaagactatgatcgctatccatgtcgacgccggagcaaatccttactacatgtcattcgcggttaagtttgcaaacggtgatgggaacttcgcctgcattgaggtccaaccggccggaggacagtatatgaaaatggaggaaatgagatccgctgtttggagactaagccctggtgttcctttgaaaggtccgttcaacatcaggcttacctccgccgtgtccggtaagaagatcattgcgaaaggcgttatcccggaaaagtggagtcctggtgctatttaccattctaaggttaacttccccgttcaaaggaagcagaaatga

SEQ ID NO: 71282 - protein, 264 aa, Arabidopsis thaliana
  peptide (1)..(264): Ceres Seq. ID no. 3086208
MASSSLKCFSFIVVLTTFFAISLKPCYCHNKTHWNTAGITWYGDREGPGTTGGACGYGDAVAKHPYRCMVSAGGPSLFKDGKGCGACYRLKCDHPLCTKKPIKVMISDECPGCTKESVHFDLSGKAFGALAKRGKGDQLRNLGELKVSYKRACCKHPKTMIAIHVDAGANPYYMSFAVKFANGDGNFACIEVQPAGGQYMKMEEMRSAVWRLSPGVPLKGPFNIRLTSAVSGKKIIAKGVIPEKWSPGAIYHSKVNFPVQRKQK

SEQ ID NO: 71283 - protein, 196 aa, Arabidopsis thaliana
  peptide (1)..(196): Ceres Seq. ID no. 3086209
MVSAGGPSLFKDGKGCGACYRLKCDHPLCTKKPIKVMISDECPGCTKESVHFDLSGKAFGALAKRGKGDQLRNLGELKVSYKRACCKHPKTMIAIHVDAGANPYYMSFAVKFANGDGNFACIEVQPAGGQYMKMEEMRSAVWRLSPGVPLKGPFNIRLTSAVSGKKIIAKGVIPEKWSPGAIYHSKVNFPVQRKQK

SEQ ID NO: 71284 - protein, 160 aa, Arabidopsis thaliana
  peptide (1)..(160): Ceres Seq. ID no. 3086210
MISDECPGCTKESVHFDLSGKAFGALAKRGKGDQLRNLGELKVSYKRACCKHPKTMIAIHVDAGANPYYMSFAVKFANGDGNFACIEVQPAGGQYMKMEEMRSAVWRLSPGVPLKGPFNIRLTSAVSGKKIIAKGVIPEKWSPGAIYHSKVNFPVQRKQK

SEQ ID NO: 71285 - DNA, 1452 bp, Arabidopsis thaliana
  misc_feature (1)..(1452): Ceres Seq. ID no. 3086234
  misc_feature (1)..(1452): Ortholog of  Ceres SEQ ID NO 15177328 as cited in SEQ ID NO 52523
atgcataacgcgaagggattgttgggacgaatcgttcgagataagctatggagatttggttatcggaggagcttgtgctcgcttaaattgacttccgaggatcttgattaccaggttctcgttgaaggaagtggttgttcccgtactgcgattctcaatagaccacctgctctcaatgcactcaccactcacatggtactctctactgttctctgtttgtatctttccttcactcctactagcaattgtggtctcttcgaggctggattcttcaatttcggatataggttgcagaaactttataagaattgggaagaagatccaaatattgggtttgtgatgatgaaggggagtggaagggcattttgtgctggtggtgatattgtgtctctctaccatttaagaacgagagatgaaatggcgtgggagggtagcccggatgctattagggagtttttctcgagtttgtatagttttatatacttgctaggcacatatctaaagccacatgtggcaattcttaacggtgttactatgggaggcggaactggagtttcgatacctgggacatttcgtgtagctactgatagaactctggattctagtttagttcggatgtccaacttcttggaggatgcagtaactagctcatggatattgcagatttttgctacccctgaaacaatcatcggttttcatcctgatgctggtgcttcttttaacctctcccacttacctggtcgcttaggggagtatctgggtctgactgggttaaagctcagtggggcagaaatgttggcatgtggccttgctacacattatattagaagtgaggaggttcctgtaatggaagaacagctcaagaagctgctcactgatgatccttctgttgttgagtcatgcttagaaaaatgtgcagaagttgcccatccggaaaagactggtgttattcgtaggatcgatttacttgaaaaatgctttagccatgacacagtagaagaaattattgattctttggtaagtttctttacgaatgattctgcgagtatgaccatctcggtcactagaagtaacagtgttttgggtcaccaggaaatcgaggctagtagaagaaaagatacatggtgcattacgactctacgtagacttaaagaaagctcaccgttatctttgaaggtggcattgagatctatccgggaaggaagattacaaacacttgaccaatgcttaatccgagagtacagaatgtcgctacaaggattaatcgggccaatgtccggcaatttttgtgagggagtacgagctcgattgatagacaaggatgaagcaccaaagtgggatccaccgagcttggagaaagtatcagaggacatggttgatgattacttctgtgccttgactcccacggaacctgatcttgaccttcctgtcaaactcagagaaagcatttag

SEQ ID NO: 71286 - protein, 483 aa, Arabidopsis thaliana
  peptide (1)..(483): Ceres Seq. ID no. 3086235
MHNAKGLLGRIVRDKLWRFGYRRSLCSLKLTSEDLDYQVLVEGSGCSRTAILNRPPALNALTTHMVLSTVLCLYLSFTPTSNCGLFEAGFFNFGYRLQKLYKNWEEDPNIGFVMMKGSGRAFCAGGDIVSLYHLRTRDEMAWEGSPDAIREFFSSLYSFIYLLGTYLKPHVAILNGVTMGGGTGVSIPGTFRVATDRTLDSSLVRMSNFLEDAVTSSWILQIFATPETIIGFHPDAGASFNLSHLPGRLGEYLGLTGLKLSGAEMLACGLATHYIRSEEVPVMEEQLKKLLTDDPSVVESCLEKCAEVAHPEKTGVIRRIDLLEKCFSHDTVEEIIDSLVSFFTNDSASMTISVTRSNSVLGHQEIEASRRKDTWCITTLRRLKESSPLSLKVALRSIREGRLQTLDQCLIREYRMSLQGLIGPMSGNFCEGVRARLIDKDEAPKWDPPSLEKVSEDMVDDYFCALTPTEPDLDLPVKLRESI

SEQ ID NO: 71287 - protein, 419 aa, Arabidopsis thaliana
  peptide (1)..(419): Ceres Seq. ID no. 3086236
MVLSTVLCLYLSFTPTSNCGLFEAGFFNFGYRLQKLYKNWEEDPNIGFVMMKGSGRAFCAGGDIVSLYHLRTRDEMAWEGSPDAIREFFSSLYSFIYLLGTYLKPHVAILNGVTMGGGTGVSIPGTFRVATDRTLDSSLVRMSNFLEDAVTSSWILQIFATPETIIGFHPDAGASFNLSHLPGRLGEYLGLTGLKLSGAEMLACGLATHYIRSEEVPVMEEQLKKLLTDDPSVVESCLEKCAEVAHPEKTGVIRRIDLLEKCFSHDTVEEIIDSLVSFFTNDSASMTISVTRSNSVLGHQEIEASRRKDTWCITTLRRLKESSPLSLKVALRSIREGRLQTLDQCLIREYRMSLQGLIGPMSGNFCEGVRARLIDKDEAPKWDPPSLEKVSEDMVDDYFCALTPTEPDLDLPVKLRESI

SEQ ID NO: 71288 - protein, 370 aa, Arabidopsis thaliana
  peptide (1)..(370): Ceres Seq. ID no. 3086237
MMKGSGRAFCAGGDIVSLYHLRTRDEMAWEGSPDAIREFFSSLYSFIYLLGTYLKPHVAILNGVTMGGGTGVSIPGTFRVATDRTLDSSLVRMSNFLEDAVTSSWILQIFATPETIIGFHPDAGASFNLSHLPGRLGEYLGLTGLKLSGAEMLACGLATHYIRSEEVPVMEEQLKKLLTDDPSVVESCLEKCAEVAHPEKTGVIRRIDLLEKCFSHDTVEEIIDSLVSFFTNDSASMTISVTRSNSVLGHQEIEASRRKDTWCITTLRRLKESSPLSLKVALRSIREGRLQTLDQCLIREYRMSLQGLIGPMSGNFCEGVRARLIDKDEAPKWDPPSLEKVSEDMVDDYFCALTPTEPDLDLPVKLRESI

SEQ ID NO: 71289 - DNA, 1791 bp, Arabidopsis thaliana
  misc_feature (1)..(1791): Ceres Seq. ID no. 3087891
  misc_feature (1)..(1791): Ortholog of  Ceres SEQ ID NO 14308787 as cited in SEQ ID NO 55614
  misc_feature (1)..(1791): Ortholog of  Ceres SEQ ID NO 13656547 as cited in SEQ ID NO 65935
  misc_feature (1)..(1791): Ortholog of  Ceres SEQ ID NO 15176721 as cited in SEQ ID NO 0
atggcgctcgcgctctcgctgtcggcatgttctcctccactccgccgcactcgtcgtgccggttttcgaacaagctgctcgatcttcgcgaatccagcacagcgagccaagaggaagctgcttgagctgatctccgaggaggatcgaggtctgagaacccagaaagaccccaagaagcgagatgaaatcgtgaacgccatcgaatccatgacggttatcgggcgcagctccatcaccacagacgactctctatctgccacgtggcggctcttgtggacgacggagaaggaacagttgttcatcatagaaaaggcaggcttgtttgggacgaccgccggagacgttttgcaggtgatcgatgtgaataaacggatcctcaataacgtcatcactttcccgccggacggggttttcttcgtacgctccgatatcgatatcgcttccccgcagagagtcaatttcagattcaatagtgcggtattgagagggaagaactgggagctcccactgccaccatttgggaagggctggtttgagaatgtgtatatggacggtgagatcagagtggccaaggacatcagaggagactacttaattgttgatcgtgctccttataactggactgaatcatttatgttggtgtccgcaagggtagagaaacaaaagcgtgttgcttatcaggggaaggcgacagtgcttgctctcggtaaggccttgccgagcaatgttgtttcccaggagaatctcgtggaggagtatctccgtgaaatcaaatgcgataacctttctatcaaagacaagctgcaacacttgtgcaaaagcacaactgtcaagacacgctacacagtcatgtcacgggagacgctgcacaaataccctgaactagcaaccgagggttccccaaccatcaaacagaggcttgagattgcaaacgatgcggttgtgcagatggcatatgaagcgagcttggtttgcatcaaggaatggggaagggcagtggaagatatcactcatcttgtctacgtttcctccagtgagttccgtttgcccggaggtgatctttacctctcggcacagctgggccttagcaacgaggttcagagagtgatgctgtattttcttggatgctatggaggtttgagtgggctgcgcgtggccaaagacattgctgagaacaacccagggagccgtgtgttgctcaccacctctgagactaccgttctggggttccgcccacccaacaaagctcgtccttacaacttagtcggggctgcactctttggagatggagcagctgccctgatcatcggagcagaccctacagagtcggaatctcctttcatggagcttcactgtgctatgcagcagttcctgccccaaacacagggggtgatcgacgggcggctgtcagaagagggcataaccttcaagctaggaagagacctccctcagaagatcgaagacaacgtggaggagttctgcaagaagctagtggcaaaggctggctctggtgcgttggagttgaatgaccttttctgggcagttcatcctggtggaccagccatcctgagcgggctggagacaaagctgaagctgaagccggaaaagctggaatgcagcagaagggcgttgatggattatgggaacgtaagcagcaacaccatcttctacataatggacaaagtcagagatgagcttgagaagaaaggcacagagggagaagagtggggtctgggcttagctttcggaccgggaatcactttcgaaggctttctcatgaggaacctctaa

SEQ ID NO: 71290 - protein, 596 aa, Arabidopsis thaliana
  peptide (1)..(596): Ceres Seq. ID no. 3087892
MALALSLSACSPPLRRTRRAGFRTSCSIFANPAQRAKRKLLELISEEDRGLRTQKDPKKRDEIVNAIESMTVIGRSSITTDDSLSATWRLLWTTEKEQLFIIEKAGLFGTTAGDVLQVIDVNKRILNNVITFPPDGVFFVRSDIDIASPQRVNFRFNSAVLRGKNWELPLPPFGKGWFENVYMDGEIRVAKDIRGDYLIVDRAPYNWTESFMLVSARVEKQKRVAYQGKATVLALGKALPSNVVSQENLVEEYLREIKCDNLSIKDKLQHLCKSTTVKTRYTVMSRETLHKYPELATEGSPTIKQRLEIANDAVVQMAYEASLVCIKEWGRAVEDITHLVYVSSSEFRLPGGDLYLSAQLGLSNEVQRVMLYFLGCYGGLSGLRVAKDIAENNPGSRVLLTTSETTVLGFRPPNKARPYNLVGAALFGDGAAALIIGADPTESESPFMELHCAMQQFLPQTQGVIDGRLSEEGITFKLGRDLPQKIEDNVEEFCKKLVAKAGSGALELNDLFWAVHPGGPAILSGLETKLKLKPEKLECSRRALMDYGNVSSNTIFYIMDKVRDELEKKGTEGEEWGLGLAFGPGITFEGFLMRNL

SEQ ID NO: 71291 - protein, 527 aa, Arabidopsis thaliana
  peptide (1)..(527): Ceres Seq. ID no. 3087893
MTVIGRSSITTDDSLSATWRLLWTTEKEQLFIIEKAGLFGTTAGDVLQVIDVNKRILNNVITFPPDGVFFVRSDIDIASPQRVNFRFNSAVLRGKNWELPLPPFGKGWFENVYMDGEIRVAKDIRGDYLIVDRAPYNWTESFMLVSARVEKQKRVAYQGKATVLALGKALPSNVVSQENLVEEYLREIKCDNLSIKDKLQHLCKSTTVKTRYTVMSRETLHKYPELATEGSPTIKQRLEIANDAVVQMAYEASLVCIKEWGRAVEDITHLVYVSSSEFRLPGGDLYLSAQLGLSNEVQRVMLYFLGCYGGLSGLRVAKDIAENNPGSRVLLTTSETTVLGFRPPNKARPYNLVGAALFGDGAAALIIGADPTESESPFMELHCAMQQFLPQTQGVIDGRLSEEGITFKLGRDLPQKIEDNVEEFCKKLVAKAGSGALELNDLFWAVHPGGPAILSGLETKLKLKPEKLECSRRALMDYGNVSSNTIFYIMDKVRDELEKKGTEGEEWGLGLAFGPGITFEGFLMRNL

SEQ ID NO: 71292 - protein, 414 aa, Arabidopsis thaliana
  peptide (1)..(414): Ceres Seq. ID no. 3087894
MDGEIRVAKDIRGDYLIVDRAPYNWTESFMLVSARVEKQKRVAYQGKATVLALGKALPSNVVSQENLVEEYLREIKCDNLSIKDKLQHLCKSTTVKTRYTVMSRETLHKYPELATEGSPTIKQRLEIANDAVVQMAYEASLVCIKEWGRAVEDITHLVYVSSSEFRLPGGDLYLSAQLGLSNEVQRVMLYFLGCYGGLSGLRVAKDIAENNPGSRVLLTTSETTVLGFRPPNKARPYNLVGAALFGDGAAALIIGADPTESESPFMELHCAMQQFLPQTQGVIDGRLSEEGITFKLGRDLPQKIEDNVEEFCKKLVAKAGSGALELNDLFWAVHPGGPAILSGLETKLKLKPEKLECSRRALMDYGNVSSNTIFYIMDKVRDELEKKGTEGEEWGLGLAFGPGITFEGFLMRNL

SEQ ID NO: 71293 - DNA, 1026 bp, Arabidopsis thaliana
  misc_feature (1)..(1026): Ceres Seq. ID no. 3088712
  misc_feature (1)..(1026): Ortholog of  Ceres SEQ ID NO 12582251 as cited in SEQ ID NO 55724
atggctcttgtacccaagattcgcaatcgcaccatctcggacaaaccagtctcttcgtcttgtactagaacatcgagtttcagacaaagacttctcgccagttgcaaacgatttctcaggttcaaattgttggttcgtgcttcttcagtgtcattaaaaaagaaagcagcaaggtgttcacaatctcaacaagttgttaaacataatgatgataggattgaggaacattcttctagtaatcggggttttaaagatggcaacaatttcttagtatcatcaacagaaacgaagaagcttgttgcgttttgtggtgaacctttccaaccactcaacgaggaggaagtagctctagtcaatagtgccttgtctaagagaaacagaaagaagattttggtttcgcataaaaactccaatattgacatctctggagaaactttacaatgcctaaggccgaatcaatggcttaacgatgatgtcactaatctctatctggagttgctgaaagagagacaaactagagatccgcaaaagtacttcaagtgtcatttcttcaataccttcttttacgttaagctcgtaagcggctccggttacaattacaaagctgtcagtagatggactaccaagagaaagcttggatatgatcttattgactgtgacataatatttgttccaatccacatagatatacattggaccctgggagtgattaacaatagggaacgcaagttcgtgtatcttgattcattatttactggagttggtcatacaattttgaatgctatggcaaagtacttggtggatgaagtaaaacaaaagagtcaaaagaatattgacgttagttcatggggaatggaatacgttgaagaacgtcctcagcaacagaacgggtacgactgtgggatgtttatgcttaaatacattgatttttacagtagaggattgagtctacaatttagccagaaagacatgccgtacttcaggttaagaacagctaaggagatactgagactgcgagctgactaa

SEQ ID NO: 71294 - protein, 341 aa, Arabidopsis thaliana
  peptide (1)..(341): Ceres Seq. ID no. 3088713
MALVPKIRNRTISDKPVSSSCTRTSSFRQRLLASCKRFLRFKLLVRASSVSLKKKAARCSQSQQVVKHNDDRIEEHSSSNRGFKDGNNFLVSSTETKKLVAFCGEPFQPLNEEEVALVNSALSKRNRKKILVSHKNSNIDISGETLQCLRPNQWLNDDVTNLYLELLKERQTRDPQKYFKCHFFNTFFYVKLVSGSGYNYKAVSRWTTKRKLGYDLIDCDIIFVPIHIDIHWTLGVINNRERKFVYLDSLFTGVGHTILNAMAKYLVDEVKQKSQKNIDVSSWGMEYVEERPQQQNGYDCGMFMLKYIDFYSRGLSLQFSQKDMPYFRLRTAKEILRLRAD

SEQ ID NO: 71295 - DNA, 1413 bp, Arabidopsis thaliana
  misc_feature (1)..(1413): Ceres Seq. ID no. 3090318
  misc_feature (1)..(1413): Ortholog of  Ceres SEQ ID NO 13596935 as cited in SEQ ID NO 63031
  misc_feature (1)..(1413): Ortholog of  Ceres SEQ ID NO 15179123 as cited in SEQ ID NO 0
atggcggcgacttccccgcggccaccaccgtcaacatccctaacatctcagcagccaccatcacccccctcacagcttcccctccgtacaatgccgggatcattccaaggacccgataagtttttccggacaagagctgagaagtataagagcactgtgttccgtacaaatattcctccgacgtttcctttcttcggcaacgttaaccctaacatcgtcgccgttcttgacgtcaagtcttttagccatctttttgacatggatctagttgataaaagagatgttctcatcggagacttccggcctagccttgggttctacggcggcgttcgtgttggagtttatctcgacactactgagccaaagcacgccaagataaaaggtttcgctatggaaacactaaaacgaagctcaaaagtatggctacaagagcttcgttcaaacctaaacattttctggggaacaatcgaatccgaaatctccaaaaacggtgccgcttcatatatcttccctctccaacgttgcatcttcagtttcctctgcgcctctctcgccggcgttgacgcttccgtatcgccggacatcgctgagaacggttggaaaacaatcaatacttggcttgcgttgcaagttattcccactgctaaacttggcgtagttcctcagcctcttgaagagattttacttcatacttggccttatccttctctcttaatcgccggaaattacaaaaagctttacaatttcatcgacgagaacgccggagattgtctccggttaggtcaagaagaattcgggttgacccgagatgaggctattcaaaatcttctctttgttttaggttttaatgcctacgggggcttttccgtcttcttaccttctttgatcgggagaataaccggcgacaattccggtttacaggagaggattagaaccgaagtcaggagagtttgcggatccgggtcggatcttaatttcaagacggttaacgaaatggagctggttaaatccgtggtttacgaaacgctgcgttttagtcctccggttccgctgcaattcgcacgtgcgaggaaagattttcagataagttcacacgatgctgtttttgaggtcaagaaaggtgagcttctttgtggttatcagccgcttgtgatgagagacgctaatgtttttgacgaaccggaggaatttaaaccggaccggtatgtaggtgagaccgggtctgaattgctgaattatctctactggtctaacggtccacaaaccggtaccccgagcgcgtcgaacaaacagtgtgcagctaaggacattgtcactctcacggcttccttgctcgttgccgatttatttctccggtatgatacgattactggtgactccggttcaattaaagctgttgttaaagctaaataa

SEQ ID NO: 71296 - protein, 470 aa, Arabidopsis thaliana
  peptide (1)..(470): Ceres Seq. ID no. 3090319
MAATSPRPPPSTSLTSQQPPSPPSQLPLRTMPGSFQGPDKFFRTRAEKYKSTVFRTNIPPTFPFFGNVNPNIVAVLDVKSFSHLFDMDLVDKRDVLIGDFRPSLGFYGGVRVGVYLDTTEPKHAKIKGFAMETLKRSSKVWLQELRSNLNIFWGTIESEISKNGAASYIFPLQRCIFSFLCASLAGVDASVSPDIAENGWKTINTWLALQVIPTAKLGVVPQPLEEILLHTWPYPSLLIAGNYKKLYNFIDENAGDCLRLGQEEFGLTRDEAIQNLLFVLGFNAYGGFSVFLPSLIGRITGDNSGLQERIRTEVRRVCGSGSDLNFKTVNEMELVKSVVYETLRFSPPVPLQFARARKDFQISSHDAVFEVKKGELLCGYQPLVMRDANVFDEPEEFKPDRYVGETGSELLNYLYWSNGPQTGTPSASNKQCAAKDIVTLTASLLVADLFLRYDTITGDSGSIKAVVKAK

SEQ ID NO: 71297 - protein, 440 aa, Arabidopsis thaliana
  peptide (1)..(440): Ceres Seq. ID no. 3090320
MPGSFQGPDKFFRTRAEKYKSTVFRTNIPPTFPFFGNVNPNIVAVLDVKSFSHLFDMDLVDKRDVLIGDFRPSLGFYGGVRVGVYLDTTEPKHAKIKGFAMETLKRSSKVWLQELRSNLNIFWGTIESEISKNGAASYIFPLQRCIFSFLCASLAGVDASVSPDIAENGWKTINTWLALQVIPTAKLGVVPQPLEEILLHTWPYPSLLIAGNYKKLYNFIDENAGDCLRLGQEEFGLTRDEAIQNLLFVLGFNAYGGFSVFLPSLIGRITGDNSGLQERIRTEVRRVCGSGSDLNFKTVNEMELVKSVVYETLRFSPPVPLQFARARKDFQISSHDAVFEVKKGELLCGYQPLVMRDANVFDEPEEFKPDRYVGETGSELLNYLYWSNGPQTGTPSASNKQCAAKDIVTLTASLLVADLFLRYDTITGDSGSIKAVVKAK

SEQ ID NO: 71298 - protein, 384 aa, Arabidopsis thaliana
  peptide (1)..(384): Ceres Seq. ID no. 3090321
MDLVDKRDVLIGDFRPSLGFYGGVRVGVYLDTTEPKHAKIKGFAMETLKRSSKVWLQELRSNLNIFWGTIESEISKNGAASYIFPLQRCIFSFLCASLAGVDASVSPDIAENGWKTINTWLALQVIPTAKLGVVPQPLEEILLHTWPYPSLLIAGNYKKLYNFIDENAGDCLRLGQEEFGLTRDEAIQNLLFVLGFNAYGGFSVFLPSLIGRITGDNSGLQERIRTEVRRVCGSGSDLNFKTVNEMELVKSVVYETLRFSPPVPLQFARARKDFQISSHDAVFEVKKGELLCGYQPLVMRDANVFDEPEEFKPDRYVGETGSELLNYLYWSNGPQTGTPSASNKQCAAKDIVTLTASLLVADLFLRYDTITGDSGSIKAVVKAK

SEQ ID NO: 71299 - DNA, 585 bp, Arabidopsis thaliana
  misc_feature (1)..(585): Ceres Seq. ID no. 3090424
  misc_feature (1)..(585): Ortholog of  Ceres SEQ ID NO 12618205 as cited in SEQ ID NO 65153
atgggtcaagaatcgtttatctatagcttcgtcgccagaggaactatgatcctcgccgagtataccgaattcacaggcaatttcccgtctattgctgctcagtgtctccagaagcttccgtcctccagcaacagcaagttcacttacaactgcgatcaccataccttcaatttccttgtcgaagatgcctacgcatattgtgttgtggcgaaagattctcttagcaagcaaatctcgatcgcatttctggagcgtgtgaaagctgatttcaagaagagatatggaggtggaaaagcaagtacagctatcgccaaaagtctcaacaaggagttcgggccggtgatgaaggaacacatgaattatattgttgaccatgcagaggagattgaaaaactaataaaagtcaaggctcaggtttcagaagttaaaagtataatgttggagaatattgacaaggcaatcgacagaggggaaaatctaacagttcttactgacaagaccgagaatctacgctctcaggcgcgggaatacaagaaaaccaagggacacaggtggaggaggaaatttgtggttaccagaacatga

SEQ ID NO: 71300 - protein, 194 aa, Arabidopsis thaliana
  peptide (1)..(194): Ceres Seq. ID no. 3090425
MGQESFIYSFVARGTMILAEYTEFTGNFPSIAAQCLQKLPSSSNSKFTYNCDHHTFNFLVEDAYAYCVVAKDSLSKQISIAFLERVKADFKKRYGGGKASTAIAKSLNKEFGPVMKEHMNYIVDHAEEIEKLIKVKAQVSEVKSIMLENIDKAIDRGENLTVLTDKTENLRSQAREYKKTKGHRWRRKFVVTRT

SEQ ID NO: 71301 - protein, 179 aa, Arabidopsis thaliana
  peptide (1)..(179): Ceres Seq. ID no. 3090426
MILAEYTEFTGNFPSIAAQCLQKLPSSSNSKFTYNCDHHTFNFLVEDAYAYCVVAKDSLSKQISIAFLERVKADFKKRYGGGKASTAIAKSLNKEFGPVMKEHMNYIVDHAEEIEKLIKVKAQVSEVKSIMLENIDKAIDRGENLTVLTDKTENLRSQAREYKKTKGHRWRRKFVVTRT

SEQ ID NO: 71302 - DNA, 1446 bp, Arabidopsis thaliana
  misc_feature (1)..(1446): Ceres Seq. ID no. 3091091
  misc_feature (1)..(1446): Ortholog of  Ceres SEQ ID NO 13594209 as cited in SEQ ID NO 59089
  misc_feature (1)..(1446): Ortholog of  Ceres SEQ ID NO 13502874 as cited in SEQ ID NO 66298
  misc_feature (1)..(1446): Ortholog of  Ceres SEQ ID NO 12614124 as cited in SEQ ID NO 68392
atggagatgatattaatctctttgtgcttaaccaccttattagcatttctcttcctaaaaccactcctcaaacgaatcaccaccaccaaacctaagttaccaccgtctccatggcggcttccggtgattggaaacctccaccagctcggtcccaaccctcaccgctatctccattccctcagcctccggtatgggccactcatgctccttcatttcggccgtgtacctgtgcttgtggtttcttgtcctgacgtgactaatgacatcatgaaaacacacgaccttaagttcgcaaaccgcccgaaatcaaaagctattaatatatttatggaaggtggccgtgatataatctttggcccctacggagaagattggaagagtatgaagagtctgggtgtggtacatctgctcaataacaaaatggttaggtcctttgagaacctaagagaagaagagatcaaagtaatgacagagaagctggaagaagcatcttcatcttcttcatcagtaaatctaagcaaactccttatgactcttaccaacgatatcatatgcagaatcaccttgggaagaaaatataacgaagaggaaggtggaatcgatatcaagaacttagtgatgacatcctctgagttttttggcaaattcttttttggagattttattcctagtttggcatggatagactggatcagtggcatagatgataaaatgaaggacataaataacaagttagattgttttttagacagcatggtgcaagaacatgttgatgccgatcacaaagagccatcagattttattgatatgttgctactgattcaaaaggataaaaccaaacggtttaagtttgacagaagtgacttaatactcatactcaaggatatgtttttctctggaacagcaacaactgcctcacaattagaatggacaatgacagagcttatgagacatccagagtgtatgaaaaaacttcaagatgagattaattcattttcgacacataatttgaatgtaacggagaaagaagttgagaaaatgaactatttacattgcgtgattaaggaggggctacggttgcatccctctggtccactattgttcagactaccaagtgaagatgtccaattaaagggatatgacatttctgcagggacacatgtcataatcaatgcttgggcactccaacgaaaccctgcgatatgggggcttgatgccaatgaatatagaccggagagacattttgggagaagactttgccctggaatcggattttctttggttttgtccaaattggcactagccaaccttgtgaaacgattcaactggagactcaaggtcggaccagtaggagatgataagcctgatctagctgaagcatctggtattgatgtttgtcgtaagtttcctctcattgtctttccatcaattgcgcacacacattga

SEQ ID NO: 71303 - protein, 481 aa, Arabidopsis thaliana
  peptide (1)..(481): Ceres Seq. ID no. 3091092
MEMILISLCLTTLLAFLFLKPLLKRITTTKPKLPPSPWRLPVIGNLHQLGPNPHRYLHSLSLRYGPLMLLHFGRVPVLVVSCPDVTNDIMKTHDLKFANRPKSKAINIFMEGGRDIIFGPYGEDWKSMKSLGVVHLLNNKMVRSFENLREEEIKVMTEKLEEASSSSSSVNLSKLLMTLTNDIICRITLGRKYNEEEGGIDIKNLVMTSSEFFGKFFFGDFIPSLAWIDWISGIDDKMKDINNKLDCFLDSMVQEHVDADHKEPSDFIDMLLLIQKDKTKRFKFDRSDLILILKDMFFSGTATTASQLEWTMTELMRHPECMKKLQDEINSFSTHNLNVTEKEVEKMNYLHCVIKEGLRLHPSGPLLFRLPSEDVQLKGYDISAGTHVIINAWALQRNPAIWGLDANEYRPERHFGRRLCPGIGFSLVLSKLALANLVKRFNWRLKVGPVGDDKPDLAEASGIDVCRKFPLIVFPSIAHTH

SEQ ID NO: 71304 - protein, 479 aa, Arabidopsis thaliana
  peptide (1)..(479): Ceres Seq. ID no. 3091093
MILISLCLTTLLAFLFLKPLLKRITTTKPKLPPSPWRLPVIGNLHQLGPNPHRYLHSLSLRYGPLMLLHFGRVPVLVVSCPDVTNDIMKTHDLKFANRPKSKAINIFMEGGRDIIFGPYGEDWKSMKSLGVVHLLNNKMVRSFENLREEEIKVMTEKLEEASSSSSSVNLSKLLMTLTNDIICRITLGRKYNEEEGGIDIKNLVMTSSEFFGKFFFGDFIPSLAWIDWISGIDDKMKDINNKLDCFLDSMVQEHVDADHKEPSDFIDMLLLIQKDKTKRFKFDRSDLILILKDMFFSGTATTASQLEWTMTELMRHPECMKKLQDEINSFSTHNLNVTEKEVEKMNYLHCVIKEGLRLHPSGPLLFRLPSEDVQLKGYDISAGTHVIINAWALQRNPAIWGLDANEYRPERHFGRRLCPGIGFSLVLSKLALANLVKRFNWRLKVGPVGDDKPDLAEASGIDVCRKFPLIVFPSIAHTH

SEQ ID NO: 71305 - protein, 414 aa, Arabidopsis thaliana
  peptide (1)..(414): Ceres Seq. ID no. 3091094
MLLHFGRVPVLVVSCPDVTNDIMKTHDLKFANRPKSKAINIFMEGGRDIIFGPYGEDWKSMKSLGVVHLLNNKMVRSFENLREEEIKVMTEKLEEASSSSSSVNLSKLLMTLTNDIICRITLGRKYNEEEGGIDIKNLVMTSSEFFGKFFFGDFIPSLAWIDWISGIDDKMKDINNKLDCFLDSMVQEHVDADHKEPSDFIDMLLLIQKDKTKRFKFDRSDLILILKDMFFSGTATTASQLEWTMTELMRHPECMKKLQDEINSFSTHNLNVTEKEVEKMNYLHCVIKEGLRLHPSGPLLFRLPSEDVQLKGYDISAGTHVIINAWALQRNPAIWGLDANEYRPERHFGRRLCPGIGFSLVLSKLALANLVKRFNWRLKVGPVGDDKPDLAEASGIDVCRKFPLIVFPSIAHTH

SEQ ID NO: 71306 - DNA, 1065 bp, Arabidopsis thaliana
  misc_feature (1)..(1065): Ceres Seq. ID no. 3091129
  misc_feature (1)..(1065): Ortholog of  Ceres SEQ ID NO 14313893 as cited in SEQ ID NO 54646
  misc_feature (1)..(1065): Ortholog of  Ceres SEQ ID NO 13656797 as cited in SEQ ID NO 65756
  misc_feature (1)..(1065): Ortholog of  Ceres SEQ ID NO 13658498 as cited in SEQ ID NO 66557
  misc_feature (1)..(1065): Ortholog of  Ceres SEQ ID NO 15227053 as cited in SEQ ID NO 0
atgaactcttctccttcttcttcttcttccccttcaagttttcttgattatggatctgcgatcggacaaaaagaagtaaagaaaatcctggttttggttctaggtttagctgcttgtcttcttctttacaaaacagcttatcctcttcatcaagagctcgatgttaacaatctcagctctcgtcctttgctcgatcacacctcttcgtcttctccactaacaagatcaaaatcgatcagttttagggaagttctggagaatgcatcaacagagaatcgaacagttattgtaacaacgttgaaccaagcatgggcagagccaaactctctgttcgatctatttcttgagagttttcgtatcggacaaggaacaaagaagttacttcaacatgtggttgtggtttgcttggattccaaggcatttgctcgctgctcacaacttcaccctaattgctactatttgaaaaccacagggactgatttctccggcgagaaactctttgctactcctgattacctcaaaatgatgtggcgaagaatcgagcttctcacacaagtgctagaaatgggatacaacttcatcttcacggatgcggatataatgtggcttcgagatccatttcctcggctgtatcctgatggagattttcaaatggcatgtgatcgattcttcggtgatcctcatgactcagacaattgggtaaacggaggattcacttacgtgaaatcaaaccacagaagcatcgagttctacaaattttggtacaattctcgtcttgattatccgaagatgcatgaccaagatgtgttcaaccaaatcaaacacaaggctttagtctcagagattggaatccaaatgagattctttgatacggtttactttggtgggttttgtcaaacgagcagagacataaacttggtgtgtaccatgcatgctaattgttgtgtaggattagcgaagaagcttcatgatcttaatcttgttcttgatgactggagaaactatttgtctttgtctgaaccagttaaaaacacaacttggagtgttcctatgaagtgtacatga

SEQ ID NO: 71307 - protein, 354 aa, Arabidopsis thaliana
  peptide (1)..(354): Ceres Seq. ID no. 3091130
MNSSPSSSSSPSSFLDYGSAIGQKEVKKILVLVLGLAACLLLYKTAYPLHQELDVNNLSSRPLLDHTSSSSPLTRSKSISFREVLENASTENRTVIVTTLNQAWAEPNSLFDLFLESFRIGQGTKKLLQHVVVVCLDSKAFARCSQLHPNCYYLKTTGTDFSGEKLFATPDYLKMMWRRIELLTQVLEMGYNFIFTDADIMWLRDPFPRLYPDGDFQMACDRFFGDPHDSDNWVNGGFTYVKSNHRSIEFYKFWYNSRLDYPKMHDQDVFNQIKHKALVSEIGIQMRFFDTVYFGGFCQTSRDINLVCTMHANCCVGLAKKLHDLNLVLDDWRNYLSLSEPVKNTTWSVPMKCT

SEQ ID NO: 71308 - protein, 180 aa, Arabidopsis thaliana
  peptide (1)..(180): Ceres Seq. ID no. 3091131
MMWRRIELLTQVLEMGYNFIFTDADIMWLRDPFPRLYPDGDFQMACDRFFGDPHDSDNWVNGGFTYVKSNHRSIEFYKFWYNSRLDYPKMHDQDVFNQIKHKALVSEIGIQMRFFDTVYFGGFCQTSRDINLVCTMHANCCVGLAKKLHDLNLVLDDWRNYLSLSEPVKNTTWSVPMKCT

SEQ ID NO: 71309 - protein, 179 aa, Arabidopsis thaliana
  peptide (1)..(179): Ceres Seq. ID no. 3091132
MWRRIELLTQVLEMGYNFIFTDADIMWLRDPFPRLYPDGDFQMACDRFFGDPHDSDNWVNGGFTYVKSNHRSIEFYKFWYNSRLDYPKMHDQDVFNQIKHKALVSEIGIQMRFFDTVYFGGFCQTSRDINLVCTMHANCCVGLAKKLHDLNLVLDDWRNYLSLSEPVKNTTWSVPMKCT

SEQ ID NO: 71310 - DNA, 966 bp, Arabidopsis thaliana
  misc_feature (1)..(966): Ceres Seq. ID no. 3091140
  misc_feature (1)..(966): Ortholog of  Ceres SEQ ID NO 15224520 as cited in SEQ ID NO 58188
  misc_feature (1)..(966): Ortholog of  Ceres SEQ ID NO 12777206 as cited in SEQ ID NO 60246
atggatcttgccccagaggagcttcaatttctcaacaaaagaggaattctacgtgaatcaacatcaatcccacaatattctctaaaaaccttttacctcataaccctaaccctaattttccctctctccttcgcaatcctagcccattctctcttcacacaaccaatcttagctcagatcgatacatacccacaagccgatcaatctcaactccaacatgaatggaccgtcctcctcgttttccaattctgctacatcatcttcctcttcgccttctctcttctctccacagccgccgttgtcttcaccgtcgcttctctttacaccggaaagcctgtttctttctcctccacaatgtcagcgatacctctcgtcctcaaaagattgttcataacattcctctgggtctctcttttgatgcttgcgtacaacaccgtgttcttgatcttcttggtcacgttaatcgtagctgttgatttacagaacgtggttttagctgtgttttcgttggtagtgatctttgttctgtttcttgtagttcatgtttatatgacagctttgtggcatttagctagtgtagtctctgttcttgaaccgatttacggtttggctgcgatgaagaagagttatgagttgcttaaagggaagactcttatggcttgttcgatggttttcatctatcttgttcattgtggattcattgctggagtttttggagcagtggtggttcgtggtggtgatgattacggaattttcgctagaatcgtcgctggtggattcttggttggtgttcttgtgatagtgaatctaattggactgcttgtgcagagtgtgttttactatgtttgcaagagttttcatcatcaggagattgataaatccgctttgcacgatcatctcggtgggtatctcggtgaatatgtgcctcttaagagcaacattcaaatggagaactttgaagtttga

SEQ ID NO: 71311 - protein, 321 aa, Arabidopsis thaliana
  peptide (1)..(321): Ceres Seq. ID no. 3091141
MDLAPEELQFLNKRGILRESTSIPQYSLKTFYLITLTLIFPLSFAILAHSLFTQPILAQIDTYPQADQSQLQHEWTVLLVFQFCYIIFLFAFSLLSTAAVVFTVASLYTGKPVSFSSTMSAIPLVLKRLFITFLWVSLLMLAYNTVFLIFLVTLIVAVDLQNVVLAVFSLVVIFVLFLVVHVYMTALWHLASVVSVLEPIYGLAAMKKSYELLKGKTLMACSMVFIYLVHCGFIAGVFGAVVVRGGDDYGIFARIVAGGFLVGVLVIVNLIGLLVQSVFYYVCKSFHHQEIDKSALHDHLGGYLGEYVPLKSNIQMENFEV

SEQ ID NO: 71312 - protein, 203 aa, Arabidopsis thaliana
  peptide (1)..(203): Ceres Seq. ID no. 3091142
MSAIPLVLKRLFITFLWVSLLMLAYNTVFLIFLVTLIVAVDLQNVVLAVFSLVVIFVLFLVVHVYMTALWHLASVVSVLEPIYGLAAMKKSYELLKGKTLMACSMVFIYLVHCGFIAGVFGAVVVRGGDDYGIFARIVAGGFLVGVLVIVNLIGLLVQSVFYYVCKSFHHQEIDKSALHDHLGGYLGEYVPLKSNIQMENFEV

SEQ ID NO: 71313 - protein, 182 aa, Arabidopsis thaliana
  peptide (1)..(182): Ceres Seq. ID no. 3091143
MLAYNTVFLIFLVTLIVAVDLQNVVLAVFSLVVIFVLFLVVHVYMTALWHLASVVSVLEPIYGLAAMKKSYELLKGKTLMACSMVFIYLVHCGFIAGVFGAVVVRGGDDYGIFARIVAGGFLVGVLVIVNLIGLLVQSVFYYVCKSFHHQEIDKSALHDHLGGYLGEYVPLKSNIQMENFEV

SEQ ID NO: 71314 - DNA, 1545 bp, Arabidopsis thaliana
  misc_feature (1)..(1545): Ceres Seq. ID no. 3091930
  misc_feature (1)..(1545): Ortholog of  Ceres SEQ ID NO 13657677 as cited in SEQ ID NO 66119
atgcggtggtcgattgcgactgcgattgcttcaacggctaaggggtttcttcatcttcatcaccattttctgaagaacagtaatcctgggattgttctttctccgtcgttgagatttcgtttctgggtacgagctttttctggtactactattgattatcgagaggtattgagaagtgggcttcacaatattaagttcgacgatgcatttcatttgttcgtactcatggcttattcttaccctctaccttcaattgttgaattcaataaagtattgactgctattgctaagatgcagatgtatgatgttgtgattaatctctggaaacgtattgagaatgctgaaggtattgaaatttcacctgatctctatacttgtaacattttggtgaattgtttctgccgctgctttcaaccctcttcggctttatcttatcttgggaagatgatgaagcttggtattgagcctgacattgtgactgctagctcgctggtcaatggattctgtctcagtaatagtattaaggatgctgtttatgtggctggccaaatggagaaaatgggaatcaaacgtgatgttgtagtcgataccatactcattgatactctttgcaaaaatagacttgtggttcccgcgctggaggttctcaaacgtatgaaagacagaggaatttcaccgaatgttgttacctacagctctctcataactggcctttgtaaatccggtagattggctgacgccgagagacgactgcacgaaatggactccaagaaaatcaaccctaatgttatcactttcagtgcattaatcgatgcatatgcaaaacgtgggaaactgtcgaaggttgatagtgtgtacaagatgatgatccaaatgtctatagatcctaatgttttcacttacagttcacttatctacgggctttgcatgcacaatcgtgtagacgaggccattaaaatgcttgacttgatgataagcaaggggtgcaccccaaatgtagtcacttacagtactcttgcaaatggatttttcaagtcgtcgagggtagatgatgggattaaacttttagacgacatgcctcaaagaggcgtggctgcaaacacagtctcttgcaacactcttatcaagggctattttcaagcaggcaagatagatctcgctctaggagtttttggatatatgacttctaatggtctgattcccaatattaggagctacaacattgtgttagctggtctatttgctaatggggaggtagagaaagcattgagcagattcgagcatatgcaaaagactagaaatgatcttgatattattacatatactatcatgattcatgggatgtgcaaggcttgtatggtgaaagaagcatatgatttgttctataaactcaagttcaaaagagtggagcccgattttaaagcatacacgataatgatcgcagaattgaatagggctggcatgcggactgaagcagatgccttgaatagattttaccaaaagcacgttcgccaaaacgaaagcgcaccagctgaagtatcctag

SEQ ID NO: 71315 - protein, 514 aa, Arabidopsis thaliana
  peptide (1)..(514): Ceres Seq. ID no. 3091931
MRWSIATAIASTAKGFLHLHHHFLKNSNPGIVLSPSLRFRFWVRAFSGTTIDYREVLRSGLHNIKFDDAFHLFVLMAYSYPLPSIVEFNKVLTAIAKMQMYDVVINLWKRIENAEGIEISPDLYTCNILVNCFCRCFQPSSALSYLGKMMKLGIEPDIVTASSLVNGFCLSNSIKDAVYVAGQMEKMGIKRDVVVDTILIDTLCKNRLVVPALEVLKRMKDRGISPNVVTYSSLITGLCKSGRLADAERRLHEMDSKKINPNVITFSALIDAYAKRGKLSKVDSVYKMMIQMSIDPNVFTYSSLIYGLCMHNRVDEAIKMLDLMISKGCTPNVVTYSTLANGFFKSSRVDDGIKLLDDMPQRGVAANTVSCNTLIKGYFQAGKIDLALGVFGYMTSNGLIPNIRSYNIVLAGLFANGEVEKALSRFEHMQKTRNDLDIITYTIMIHGMCKACMVKEAYDLFYKLKFKRVEPDFKAYTIMIAELNRAGMRTEADALNRFYQKHVRQNESAPAEVS

SEQ ID NO: 71316 - protein, 439 aa, Arabidopsis thaliana
  peptide (1)..(439): Ceres Seq. ID no. 3091932
MAYSYPLPSIVEFNKVLTAIAKMQMYDVVINLWKRIENAEGIEISPDLYTCNILVNCFCRCFQPSSALSYLGKMMKLGIEPDIVTASSLVNGFCLSNSIKDAVYVAGQMEKMGIKRDVVVDTILIDTLCKNRLVVPALEVLKRMKDRGISPNVVTYSSLITGLCKSGRLADAERRLHEMDSKKINPNVITFSALIDAYAKRGKLSKVDSVYKMMIQMSIDPNVFTYSSLIYGLCMHNRVDEAIKMLDLMISKGCTPNVVTYSTLANGFFKSSRVDDGIKLLDDMPQRGVAANTVSCNTLIKGYFQAGKIDLALGVFGYMTSNGLIPNIRSYNIVLAGLFANGEVEKALSRFEHMQKTRNDLDIITYTIMIHGMCKACMVKEAYDLFYKLKFKRVEPDFKAYTIMIAELNRAGMRTEADALNRFYQKHVRQNESAPAEVS

SEQ ID NO: 71317 - protein, 417 aa, Arabidopsis thaliana
  peptide (1)..(417): Ceres Seq. ID no. 3091933
MQMYDVVINLWKRIENAEGIEISPDLYTCNILVNCFCRCFQPSSALSYLGKMMKLGIEPDIVTASSLVNGFCLSNSIKDAVYVAGQMEKMGIKRDVVVDTILIDTLCKNRLVVPALEVLKRMKDRGISPNVVTYSSLITGLCKSGRLADAERRLHEMDSKKINPNVITFSALIDAYAKRGKLSKVDSVYKMMIQMSIDPNVFTYSSLIYGLCMHNRVDEAIKMLDLMISKGCTPNVVTYSTLANGFFKSSRVDDGIKLLDDMPQRGVAANTVSCNTLIKGYFQAGKIDLALGVFGYMTSNGLIPNIRSYNIVLAGLFANGEVEKALSRFEHMQKTRNDLDIITYTIMIHGMCKACMVKEAYDLFYKLKFKRVEPDFKAYTIMIAELNRAGMRTEADALNRFYQKHVRQNESAPAEVS

SEQ ID NO: 71318 - DNA, 1428 bp, Arabidopsis thaliana
  misc_feature (1)..(1428): Ceres Seq. ID no. 3091938
  misc_feature (1)..(1428): Ortholog of  Ceres SEQ ID NO 14313897 as cited in SEQ ID NO 59695
  misc_feature (1)..(1428): Ortholog of  Ceres SEQ ID NO 13660049 as cited in SEQ ID NO 67010
atggcaatggagaaagatctcagtccaaattctccacggattagaaagctaagggatactagttaccctactacaccaacgtctcgaatgaatactaataaccagagagataaccattatcccaacattcctaattcaccaagggattacaattatactcctagctctccaacagctcgcattcgacaccgcaggcgatcaagcgagaatttagctgaggtgaacagaagcaatgtaagcagagtaagcaatttgttacttggtgataagaacaagtacagatcaatgtggataaggacatgctcatctctctggatgctcggtggagttgtgtttataatctacatgggtcatctctacatttgggctatggttgtggttatacagatattcatggccaaagagctcttctttcttcgcagaagagctcatgaagaacgtcgcttacccggtttctggctcttgaattggcacttcttcttcacggctatgttgtttgtctatggacgcatcattcaacagcagctagtcaacacggtttcttcagatagattcatatacaagcttgtgagtggtcttatcaagtaccagatggttatttgctacttcttgtacatcgcaggtctcatatggtttatccttacattgaagaataagatgtataagtatcagtttgggcaatacgcttggacacatatgatccttatcgttgtctttactcaatcttctttcaccgtcgccaatatttttgaagggatcttctggtttcttctaccagcagcactgattgctatgaacgatgtagcagcttacttcttcggtttctatttcgggaaaactccgctcatcaagttgtctccaaagaaaacatgggaaggtttcatcggagcatcagttgcaactataatctctgcatttatttttgctaatgtcttaggccagttccaatggcttacatgtccaaggaaggatttttcaactggttggcttcattgtgatccaggccctctcttcaggccagagtattacccatttccctcttggattactccattttctccatggaaagggatctcgaccctgcctgtccaatggcatgctttttctctcggtctattcgcatccattatggcgccttttggtggcttcttcgcaagcggtttcaaaagagctttcaagatcaaggatttcggagacagcataccaggacatggaggatttactgacagaatggattgccaaatggttatggcggttttcgcatacatctacatccaatctttcattgttaatcgggactacagtgtcgagatgatcctagaccagatatcgaggagcctgggacacgaggagcagaaaatgctttatgaaaagctcggagacattcttcaacataagttgcaagggagcttctttctctatggttag

SEQ ID NO: 71319 - protein, 475 aa, Arabidopsis thaliana
  peptide (1)..(475): Ceres Seq. ID no. 3091939
MAMEKDLSPNSPRIRKLRDTSYPTTPTSRMNTNNQRDNHYPNIPNSPRDYNYTPSSPTARIRHRRRSSENLAEVNRSNVSRVSNLLLGDKNKYRSMWIRTCSSLWMLGGVVFIIYMGHLYIWAMVVVIQIFMAKELFFLRRRAHEERRLPGFWLLNWHFFFTAMLFVYGRIIQQQLVNTVSSDRFIYKLVSGLIKYQMVICYFLYIAGLIWFILTLKNKMYKYQFGQYAWTHMILIVVFTQSSFTVANIFEGIFWFLLPAALIAMNDVAAYFFGFYFGKTPLIKLSPKKTWEGFIGASVATIISAFIFANVLGQFQWLTCPRKDFSTGWLHCDPGPLFRPEYYPFPSWITPFSPWKGISTLPVQWHAFSLGLFASIMAPFGGFFASGFKRAFKIKDFGDSIPGHGGFTDRMDCQMVMAVFAYIYIQSFIVNRDYSVEMILDQISRSLGHEEQKMLYEKLGDILQHKLQGSFFLYG

SEQ ID NO: 71320 - protein, 473 aa, Arabidopsis thaliana
  peptide (1)..(473): Ceres Seq. ID no. 3091940
MEKDLSPNSPRIRKLRDTSYPTTPTSRMNTNNQRDNHYPNIPNSPRDYNYTPSSPTARIRHRRRSSENLAEVNRSNVSRVSNLLLGDKNKYRSMWIRTCSSLWMLGGVVFIIYMGHLYIWAMVVVIQIFMAKELFFLRRRAHEERRLPGFWLLNWHFFFTAMLFVYGRIIQQQLVNTVSSDRFIYKLVSGLIKYQMVICYFLYIAGLIWFILTLKNKMYKYQFGQYAWTHMILIVVFTQSSFTVANIFEGIFWFLLPAALIAMNDVAAYFFGFYFGKTPLIKLSPKKTWEGFIGASVATIISAFIFANVLGQFQWLTCPRKDFSTGWLHCDPGPLFRPEYYPFPSWITPFSPWKGISTLPVQWHAFSLGLFASIMAPFGGFFASGFKRAFKIKDFGDSIPGHGGFTDRMDCQMVMAVFAYIYIQSFIVNRDYSVEMILDQISRSLGHEEQKMLYEKLGDILQHKLQGSFFLYG

SEQ ID NO: 71321 - protein, 446 aa, Arabidopsis thaliana
  peptide (1)..(446): Ceres Seq. ID no. 3091941
MNTNNQRDNHYPNIPNSPRDYNYTPSSPTARIRHRRRSSENLAEVNRSNVSRVSNLLLGDKNKYRSMWIRTCSSLWMLGGVVFIIYMGHLYIWAMVVVIQIFMAKELFFLRRRAHEERRLPGFWLLNWHFFFTAMLFVYGRIIQQQLVNTVSSDRFIYKLVSGLIKYQMVICYFLYIAGLIWFILTLKNKMYKYQFGQYAWTHMILIVVFTQSSFTVANIFEGIFWFLLPAALIAMNDVAAYFFGFYFGKTPLIKLSPKKTWEGFIGASVATIISAFIFANVLGQFQWLTCPRKDFSTGWLHCDPGPLFRPEYYPFPSWITPFSPWKGISTLPVQWHAFSLGLFASIMAPFGGFFASGFKRAFKIKDFGDSIPGHGGFTDRMDCQMVMAVFAYIYIQSFIVNRDYSVEMILDQISRSLGHEEQKMLYEKLGDILQHKLQGSFFLYG

SEQ ID NO: 71322 - DNA, 1344 bp, Arabidopsis thaliana
  misc_feature (1)..(1344): Ceres Seq. ID no. 3092078
  misc_feature (1)..(1344): Ortholog of  Ceres SEQ ID NO 14306538 as cited in SEQ ID NO 53117
atgagtcaacacatgaaccttctcctgccttcatttgaaacggacaaagaggaatacgatgaacgcaagacaacagaccacggaggcatcggtggcagcgtctggaggttcaaaggcaacaaagcggccaaggaagcggctagtgtctcaatgaaaggtacacttgctaggttattcgactgctgcagcaaagacgtcaaaaagactattttgcctctgggtcacggcgacccctccgtctacccttgcttccaaacgtccgttgacgctgaggaagcggtggttgaatccttacggtctggagctgcaaactcttacgcccccggggtcggtattttaccggccagaagggcggttgcaaattatctgaaccgggaccttccacataagatacattcagatgatatatttatgacggtggggtgttgccaagggatagagacaatgattcatgccctcgccggaccaaaggccaatatcttgctaccgactctaatttatcccctctacaacagtcacgcaatccatagcctagtcgagattcgcaagtacaatctccttcccgatctagactgggagatagatcttcaaggtgttgaggccatggcagacgaaaataccattgctgtggtgataatgaatcctcacaacccgtgtggaaatgtctatacatatgaacatctaaagaaagtggctgaggtggcgagaaagctaggaataatggtgatttctgatgaagtttataaccaaactatttatggagagaataaatttgtcccgatggggatattttcatccattactcctgtggttacactcgggtccatatccaagggatggctcgttcccggctggcgaataggttggatcgcaatgaacgatcccaaaaacgttttcaaaacaactagggtcgttgaatccatcaaggaacatctcgacataagtccagatccatcaacaatcctacagtttgcacttccaaacatcttggagaagacgaagaaagaattcttcgagaagaataactcgatcctgagtcaaaacgtagattttgcgttcgatgccctcaaggacattccttgcctcacctgccccaagaaaccggagtcgtgtacttacttagtgacaaaattggatctgtccctcttggaggacatcacgaatgattttgatttctgcatgaagctggcccaagaggaaaatctcgtctttctacctggagaggtactaggactgaagaattgggtgagattctctatcggagtggagaggtctatgctggaagatgcattcatgaggctcaaaggcttcttcgctcgccatactaaaacacaactcacttaa

SEQ ID NO: 71323 - protein, 447 aa, Arabidopsis thaliana
  peptide (1)..(447): Ceres Seq. ID no. 3092079
MSQHMNLLLPSFETDKEEYDERKTTDHGGIGGSVWRFKGNKAAKEAASVSMKGTLARLFDCCSKDVKKTILPLGHGDPSVYPCFQTSVDAEEAVVESLRSGAANSYAPGVGILPARRAVANYLNRDLPHKIHSDDIFMTVGCCQGIETMIHALAGPKANILLPTLIYPLYNSHAIHSLVEIRKYNLLPDLDWEIDLQGVEAMADENTIAVVIMNPHNPCGNVYTYEHLKKVAEVARKLGIMVISDEVYNQTIYGENKFVPMGIFSSITPVVTLGSISKGWLVPGWRIGWIAMNDPKNVFKTTRVVESIKEHLDISPDPSTILQFALPNILEKTKKEFFEKNNSILSQNVDFAFDALKDIPCLTCPKKPESCTYLVTKLDLSLLEDITNDFDFCMKLAQEENLVFLPGEVLGLKNWVRFSIGVERSMLEDAFMRLKGFFARHTKTQLT

SEQ ID NO: 71324 - protein, 443 aa, Arabidopsis thaliana
  peptide (1)..(443): Ceres Seq. ID no. 3092080
MNLLLPSFETDKEEYDERKTTDHGGIGGSVWRFKGNKAAKEAASVSMKGTLARLFDCCSKDVKKTILPLGHGDPSVYPCFQTSVDAEEAVVESLRSGAANSYAPGVGILPARRAVANYLNRDLPHKIHSDDIFMTVGCCQGIETMIHALAGPKANILLPTLIYPLYNSHAIHSLVEIRKYNLLPDLDWEIDLQGVEAMADENTIAVVIMNPHNPCGNVYTYEHLKKVAEVARKLGIMVISDEVYNQTIYGENKFVPMGIFSSITPVVTLGSISKGWLVPGWRIGWIAMNDPKNVFKTTRVVESIKEHLDISPDPSTILQFALPNILEKTKKEFFEKNNSILSQNVDFAFDALKDIPCLTCPKKPESCTYLVTKLDLSLLEDITNDFDFCMKLAQEENLVFLPGEVLGLKNWVRFSIGVERSMLEDAFMRLKGFFARHTKTQLT

SEQ ID NO: 71325 - protein, 397 aa, Arabidopsis thaliana
  peptide (1)..(397): Ceres Seq. ID no. 3092081
MKGTLARLFDCCSKDVKKTILPLGHGDPSVYPCFQTSVDAEEAVVESLRSGAANSYAPGVGILPARRAVANYLNRDLPHKIHSDDIFMTVGCCQGIETMIHALAGPKANILLPTLIYPLYNSHAIHSLVEIRKYNLLPDLDWEIDLQGVEAMADENTIAVVIMNPHNPCGNVYTYEHLKKVAEVARKLGIMVISDEVYNQTIYGENKFVPMGIFSSITPVVTLGSISKGWLVPGWRIGWIAMNDPKNVFKTTRVVESIKEHLDISPDPSTILQFALPNILEKTKKEFFEKNNSILSQNVDFAFDALKDIPCLTCPKKPESCTYLVTKLDLSLLEDITNDFDFCMKLAQEENLVFLPGEVLGLKNWVRFSIGVERSMLEDAFMRLKGFFARHTKTQLT

SEQ ID NO: 71326 - DNA, 1497 bp, Arabidopsis thaliana
  misc_feature (1)..(1497): Ceres Seq. ID no. 3092344
  misc_feature (1)..(1497): Ortholog of  Ceres SEQ ID NO 14311509 as cited in SEQ ID NO 51398
  misc_feature (1)..(1497): Ortholog of  Ceres SEQ ID NO 14307702 as cited in SEQ ID NO 54703
  misc_feature (1)..(1497): Ortholog of  Ceres SEQ ID NO 15176361 as cited in SEQ ID NO 55438
atgaacaagagtaatcctgctggttcggtgactggttcggatataatagacgccaagatcgaagaacatcaactttgtggatccaagaagtgtcctagctgcggccacaagctcgaaggcaaaccacaggattgggttggtttaccagcaggagtgaaatttgacccaacggatcaagaattgatagaacatttagaagcgaaagtgttagctaaagacttcaaatctcaccctctcattgacgaattcatcccaaccattgaaggcgaagacggcatttgctacactcatcccgagaaacttcctggagtgactagagatggtttaagccgacacttctttcatagaccatcaaaggcgtacacgacgggaacaagaaagcgaagaaagattcaaacagaatgtgacaataatttgcaaggaagtagtagctccggtgagacgaggtggcataagaccggtaagacaagaccggttatggtaaacggtaagcaaaaaggttgtaagaagattttggttttgtataccaattttggtaagaatcgaaaaccggagaaaaccaattgggtaatgcatcaatatcatttggggacacatgaggaagagaaagaaggagaacttgttgtgtctaagatcttttatcaaactcagcctaggcaatgcaactggtcgtcttctacatcgagcttgaacgctataggtggtggcggcggtgaagcgagtagcggcggaggcggcggagagtatcatatgaggagagatagtgggactactagtggtgggagttgttcttcgtctagagaaattattaatgttaatcctccgaatcgatccgatgaaataggcggcgttggtggtggcgttatggccgtagcagctgcggctgcggcggttgcagctgggcttccgagttatgcaatggatcagctcagctttgttccgtttatgaaaagctttgatgaggtggcgaggagggaaactcctcagactgggcacgctacatgtgaggatgtaatggcagaacaacatcgtcatcgtcatcaaccatcatcatcaacatcacatcatatggctcatgatcatcaccatcatcatcatcaacaacaacaacaacggcatcatgcattcaacataagccagcctacacatccgatatcaaccattatttctccatctacttcgcttcaccatgcctccattaatattcttgacgataatccttatcatgttcatagaatcttgctccccaatgaaaattaccagacacaacagcaactacgtcaagaaggagaagaagaacataatgatgggaagatgggaggaaggtcagcttccggattggaagaactcataatgggctgcacttcttctaccactcatcatgatgtaaaagatgggtcatcatcaatggggaaccaacaagaagcagaatggttgaagtactcaacgttttggccagcccctgactcttctgacaaccaagatcatcatgggtaa

SEQ ID NO: 71327 - protein, 498 aa, Arabidopsis thaliana
  peptide (1)..(498): Ceres Seq. ID no. 3092345
MNKSNPAGSVTGSDIIDAKIEEHQLCGSKKCPSCGHKLEGKPQDWVGLPAGVKFDPTDQELIEHLEAKVLAKDFKSHPLIDEFIPTIEGEDGICYTHPEKLPGVTRDGLSRHFFHRPSKAYTTGTRKRRKIQTECDNNLQGSSSSGETRWHKTGKTRPVMVNGKQKGCKKILVLYTNFGKNRKPEKTNWVMHQYHLGTHEEEKEGELVVSKIFYQTQPRQCNWSSSTSSLNAIGGGGGEASSGGGGGEYHMRRDSGTTSGGSCSSSREIINVNPPNRSDEIGGVGGGVMAVAAAAAAVAAGLPSYAMDQLSFVPFMKSFDEVARRETPQTGHATCEDVMAEQHRHRHQPSSSTSHHMAHDHHHHHHQQQQQRHHAFNISQPTHPISTIISPSTSLHHASINILDDNPYHVHRILLPNENYQTQQQLRQEGEEEHNDGKMGGRSASGLEELIMGCTSSTTHHDVKDGSSSMGNQQEAEWLKYSTFWPAPDSSDNQDHHG

SEQ ID NO: 71328 - protein, 339 aa, Arabidopsis thaliana
  peptide (1)..(339): Ceres Seq. ID no. 3092346
MVNGKQKGCKKILVLYTNFGKNRKPEKTNWVMHQYHLGTHEEEKEGELVVSKIFYQTQPRQCNWSSSTSSLNAIGGGGGEASSGGGGGEYHMRRDSGTTSGGSCSSSREIINVNPPNRSDEIGGVGGGVMAVAAAAAAVAAGLPSYAMDQLSFVPFMKSFDEVARRETPQTGHATCEDVMAEQHRHRHQPSSSTSHHMAHDHHHHHHQQQQQRHHAFNISQPTHPISTIISPSTSLHHASINILDDNPYHVHRILLPNENYQTQQQLRQEGEEEHNDGKMGGRSASGLEELIMGCTSSTTHHDVKDGSSSMGNQQEAEWLKYSTFWPAPDSSDNQDHHG

SEQ ID NO: 71329 - protein, 308 aa, Arabidopsis thaliana
  peptide (1)..(308): Ceres Seq. ID no. 3092347
MHQYHLGTHEEEKEGELVVSKIFYQTQPRQCNWSSSTSSLNAIGGGGGEASSGGGGGEYHMRRDSGTTSGGSCSSSREIINVNPPNRSDEIGGVGGGVMAVAAAAAAVAAGLPSYAMDQLSFVPFMKSFDEVARRETPQTGHATCEDVMAEQHRHRHQPSSSTSHHMAHDHHHHHHQQQQQRHHAFNISQPTHPISTIISPSTSLHHASINILDDNPYHVHRILLPNENYQTQQQLRQEGEEEHNDGKMGGRSASGLEELIMGCTSSTTHHDVKDGSSSMGNQQEAEWLKYSTFWPAPDSSDNQDHHG

SEQ ID NO: 71330 - DNA, 1260 bp, Arabidopsis thaliana
  misc_feature (1)..(1260): Ceres Seq. ID no. 3092832
  misc_feature (1)..(1260): Ortholog of  Ceres SEQ ID NO 13584744 as cited in SEQ ID NO 69137
atgggaaagattcttcatcttcttcttcttcttcttaaggtctctgttcttgaattcatcattagtgtttctgcttttacttcacctgcttcacagccttctctttctcctgtttacacttccatggcttccttttctccagggatccacatgggcaaaggccaagaacacaagttagatgcacacaagaaacttctaatcgctctcataatcacctcatcttctctaggactaatacttgtatcttgtttatgcttttgggtttattggtctaagaaatctcccaaaaacaccaagaactcaggtgagagtaggatttcattatccaagaagggctttgtgcagtccttcgattacaagacactagagaaagcaacaggcggtttcaaagacggtaatcttataggacgaggcgggttcggagatgtttacaaggcctgtttaggcaacaacactctagcagcagtcaaaaagatcgaaaacgttagtcaagaagcaaaacgagaatttcagaatgaagttgatttgttgagcaagattcaccacccgaacatcatctcattgtttggatatggaaatgaactcagttcgagttttatcgtctacgagctgatggaaagcggatcattggatacacagttacacggaccttctcggggatcggctttaacatggcacatgcggatgaagattgctcttgatacagcaagagctgttgagtatctccacgagcgttgtcgtcctccggttatccacagagatcttaaatcgtcaaatattctccttgattcttccttcaacgccaagatttcggattttggtcttgcggtaatggtgggggctcacggcaaaaacaacattaaactatcaggaacacttggttatgttgctccagaatatctcctagatggaaaattgacggataagagtgatgtttatgcgtttggtgtggttttacttgaactcttgttaggaagacggccggttgagaaattgagttcggttcagtgtcaatctcttgtcacttgggcaatgccccaacttacggatagatcaaagcttccgaaaatcgtggatccggttatcaaagatacaatggatcataagcacttataccaggtggcagccgtggcagtgctttgtgtacaaccagaaccgagttatcgaccgttgataaccgatgttcttcactcactagttccattggttccggtagagctaggagggactctccgtttgatctctgattgctttgagtaa

SEQ ID NO: 71331 - protein, 419 aa, Arabidopsis thaliana
  peptide (1)..(419): Ceres Seq. ID no. 3092833
MGKILHLLLLLLKVSVLEFIISVSAFTSPASQPSLSPVYTSMASFSPGIHMGKGQEHKLDAHKKLLIALIITSSSLGLILVSCLCFWVYWSKKSPKNTKNSGESRISLSKKGFVQSFDYKTLEKATGGFKDGNLIGRGGFGDVYKACLGNNTLAAVKKIENVSQEAKREFQNEVDLLSKIHHPNIISLFGYGNELSSSFIVYELMESGSLDTQLHGPSRGSALTWHMRMKIALDTARAVEYLHERCRPPVIHRDLKSSNILLDSSFNAKISDFGLAVMVGAHGKNNIKLSGTLGYVAPEYLLDGKLTDKSDVYAFGVVLLELLLGRRPVEKLSSVQCQSLVTWAMPQLTDRSKLPKIVDPVIKDTMDHKHLYQVAAVAVLCVQPEPSYRPLITDVLHSLVPLVPVELGGTLRLISDCFE

SEQ ID NO: 71332 - protein, 378 aa, Arabidopsis thaliana
  peptide (1)..(378): Ceres Seq. ID no. 3092834
MASFSPGIHMGKGQEHKLDAHKKLLIALIITSSSLGLILVSCLCFWVYWSKKSPKNTKNSGESRISLSKKGFVQSFDYKTLEKATGGFKDGNLIGRGGFGDVYKACLGNNTLAAVKKIENVSQEAKREFQNEVDLLSKIHHPNIISLFGYGNELSSSFIVYELMESGSLDTQLHGPSRGSALTWHMRMKIALDTARAVEYLHERCRPPVIHRDLKSSNILLDSSFNAKISDFGLAVMVGAHGKNNIKLSGTLGYVAPEYLLDGKLTDKSDVYAFGVVLLELLLGRRPVEKLSSVQCQSLVTWAMPQLTDRSKLPKIVDPVIKDTMDHKHLYQVAAVAVLCVQPEPSYRPLITDVLHSLVPLVPVELGGTLRLISDCFE

SEQ ID NO: 71333 - protein, 369 aa, Arabidopsis thaliana
  peptide (1)..(369): Ceres Seq. ID no. 3092835
MGKGQEHKLDAHKKLLIALIITSSSLGLILVSCLCFWVYWSKKSPKNTKNSGESRISLSKKGFVQSFDYKTLEKATGGFKDGNLIGRGGFGDVYKACLGNNTLAAVKKIENVSQEAKREFQNEVDLLSKIHHPNIISLFGYGNELSSSFIVYELMESGSLDTQLHGPSRGSALTWHMRMKIALDTARAVEYLHERCRPPVIHRDLKSSNILLDSSFNAKISDFGLAVMVGAHGKNNIKLSGTLGYVAPEYLLDGKLTDKSDVYAFGVVLLELLLGRRPVEKLSSVQCQSLVTWAMPQLTDRSKLPKIVDPVIKDTMDHKHLYQVAAVAVLCVQPEPSYRPLITDVLHSLVPLVPVELGGTLRLISDCFE

SEQ ID NO: 71334 - DNA, 1254 bp, Arabidopsis thaliana
  misc_feature (1)..(1254): Ceres Seq. ID no. 3093503
  misc_feature (1)..(1254): Ortholog of  Ceres SEQ ID NO 15171144 as cited in SEQ ID NO 60227
atgcctgtggtgagaacgagagcgaaatgttcgattcccgtcacaaaccctaatccaacagtcggaggaggaaactcaaacgtctcgatctacgagaaatgcagagaagacaggatcaaggagaatcttcagaggatgaagaatctcggaatcatggatctctctctcaaactcaaatccgagatccgacccgccaaaaggcgttacggtaactctaatgccaatccgggtcgagaaacatctcctattcagctttccgtctcctctagacgatcctcaagattgaagcaggagccgccagtttctcggagatcctcgagattgaagaacgctacaccagtttcctacgcagaggaacctgaactgaagaagggtaaagtgtctaaagaagagattgttttgtgggtaggagaaggcgtaaggccagagatttacactgaggagcatgagaaactgttaggtaacacagaacgaacttgggagctttttgttgatggttgtgacaaaaatgggaaacggatttatgaccctgttagaggaaagtgttgccaccagtgcaggcagaagacgctaggttatcatacccaatgcagccagtgtaaccattctgttcgaggtcaattctgtggagattgtttatacatgagatatggagaacatgttcttgaagctctggaaaatccggactggatttgtccagtctgtcgcgatatctgcaactgcagtttctgtcgtacaaaaaaagggtggctcccaactggtgcagcttacaggaagatacataaactcgggtataagtctgttgcacattatctgattcaaaccaaccaacagtcagaaacaagtgaggatgatgaaactgatgctcctgcagatagtcaagcttcagaaggagatcatctccttctcataactgatgggattcaggacaatcaaattgacgaaaatctcgatgatgatgatggctcaaacaagaatccggattcagctagaaagtcattatgcttcttgtcgtctgggaacaaccaaacttcagtgactgatggtgatctcaagccattagatgtgaaagaggtggatccagcaactcctgtgatcatcgatcttgaggctcagtgcagtgaaactgagaggatggctaactctgcaaacaaagagaaccgagaaacaagaagcaagcgaaagatgtctgctgaaccaaacccaaatagtattggtggaagactgagacagcgtcgtaagattcaagcttga

SEQ ID NO: 71335 - protein, 417 aa, Arabidopsis thaliana
  peptide (1)..(417): Ceres Seq. ID no. 3093504
MPVVRTRAKCSIPVTNPNPTVGGGNSNVSIYEKCREDRIKENLQRMKNLGIMDLSLKLKSEIRPAKRRYGNSNANPGRETSPIQLSVSSRRSSRLKQEPPVSRRSSRLKNATPVSYAEEPELKKGKVSKEEIVLWVGEGVRPEIYTEEHEKLLGNTERTWELFVDGCDKNGKRIYDPVRGKCCHQCRQKTLGYHTQCSQCNHSVRGQFCGDCLYMRYGEHVLEALENPDWICPVCRDICNCSFCRTKKGWLPTGAAYRKIHKLGYKSVAHYLIQTNQQSETSEDDETDAPADSQASEGDHLLLITDGIQDNQIDENLDDDDGSNKNPDSARKSLCFLSSGNNQTSVTDGDLKPLDVKEVDPATPVIIDLEAQCSETERMANSANKENRETRSKRKMSAEPNPNSIGGRLRQRRKIQA

SEQ ID NO: 71336 - protein, 372 aa, Arabidopsis thaliana
  peptide (1)..(372): Ceres Seq. ID no. 3093505
MKNLGIMDLSLKLKSEIRPAKRRYGNSNANPGRETSPIQLSVSSRRSSRLKQEPPVSRRSSRLKNATPVSYAEEPELKKGKVSKEEIVLWVGEGVRPEIYTEEHEKLLGNTERTWELFVDGCDKNGKRIYDPVRGKCCHQCRQKTLGYHTQCSQCNHSVRGQFCGDCLYMRYGEHVLEALENPDWICPVCRDICNCSFCRTKKGWLPTGAAYRKIHKLGYKSVAHYLIQTNQQSETSEDDETDAPADSQASEGDHLLLITDGIQDNQIDENLDDDDGSNKNPDSARKSLCFLSSGNNQTSVTDGDLKPLDVKEVDPATPVIIDLEAQCSETERMANSANKENRETRSKRKMSAEPNPNSIGGRLRQRRKIQA

SEQ ID NO: 71337 - protein, 366 aa, Arabidopsis thaliana
  peptide (1)..(366): Ceres Seq. ID no. 3093506
MDLSLKLKSEIRPAKRRYGNSNANPGRETSPIQLSVSSRRSSRLKQEPPVSRRSSRLKNATPVSYAEEPELKKGKVSKEEIVLWVGEGVRPEIYTEEHEKLLGNTERTWELFVDGCDKNGKRIYDPVRGKCCHQCRQKTLGYHTQCSQCNHSVRGQFCGDCLYMRYGEHVLEALENPDWICPVCRDICNCSFCRTKKGWLPTGAAYRKIHKLGYKSVAHYLIQTNQQSETSEDDETDAPADSQASEGDHLLLITDGIQDNQIDENLDDDDGSNKNPDSARKSLCFLSSGNNQTSVTDGDLKPLDVKEVDPATPVIIDLEAQCSETERMANSANKENRETRSKRKMSAEPNPNSIGGRLRQRRKIQA

SEQ ID NO: 71338 - DNA, 1227 bp, Arabidopsis thaliana
  misc_feature (1)..(1227): Ceres Seq. ID no. 3094514
  misc_feature (1)..(1227): Ortholog of  Ceres SEQ ID NO 13597334 as cited in SEQ ID NO 64244
atggcttctctttggctgaagttaatctccataagtctaatatacctcaatgttatcgctaaatcaactccgcatcaagaaagcgaattcgaatgtgtctctatagacaaacaatctgcactacaacatcctctaatgaagaatcatcgcatacagactagaccaagtcgagagcttctatcaatactctctacgtccaatggtaacatactcagagagattgatttgaagggatcagaagaatgtccaaagggacaagtaccgattcataaacaaaaaaccaacttaaccaatagtcttattcatccccaacaaattcatagagcaggccgtatcctgaaacaaagtcgcagggataaaaagaagaaaaagaacaatcgacgtaaaaaaaataaaaataaactcatgatcccttctgcattgttgtctcaaaaaaataagattcctcaccaccagccaaaattatttacagagacacatctacattatgcaattgttaggacatttgaaaacacgacaaagaaatggcgtggagcacaagcattgttcaatattaacaagccccgagtggtgcaaaatcaatttagtaaggcttggatttggcttaattacattcaaggaagcttaatgagcagcatccagtttggttgggctgtgcatacgaatttatattcagacgatcgtccaagactaactacgttttggatgtcagatcagcatccaaaaggatgttacaatgcgttatgtccaggaggttatgttcaaattcataaatcaatctaccccggtttggtgtatgataaagttaatgctctaggaggaaaacagaacactgtccatctttctgttgctgaggatccagtgaccaaaaattgggtattgacgataggatccataatgataggctattggccacgtcaaagtcagatggtagatggagcttctgaagtatacttcggtggatttgcaggaaacactgcatcgtctcaaccgacgacaagcccaccaatgggaactggagagtttccgacaaaagatttgagtcggtcttgtttcatgaaacagcttaaatatgttctttcggattattcagttgtggatattaatgccaacgaggtagaacagtatgtggatagtcgtaagtgttatggtgtaatgtttctcaagtatgtagattatgattccagagagactcttacgtttggaggacctggtggacaatgttga

SEQ ID NO: 71339 - protein, 408 aa, Arabidopsis thaliana
  peptide (1)..(408): Ceres Seq. ID no. 3094515
MASLWLKLISISLIYLNVIAKSTPHQESEFECVSIDKQSALQHPLMKNHRIQTRPSRELLSILSTSNGNILREIDLKGSEECPKGQVPIHKQKTNLTNSLIHPQQIHRAGRILKQSRRDKKKKKNNRRKKNKNKLMIPSALLSQKNKIPHHQPKLFTETHLHYAIVRTFENTTKKWRGAQALFNINKPRVVQNQFSKAWIWLNYIQGSLMSSIQFGWAVHTNLYSDDRPRLTTFWMSDQHPKGCYNALCPGGYVQIHKSIYPGLVYDKVNALGGKQNTVHLSVAEDPVTKNWVLTIGSIMIGYWPRQSQMVDGASEVYFGGFAGNTASSQPTTSPPMGTGEFPTKDLSRSCFMKQLKYVLSDYSVVDINANEVEQYVDSRKCYGVMFLKYVDYDSRETLTFGGPGGQC

SEQ ID NO: 71340 - protein, 363 aa, Arabidopsis thaliana
  peptide (1)..(363): Ceres Seq. ID no. 3094516
MKNHRIQTRPSRELLSILSTSNGNILREIDLKGSEECPKGQVPIHKQKTNLTNSLIHPQQIHRAGRILKQSRRDKKKKKNNRRKKNKNKLMIPSALLSQKNKIPHHQPKLFTETHLHYAIVRTFENTTKKWRGAQALFNINKPRVVQNQFSKAWIWLNYIQGSLMSSIQFGWAVHTNLYSDDRPRLTTFWMSDQHPKGCYNALCPGGYVQIHKSIYPGLVYDKVNALGGKQNTVHLSVAEDPVTKNWVLTIGSIMIGYWPRQSQMVDGASEVYFGGFAGNTASSQPTTSPPMGTGEFPTKDLSRSCFMKQLKYVLSDYSVVDINANEVEQYVDSRKCYGVMFLKYVDYDSRETLTFGGPGGQC

SEQ ID NO: 71341 - protein, 273 aa, Arabidopsis thaliana
  peptide (1)..(273): Ceres Seq. ID no. 3094517
MIPSALLSQKNKIPHHQPKLFTETHLHYAIVRTFENTTKKWRGAQALFNINKPRVVQNQFSKAWIWLNYIQGSLMSSIQFGWAVHTNLYSDDRPRLTTFWMSDQHPKGCYNALCPGGYVQIHKSIYPGLVYDKVNALGGKQNTVHLSVAEDPVTKNWVLTIGSIMIGYWPRQSQMVDGASEVYFGGFAGNTASSQPTTSPPMGTGEFPTKDLSRSCFMKQLKYVLSDYSVVDINANEVEQYVDSRKCYGVMFLKYVDYDSRETLTFGGPGGQC

SEQ ID NO: 71342 - DNA, 768 bp, Arabidopsis thaliana
  misc_feature (1)..(768): Ceres Seq. ID no. 3094772
  misc_feature (1)..(768): Ortholog of  Ceres SEQ ID NO 13661768 as cited in SEQ ID NO 61427
  misc_feature (1)..(768): Ortholog of  Ceres SEQ ID NO 15179176 as cited in SEQ ID NO 0
atgtcttcaaatatattggccatggtggccatgcaactcctccttatacgcatagtttcttcccaaaacgttacgaatgagtatttgaaccaccaatgcaacaacacacaagggacatacacgcggggtagtacgtttgagaagaatctcaaccaagtcatccgtaacatctctcacctccatcttcgctacggttacacctacaactccaatgttgaggcttacgaagttagtaaagatcccaacattgtcttcgttttgctccagtgtcgtggtgactcttacgggtccaagtgccactcctgcctccacacagccttctctgggcttcgtgagagatgtcggggaaacaaaggagcaataatatggtacgaccaatgtgttttggagatttcttccgtgaataccaaggggaggattcgttacgatagttttttcaatatgaccaacgtgaagaatgtgagcagcaatgcggagcagtttaaaaataaaaggaaggatctcttccacaagctattgttgggagccaccaaggatgtaagcgacagcaatgatgcgtacgcagtgggggagacgaggataggaagaaataagatgtatgcaatgatgcagtgtgcactagacttaacgacgaatggatgctatgtgtgtctagaatggattataggcaggtatgatagcttctactttgaccgtagacaaggaacgagagttttgagtaggagttgtagcttaagatatgagctttacccttttcttaggaggtaa

SEQ ID NO: 71343 - protein, 255 aa, Arabidopsis thaliana
  peptide (1)..(255): Ceres Seq. ID no. 3094773
MSSNILAMVAMQLLLIRIVSSQNVTNEYLNHQCNNTQGTYTRGSTFEKNLNQVIRNISHLHLRYGYTYNSNVEAYEVSKDPNIVFVLLQCRGDSYGSKCHSCLHTAFSGLRERCRGNKGAIIWYDQCVLEISSVNTKGRIRYDSFFNMTNVKNVSSNAEQFKNKRKDLFHKLLLGATKDVSDSNDAYAVGETRIGRNKMYAMMQCALDLTTNGCYVCLEWIIGRYDSFYFDRRQGTRVLSRSCSLRYELYPFLRR

SEQ ID NO: 71344 - protein, 248 aa, Arabidopsis thaliana
  peptide (1)..(248): Ceres Seq. ID no. 3094774
MVAMQLLLIRIVSSQNVTNEYLNHQCNNTQGTYTRGSTFEKNLNQVIRNISHLHLRYGYTYNSNVEAYEVSKDPNIVFVLLQCRGDSYGSKCHSCLHTAFSGLRERCRGNKGAIIWYDQCVLEISSVNTKGRIRYDSFFNMTNVKNVSSNAEQFKNKRKDLFHKLLLGATKDVSDSNDAYAVGETRIGRNKMYAMMQCALDLTTNGCYVCLEWIIGRYDSFYFDRRQGTRVLSRSCSLRYELYPFLRR

SEQ ID NO: 71345 - protein, 245 aa, Arabidopsis thaliana
  peptide (1)..(245): Ceres Seq. ID no. 3094776
MQLLLIRIVSSQNVTNEYLNHQCNNTQGTYTRGSTFEKNLNQVIRNISHLHLRYGYTYNSNVEAYEVSKDPNIVFVLLQCRGDSYGSKCHSCLHTAFSGLRERCRGNKGAIIWYDQCVLEISSVNTKGRIRYDSFFNMTNVKNVSSNAEQFKNKRKDLFHKLLLGATKDVSDSNDAYAVGETRIGRNKMYAMMQCALDLTTNGCYVCLEWIIGRYDSFYFDRRQGTRVLSRSCSLRYELYPFLRR

SEQ ID NO: 71346 - DNA, 1080 bp, Arabidopsis thaliana
  misc_feature (1)..(1080): Ceres Seq. ID no. 3094823
  misc_feature (1)..(1080): Ortholog of  Ceres SEQ ID NO 14301916 as cited in SEQ ID NO 69281
atgtataagaatcagttgcaagagcttgcacagaggagttgtttcagtctcccatcatatacatgcacaagagaaggaccagatcatgctccaagattcaaagctagtgtaaacttcaatggtgagatatttgaaagcccaacttactgttctactctcagacaagctgagcattcagctgctgaagttgctcttagtgctctctcttccaaaggtccttcaaagtctctaactgctagagttctagatgagactgggatctacaagaatctgcttcaagagacagcacacagagctggtcttgatctaccggtttacacaagtgtgagatcaggacctggtcacatcccaacattctcttgtactgtggagcttgctggaatgagttttaatggagaatcagcaaagactaagaaacaagctgagaagaatgcagccattgcagcttggttctccttgagaaaaatgccaagattggacccattgagaggtgaagagaaggaacaagagatagttgcaagagtcctctcaagatttagacccaaagaagtgaaaagaagagaaccaaaccagtcaagaagaagaacagtcatcagaacaattcgccaaaacacaacaacaacaacaacaaccacaggagacttgttgtgtgagaaactcagatccatcaatctatataccaatgaagcttcatcatcatcaccaccaccacagagattctggccttcaagaacaaatctcacacaagaacaatccaaagtcaaatcattgctagagaaatgtcaagaatatgcagagaagaaacagagcctagatgatcctaagccagagatgagaatcaaaacatcatcaccatcaccattatcatcatcagtggagagaaactgttatagtaagctcttaccctttccaagttttgtgttaaaccatcagaaactagctccagcagttcacatcagatcagtgatcccagtttgttcagctcctccaccaaaacctaaccctaaccctaattcatcaccgttcatcacaagggagctgggaaatggaagccaagagaagaagtcattaccaaattag

SEQ ID NO: 71347 - protein, 359 aa, Arabidopsis thaliana; identical to SEQ ID NO: 50007
  peptide (1)..(359): Ceres Seq. ID no. 3094824

SEQ ID NO: 71348 - protein, 232 aa, Arabidopsis thaliana; identical to SEQ ID NO: 50008
  peptide (1)..(232): Ceres Seq. ID no. 3094825

SEQ ID NO: 71349 - protein, 204 aa, Arabidopsis thaliana; identical to SEQ ID NO: 50009
  peptide (1)..(204): Ceres Seq. ID no. 3094826

SEQ ID NO: 71350 - DNA, 1533 bp, Arabidopsis thaliana
  misc_feature (1)..(1533): Ceres Seq. ID no. 3095119
  misc_feature (1)..(1533): Ortholog of  Ceres SEQ ID NO 15170151 as cited in SEQ ID NO 53069
  misc_feature (1)..(1533): Ortholog of  Ceres SEQ ID NO 13594209 as cited in SEQ ID NO 59089
  misc_feature (1)..(1533): Ortholog of  Ceres SEQ ID NO 14303546 as cited in SEQ ID NO 64893
  misc_feature (1)..(1533): Ortholog of  Ceres SEQ ID NO 13502874 as cited in SEQ ID NO 66298
  misc_feature (1)..(1533): Ortholog of  Ceres SEQ ID NO 12614124 as cited in SEQ ID NO 68392
atggctactatttggtttctcccacttctctttctctcttgtcttcttcttgccgctttaagactcaagaagcggcggcaacatcaacggaaaccaccgtctccaccgggctttccgatcatcggaaacttgcatcagcttggggagctaccacatcaatctctatggagtctctccaaaaaatatggtcctgtaatgcttttgaagtttggaagtatcccaacggttgttgtctcttcttctgaaacagcaaagcaagctctgaaaatccatgacctcaattgttgtagccgtccaagcttagcaggattaaaacaaaagtcatatgattatttaggaccaagagcgctctcttacaactacttggacatagttttctctccttttaatgattactggaaagaattgaggaggatgtgtgtgcaagagcttttcagtcctaaacaagttcatttgattcaacccatcagggaagaggaagtcaagaaactgatgaattcattctcggaatcagctgctcagaaaactccggttaacttgagcgagaagttagcttctttaactgttggcgtgatatgcaaggcagcatttggtgtgagtttccaaggaactgtgcttaatagtgacaacttcgacaagttaatccatgatgcatttttgttcttggggagcttctctgcctcggattattttccaaatgtcggctggatcatcgactggctcacggggttacaagggcagagagagagaagtgtgagaggtcttgacgcattctatgaacaaatgtttgatctacataaacaggggaacaaagaaggagttgaggattttgtggacttgctcttgaagttggagaaagaagaaactgttcttggatatggcaagctcacaagaaaccatatcaaagcagtcttaatgaatgttcttcttggaggcattggaacttcggctataacaatgacatgggcaatgacagaacttatgagaaacccgcgagtaatgaagaaagttcaatccgaaatcagaaatcaaattgggggcaagtcaatgatctgcttggatgacatagaccaactccattacctgaaaatggtgatcaatgaaacatggaggctacatcctccagcaccacttctagttccaagagaagtaatgtctgaatttgaaatcaacggctacacgattccagccaagacaagactttatgtgaatgtatggggtatcgggcgtgatccagatacttggaaagatccagaggagtttcttccagagagatttgttaacagtaacattgatgcaaaaggacaaaactttgagctgttaccatttggaagtggtaggagaatgtgtcctgccatgtacatggggacaacaatggtggagtttggtctagccaatctcttgtaccattttgactggaaattaccagaaggcatggtggtcgaagacattgacatggaagaatctcctggactcaatgccagcaagaaaaatgagcttgtacttgttcctaggaagtatttaaatctgtaa

SEQ ID NO: 71351 - protein, 510 aa, Arabidopsis thaliana
  peptide (1)..(510): Ceres Seq. ID no. 3095120
MATIWFLPLLFLSCLLLAALRLKKRRQHQRKPPSPPGFPIIGNLHQLGELPHQSLWSLSKKYGPVMLLKFGSIPTVVVSSSETAKQALKIHDLNCCSRPSLAGLKQKSYDYLGPRALSYNYLDIVFSPFNDYWKELRRMCVQELFSPKQVHLIQPIREEEVKKLMNSFSESAAQKTPVNLSEKLASLTVGVICKAAFGVSFQGTVLNSDNFDKLIHDAFLFLGSFSASDYFPNVGWIIDWLTGLQGQRERSVRGLDAFYEQMFDLHKQGNKEGVEDFVDLLLKLEKEETVLGYGKLTRNHIKAVLMNVLLGGIGTSAITMTWAMTELMRNPRVMKKVQSEIRNQIGGKSMICLDDIDQLHYLKMVINETWRLHPPAPLLVPREVMSEFEINGYTIPAKTRLYVNVWGIGRDPDTWKDPEEFLPERFVNSNIDAKGQNFELLPFGSGRRMCPAMYMGTTMVEFGLANLLYHFDWKLPEGMVVEDIDMEESPGLNASKKNELVLVPRKYLNL

SEQ ID NO: 71352 - protein, 445 aa, Arabidopsis thaliana
  peptide (1)..(445): Ceres Seq. ID no. 3095121
MLLKFGSIPTVVVSSSETAKQALKIHDLNCCSRPSLAGLKQKSYDYLGPRALSYNYLDIVFSPFNDYWKELRRMCVQELFSPKQVHLIQPIREEEVKKLMNSFSESAAQKTPVNLSEKLASLTVGVICKAAFGVSFQGTVLNSDNFDKLIHDAFLFLGSFSASDYFPNVGWIIDWLTGLQGQRERSVRGLDAFYEQMFDLHKQGNKEGVEDFVDLLLKLEKEETVLGYGKLTRNHIKAVLMNVLLGGIGTSAITMTWAMTELMRNPRVMKKVQSEIRNQIGGKSMICLDDIDQLHYLKMVINETWRLHPPAPLLVPREVMSEFEINGYTIPAKTRLYVNVWGIGRDPDTWKDPEEFLPERFVNSNIDAKGQNFELLPFGSGRRMCPAMYMGTTMVEFGLANLLYHFDWKLPEGMVVEDIDMEESPGLNASKKNELVLVPRKYLNL

SEQ ID NO: 71353 - protein, 372 aa, Arabidopsis thaliana
  peptide (1)..(372): Ceres Seq. ID no. 3095122
MCVQELFSPKQVHLIQPIREEEVKKLMNSFSESAAQKTPVNLSEKLASLTVGVICKAAFGVSFQGTVLNSDNFDKLIHDAFLFLGSFSASDYFPNVGWIIDWLTGLQGQRERSVRGLDAFYEQMFDLHKQGNKEGVEDFVDLLLKLEKEETVLGYGKLTRNHIKAVLMNVLLGGIGTSAITMTWAMTELMRNPRVMKKVQSEIRNQIGGKSMICLDDIDQLHYLKMVINETWRLHPPAPLLVPREVMSEFEINGYTIPAKTRLYVNVWGIGRDPDTWKDPEEFLPERFVNSNIDAKGQNFELLPFGSGRRMCPAMYMGTTMVEFGLANLLYHFDWKLPEGMVVEDIDMEESPGLNASKKNELVLVPRKYLNL

SEQ ID NO: 71354 - DNA, 2700 bp, Arabidopsis thaliana
  misc_feature (1)..(2700): Ceres Seq. ID no. 3095595
  misc_feature (1)..(2700): Ortholog of  Ceres SEQ ID NO 15226720 as cited in SEQ ID NO 58707
  misc_feature (1)..(2700): Ortholog of  Ceres SEQ ID NO 13654989 as cited in SEQ ID NO 63117
  misc_feature (1)..(2700): Ortholog of  Ceres SEQ ID NO 13584744 as cited in SEQ ID NO 69137
atggagtaccatcctcaagcaattaggttatgtgcgttgatcttcatctctttctatgctcttttacacctcgttgaagcacaagaccaaaaaggattcattagtttggattgcgggtcattgccaaatgagcctccttacaacgatccttcaaccggattaacatactcgacggacgatggtttcgtgcagagtggcaaaactggaagaatccagaaagcgttcgagtcgatcttcagtaaaccgtctttgaagcttagatacttcccggacggattccgaaactgctataccttgaatgtcacgcaagacacaaactatctgatcaaagctgtatttgtgtatggtaactacgatggtcttaacaatcccccgagtttcgatctttaccttggtccgaatctatgggtaacggttgatatgaatggacggaccaatggtactatccaggagattatccacaagaccatatctaagtctctccaggtctgtcttgttaagacaggaacaagctcacctatgattaatacgttagagctacgaccacttaaaaacaatacttacaatactcagagtggctctctgaagtatttcttccgatattatttcagcggttcaggccaaaacatacggtaccctgatgatgtcaatgatcgtaaatggtatccattctttgatgcaaaagagtggacagagttaacaaccaatctgaatataaacagttctaatggttatgcaccaccagaagttgtgatggcgtcagcctcaacgcctataagtacttttggaacatggaacttctcatggttattgccatcttccacaacccaattttatgtgtacatgcattttgccgagattcaaactctacggtccctcgatacccgagaattcaaagtgacgttgaatggaaaacttgcttatgaacgctacagccctaaaacgttagccaccgaaaccattttctattcgacaccacaacaatgtgaagatgggacatgcctcttggagttgacgaaaacacctaagtctactcttcctcctctcatgaacgctcttgaggttttcaccgtgatcgattttccacagatggaaacaaatccagatgatgttgctgctatcaagagtatccaaagcacttatggattaagtaaaatcagctggcaaggagatccatgcgttcctaaacagtttttgtgggagggtttaaactgcaataatctagataactccacgccgcctattgtcacttccttaaacttatcgtcaagtcatttaacggggatcatcgcgcaaggcattcagaatctgacacacctacaagaactagacttgtcaaataacaatttgacgggaggaatacccgaatttcttgctgacataaaatcactcttagtaataaatttaagtgggaacaattttaatggctctattcctcaaatccttttacagaagaaaggactaaagctaattcttgaaggaaacgccaatctgatttgtccggatggattatgtgtaaacaaagctggcaatggtggtgccaagaaaatgaatgttgtaataccgattgttgcatcagttgcgtttgtggttgttcttggatctgcattggcgttcttttttattttcaaaaagaaaaagacatcaaacagtcaagatttaggtccatcttcatatactcaagtatcagaagttagaacaatcagatcttcagagtcggcaataatgactaagaacagaagatttacatattcggaggttgtaacaatgacaaataactttgaaagagttcttggtaaaggaggatttggaatggtttatcatggaactgtaaataatactgaacaagtagccgttaaaatgctttcacactcatcttctcaaggatataaagaattcaaagcagaggtggaacttcttctcagagttcaccacaaaaatttggttggcctcgttggatattgtgatgaaggagaaaacttggctcttatctacgagtacatggctaacggagacttgagagaacatatgtcaggaaagcgaggtggatctattctaaattgggaaactagactaaaaatagttgtcgagtctgcccaaggtttggaatacttgcataatggatgcaaaccaccaatggttcatagggatgttaaaaccacaaatatattgttgaatgaacacctccatgctaagctagctgattttgggctttcgagatcttttccaattgaaggagaaactcatgtgtcaacagttgttgctggaactcctggataccttgatccagaatattaccgaacaaattggttgaacgagaaaagtgatgtttatagctttggaattgtactattagagatcatcacaaaccaacttgtgatcaatcaaagtcgtgaaaaaccacatatagcagaatgggtggggttaatgcttacaaaaggagacattcaaaacattatggatccaaaactttatggtgattatgactctggttctgtctggagagcagttgaactagcaatgtcatgtctaaatccttcttcagctagaagaccaacaatgtctcaagttgttatcgaattaaacgaatgtttgtcatatgaaaacgcaagaggaggaacgagtcaaaacatgaactcagagagttcaatagaagtcagcatgaactttgatattggagctacccctgatgctcgttag

SEQ ID NO: 71355 - protein, 899 aa, Arabidopsis thaliana
  peptide (1)..(899): Ceres Seq. ID no. 3095596
MEYHPQAIRLCALIFISFYALLHLVEAQDQKGFISLDCGSLPNEPPYNDPSTGLTYSTDDGFVQSGKTGRIQKAFESIFSKPSLKLRYFPDGFRNCYTLNVTQDTNYLIKAVFVYGNYDGLNNPPSFDLYLGPNLWVTVDMNGRTNGTIQEIIHKTISKSLQVCLVKTGTSSPMINTLELRPLKNNTYNTQSGSLKYFFRYYFSGSGQNIRYPDDVNDRKWYPFFDAKEWTELTTNLNINSSNGYAPPEVVMASASTPISTFGTWNFSWLLPSSTTQFYVYMHFAEIQTLRSLDTREFKVTLNGKLAYERYSPKTLATETIFYSTPQQCEDGTCLLELTKTPKSTLPPLMNALEVFTVIDFPQMETNPDDVAAIKSIQSTYGLSKISWQGDPCVPKQFLWEGLNCNNLDNSTPPIVTSLNLSSSHLTGIIAQGIQNLTHLQELDLSNNNLTGGIPEFLADIKSLLVINLSGNNFNGSIPQILLQKKGLKLILEGNANLICPDGLCVNKAGNGGAKKMNVVIPIVASVAFVVVLGSALAFFFIFKKKKTSNSQDLGPSSYTQVSEVRTIRSSESAIMTKNRRFTYSEVVTMTNNFERVLGKGGFGMVYHGTVNNTEQVAVKMLSHSSSQGYKEFKAEVELLLRVHHKNLVGLVGYCDEGENLALIYEYMANGDLREHMSGKRGGSILNWETRLKIVVESAQGLEYLHNGCKPPMVHRDVKTTNILLNEHLHAKLADFGLSRSFPIEGETHVSTVVAGTPGYLDPEYYRTNWLNEKSDVYSFGIVLLEIITNQLVINQSREKPHIAEWVGLMLTKGDIQNIMDPKLYGDYDSGSVWRAVELAMSCLNPSSARRPTMSQVVIELNECLSYENARGGTSQNMNSESSIEVSMNFDIGATPDAR

SEQ ID NO: 71356 - protein, 759 aa, Arabidopsis thaliana
  peptide (1)..(759): Ceres Seq. ID no. 3095598
MNGRTNGTIQEIIHKTISKSLQVCLVKTGTSSPMINTLELRPLKNNTYNTQSGSLKYFFRYYFSGSGQNIRYPDDVNDRKWYPFFDAKEWTELTTNLNINSSNGYAPPEVVMASASTPISTFGTWNFSWLLPSSTTQFYVYMHFAEIQTLRSLDTREFKVTLNGKLAYERYSPKTLATETIFYSTPQQCEDGTCLLELTKTPKSTLPPLMNALEVFTVIDFPQMETNPDDVAAIKSIQSTYGLSKISWQGDPCVPKQFLWEGLNCNNLDNSTPPIVTSLNLSSSHLTGIIAQGIQNLTHLQELDLSNNNLTGGIPEFLADIKSLLVINLSGNNFNGSIPQILLQKKGLKLILEGNANLICPDGLCVNKAGNGGAKKMNVVIPIVASVAFVVVLGSALAFFFIFKKKKTSNSQDLGPSSYTQVSEVRTIRSSESAIMTKNRRFTYSEVVTMTNNFERVLGKGGFGMVYHGTVNNTEQVAVKMLSHSSSQGYKEFKAEVELLLRVHHKNLVGLVGYCDEGENLALIYEYMANGDLREHMSGKRGGSILNWETRLKIVVESAQGLEYLHNGCKPPMVHRDVKTTNILLNEHLHAKLADFGLSRSFPIEGETHVSTVVAGTPGYLDPEYYRTNWLNEKSDVYSFGIVLLEIITNQLVINQSREKPHIAEWVGLMLTKGDIQNIMDPKLYGDYDSGSVWRAVELAMSCLNPSSARRPTMSQVVIELNECLSYENARGGTSQNMNSESSIEVSMNFDIGATPDAR

SEQ ID NO: 71357 - protein, 726 aa, Arabidopsis thaliana
  peptide (1)..(726): Ceres Seq. ID no. 3095599
MINTLELRPLKNNTYNTQSGSLKYFFRYYFSGSGQNIRYPDDVNDRKWYPFFDAKEWTELTTNLNINSSNGYAPPEVVMASASTPISTFGTWNFSWLLPSSTTQFYVYMHFAEIQTLRSLDTREFKVTLNGKLAYERYSPKTLATETIFYSTPQQCEDGTCLLELTKTPKSTLPPLMNALEVFTVIDFPQMETNPDDVAAIKSIQSTYGLSKISWQGDPCVPKQFLWEGLNCNNLDNSTPPIVTSLNLSSSHLTGIIAQGIQNLTHLQELDLSNNNLTGGIPEFLADIKSLLVINLSGNNFNGSIPQILLQKKGLKLILEGNANLICPDGLCVNKAGNGGAKKMNVVIPIVASVAFVVVLGSALAFFFIFKKKKTSNSQDLGPSSYTQVSEVRTIRSSESAIMTKNRRFTYSEVVTMTNNFERVLGKGGFGMVYHGTVNNTEQVAVKMLSHSSSQGYKEFKAEVELLLRVHHKNLVGLVGYCDEGENLALIYEYMANGDLREHMSGKRGGSILNWETRLKIVVESAQGLEYLHNGCKPPMVHRDVKTTNILLNEHLHAKLADFGLSRSFPIEGETHVSTVVAGTPGYLDPEYYRTNWLNEKSDVYSFGIVLLEIITNQLVINQSREKPHIAEWVGLMLTKGDIQNIMDPKLYGDYDSGSVWRAVELAMSCLNPSSARRPTMSQVVIELNECLSYENARGGTSQNMNSESSIEVSMNFDIGATPDAR

SEQ ID NO: 71358 - DNA, 4443 bp, Arabidopsis thaliana
  misc_feature (1)..(4443): Ceres Seq. ID no. 3095665
  misc_feature (1)..(4443): Ortholog of  Ceres SEQ ID NO 12612333 as cited in SEQ ID NO 56421
  misc_feature (1)..(4443): Ortholog of  Ceres SEQ ID NO 14305843 as cited in SEQ ID NO 59357
  misc_feature (1)..(4443): Ortholog of  Ceres SEQ ID NO 12618407 as cited in SEQ ID NO 64994
atggggtttcgcaccagaaacctctcctttctcattctcctccttcttaacttctttgctgccacatacgctcgtgaatgtagccctccaaaaccatcacctaagcctcacaaaccaccaaaacattctgtcgtcccacctaaaccaccggcggttaaaccacatccccacccgaaacctcccactataaaacctcctccgcctaaacgacacccccaccctaaaccacccaccgtcaaaccacaccctcaccctaaaccccctaccaaacctcatccccaccctaaaccacctaccaaacctcatccccaccctaaaccacccaccatcaaaccacctcctcaccctaaacctcgtccccaccctaaaccacccaacgtcaaaccacaccctcaccctaaacccccgacaaaacctcatccccaccctaaaccccccaccaaacatcatccccacccaaaacctcccaccataaaacctcctccgaaaccaccctccgtcaaacctccaccatcaactcctaaacctcctacgaccaaccctcctccgtctactccccaaccccctacccacaagcctccaccgtgcacaccaacaccacccgttgcctcaccaccaatggcaactcctcccactcaaatgcctcctatcgcaacacctcccatcgccaaatcgcccgtcgcaacaccgcctattgcaaccccacctactgcaacaccgcccattacaattccacctgttgcaacacctcctatcacaacacctcccatcgcaaacccacctatcataatgccacctatagcaactcctccagtagcagctcctcctataacaaatcctccaatatcaaagccgcctgttactacaccgcctactaccactcctcccattgcaaaaccacctatcgcaactcctcctatttcaacaccaccagccgcaacaccaccagccgcaacaccaccaataacaactctaccacccgcaaaaccgcctgttgcaatttcaccaatagtaactccacccgtcactccaattgcacagccaccagttgcaacaccgcccaccgcaactccacctgttgcaacaccaccaatagcaactccacctacctcaaaatcacctatctcaactcctcctatttcagaatcaccagttgcaacaccaccaaccgcaacatcaccaataaaaactccaccacccgcaaaaccacctgttgcaactccacccatcgcaaaatcgccaattgcaacaccgcccactgcgactccaccagttgcaactcctcctattgaaaaaccaccggttgcaacaccacccactacaacaccgcccaccgcaactccacctgttgcaaaaccaccagttgaaacaccaccaatagcaactccacctaccgcaaagccaccaatctcaactcctcctatttcaaaaccaccagttgcaacaccaccagccgcaacaccacctataacaactccaacaccagtaaaaccacctgttgcaactccaccgttagcaattccacccgtcgcaaaacccccagttgtaacaccgcccaccgcaacaccacctattgcaactcctcctattgcaaaatcaccggttgcaacaccgcccaccgcgacaccaccagttgcaactcctcctattgcaaaaccaccagttgtaacaccaccaactacaacaccgcccaccgcaactccacctgttgcaaaaccaccggttgcaacaccaccaatagcaactccacctaccgcaaagccaccaatctcaactcctcctatttcaaaatcaccagttgcaacaccaccagccgcaacaccacctatcacaactccaccacccgcaaaacctcctgttgcaactccaccaatagcaactccacccatcgcaaaaccgccagttgcaacaccgcccaccgcaacaccaccaattgcaacttctcctgttgcaaaaccaccagttgcaacaccacctataaaaactccaccacctgcaaaaccgcctgttgcaattccaccaatagcaactccacccgtcgcaaaaccgccagttgcaacaccgcccaccgcaactccacctattgcaactcctcctattgcaacaccaccggttgtaacaccgcccaccgcaactccaccagttgcaactcctcctattgcaaaacctccaacgacaataccgcctactgcaactccacctgttgcaatgccaccaatagcaactccacctaccgcaaaaccgcctattgcaactccaccgatagcaattccacccgtcgcaaaacccccagttgtaacaccgcccaccgcaacaccacctattgcaactcctcctattgcaaaatcaccggttgcaacaccgcccaccgcgacaccaccagttgcaactcctcctattgcaaaaccaccagttgcaacaccacccactacagcaccgcccaccgcaactccacctgttgcaaaaccaccggttgcaacaccaccaatagcaactccacctaccgcaaagccaccaatcttaactcctcctatttcaaaaccaccagttgcaacaccaccagccgcaacaccacctatcacaactccaccacccgcaaaacctcctgttgcaactccaccaatagcaactccacccatcgcaaaaccgccagttgcaacaccgcccaccgcaacaccaccaattgcaacttctcctgttgcaaaaccaccagttgcaataccacctataaaaactccaccacccgcaaaaccgcctgttgcaattccaccaatagcaactccacccgtcgcaaaaccgccagttgcaacaccgcccaccgcaactccacctattgcaacttctcctattgcaacaccaccggttgtaacaccgcccaccgcaacttcaccagttgcaactcctcctattgcaaaacctccaacgacaacaccgcccaccgcaactccacctgttgcaatgccaccaatagcaactccacctaccgcaaaaccgcctgttgcaactccacctatagcaaatccacctgtagaaaaaccgccggttgcaacaccgccaatcgcaaaaccgcccactgtactgccacctattgcaaaaccaccagttgaaacatcgcccaccgcaacacctccaaccgcaactccacctgttgcaattcctcctgttgtaaaaccaccggttgctatacctcccattacaaaaccaccggttgcaacaccaccagtaacaaatccacctaccgcaatgccaccaatcgttacgccgcctcctatcgtaactcctcctattgcaaaatcaccgatcgcaactccacctgtttctactcctcctatcgcaaagccacctatcgcaacaccgcctgttgcaactacgcccattgcaaaaccaccaattgcaacaccacccaccgcaaatccacctgttgcaaatcctcctatcgcaaagtcacctattgcaaagccaccaattgcaacaccccccaccgcaatgccatcaatagcaactccacctatcggtaagccgcctgttgcaaccccgcccatggcaaagccaccagttgcaagtccaccaattgcaacacctccaatcataaaaccaccagtcgcaactcctccaatcacaaaaccgccggttgcaactccaccagtagcaactcctcctatcgcaaagccaccagtcgcaacgtcgcctattgaaactccgcccgtggcaaaaccaccagttacaactccacctgtagcaactcctcccatcgtaaaaccacctattgtgacaccgcctattgcaactccacccatcgcaaagtcaccaatcgcgccgccgcctattggtactcctcctattgcaaaaccaccagttgcgacaccaccaaccgcaactccacctgttgctacttctcctatagcaaaaccacctgttgcaacgccgccacctgcaactccgcctgttgcaaaaccaccggttgcaacaccacccaccgtaactccacctgttgcaactcctccaatcgcaaagccacccggcgcacggccacccgttgccacaccacccgtagcaactccacctatcgctaagtcgcctgttgcaaccccacctatgacaaagccacctgttgcaagttcaccaattgcaactcctccaatcgcaaaaacacccatcgcaacgccacctacaactatgccgaaaacttgcccaattgacacgttgaagctaggctcgtgtgttgaccttcttggaggtttggttcacattggaattgggaaaagcgccaaggaaaagtgttgtccagttgttgaaggtttagttgatctagacgcagccgtttgtttatgtaccactattaaagctaaacttctcaacatagacgtcattctccccatagctcttgaagttctccttaattgtggaaaaaatccaccacctggattcaaatgtcccgcctga

SEQ ID NO: 71359 - protein, 1480 aa, Arabidopsis thaliana
  peptide (1)..(1480): Ceres Seq. ID no. 3095666
MGFRTRNLSFLILLLLNFFAATYARECSPPKPSPKPHKPPKHSVVPPKPPAVKPHPHPKPPTIKPPPPKRHPHPKPPTVKPHPHPKPPTKPHPHPKPPTKPHPHPKPPTIKPPPHPKPRPHPKPPNVKPHPHPKPPTKPHPHPKPPTKHHPHPKPPTIKPPPKPPSVKPPPSTPKPPTTNPPPSTPQPPTHKPPPCTPTPPVASPPMATPPTQMPPIATPPIAKSPVATPPIATPPTATPPITIPPVATPPITTPPIANPPIIMPPIATPPVAAPPITNPPISKPPVTTPPTTTPPIAKPPIATPPISTPPAATPPAATPPITTLPPAKPPVAISPIVTPPVTPIAQPPVATPPTATPPVATPPIATPPTSKSPISTPPISESPVATPPTATSPIKTPPPAKPPVATPPIAKSPIATPPTATPPVATPPIEKPPVATPPTTTPPTATPPVAKPPVETPPIATPPTAKPPISTPPISKPPVATPPAATPPITTPTPVKPPVATPPLAIPPVAKPPVVTPPTATPPIATPPIAKSPVATPPTATPPVATPPIAKPPVVTPPTTTPPTATPPVAKPPVATPPIATPPTAKPPISTPPISKSPVATPPAATPPITTPPPAKPPVATPPIATPPIAKPPVATPPTATPPIATSPVAKPPVATPPIKTPPPAKPPVAIPPIATPPVAKPPVATPPTATPPIATPPIATPPVVTPPTATPPVATPPIAKPPTTIPPTATPPVAMPPIATPPTAKPPIATPPIAIPPVAKPPVVTPPTATPPIATPPIAKSPVATPPTATPPVATPPIAKPPVATPPTTAPPTATPPVAKPPVATPPIATPPTAKPPILTPPISKPPVATPPAATPPITTPPPAKPPVATPPIATPPIAKPPVATPPTATPPIATSPVAKPPVAIPPIKTPPPAKPPVAIPPIATPPVAKPPVATPPTATPPIATSPIATPPVVTPPTATSPVATPPIAKPPTTTPPTATPPVAMPPIATPPTAKPPVATPPIANPPVEKPPVATPPIAKPPTVLPPIAKPPVETSPTATPPTATPPVAIPPVVKPPVAIPPITKPPVATPPVTNPPTAMPPIVTPPPIVTPPIAKSPIATPPVSTPPIAKPPIATPPVATTPIAKPPIATPPTANPPVANPPIAKSPIAKPPIATPPTAMPSIATPPIGKPPVATPPMAKPPVASPPIATPPIIKPPVATPPITKPPVATPPVATPPIAKPPVATSPIETPPVAKPPVTTPPVATPPIVKPPIVTPPIATPPIAKSPIAPPPIGTPPIAKPPVATPPTATPPVATSPIAKPPVATPPPATPPVAKPPVATPPTVTPPVATPPIAKPPGARPPVATPPVATPPIAKSPVATPPMTKPPVASSPIATPPIAKTPIATPPTTMPKTCPIDTLKLGSCVDLLGGLVHIGIGKSAKEKCCPVVEGLVDLDAAVCLCTTIKAKLLNIDVILPIALEVLLNCGKNPPPGFKCPA

SEQ ID NO: 71360 - protein, 1274 aa, Arabidopsis thaliana
  peptide (1)..(1274): Ceres Seq. ID no. 3095668
MATPPTQMPPIATPPIAKSPVATPPIATPPTATPPITIPPVATPPITTPPIANPPIIMPPIATPPVAAPPITNPPISKPPVTTPPTTTPPIAKPPIATPPISTPPAATPPAATPPITTLPPAKPPVAISPIVTPPVTPIAQPPVATPPTATPPVATPPIATPPTSKSPISTPPISESPVATPPTATSPIKTPPPAKPPVATPPIAKSPIATPPTATPPVATPPIEKPPVATPPTTTPPTATPPVAKPPVETPPIATPPTAKPPISTPPISKPPVATPPAATPPITTPTPVKPPVATPPLAIPPVAKPPVVTPPTATPPIATPPIAKSPVATPPTATPPVATPPIAKPPVVTPPTTTPPTATPPVAKPPVATPPIATPPTAKPPISTPPISKSPVATPPAATPPITTPPPAKPPVATPPIATPPIAKPPVATPPTATPPIATSPVAKPPVATPPIKTPPPAKPPVAIPPIATPPVAKPPVATPPTATPPIATPPIATPPVVTPPTATPPVATPPIAKPPTTIPPTATPPVAMPPIATPPTAKPPIATPPIAIPPVAKPPVVTPPTATPPIATPPIAKSPVATPPTATPPVATPPIAKPPVATPPTTAPPTATPPVAKPPVATPPIATPPTAKPPILTPPISKPPVATPPAATPPITTPPPAKPPVATPPIATPPIAKPPVATPPTATPPIATSPVAKPPVAIPPIKTPPPAKPPVAIPPIATPPVAKPPVATPPTATPPIATSPIATPPVVTPPTATSPVATPPIAKPPTTTPPTATPPVAMPPIATPPTAKPPVATPPIANPPVEKPPVATPPIAKPPTVLPPIAKPPVETSPTATPPTATPPVAIPPVVKPPVAIPPITKPPVATPPVTNPPTAMPPIVTPPPIVTPPIAKSPIATPPVSTPPIAKPPIATPPVATTPIAKPPIATPPTANPPVANPPIAKSPIAKPPIATPPTAMPSIATPPIGKPPVATPPMAKPPVASPPIATPPIIKPPVATPPITKPPVATPPVATPPIAKPPVATSPIETPPVAKPPVTTPPVATPPIVKPPIVTPPIATPPIAKSPIAPPPIGTPPIAKPPVATPPTATPPVATSPIAKPPVATPPPATPPVAKPPVATPPTVTPPVATPPIAKPPGARPPVATPPVATPPIAKSPVATPPMTKPPVASSPIATPPIAKTPIATPPTTMPKTCPIDTLKLGSCVDLLGGLVHIGIGKSAKEKCCPVVEGLVDLDAAVCLCTTIKAKLLNIDVILPIALEVLLNCGKNPPPGFKCPA

SEQ ID NO: 71361 - protein, 1267 aa, Arabidopsis thaliana
  peptide (1)..(1267): Ceres Seq. ID no. 3095669
MPPIATPPIAKSPVATPPIATPPTATPPITIPPVATPPITTPPIANPPIIMPPIATPPVAAPPITNPPISKPPVTTPPTTTPPIAKPPIATPPISTPPAATPPAATPPITTLPPAKPPVAISPIVTPPVTPIAQPPVATPPTATPPVATPPIATPPTSKSPISTPPISESPVATPPTATSPIKTPPPAKPPVATPPIAKSPIATPPTATPPVATPPIEKPPVATPPTTTPPTATPPVAKPPVETPPIATPPTAKPPISTPPISKPPVATPPAATPPITTPTPVKPPVATPPLAIPPVAKPPVVTPPTATPPIATPPIAKSPVATPPTATPPVATPPIAKPPVVTPPTTTPPTATPPVAKPPVATPPIATPPTAKPPISTPPISKSPVATPPAATPPITTPPPAKPPVATPPIATPPIAKPPVATPPTATPPIATSPVAKPPVATPPIKTPPPAKPPVAIPPIATPPVAKPPVATPPTATPPIATPPIATPPVVTPPTATPPVATPPIAKPPTTIPPTATPPVAMPPIATPPTAKPPIATPPIAIPPVAKPPVVTPPTATPPIATPPIAKSPVATPPTATPPVATPPIAKPPVATPPTTAPPTATPPVAKPPVATPPIATPPTAKPPILTPPISKPPVATPPAATPPITTPPPAKPPVATPPIATPPIAKPPVATPPTATPPIATSPVAKPPVAIPPIKTPPPAKPPVAIPPIATPPVAKPPVATPPTATPPIATSPIATPPVVTPPTATSPVATPPIAKPPTTTPPTATPPVAMPPIATPPTAKPPVATPPIANPPVEKPPVATPPIAKPPTVLPPIAKPPVETSPTATPPTATPPVAIPPVVKPPVAIPPITKPPVATPPVTNPPTAMPPIVTPPPIVTPPIAKSPIATPPVSTPPIAKPPIATPPVATTPIAKPPIATPPTANPPVANPPIAKSPIAKPPIATPPTAMPSIATPPIGKPPVATPPMAKPPVASPPIATPPIIKPPVATPPITKPPVATPPVATPPIAKPPVATSPIETPPVAKPPVTTPPVATPPIVKPPIVTPPIATPPIAKSPIAPPPIGTPPIAKPPVATPPTATPPVATSPIAKPPVATPPPATPPVAKPPVATPPTVTPPVATPPIAKPPGARPPVATPPVATPPIAKSPVATPPMTKPPVASSPIATPPIAKTPIATPPTTMPKTCPIDTLKLGSCVDLLGGLVHIGIGKSAKEKCCPVVEGLVDLDAAVCLCTTIKAKLLNIDVILPIALEVLLNCGKNPPPGFKCPA

SEQ ID NO: 71362 - DNA, 990 bp, Arabidopsis thaliana
  misc_feature (1)..(990): Ceres Seq. ID no. 3095701
  misc_feature (1)..(990): Ortholog of  Ceres SEQ ID NO 14302734 as cited in SEQ ID NO 66748
atgagcaacgaagaaaacatcaaatctgataataagagcggcgattcctctgatctccctaccattcccgccttagatattggggcagaggaatgtgatcttcttgcagagcttaaggcaagtcacttcaaattgttgataaaaattcacacaaacctaaccttaaagcgaccatttgatgtgaaaaaactctcacctaaagttaccaaacgtgttctgttcctcaaagacattcaggttacacacgatgaactcgaagagaagtttcttgctgagaaatctgcattggaggcaacatatgataatctctacaagccgctttttgctaagaggtatgaaattgtgaatggtgtggtcgaagctgaagcagagaaagaaggagttcccaatttctggttgattgcaatgaaaaccaatgaaatgctcgcaaatgagataacggaaagagatgaggcagcattgaagtatcttaaggacatcagatcttgcagagttgaagacacttcaagaaatttcaagctggagtttctctttgattctaatctttacttcaagaactcggttctgtctaaaacttaccatgtgaacgatgaagatggtcctgttcttgagaaagtgattggaacggacatagaatggtttccaggtaaatgtttgactcataaggttgttgtgaagaagaaaacaaagaaagggccaaagaaggtcaacaacatccccatgaccaaaacagaaaactgcgagagtttcttcaatttcttcaagccacctgagattcctgagattgatgaagttgacgattacgatgattttgataccattatgacggaagaactacaaaacctgatggaccaagactatgacattgctgtgacaatccgagataaactgatccctcatgcagtttcatggtttacgggagaggctcttgttgatgaagacgattctgatgataatgatgatgatgataatgatgagaagagtgactaa

SEQ ID NO: 71363 - protein, 329 aa, Arabidopsis thaliana
  peptide (1)..(329): Ceres Seq. ID no. 3095702
MSNEENIKSDNKSGDSSDLPTIPALDIGAEECDLLAELKASHFKLLIKIHTNLTLKRPFDVKKLSPKVTKRVLFLKDIQVTHDELEEKFLAEKSALEATYDNLYKPLFAKRYEIVNGVVEAEAEKEGVPNFWLIAMKTNEMLANEITERDEAALKYLKDIRSCRVEDTSRNFKLEFLFDSNLYFKNSVLSKTYHVNDEDGPVLEKVIGTDIEWFPGKCLTHKVVVKKKTKKGPKKVNNIPMTKTENCESFFNFFKPPEIPEIDEVDDYDDFDTIMTEELQNLMDQDYDIAVTIRDKLIPHAVSWFTGEALVDEDDSDDNDDDDNDEKSD

SEQ ID NO: 71364 - protein, 194 aa, Arabidopsis thaliana
  peptide (1)..(194): Ceres Seq. ID no. 3095704
MKTNEMLANEITERDEAALKYLKDIRSCRVEDTSRNFKLEFLFDSNLYFKNSVLSKTYHVNDEDGPVLEKVIGTDIEWFPGKCLTHKVVVKKKTKKGPKKVNNIPMTKTENCESFFNFFKPPEIPEIDEVDDYDDFDTIMTEELQNLMDQDYDIAVTIRDKLIPHAVSWFTGEALVDEDDSDDNDDDDNDEKSD

SEQ ID NO: 71365 - protein, 189 aa, Arabidopsis thaliana
  peptide (1)..(189): Ceres Seq. ID no. 3095705
MLANEITERDEAALKYLKDIRSCRVEDTSRNFKLEFLFDSNLYFKNSVLSKTYHVNDEDGPVLEKVIGTDIEWFPGKCLTHKVVVKKKTKKGPKKVNNIPMTKTENCESFFNFFKPPEIPEIDEVDDYDDFDTIMTEELQNLMDQDYDIAVTIRDKLIPHAVSWFTGEALVDEDDSDDNDDDDNDEKSD

SEQ ID NO: 71366 - DNA, 1134 bp, Arabidopsis thaliana
  misc_feature (1)..(1134): Ceres Seq. ID no. 3096143
  misc_feature (1)..(1134): Ortholog of  Ceres SEQ ID NO 13596090 as cited in SEQ ID NO 68377
  misc_feature (1)..(1134): Ortholog of  Ceres SEQ ID NO 14303557 as cited in SEQ ID NO 68595
atgggagcggtgacgtcatcaatggcggcgaagtttgcgtttttcccgccaaatccgccgtcgtacggcgtagaagtggtggaaggaaagctgaggctgattggtgtagagaacgtgaaggagaatgttgaagtattgaagctgaagacgaagagaggtaatcaggtggttgcggcgtatattaagaatcctacagcttcacttacgcttctttattctcatggtaacgccgcggatcttggtcagatgttcgagcttttctccgagcttagcctccatcttcgtgttaacttaattgggtatgattattcgggttatgggagatcttcagggaagcctagtgagcagaacacgtatagcgatatagaagcagtgtatagatgcttggaagagaagtatggtgtgaaggaacaagatgttatcttatatggacaatctgtaggaagcggcccgactttagaattggcttctcggttacctaacctacgagccgtggttcttcatagcgctattgcttccggacttagagtcatgtaccctgttaaacgaacttactggttcgacatttacaagaatgtcgagaagatatcgtttgtcaaatgtccggttttagtaatacacggaacatcagatgatgttgttaattggtctcatgggaagcaattatttgagctatgtaaagaaaaatatgaaccgctttggatcaaaggagggaaccattgtgatttagagttatatccgcaatacataaagcatctaagaaaatttgtatcggcgattgaaaagtcgccgatacttagaaatggaccggtgccactaacagagaaggcaaggagtagtacggatattagagaacctgcaagaccaagcacagatcagagagataaatcaagaacaagcacggatcaaagagagatgccgaagctgagtacagatatagcgagagcaagcgttgataagagggagagaacgagaagaagcgttgatgggactgagaaaccgagtaattccgcggaacagcaactagtacaaccagagaaaggaaggaatagcattgacaggtttggggagatgataagatcagtaggattttgcaacatagattgtttcaagcctacagcaacagctaagtga

SEQ ID NO: 71367 - protein, 377 aa, Arabidopsis thaliana
  peptide (1)..(377): Ceres Seq. ID no. 3096144
MGAVTSSMAAKFAFFPPNPPSYGVEVVEGKLRLIGVENVKENVEVLKLKTKRGNQVVAAYIKNPTASLTLLYSHGNAADLGQMFELFSELSLHLRVNLIGYDYSGYGRSSGKPSEQNTYSDIEAVYRCLEEKYGVKEQDVILYGQSVGSGPTLELASRLPNLRAVVLHSAIASGLRVMYPVKRTYWFDIYKNVEKISFVKCPVLVIHGTSDDVVNWSHGKQLFELCKEKYEPLWIKGGNHCDLELYPQYIKHLRKFVSAIEKSPILRNGPVPLTEKARSSTDIREPARPSTDQRDKSRTSTDQREMPKLSTDIARASVDKRERTRRSVDGTEKPSNSAEQQLVQPEKGRNSIDRFGEMIRSVGFCNIDCFKPTATAK

SEQ ID NO: 71368 - protein, 370 aa, Arabidopsis thaliana
  peptide (1)..(370): Ceres Seq. ID no. 3096145
MAAKFAFFPPNPPSYGVEVVEGKLRLIGVENVKENVEVLKLKTKRGNQVVAAYIKNPTASLTLLYSHGNAADLGQMFELFSELSLHLRVNLIGYDYSGYGRSSGKPSEQNTYSDIEAVYRCLEEKYGVKEQDVILYGQSVGSGPTLELASRLPNLRAVVLHSAIASGLRVMYPVKRTYWFDIYKNVEKISFVKCPVLVIHGTSDDVVNWSHGKQLFELCKEKYEPLWIKGGNHCDLELYPQYIKHLRKFVSAIEKSPILRNGPVPLTEKARSSTDIREPARPSTDQRDKSRTSTDQREMPKLSTDIARASVDKRERTRRSVDGTEKPSNSAEQQLVQPEKGRNSIDRFGEMIRSVGFCNIDCFKPTATAK

SEQ ID NO: 71369 - protein, 295 aa, Arabidopsis thaliana
  peptide (1)..(295): Ceres Seq. ID no. 3096146
MFELFSELSLHLRVNLIGYDYSGYGRSSGKPSEQNTYSDIEAVYRCLEEKYGVKEQDVILYGQSVGSGPTLELASRLPNLRAVVLHSAIASGLRVMYPVKRTYWFDIYKNVEKISFVKCPVLVIHGTSDDVVNWSHGKQLFELCKEKYEPLWIKGGNHCDLELYPQYIKHLRKFVSAIEKSPILRNGPVPLTEKARSSTDIREPARPSTDQRDKSRTSTDQREMPKLSTDIARASVDKRERTRRSVDGTEKPSNSAEQQLVQPEKGRNSIDRFGEMIRSVGFCNIDCFKPTATAK

SEQ ID NO: 71370 - DNA, 2340 bp, Arabidopsis thaliana
  misc_feature (1)..(2340): Ceres Seq. ID no. 3097868
  misc_feature (1)..(2340): Ortholog of  Ceres SEQ ID NO 14307817 as cited in SEQ ID NO 54722
atggagctatctctagtcagattatggaacacttgttttcctagtttcttctacatttcgactgtgctttttctgctcaccggtggaggagtttactctcactctgaatatttgattggattgggaagctatgacattactggcccggctgctgatgttaatatgatgggttatgctaacatggagcaagtagcatctggtattcacttcaggctccgtgctaggactttcattgtctctgagccccaagggaagcgggttgtgtttgttaacctcgatgcttgcatggcttcacaaattgtaaaactaaaagtgatcgagagactcaaggcacgatatggggacttatatactgaacagaatgttggcatcagtggtattcatacccatgctggtccaggggggtatcttcagtatgtggtgtatatcgtaacatcacttggatttgttcgtcagtcgtttgatgcccttgtcgatggaattgagaacagtatcatacaagctcacgaaaatcttcgtcctggatcaatttttctcaataatggggaactcttggatgctggtgtaaaccgcagtccaagtgcatatcttaataatccttcaaaagaaaggagtaaacacaagtacaacgttgataaggaaatgactctcttaaagtttgtggatgatcaatggggtccagtaggtagtttcaattggtttgctacccatggaacttccatgagtcgtacaaactctttgatcagtggggacaacaagggcgctgcatcacgatttatggaggattggtatgaacagaatactgctgaaagatcttactctgaagagtttatttcagatgagatacctagaagagtttcaagcctaatcgagaatcatcaggacagtcatcacgagttgctagagcttgcatcttactttgagtcacaacctggtaagcctgtaactagaatttcaagttctgcaaggcgggtgaggagtgctctgaggaaggcggataagcctggcttcgtttctgctttctgtcaaacgaactgtggagatgttagcccaaatgtgcttggagccttttgcctggacactggtcttccttgtgatttcaatcacagtacatgtggtgggaaaaatgagatgtgctatgggcgtggaccaggctatcctgatgaatttgaaagtacacgtataattggtgagagacaattcaagatggctttggaacttttcaacaaagcatctgaacagctacaagggaaggttgattaccgccatgtttatgttgacttttcacagctcaatgtgacacttcctaaaaaagatgggaaatcagaagttgtaaaaacatgtcctgcggcaatgggctttgctttcgctgctgggaccacagatggaccaggagcatttgattttacacaaggagatgataaggggaaccctttctggagattggtgagaaatgttcttaaaacaccggacaagaaacaaatcgattgtcactatccaaaacctatcttgcttgacactggagaaatgacaaagccatatgactgggctccgtcaattctttcattgcaagttctacgtattggacaacttttcattctcagcgttcctggagaatttacaactatggctggaaggcgtctccgctatgcagtgaaaacacaacttaaaaacagtggtaataaagatttgagcggtgagattcacgttgtgatagctggattggctaatggttactcacagtatgtgactacttttgaggagtatcaagtgcagagatacgagggtgcatctacgttatatgggccacacaccctcagtggctacattcaagagttcaagaaactctccaaatctctcgtccttgatatgcctgttcaaccggggcctcaaccgccggatctccttgacaagcaactaagcttcctcacaccagtcatgatggacacaactcctagcggagacagtttcggggatgttatttcggatgttcctaaaaacttgtctttgaagagaggaaacggccaggtgaccgttgtattccggtcagcctgccctagaaacgatctactgacagaagggacgtttacactggtggagagactagagcagaaggacaagacttggaccccggtttatgacgacgatgatctatgtctgaggttcaagtggtcgaggcataaaaagctgagctcccggagtcaggccactgtggaatggagaattcccgagtctgcatcaccaggggtttataggatcacccattttggtgctgcaaagaagctttttgggtcagtccatcatttcacaggctcttctagtgctttcgttgtaacataa

SEQ ID NO: 71371 - protein, 779 aa, Arabidopsis thaliana
  peptide (1)..(779): Ceres Seq. ID no. 3097869
MELSLVRLWNTCFPSFFYISTVLFLLTGGGVYSHSEYLIGLGSYDITGPAADVNMMGYANMEQVASGIHFRLRARTFIVSEPQGKRVVFVNLDACMASQIVKLKVIERLKARYGDLYTEQNVGISGIHTHAGPGGYLQYVVYIVTSLGFVRQSFDALVDGIENSIIQAHENLRPGSIFLNNGELLDAGVNRSPSAYLNNPSKERSKHKYNVDKEMTLLKFVDDQWGPVGSFNWFATHGTSMSRTNSLISGDNKGAASRFMEDWYEQNTAERSYSEEFISDEIPRRVSSLIENHQDSHHELLELASYFESQPGKPVTRISSSARRVRSALRKADKPGFVSAFCQTNCGDVSPNVLGAFCLDTGLPCDFNHSTCGGKNEMCYGRGPGYPDEFESTRIIGERQFKMALELFNKASEQLQGKVDYRHVYVDFSQLNVTLPKKDGKSEVVKTCPAAMGFAFAAGTTDGPGAFDFTQGDDKGNPFWRLVRNVLKTPDKKQIDCHYPKPILLDTGEMTKPYDWAPSILSLQVLRIGQLFILSVPGEFTTMAGRRLRYAVKTQLKNSGNKDLSGEIHVVIAGLANGYSQYVTTFEEYQVQRYEGASTLYGPHTLSGYIQEFKKLSKSLVLDMPVQPGPQPPDLLDKQLSFLTPVMMDTTPSGDSFGDVISDVPKNLSLKRGNGQVTVVFRSACPRNDLLTEGTFTLVERLEQKDKTWTPVYDDDDLCLRFKWSRHKKLSSRSQATVEWRIPESASPGVYRITHFGAAKKLFGSVHHFTGSSSAFVVT

SEQ ID NO: 71372 - protein, 725 aa, Arabidopsis thaliana
  peptide (1)..(725): Ceres Seq. ID no. 3097870
MMGYANMEQVASGIHFRLRARTFIVSEPQGKRVVFVNLDACMASQIVKLKVIERLKARYGDLYTEQNVGISGIHTHAGPGGYLQYVVYIVTSLGFVRQSFDALVDGIENSIIQAHENLRPGSIFLNNGELLDAGVNRSPSAYLNNPSKERSKHKYNVDKEMTLLKFVDDQWGPVGSFNWFATHGTSMSRTNSLISGDNKGAASRFMEDWYEQNTAERSYSEEFISDEIPRRVSSLIENHQDSHHELLELASYFESQPGKPVTRISSSARRVRSALRKADKPGFVSAFCQTNCGDVSPNVLGAFCLDTGLPCDFNHSTCGGKNEMCYGRGPGYPDEFESTRIIGERQFKMALELFNKASEQLQGKVDYRHVYVDFSQLNVTLPKKDGKSEVVKTCPAAMGFAFAAGTTDGPGAFDFTQGDDKGNPFWRLVRNVLKTPDKKQIDCHYPKPILLDTGEMTKPYDWAPSILSLQVLRIGQLFILSVPGEFTTMAGRRLRYAVKTQLKNSGNKDLSGEIHVVIAGLANGYSQYVTTFEEYQVQRYEGASTLYGPHTLSGYIQEFKKLSKSLVLDMPVQPGPQPPDLLDKQLSFLTPVMMDTTPSGDSFGDVISDVPKNLSLKRGNGQVTVVFRSACPRNDLLTEGTFTLVERLEQKDKTWTPVYDDDDLCLRFKWSRHKKLSSRSQATVEWRIPESASPGVYRITHFGAAKKLFGSVHHFTGSSSAFVVT

SEQ ID NO: 71373 - protein, 724 aa, Arabidopsis thaliana
  peptide (1)..(724): Ceres Seq. ID no. 3097871
MGYANMEQVASGIHFRLRARTFIVSEPQGKRVVFVNLDACMASQIVKLKVIERLKARYGDLYTEQNVGISGIHTHAGPGGYLQYVVYIVTSLGFVRQSFDALVDGIENSIIQAHENLRPGSIFLNNGELLDAGVNRSPSAYLNNPSKERSKHKYNVDKEMTLLKFVDDQWGPVGSFNWFATHGTSMSRTNSLISGDNKGAASRFMEDWYEQNTAERSYSEEFISDEIPRRVSSLIENHQDSHHELLELASYFESQPGKPVTRISSSARRVRSALRKADKPGFVSAFCQTNCGDVSPNVLGAFCLDTGLPCDFNHSTCGGKNEMCYGRGPGYPDEFESTRIIGERQFKMALELFNKASEQLQGKVDYRHVYVDFSQLNVTLPKKDGKSEVVKTCPAAMGFAFAAGTTDGPGAFDFTQGDDKGNPFWRLVRNVLKTPDKKQIDCHYPKPILLDTGEMTKPYDWAPSILSLQVLRIGQLFILSVPGEFTTMAGRRLRYAVKTQLKNSGNKDLSGEIHVVIAGLANGYSQYVTTFEEYQVQRYEGASTLYGPHTLSGYIQEFKKLSKSLVLDMPVQPGPQPPDLLDKQLSFLTPVMMDTTPSGDSFGDVISDVPKNLSLKRGNGQVTVVFRSACPRNDLLTEGTFTLVERLEQKDKTWTPVYDDDDLCLRFKWSRHKKLSSRSQATVEWRIPESASPGVYRITHFGAAKKLFGSVHHFTGSSSAFVVT

SEQ ID NO: 71374 - DNA, 714 bp, Arabidopsis thaliana
  misc_feature (1)..(714): Ceres Seq. ID no. 3098647
  misc_feature (1)..(714): Ortholog of  Ceres SEQ ID NO 14308640 as cited in SEQ ID NO 60489
  misc_feature (1)..(714): Ortholog of  Ceres SEQ ID NO 12619999 as cited in SEQ ID NO 66123
  misc_feature (1)..(714): Ortholog of  Ceres SEQ ID NO 13656436 as cited in SEQ ID NO 69154
atgaacgaagagatgagcggtgagtcgccggagaataacaaacacgtaaagaaaccgacgatgccggaaaagatcgattacgtgttcaaggtggtggtcattggagattctgctgtcgggaaaacgcagctcctctcacgttttacacacaacgagttctgttatgattcaaaatcaaccattggtgtcgagtttcagacacggaccatcactcttcggggcaaactcgtcaaagctcagatctgggacaccgccggtcaagagagatacagagcggtgactagcgcctactacagaggtgcgttaggtgcgatggtggtttacgacattaccaaacgcctctcattcgaccacgttgcacgttgggtcgaggaattacgtgctcacgccgatgattccgccgtgatcatgctcgtcggaaacaaagccgatctctccgttggtaaacgtgccgttcctacggaggatgcagtcgaattcgccgagactcaacggctttttttctcggaagtctcggctctaagcggcggaaacgtcgacgaagcttttttccgtttactcgaggagattttcagccgcgttgttgtttcgagaaaagctatggaatccgacggtggagccaccgtgaaacttgacggttcgagaattgatgtcatctctggttcggatcttgagactagtaatatcaaggaacaagcttcgtgctcgtgttga

SEQ ID NO: 71375 - protein, 237 aa, Arabidopsis thaliana
  peptide (1)..(237): Ceres Seq. ID no. 3098648
MNEEMSGESPENNKHVKKPTMPEKIDYVFKVVVIGDSAVGKTQLLSRFTHNEFCYDSKSTIGVEFQTRTITLRGKLVKAQIWDTAGQERYRAVTSAYYRGALGAMVVYDITKRLSFDHVARWVEELRAHADDSAVIMLVGNKADLSVGKRAVPTEDAVEFAETQRLFFSEVSALSGGNVDEAFFRLLEEIFSRVVVSRKAMESDGGATVKLDGSRIDVISGSDLETSNIKEQASCSC

SEQ ID NO: 71376 - protein, 233 aa, Arabidopsis thaliana
  peptide (1)..(233): Ceres Seq. ID no. 3098649
MSGESPENNKHVKKPTMPEKIDYVFKVVVIGDSAVGKTQLLSRFTHNEFCYDSKSTIGVEFQTRTITLRGKLVKAQIWDTAGQERYRAVTSAYYRGALGAMVVYDITKRLSFDHVARWVEELRAHADDSAVIMLVGNKADLSVGKRAVPTEDAVEFAETQRLFFSEVSALSGGNVDEAFFRLLEEIFSRVVVSRKAMESDGGATVKLDGSRIDVISGSDLETSNIKEQASCSC

SEQ ID NO: 71377 - protein, 217 aa, Arabidopsis thaliana
  peptide (1)..(217): Ceres Seq. ID no. 3098650
MPEKIDYVFKVVVIGDSAVGKTQLLSRFTHNEFCYDSKSTIGVEFQTRTITLRGKLVKAQIWDTAGQERYRAVTSAYYRGALGAMVVYDITKRLSFDHVARWVEELRAHADDSAVIMLVGNKADLSVGKRAVPTEDAVEFAETQRLFFSEVSALSGGNVDEAFFRLLEEIFSRVVVSRKAMESDGGATVKLDGSRIDVISGSDLETSNIKEQASCSC

SEQ ID NO: 71378 - DNA, 1122 bp, Arabidopsis thaliana
  misc_feature (1)..(1122): Ceres Seq. ID no. 3100319
  misc_feature (1)..(1122): Ortholog of  Ceres SEQ ID NO 15180288 as cited in SEQ ID NO 0
atgcagttgtctccggaacgatgccgtccgatgtctgaaaacagagaggcttggtcagcgaattccgaggaaatggagctgcttcacggctccaacagattatcttcaccggaacatgttcgtagaagagtctccgggaattcttctgaggacggttcgcctcgaatttgccggcagcagtcgttcggtcgcgacataggccatgcagctgccgagacgtatctcattactcgacttagcttcaaccttcttggatatctcgggctggatttgtacataccgccaacgagtgatggcctgaagccggttgtagttttcgttactggtggagcttggattatcggttacaaagcttggggttctctcttgggactacagctagcagaaagggacataattgtggcatgtctagattacagaaactttcctcaggggacaattagtgatatggtaagtgatgcagctcaaggaatctcatttgtctgcaataacatctctgcatttggaggtgatcctaacagaatctatctgatggggcaatcggctggtgcacatatctcttcttgtgctctctttgaacaagctattaaagaatcaagaggggagagcatctcatggagtgtatctcagattaaagcttactttggtttatctggagggtacaatctctttaatctggttgaacacttccacaaccgaggcttgtatcgttcaattttcctaagcataatggaaggagaagagtcctttaaacaattctcccctgaagtaagattgaaagacctgaatgtaagaaaagctgcagccctcttacctcatattatactctttcatggatccgcagattattcaattccacctgaagcaagcaaaacttttacagatgctcttcaagctgctgaagtgaaagctgagctagttatgtacaagggtaaaactcataccgacctatttcttcaggatcctctgagaggcggtaaagatgagctatttgatcatatagtctctatgatacacgccgatgacagtgacgcattgagaaacgatgctgttgcgccaccgaggaaacggcttgttccagagttcttgctgaaactggctggcagggtcagccctttttga

SEQ ID NO: 71379 - protein, 373 aa, Arabidopsis thaliana
  peptide (1)..(373): Ceres Seq. ID no. 3100320
MQLSPERCRPMSENREAWSANSEEMELLHGSNRLSSPEHVRRRVSGNSSEDGSPRICRQQSFGRDIGHAAAETYLITRLSFNLLGYLGLDLYIPPTSDGLKPVVVFVTGGAWIIGYKAWGSLLGLQLAERDIIVACLDYRNFPQGTISDMVSDAAQGISFVCNNISAFGGDPNRIYLMGQSAGAHISSCALFEQAIKESRGESISWSVSQIKAYFGLSGGYNLFNLVEHFHNRGLYRSIFLSIMEGEESFKQFSPEVRLKDLNVRKAAALLPHIILFHGSADYSIPPEASKTFTDALQAAEVKAELVMYKGKTHTDLFLQDPLRGGKDELFDHIVSMIHADDSDALRNDAVAPPRKRLVPEFLLKLAGRVSPF

SEQ ID NO: 71380 - protein, 363 aa, Arabidopsis thaliana
  peptide (1)..(363): Ceres Seq. ID no. 3100321
MSENREAWSANSEEMELLHGSNRLSSPEHVRRRVSGNSSEDGSPRICRQQSFGRDIGHAAAETYLITRLSFNLLGYLGLDLYIPPTSDGLKPVVVFVTGGAWIIGYKAWGSLLGLQLAERDIIVACLDYRNFPQGTISDMVSDAAQGISFVCNNISAFGGDPNRIYLMGQSAGAHISSCALFEQAIKESRGESISWSVSQIKAYFGLSGGYNLFNLVEHFHNRGLYRSIFLSIMEGEESFKQFSPEVRLKDLNVRKAAALLPHIILFHGSADYSIPPEASKTFTDALQAAEVKAELVMYKGKTHTDLFLQDPLRGGKDELFDHIVSMIHADDSDALRNDAVAPPRKRLVPEFLLKLAGRVSPF

SEQ ID NO: 71381 - protein, 349 aa, Arabidopsis thaliana
  peptide (1)..(349): Ceres Seq. ID no. 3100323
MELLHGSNRLSSPEHVRRRVSGNSSEDGSPRICRQQSFGRDIGHAAAETYLITRLSFNLLGYLGLDLYIPPTSDGLKPVVVFVTGGAWIIGYKAWGSLLGLQLAERDIIVACLDYRNFPQGTISDMVSDAAQGISFVCNNISAFGGDPNRIYLMGQSAGAHISSCALFEQAIKESRGESISWSVSQIKAYFGLSGGYNLFNLVEHFHNRGLYRSIFLSIMEGEESFKQFSPEVRLKDLNVRKAAALLPHIILFHGSADYSIPPEASKTFTDALQAAEVKAELVMYKGKTHTDLFLQDPLRGGKDELFDHIVSMIHADDSDALRNDAVAPPRKRLVPEFLLKLAGRVSPF

SEQ ID NO: 71382 - DNA, 1719 bp, Arabidopsis thaliana
  misc_feature (1)..(1719): Ceres Seq. ID no. 3441158
  misc_feature (1)..(1719): Ortholog of  Ceres SEQ ID NO 12607856 as cited in SEQ ID NO 55419
atgaaactggaagacttacttgtggaagacgaaaccaaagatcaacctggcgctagcgttgcgtctcttcttgatcatcatcgtcgtcacccccagccttcccttcaacaacaaccatcaaaagtgaatgagcataagagcgaagaagagaagaatgatttgatcaagaagaagcaaaagcgaagtcttcaaagagaagtgatgaaaatgcaaggagagctagaggacgaacaagccttaaacaaggctctacgtgatatgcatcgtggtcccgtcatgtctcagcctcgtctctctttattgcttcttcctcctcaggttcaagagctaatagaggagcttgcgacggttgaggcagagatactctgtcttgagaaacgaatccaagacttgaaacttgatgtgtatagtgagaaaaaagagaacaaagaacttgaagacagtattgatgaaggagaagaagagaggatgatgaaccctaagagactactacaaaggcagaatcatcttccttgcgacgctgacaatgaccttataaagatgagatctgaggatctaaaacagagatcaaagtcccagagttatggagatcatcatgttgtcaaggatattcaaatgaacagtccacgtactcatgcgtcaattggatcaaccatggagttctcatcaagaatccattcttcgactttttctgatggaatgtcaagaacacaagagaagaataatgtgcaagagacgacaccaaatggagtatcggaagatctggtgaagtgcttgatgggaatctatctggaactcaacaggtcatcgcgtgagcgagaagggtcaaaaactgtttcaaagctgagcctcacacacctcaagaacgcttctttcaaacgcaaatcggtgtatgaccataacgcatctaatcttgatccatatggagctgtcatggggacttctcttagagacataggagaatacaagaacttcatccatatcactcgaacctccattgatgttagccgtttatccgattgctccacttctcttgtcaatttgagggttttgaaggagaagttgagcaaagtggatttgagtttcttgaaccacaagaaaaagatggcattctggatcaatacctacaacgcctgcgttatgaatggatttttggaacacggactaccttcatcaaaggaaaaactgctgaccattctcaaaatggcaacaattgacgtgggaggtacacaactgtctgctctagatatcgaaggatccatcttgcagagtccatgcgaacctagggaatctgtttcagccggtgaaagcgaagtgagaatacagacacgctacggattcagatgcgtagagccaaacctaatgttcgtgctttgtcgtggagattggtcttcacctgcattgagagtttatacagcagaagatgtggtgaacgaactaatcaaagcaagaacagagtatctagaagcttccatcggtgtctcgggaaggaaaaagattgtgattccgcgattcttgcataaacgtctacgggatttcgctgaggatgaaggctcgttaattgaatggatatgcagccaattaccaccagcccaacgttgctttcagctcaaggaaacagcgatggaggggttgaacaagaaaagtgaatctcaattgaaaaaactgatagaagtgaggtctcacgaatacgagtttcgttatctcttggcattgtaa

SEQ ID NO: 71383 - protein, 572 aa, Arabidopsis thaliana
  peptide (1)..(572): Ceres Seq. ID no. 3441159
MKLEDLLVEDETKDQPGASVASLLDHHRRHPQPSLQQQPSKVNEHKSEEEKNDLIKKKQKRSLQREVMKMQGELEDEQALNKALRDMHRGPVMSQPRLSLLLLPPQVQELIEELATVEAEILCLEKRIQDLKLDVYSEKKENKELEDSIDEGEEERMMNPKRLLQRQNHLPCDADNDLIKMRSEDLKQRSKSQSYGDHHVVKDIQMNSPRTHASIGSTMEFSSRIHSSTFSDGMSRTQEKNNVQETTPNGVSEDLVKCLMGIYLELNRSSREREGSKTVSKLSLTHLKNASFKRKSVYDHNASNLDPYGAVMGTSLRDIGEYKNFIHITRTSIDVSRLSDCSTSLVNLRVLKEKLSKVDLSFLNHKKKMAFWINTYNACVMNGFLEHGLPSSKEKLLTILKMATIDVGGTQLSALDIEGSILQSPCEPRESVSAGESEVRIQTRYGFRCVEPNLMFVLCRGDWSSPALRVYTAEDVVNELIKARTEYLEASIGVSGRKKIVIPRFLHKRLRDFAEDEGSLIEWICSQLPPAQRCFQLKETAMEGLNKKSESQLKKLIEVRSHEYEFRYLLAL

SEQ ID NO: 71384 - protein, 505 aa, Arabidopsis thaliana
  peptide (1)..(505): Ceres Seq. ID no. 3441160
MKMQGELEDEQALNKALRDMHRGPVMSQPRLSLLLLPPQVQELIEELATVEAEILCLEKRIQDLKLDVYSEKKENKELEDSIDEGEEERMMNPKRLLQRQNHLPCDADNDLIKMRSEDLKQRSKSQSYGDHHVVKDIQMNSPRTHASIGSTMEFSSRIHSSTFSDGMSRTQEKNNVQETTPNGVSEDLVKCLMGIYLELNRSSREREGSKTVSKLSLTHLKNASFKRKSVYDHNASNLDPYGAVMGTSLRDIGEYKNFIHITRTSIDVSRLSDCSTSLVNLRVLKEKLSKVDLSFLNHKKKMAFWINTYNACVMNGFLEHGLPSSKEKLLTILKMATIDVGGTQLSALDIEGSILQSPCEPRESVSAGESEVRIQTRYGFRCVEPNLMFVLCRGDWSSPALRVYTAEDVVNELIKARTEYLEASIGVSGRKKIVIPRFLHKRLRDFAEDEGSLIEWICSQLPPAQRCFQLKETAMEGLNKKSESQLKKLIEVRSHEYEFRYLLAL

SEQ ID NO: 71385 - protein, 503 aa, Arabidopsis thaliana
  peptide (1)..(503): Ceres Seq. ID no. 3441161
MQGELEDEQALNKALRDMHRGPVMSQPRLSLLLLPPQVQELIEELATVEAEILCLEKRIQDLKLDVYSEKKENKELEDSIDEGEEERMMNPKRLLQRQNHLPCDADNDLIKMRSEDLKQRSKSQSYGDHHVVKDIQMNSPRTHASIGSTMEFSSRIHSSTFSDGMSRTQEKNNVQETTPNGVSEDLVKCLMGIYLELNRSSREREGSKTVSKLSLTHLKNASFKRKSVYDHNASNLDPYGAVMGTSLRDIGEYKNFIHITRTSIDVSRLSDCSTSLVNLRVLKEKLSKVDLSFLNHKKKMAFWINTYNACVMNGFLEHGLPSSKEKLLTILKMATIDVGGTQLSALDIEGSILQSPCEPRESVSAGESEVRIQTRYGFRCVEPNLMFVLCRGDWSSPALRVYTAEDVVNELIKARTEYLEASIGVSGRKKIVIPRFLHKRLRDFAEDEGSLIEWICSQLPPAQRCFQLKETAMEGLNKKSESQLKKLIEVRSHEYEFRYLLAL

SEQ ID NO: 71386 - DNA, 1467 bp, Arabidopsis thaliana
  misc_feature (1)..(1467): Ceres Seq. ID no. 3441581
  misc_feature (1)..(1467): Ortholog of  Ceres SEQ ID NO 14310736 as cited in SEQ ID NO 52901
  misc_feature (1)..(1467): Ortholog of  Ceres SEQ ID NO 15172325 as cited in SEQ ID NO 54668
  misc_feature (1)..(1467): Ortholog of  Ceres SEQ ID NO 13594345 as cited in SEQ ID NO 58043
  misc_feature (1)..(1467): Ortholog of  Ceres SEQ ID NO 14308594 as cited in SEQ ID NO 60384
  misc_feature (1)..(1467): Ortholog of  Ceres SEQ ID NO 12614112 as cited in SEQ ID NO 60891
  misc_feature (1)..(1467): Ortholog of  Ceres SEQ ID NO 13597574 as cited in SEQ ID NO 64677
  misc_feature (1)..(1467): Ortholog of  Ceres SEQ ID NO 13662880 as cited in SEQ ID NO 65422
  misc_feature (1)..(1467): Ortholog of  Ceres SEQ ID NO 12779098 as cited in SEQ ID NO 67698
  misc_feature (1)..(1467): Ortholog of  Ceres SEQ ID NO 13596180 as cited in SEQ ID NO 67941
atgggatcccgttttgtttctaacgaacaaaaaccacacgtagtttgcgtgccttacccagctcaaggccacattaaccctatgatgaaagtggctaaactcctccacgtcaaaggcttccacgtcaccttcgtcaacaccgtctacaaccacaaccgtctactccgatcccgtggggccaacgcactcgatggacttccttccttccagttcgagtcaatacctgacggtcttccggagactggcgtggacgccacgcaggacatccctgccctttccgagtccacaacgaaaaactgtctcgttccgttcaagaagcttctccagcggattgtcacgagagaggatgtccctccggtgagctgtattgtatcagatggttcgatgagctttactcttgacgtagcggaagagcttggtgttccggagattcatttttggaccactagtgcttgtggcttcatggcttatctacacttttatctcttcatcgagaagggtttatgtccagtaaaagatgcgagttgcttgacgaaggaatacttggacacagttatagattggataccgtcaatgaacaatgtaaaactaaaagacattcctagttttatacgtaccactaatcctaacgacataatgctcaacttcgttgtccgtgaggcatgtcgaaccaaacgtgcctctgctatcattctgaacacgtttgatgaccttgaacatgacataatccagtctatgcaatccattttaccaccggtttatccaatcggaccgcttcatctcttagtaaacagggagattgaagaagatagtgagattggaaggatgggatcaaatctatggaaagaggagactgagtgcttgggatggcttaatactaagtctcgaaatagcgttgtttatgttaactttgggagcataacaataatgaccacggcacagcttttggagtttgcttggggtttggcggcaacgggaaaggagtttctatgggtgatgcggccggattcagtagccggagaggaggcagtgattccaaaagagtttttagcggagacagctgatcgaagaatgctgacaagttggtgtcctcaggagaaagttctttctcatccggcggtcggagggttcttgacccattgcgggtggaattcgacgttagaaagtctttcatgcggagttccaatggtatgttggccattttttgctgagcaacaaacaaattgtaagttttcttgtgatgaatgggaggttggtattgagatcggtggagatgtcaagaggggagaggttgaggcggtggttagagagctcatggatggagagaaaggaaagaaaatgagagagaaggctgtagagtggcggcgcttggccgagaaagctacaaagcttccgtgtggttcgtcggtgataaattttgagacgattgtcaacaaggttctcttgggaaagatccctaacacgtaa

SEQ ID NO: 71387 - protein, 488 aa, Arabidopsis thaliana
  peptide (1)..(488): Ceres Seq. ID no. 3441582
MGSRFVSNEQKPHVVCVPYPAQGHINPMMKVAKLLHVKGFHVTFVNTVYNHNRLLRSRGANALDGLPSFQFESIPDGLPETGVDATQDIPALSESTTKNCLVPFKKLLQRIVTREDVPPVSCIVSDGSMSFTLDVAEELGVPEIHFWTTSACGFMAYLHFYLFIEKGLCPVKDASCLTKEYLDTVIDWIPSMNNVKLKDIPSFIRTTNPNDIMLNFVVREACRTKRASAIILNTFDDLEHDIIQSMQSILPPVYPIGPLHLLVNREIEEDSEIGRMGSNLWKEETECLGWLNTKSRNSVVYVNFGSITIMTTAQLLEFAWGLAATGKEFLWVMRPDSVAGEEAVIPKEFLAETADRRMLTSWCPQEKVLSHPAVGGFLTHCGWNSTLESLSCGVPMVCWPFFAEQQTNCKFSCDEWEVGIEIGGDVKRGEVEAVVRELMDGEKGKKMREKAVEWRRLAEKATKLPCGSSVINFETIVNKVLLGKIPNT

SEQ ID NO: 71388 - protein, 461 aa, Arabidopsis thaliana
  peptide (1)..(461): Ceres Seq. ID no. 3441583
MMKVAKLLHVKGFHVTFVNTVYNHNRLLRSRGANALDGLPSFQFESIPDGLPETGVDATQDIPALSESTTKNCLVPFKKLLQRIVTREDVPPVSCIVSDGSMSFTLDVAEELGVPEIHFWTTSACGFMAYLHFYLFIEKGLCPVKDASCLTKEYLDTVIDWIPSMNNVKLKDIPSFIRTTNPNDIMLNFVVREACRTKRASAIILNTFDDLEHDIIQSMQSILPPVYPIGPLHLLVNREIEEDSEIGRMGSNLWKEETECLGWLNTKSRNSVVYVNFGSITIMTTAQLLEFAWGLAATGKEFLWVMRPDSVAGEEAVIPKEFLAETADRRMLTSWCPQEKVLSHPAVGGFLTHCGWNSTLESLSCGVPMVCWPFFAEQQTNCKFSCDEWEVGIEIGGDVKRGEVEAVVRELMDGEKGKKMREKAVEWRRLAEKATKLPCGSSVINFETIVNKVLLGKIPNT

SEQ ID NO: 71389 - protein, 460 aa, Arabidopsis thaliana
  peptide (1)..(460): Ceres Seq. ID no. 3441584
MKVAKLLHVKGFHVTFVNTVYNHNRLLRSRGANALDGLPSFQFESIPDGLPETGVDATQDIPALSESTTKNCLVPFKKLLQRIVTREDVPPVSCIVSDGSMSFTLDVAEELGVPEIHFWTTSACGFMAYLHFYLFIEKGLCPVKDASCLTKEYLDTVIDWIPSMNNVKLKDIPSFIRTTNPNDIMLNFVVREACRTKRASAIILNTFDDLEHDIIQSMQSILPPVYPIGPLHLLVNREIEEDSEIGRMGSNLWKEETECLGWLNTKSRNSVVYVNFGSITIMTTAQLLEFAWGLAATGKEFLWVMRPDSVAGEEAVIPKEFLAETADRRMLTSWCPQEKVLSHPAVGGFLTHCGWNSTLESLSCGVPMVCWPFFAEQQTNCKFSCDEWEVGIEIGGDVKRGEVEAVVRELMDGEKGKKMREKAVEWRRLAEKATKLPCGSSVINFETIVNKVLLGKIPNT

SEQ ID NO: 71390 - DNA, 876 bp, Arabidopsis thaliana
  misc_feature (1)..(876): Ceres Seq. ID no. 3441601
  misc_feature (1)..(876): Ortholog of  Ceres SEQ ID NO 15178173 as cited in SEQ ID NO 54139
  misc_feature (1)..(876): Ortholog of  Ceres SEQ ID NO 14301836 as cited in SEQ ID NO 67386
atgtctaatacaagctattaccgatcaccgttcggagacacgactcacaccaaagtgtttgtaggaggtttagcatgggagactcccaccgatgaaatgcgccgttactttgatcagttcggagagattcttgaagccgtcatcattaccgataaggctaccggaaaatctaaaggctacggttttgtcacgtttcgagactcggattcagcgacgagagccgtcgctgatccgaatccggtgatcgatggacgaaaggcaaattgcaatattgcgtcttttggacggccccgaccatcgacgcctcgaggacgaggacaaggaggaagccctagtcagtatcaaggcggaggacaatcaagctataccggaatggctgctccggtgcagcaggctgcggctgcccagctcatgtatccgtcatacgggtacacctacaattctgaatatgggtaccaccaagccctatacaacgcacagctccaacaggcacaatactatcaacagcaaatgtacggaggaggaggagcaacatcaccatcatcatccaacatcatgccttccccttattactacctccaagctccaagccctagaccatatcttcatcatcaacaacattatcaatatcaccatcatcagcagcagcagcaacaacaacaacaacgtttaccttctgcttcatcttacctaatttacccatccaatgtcgaggctcctactccatctaatgtccctacttcccaagggccactatcttcttccactgaatcacacgcaccacaacaagtatcagaagaaggtggagaattcgatccaacggatgcacctgaaagtacgactacgaacatcagagacttaacgtcatcttcttga

SEQ ID NO: 71391 - protein, 291 aa, Arabidopsis thaliana
  peptide (1)..(291): Ceres Seq. ID no. 3441602
MSNTSYYRSPFGDTTHTKVFVGGLAWETPTDEMRRYFDQFGEILEAVIITDKATGKSKGYGFVTFRDSDSATRAVADPNPVIDGRKANCNIASFGRPRPSTPRGRGQGGSPSQYQGGGQSSYTGMAAPVQQAAAAQLMYPSYGYTYNSEYGYHQALYNAQLQQAQYYQQQMYGGGGATSPSSSNIMPSPYYYLQAPSPRPYLHHQQHYQYHHHQQQQQQQQQRLPSASSYLIYPSNVEAPTPSNVPTSQGPLSSSTESHAPQQVSEEGGEFDPTDAPESTTTNIRDLTSSS

SEQ ID NO: 71392 - protein, 259 aa, Arabidopsis thaliana
  peptide (1)..(259): Ceres Seq. ID no. 3441603
MRRYFDQFGEILEAVIITDKATGKSKGYGFVTFRDSDSATRAVADPNPVIDGRKANCNIASFGRPRPSTPRGRGQGGSPSQYQGGGQSSYTGMAAPVQQAAAAQLMYPSYGYTYNSEYGYHQALYNAQLQQAQYYQQQMYGGGGATSPSSSNIMPSPYYYLQAPSPRPYLHHQQHYQYHHHQQQQQQQQQRLPSASSYLIYPSNVEAPTPSNVPTSQGPLSSSTESHAPQQVSEEGGEFDPTDAPESTTTNIRDLTSSS

SEQ ID NO: 71393 - protein, 167 aa, Arabidopsis thaliana
  peptide (1)..(167): Ceres Seq. ID no. 3441604
MAAPVQQAAAAQLMYPSYGYTYNSEYGYHQALYNAQLQQAQYYQQQMYGGGGATSPSSSNIMPSPYYYLQAPSPRPYLHHQQHYQYHHHQQQQQQQQQRLPSASSYLIYPSNVEAPTPSNVPTSQGPLSSSTESHAPQQVSEEGGEFDPTDAPESTTTNIRDLTSSS

SEQ ID NO: 71394 - DNA, 1983 bp, Arabidopsis thaliana
  misc_feature (1)..(1983): Ceres Seq. ID no. 3442122
  misc_feature (1)..(1983): Ortholog of  Ceres SEQ ID NO 13657677 as cited in SEQ ID NO 66119
atgcgaagattttaccggaagcccttttctgtaccgcttctgaatcgtccgcattgttcttcacaatctcactgtttgtacaaaaatggagactttttgtcggatgattcaaagtgctcgcctttatcgagctcaaggacgagtgttagatgggtgttcaatagcagctcacttcctcctcccgaatggatagaaccttttaacgatgtctccgatttggtgaaatcgaatcgtaatctcctgccgtcgccatgggtaagccaaattctcaaccttttagatggttcggcttctatggaatcgaatctagatggtttctgccgtaagtttcttatcaaactatcgcccaattttgtttcgtttgtgttgaaatccgatgagattcgcgaaaaacctgatattgcttggagtttcttctgttggtctcgtaagcagaagaagtatactcataacctcgagtgttatgtctccttggttgatgtattggctctggcaaaagatgtggatagaattaggtttgtaagcagtgagattaagaaatttgagtttcctatgactgtttctgcggcgaatgctctgattaagagttttgggaagcttggaatggtggaggaattgttgtgggtttggcgtaaaatgaaagagaatgggattgagccgactttgtacacttataactttttgatgaacggtttagtgagcgccatgttcgttgattcggcagagcgtgtttttgaggttatggagagtggcaggatcaaaccagacattgtgacttataacacaatgatcaaaggttattgtaaagcagggcagacacagaaagctatggagaagcttagagatatggagacgagaggtcatgaggctgataagattacgtatatgactatgatccaggcttgttatgcagatagcgactttggttcttgtgtggctttgtatcaagagatggatgagaagggaattcaagtcccgcctcatgcgtttagcttagtgattggtggactttgtaaggaagggaaattgaatgaagggtatactgtttttgagaatatgatacgtaaaggatctaaaccaaatgtagctatatacacggttttgatagatggttatgcgaaaagtggaagtgttgaagacgcgataaggcttttacatagaatgatagacgaagggtttaaacccgatgtggtaacttattctgtcgtagttaatggtttgtgtaaaaacgggagagtggaagaggcattggactatttccatacttgccggtttgacggattggctatcaattcaatgttttattctagtctcattgatggtttaggaaaagcgggcagagtagatgaagccgagaggctttttgaagagatgtctgagaaaggatgcacaagggattcatactgttacaatgcactgatcgatgcgtttacaaagcatcggaaagtcgatgaagcgatagccctgtttaagagaatggaagaagaagaaggttgtgatcaaacggtttatacatacacgatactcttatccggaatgttcaaagaacatagaaacgaggaggcgttaaagctttgggacatgatgatcgataaaggcattacaccaaccgcagcttgcttcagggcgttgtcgactgggctatgtttgtccggaaaagtggcgagagcttgtaagatactggatgagttagcaccaatgggtgtgattcttgatgcagcttgtgaagatatgataaatacattgtgtaaagctggtcggataaaagaagcttgtaaattagctgatgggataacagagagaggaagagaagtgccagggaggatcagaacagtgatgatcaatgcgttgaggaaagtgggaaaagcagatttagcaatgaagctaatgcatagcaaaattgggattggttatgaaagaatgggtagtgttaaaaggcgtgtcaagtttacgactttacttgaaacttgttttgactcttga

SEQ ID NO: 71395 - protein, 660 aa, Arabidopsis thaliana
  peptide (1)..(660): Ceres Seq. ID no. 3442123
MRRFYRKPFSVPLLNRPHCSSQSHCLYKNGDFLSDDSKCSPLSSSRTSVRWVFNSSSLPPPEWIEPFNDVSDLVKSNRNLLPSPWVSQILNLLDGSASMESNLDGFCRKFLIKLSPNFVSFVLKSDEIREKPDIAWSFFCWSRKQKKYTHNLECYVSLVDVLALAKDVDRIRFVSSEIKKFEFPMTVSAANALIKSFGKLGMVEELLWVWRKMKENGIEPTLYTYNFLMNGLVSAMFVDSAERVFEVMESGRIKPDIVTYNTMIKGYCKAGQTQKAMEKLRDMETRGHEADKITYMTMIQACYADSDFGSCVALYQEMDEKGIQVPPHAFSLVIGGLCKEGKLNEGYTVFENMIRKGSKPNVAIYTVLIDGYAKSGSVEDAIRLLHRMIDEGFKPDVVTYSVVVNGLCKNGRVEEALDYFHTCRFDGLAINSMFYSSLIDGLGKAGRVDEAERLFEEMSEKGCTRDSYCYNALIDAFTKHRKVDEAIALFKRMEEEEGCDQTVYTYTILLSGMFKEHRNEEALKLWDMMIDKGITPTAACFRALSTGLCLSGKVARACKILDELAPMGVILDAACEDMINTLCKAGRIKEACKLADGITERGREVPGRIRTVMINALRKVGKADLAMKLMHSKIGIGYERMGSVKRRVKFTTLLETCFDS

SEQ ID NO: 71396 - protein, 562 aa, Arabidopsis thaliana
  peptide (1)..(562): Ceres Seq. ID no. 3442124
MESNLDGFCRKFLIKLSPNFVSFVLKSDEIREKPDIAWSFFCWSRKQKKYTHNLECYVSLVDVLALAKDVDRIRFVSSEIKKFEFPMTVSAANALIKSFGKLGMVEELLWVWRKMKENGIEPTLYTYNFLMNGLVSAMFVDSAERVFEVMESGRIKPDIVTYNTMIKGYCKAGQTQKAMEKLRDMETRGHEADKITYMTMIQACYADSDFGSCVALYQEMDEKGIQVPPHAFSLVIGGLCKEGKLNEGYTVFENMIRKGSKPNVAIYTVLIDGYAKSGSVEDAIRLLHRMIDEGFKPDVVTYSVVVNGLCKNGRVEEALDYFHTCRFDGLAINSMFYSSLIDGLGKAGRVDEAERLFEEMSEKGCTRDSYCYNALIDAFTKHRKVDEAIALFKRMEEEEGCDQTVYTYTILLSGMFKEHRNEEALKLWDMMIDKGITPTAACFRALSTGLCLSGKVARACKILDELAPMGVILDAACEDMINTLCKAGRIKEACKLADGITERGREVPGRIRTVMINALRKVGKADLAMKLMHSKIGIGYERMGSVKRRVKFTTLLETCFDS

SEQ ID NO: 71397 - protein, 476 aa, Arabidopsis thaliana
  peptide (1)..(476): Ceres Seq. ID no. 3442125
MTVSAANALIKSFGKLGMVEELLWVWRKMKENGIEPTLYTYNFLMNGLVSAMFVDSAERVFEVMESGRIKPDIVTYNTMIKGYCKAGQTQKAMEKLRDMETRGHEADKITYMTMIQACYADSDFGSCVALYQEMDEKGIQVPPHAFSLVIGGLCKEGKLNEGYTVFENMIRKGSKPNVAIYTVLIDGYAKSGSVEDAIRLLHRMIDEGFKPDVVTYSVVVNGLCKNGRVEEALDYFHTCRFDGLAINSMFYSSLIDGLGKAGRVDEAERLFEEMSEKGCTRDSYCYNALIDAFTKHRKVDEAIALFKRMEEEEGCDQTVYTYTILLSGMFKEHRNEEALKLWDMMIDKGITPTAACFRALSTGLCLSGKVARACKILDELAPMGVILDAACEDMINTLCKAGRIKEACKLADGITERGREVPGRIRTVMINALRKVGKADLAMKLMHSKIGIGYERMGSVKRRVKFTTLLETCFDS

SEQ ID NO: 71398 - DNA, 798 bp, Arabidopsis thaliana
  misc_feature (1)..(798): Ceres Seq. ID no. 3442135
  misc_feature (1)..(798): Ortholog of  Ceres SEQ ID NO 13594176 as cited in SEQ ID NO 59144
atgaagcgtgggaaaggcgagaaaaaggcaacaaagagccgcgatggcagcggtcaagtagttccgctcactgaaccagtggttacagctacgggtatggttggaacaagatcatggataggagggctcttcacacgctccaatagacgtcaagacaaggcagtcgactacactttgtctcctcttcaggaggaaagacttcaaaggctgcaagatcgtatggttgtacctttcgacgagacacgtcctgatcatcaggaatcacttaaagcattgtggaacgtcgcgtttccgaatgttcatctcacgggtttagtaacagaacaatggaaagaaatgggatggcaaggtcccaatccatctaccgatttcaggggttgcggatttatcgctctagaaaatttactattttctgcaagaacttatccggtttgtttccggaggctattgttaaaacaaagaggcgaccgggcaaagtgggagtacccttttgcagtggccggaatcaacatctccttcatgttgatccaaatgctcgatttacaaaataatccaaagccaaaatgtcttccaggaatgaatttcctcaaactcttagaagaagacgagagggcattcgatgtactatactgtatagctttcgcgatgatggatgctcaatggcttgcaatgcacgcttcttacatggaattcaatgaagtattacaagcaactcggaatcagctggagagagagctttctttggatgatattcatcggattcaagatcttcctgcctacaatctcttgttccaatag

SEQ ID NO: 71399 - protein, 265 aa, Arabidopsis thaliana
  peptide (1)..(265): Ceres Seq. ID no. 3442136
MKRGKGEKKATKSRDGSGQVVPLTEPVVTATGMVGTRSWIGGLFTRSNRRQDKAVDYTLSPLQEERLQRLQDRMVVPFDETRPDHQESLKALWNVAFPNVHLTGLVTEQWKEMGWQGPNPSTDFRGCGFIALENLLFSARTYPVCFRRLLLKQRGDRAKWEYPFAVAGINISFMLIQMLDLQNNPKPKCLPGMNFLKLLEEDERAFDVLYCIAFAMMDAQWLAMHASYMEFNEVLQATRNQLERELSLDDIHRIQDLPAYNLLFQ

SEQ ID NO: 71400 - protein, 233 aa, Arabidopsis thaliana
  peptide (1)..(233): Ceres Seq. ID no. 3442137
MVGTRSWIGGLFTRSNRRQDKAVDYTLSPLQEERLQRLQDRMVVPFDETRPDHQESLKALWNVAFPNVHLTGLVTEQWKEMGWQGPNPSTDFRGCGFIALENLLFSARTYPVCFRRLLLKQRGDRAKWEYPFAVAGINISFMLIQMLDLQNNPKPKCLPGMNFLKLLEEDERAFDVLYCIAFAMMDAQWLAMHASYMEFNEVLQATRNQLERELSLDDIHRIQDLPAYNLLFQ

SEQ ID NO: 71401 - protein, 192 aa, Arabidopsis thaliana
  peptide (1)..(192): Ceres Seq. ID no. 3442138
MVVPFDETRPDHQESLKALWNVAFPNVHLTGLVTEQWKEMGWQGPNPSTDFRGCGFIALENLLFSARTYPVCFRRLLLKQRGDRAKWEYPFAVAGINISFMLIQMLDLQNNPKPKCLPGMNFLKLLEEDERAFDVLYCIAFAMMDAQWLAMHASYMEFNEVLQATRNQLERELSLDDIHRIQDLPAYNLLFQ

SEQ ID NO: 71402 - DNA, 1233 bp, Arabidopsis thaliana
  misc_feature (1)..(1233): Ceres Seq. ID no. 3443382
  misc_feature (1)..(1233): Ortholog of  Ceres SEQ ID NO 13594213 as cited in SEQ ID NO 57038
  misc_feature (1)..(1233): Ortholog of  Ceres SEQ ID NO 13654989 as cited in SEQ ID NO 63117
  misc_feature (1)..(1233): Ortholog of  Ceres SEQ ID NO 13584744 as cited in SEQ ID NO 69137
atgggcaactgcggtactagagacgaggctgccgtcttcactcctcaagctcaagcccaacagctccagaagaagcactcccgatccgtctcagatctgagcgatccatccactcctcgcttccgagacgactctcgcactcctatttcgtatgcccaagtcatcccctttactttgtttgagcttgagaccatcaccaagagcttccgcccagattatatactcggagaaggtggtttcggtaccgtctacaagggttacattgatgacaatctccgcgtcggcctcaagtctctccctgttgccgtcaaggtccttaacaaggagggactccagggtcaccgtgaatggcttacagaggtcaacttcctcggccaactccgtcatcccaacctcgtcaagcttattggttactgctgcgaggacgatcaccgattacttgtttatgagttcatgctgcgaggcagtcttgagaatcacctatttcgaagtaatccccgcacccttctccattttttgaagatgatgattgctcttggagctgcgaaaggccttgctttcctccacaatgctgaaagaccggttatttatagggatttcaagacttccaatatactgcttgactccgactacaccgccaagctttcagattttggcttagctaaagctggaccccagggtgatgaaacccatgtatcaactcgagttatgggtacttatggctatgctgccccagaatatgtgatgactggacacttgacggccagaagtgatgtatacagctttggagttgttcttctagagatgttgacaggaagaaaatcagtggataagacaagacctagcaaagagcagaacttggttgattgggctcggccaaagctgaatgataaaagaaaactgctgcagataattgacccaagactggagaaccaatactctgtcagggcagctcagaaggcatgcagcttggcgtattattgtcttagccagaacccgaaagctaggccattgatgagcgatgtggttgagactttggaacctttgcagtgtactggtgatgccctgatcccttgtgcaactactacagctggagctgcatttgcaatgggaggggtgcctgattacagaatgcaccggaggtttgcaaagaacgttgggccaggtgcaatttgccggtcacccaatccaaattattcaccgggtggacctgcagcatgcagagttcggtga

SEQ ID NO: 71403 - protein, 410 aa, Arabidopsis thaliana
  peptide (1)..(410): Ceres Seq. ID no. 3443383
MGNCGTRDEAAVFTPQAQAQQLQKKHSRSVSDLSDPSTPRFRDDSRTPISYAQVIPFTLFELETITKSFRPDYILGEGGFGTVYKGYIDDNLRVGLKSLPVAVKVLNKEGLQGHREWLTEVNFLGQLRHPNLVKLIGYCCEDDHRLLVYEFMLRGSLENHLFRSNPRTLLHFLKMMIALGAAKGLAFLHNAERPVIYRDFKTSNILLDSDYTAKLSDFGLAKAGPQGDETHVSTRVMGTYGYAAPEYVMTGHLTARSDVYSFGVVLLEMLTGRKSVDKTRPSKEQNLVDWARPKLNDKRKLLQIIDPRLENQYSVRAAQKACSLAYYCLSQNPKARPLMSDVVETLEPLQCTGDALIPCATTTAGAAFAMGGVPDYRMHRRFAKNVGPGAICRSPNPNYSPGGPAACRVR

SEQ ID NO: 71404 - protein, 259 aa, Arabidopsis thaliana
  peptide (1)..(259): Ceres Seq. ID no. 3443384
MLRGSLENHLFRSNPRTLLHFLKMMIALGAAKGLAFLHNAERPVIYRDFKTSNILLDSDYTAKLSDFGLAKAGPQGDETHVSTRVMGTYGYAAPEYVMTGHLTARSDVYSFGVVLLEMLTGRKSVDKTRPSKEQNLVDWARPKLNDKRKLLQIIDPRLENQYSVRAAQKACSLAYYCLSQNPKARPLMSDVVETLEPLQCTGDALIPCATTTAGAAFAMGGVPDYRMHRRFAKNVGPGAICRSPNPNYSPGGPAACRVR

SEQ ID NO: 71405 - protein, 236 aa, Arabidopsis thaliana
  peptide (1)..(236): Ceres Seq. ID no. 3443385
MMIALGAAKGLAFLHNAERPVIYRDFKTSNILLDSDYTAKLSDFGLAKAGPQGDETHVSTRVMGTYGYAAPEYVMTGHLTARSDVYSFGVVLLEMLTGRKSVDKTRPSKEQNLVDWARPKLNDKRKLLQIIDPRLENQYSVRAAQKACSLAYYCLSQNPKARPLMSDVVETLEPLQCTGDALIPCATTTAGAAFAMGGVPDYRMHRRFAKNVGPGAICRSPNPNYSPGGPAACRVR

SEQ ID NO: 71406 - DNA, 1593 bp, Arabidopsis thaliana
  misc_feature (1)..(1593): Ceres Seq. ID no. 3444981
  misc_feature (1)..(1593): Ortholog of  Ceres SEQ ID NO 14310920 as cited in SEQ ID NO 54622
atggagcttcctcaacctcgtcccttcaaaacccaagggagaaaaccaacacatgattttttatcgctctgcagtcattcaaccgtccacccagatccaaagccaacaccaccaccttcttctcaaggtagtcacttgaaaacccatgattttcttcaaccgttagaatgtgttggtgctaaagaagacgtaagtaggattaactctaccactacagcgtccgagaagccaccgccccctgctccacctccaccgttgcagcacgtgcttcccggtggtatagggacttatacgattagccccattccttacttccatcatcatcatcagagaattcctaagccggagttgtcaccaccaatgatgttcaatgctaatgagagaaacgttttggatgagaattctaactctaattgcagctcgtacgccgctgcatcaagcgggttcactctgtgggatgaatctgcttctgggaagaagggacagacaaggaaggagaatagtgttggggagagagtaaacatgagagctgatgttgcagcaactgtgggacaatggccagtggcggagagacggtcccagtctttgacaaacaaccatatgagcggtttcagttctctctcttcctctcaagggtctgtgcttaagagccagagcttcatggacatgataaggtcagcaaaaggaagttcacaggaagatgatttagatgatgaagaagattttatcatgaagaaagaaagctcctcgactagccagagccatagagtggatttgagggtaaaagcagatgtgagaggctctcctaacgatcaaaagctgaacacacctaggtctaaacattctgctacagagcaacggagaaggagcaagatcaatgatagatttcagatgttgagacaactaatacctaacagcgaccaaaagcgggataaggcctccttcttactagaggttatcgagtatattcaattcttacaagagaaagcagacaagtatgtgacctcttaccaaggatggaatcacgaacctgcgaagctattgaattggcagagtaacaacaaccaacagctagtacctgaaggagttgcttttgctccaaaattggaagaagagaaaaacaacattccggtttcggtccttgcaactgcacaaggtgttgttattgatcatccaacaaccgcgacgacctctccatttccattgtcgattcaaagcaacagttttttctctcctgtgattgcgggtaatcccgtaccccagttccacgcaagagtcgcatcatcagaggctgtagagccaagtccgagttcccggagtcaaaaagaagaagaagatgaggaagttcttgagggtaacatcagaatttcaagtgtttactcacaaggcagattagtgaaaacactgagagaagcattggagaattcaggagtggacttaacgaaagcaagcatctccgttgaaatcgagctcgctaaacaatcctcgtcttcttccttcaaggatcatgaagttcgtgaaccggtttctcgaaccagaaacgacaatgtcaagcaaactcggaaaccaaaacggctcaagacgggacagtag

SEQ ID NO: 71407 - protein, 530 aa, Arabidopsis thaliana
  peptide (1)..(530): Ceres Seq. ID no. 3444982
MELPQPRPFKTQGRKPTHDFLSLCSHSTVHPDPKPTPPPSSQGSHLKTHDFLQPLECVGAKEDVSRINSTTTASEKPPPPAPPPPLQHVLPGGIGTYTISPIPYFHHHHQRIPKPELSPPMMFNANERNVLDENSNSNCSSYAAASSGFTLWDESASGKKGQTRKENSVGERVNMRADVAATVGQWPVAERRSQSLTNNHMSGFSSLSSSQGSVLKSQSFMDMIRSAKGSSQEDDLDDEEDFIMKKESSSTSQSHRVDLRVKADVRGSPNDQKLNTPRSKHSATEQRRRSKINDRFQMLRQLIPNSDQKRDKASFLLEVIEYIQFLQEKADKYVTSYQGWNHEPAKLLNWQSNNNQQLVPEGVAFAPKLEEEKNNIPVSVLATAQGVVIDHPTTATTSPFPLSIQSNSFFSPVIAGNPVPQFHARVASSEAVEPSPSSRSQKEEEDEEVLEGNIRISSVYSQGRLVKTLREALENSGVDLTKASISVEIELAKQSSSSSFKDHEVREPVSRTRNDNVKQTRKPKRLKTGQ

SEQ ID NO: 71408 - protein, 410 aa, Arabidopsis thaliana
  peptide (1)..(410): Ceres Seq. ID no. 3444983
MMFNANERNVLDENSNSNCSSYAAASSGFTLWDESASGKKGQTRKENSVGERVNMRADVAATVGQWPVAERRSQSLTNNHMSGFSSLSSSQGSVLKSQSFMDMIRSAKGSSQEDDLDDEEDFIMKKESSSTSQSHRVDLRVKADVRGSPNDQKLNTPRSKHSATEQRRRSKINDRFQMLRQLIPNSDQKRDKASFLLEVIEYIQFLQEKADKYVTSYQGWNHEPAKLLNWQSNNNQQLVPEGVAFAPKLEEEKNNIPVSVLATAQGVVIDHPTTATTSPFPLSIQSNSFFSPVIAGNPVPQFHARVASSEAVEPSPSSRSQKEEEDEEVLEGNIRISSVYSQGRLVKTLREALENSGVDLTKASISVEIELAKQSSSSSFKDHEVREPVSRTRNDNVKQTRKPKRLKTGQ

SEQ ID NO: 71409 - protein, 409 aa, Arabidopsis thaliana
  peptide (1)..(409): Ceres Seq. ID no. 3444984
MFNANERNVLDENSNSNCSSYAAASSGFTLWDESASGKKGQTRKENSVGERVNMRADVAATVGQWPVAERRSQSLTNNHMSGFSSLSSSQGSVLKSQSFMDMIRSAKGSSQEDDLDDEEDFIMKKESSSTSQSHRVDLRVKADVRGSPNDQKLNTPRSKHSATEQRRRSKINDRFQMLRQLIPNSDQKRDKASFLLEVIEYIQFLQEKADKYVTSYQGWNHEPAKLLNWQSNNNQQLVPEGVAFAPKLEEEKNNIPVSVLATAQGVVIDHPTTATTSPFPLSIQSNSFFSPVIAGNPVPQFHARVASSEAVEPSPSSRSQKEEEDEEVLEGNIRISSVYSQGRLVKTLREALENSGVDLTKASISVEIELAKQSSSSSFKDHEVREPVSRTRNDNVKQTRKPKRLKTGQ

SEQ ID NO: 71410 - DNA, 1146 bp, Arabidopsis thaliana
  misc_feature (1)..(1146): Ceres Seq. ID no. 3447026
  misc_feature (1)..(1146): Ortholog of  Ceres SEQ ID NO 13654989 as cited in SEQ ID NO 63117
  misc_feature (1)..(1146): Ortholog of  Ceres SEQ ID NO 13584744 as cited in SEQ ID NO 69137
atgagttgtttctcgtgcttctcttcaaaagttctggacaatgaaggttcttcgatgcctgctccttataagcaaccaaactcacctaagagaacaacaggagaagtggtggctaagaacgcaaacggaccatcaaacaatatgggggcacgtattttcacgttccgtgagctagccaccgcgacaaagaattttagacaagagtgcctcattggtgaaggtgggttcgggagggtttacaaaggaaagcttgaaaatccagctcaggtcgtggcagtgaaacaacttgataggaatggattacaaggacaaagagagttcttggtcgaggtcttaatgcttagtcttctacatcataggaatcttgtgaatcttatcggttattgcgctgatggagaccaaagacttcttgtttacgagtatatgcctcttggatctctagaagatcatctcctcgatcttgaaccgggacaaaaaccactagactggaacactcgtattaagattgctttaggagcagcaaaaggaattgagtatctccatgatgaggctgatcctccagtgatttaccgagatcttaaatcgtcaaatatattacttgacccagaatacgttgcgaaattatcggatttcggtttagcaaagctaggtcctgttggagacacactacatgtgtcttcccgagttatgggaacttatggttattgtgctcctgaatatcaaagaactggctatctaacaaataaatcagatgtctacagctttggagttgtgttgttggaacttatatccggaagacgagtcatcgacacaatgagacctagtcatgaacaaaatctcgttacttgggcactaccgatttttagagatccgactagatattggcagctagctgatccattgcttcgaggcgactatccggaaaagagtttgaaccaagctatagctgtagcggcaatgtgcctgcatgaagaaccaacggttagaccactaatgagtgacgttattacagccttgagctttcttggtgcatcctcaaattcctccaataccggctctaaccatttgcaacaaaatcgatccaacaaatatcaggatgcagttcagtgggactcaagtcctagatatgctaattcgcaaatgtag

SEQ ID NO: 71411 - protein, 381 aa, Arabidopsis thaliana
  peptide (1)..(381): Ceres Seq. ID no. 3447027
MSCFSCFSSKVLDNEGSSMPAPYKQPNSPKRTTGEVVAKNANGPSNNMGARIFTFRELATATKNFRQECLIGEGGFGRVYKGKLENPAQVVAVKQLDRNGLQGQREFLVEVLMLSLLHHRNLVNLIGYCADGDQRLLVYEYMPLGSLEDHLLDLEPGQKPLDWNTRIKIALGAAKGIEYLHDEADPPVIYRDLKSSNILLDPEYVAKLSDFGLAKLGPVGDTLHVSSRVMGTYGYCAPEYQRTGYLTNKSDVYSFGVVLLELISGRRVIDTMRPSHEQNLVTWALPIFRDPTRYWQLADPLLRGDYPEKSLNQAIAVAAMCLHEEPTVRPLMSDVITALSFLGASSNSSNTGSNHLQQNRSNKYQDAVQWDSSPRYANSQM

SEQ ID NO: 71412 - protein, 363 aa, Arabidopsis thaliana
  peptide (1)..(363): Ceres Seq. ID no. 3447028
MPAPYKQPNSPKRTTGEVVAKNANGPSNNMGARIFTFRELATATKNFRQECLIGEGGFGRVYKGKLENPAQVVAVKQLDRNGLQGQREFLVEVLMLSLLHHRNLVNLIGYCADGDQRLLVYEYMPLGSLEDHLLDLEPGQKPLDWNTRIKIALGAAKGIEYLHDEADPPVIYRDLKSSNILLDPEYVAKLSDFGLAKLGPVGDTLHVSSRVMGTYGYCAPEYQRTGYLTNKSDVYSFGVVLLELISGRRVIDTMRPSHEQNLVTWALPIFRDPTRYWQLADPLLRGDYPEKSLNQAIAVAAMCLHEEPTVRPLMSDVITALSFLGASSNSSNTGSNHLQQNRSNKYQDAVQWDSSPRYANSQM

SEQ ID NO: 71413 - protein, 334 aa, Arabidopsis thaliana
  peptide (1)..(334): Ceres Seq. ID no. 3447029
MGARIFTFRELATATKNFRQECLIGEGGFGRVYKGKLENPAQVVAVKQLDRNGLQGQREFLVEVLMLSLLHHRNLVNLIGYCADGDQRLLVYEYMPLGSLEDHLLDLEPGQKPLDWNTRIKIALGAAKGIEYLHDEADPPVIYRDLKSSNILLDPEYVAKLSDFGLAKLGPVGDTLHVSSRVMGTYGYCAPEYQRTGYLTNKSDVYSFGVVLLELISGRRVIDTMRPSHEQNLVTWALPIFRDPTRYWQLADPLLRGDYPEKSLNQAIAVAAMCLHEEPTVRPLMSDVITALSFLGASSNSSNTGSNHLQQNRSNKYQDAVQWDSSPRYANSQM

SEQ ID NO: 71414 - DNA, 3330 bp, Arabidopsis thaliana
  misc_feature (1)..(3330): Ceres Seq. ID no. 3447874
  misc_feature (1)..(3330): Ortholog of  Ceres SEQ ID NO 12586556 as cited in SEQ ID NO 64667
  misc_feature (1)..(3330): Ortholog of  Ceres SEQ ID NO 13660894 as cited in SEQ ID NO 67475
atgccaaagtgcaagaatctgttgctaacctcgaagcgacgtaaatccaaatccaaaagactaaagctccatcagcatgaacctgagtctctgtttccagagaaggaggtagaagaggaagatgaagatgaaggaggcttcaagctgaaaattgcagctccttctcaagagcatggagttcaacctctgggaaacctatatttcaatcctggtgcggtcaatgtgcgaaacactggattaggtaatctccagatactctcagatgagctcgttttggatattctaggtcttcttggcgccaatcatttgggtgttttggctactgtaactaagtcattctatatatttgctaatcatgagcctctctggagaaatcttgtgttagaggagttaaaaggagattttttgtttaatgggtcgtggagatctacctatgtagctgcttaccatccgaaattcaagtttgctggagatggtgaatcgaatttgaagattatagatttctattctgattatctgtttcagagctggttatgtgcgaatcttgaaatgaaaccgaaatggcttagaagagataatatcacacgggtgagaggcatttctgttgaagacttcattacaaagtttgaggagccgaataagccagttttgttggagggatgtttggatggttggcctgctattgagaaatggtcaagagattatctgactaaggtggttggtgatgtcgaattcgcggtaggtccagtggaaatgaagctcgagaagtattttaggtattctgatggagctagggaagaaaggcctttgtacttgtttgatccaaagtttgcagagaaagttccggttttggattcggagtatgatgttcctgtctatttcagagaggacttgtttggtgttttaggaaacgagcgacctgattatagatggatcataattggtccagccggatcaggatcgtctttccatattgatcctaactcaacatcagcttggaatgcggtgatcacagggtcgaagaaatgggttttgttcccacctgatgtggttcctccgggtgtgcatccaagtcctgatggagcagaagtggcctgtcctgtttccataatagaatggttcatgaacttttatgatgatactaaggattgggagaagaaacctattgagtgtatatgcaaagccggggaggtgatgtttgtacctaatggatggtggcatctggtgattaacctggaggaatcgattgctattactcagaattatgctagcaggagtaatttgttgaatgtgttagaatttctgaagaaaccaaatgctaaagaacttgtctccgggacaactgacagagagaatttgcatgacaaattcaagaaagccattgaagaagcttacccggggactatccaagagttagaaaagaaagcagaagaagcaaaaagagccgaagaacaaagaagaatgagtaacattgtgctcaacacacttcgattcaaacacccgaagcttgccttgctccaatcctgctcttccttttccgacctcaagatcatacatggctttctcttacgaacccatctcatctccgacgtcttcgttgccagtcgtctcctcgctctctgcgttgacgactccaccttcaacaaaccaaccaatctcttgggatatgcatacggaatcttctctcagattcaaaaccctaatcttttcgtcttcaatctactcattcgctgcttctccactggtgcagagcctagtaaggcttttgggttctatacccagatgttgaaatctcggatttggccagataacatcacgtttccgtttctgattaaggcgtctagtgagatggagtgtgttctagtgggagagcaaacgcattcacagattgttagattcggatttcagaatgatgtttatgtagagaattcgcttgttcatatgtacgctaattgtgggttcatcgctgctgctggtagaatctttgggcaaatggggtttcgagatgttgtttcatggacttctatggtggctgggtattgtaaatgcgggatggttgagaatgcacgagagatgttcgatgaaatgcctcacagaaatttgtttacttggagtattatgattaatgggtatgcgaagaacaactgttttgagaaagccattgacttgtttgaattcatgaaaagggaaggagttgtcgcgaatgagacggttatggtgagtgtgatttcgtcttgtgctcatttgggtgcacttgagtttggagaaagagcatatgagtatgtggttaagagtcacatgactgtgaatcttattcttgggacagctcttgtggatatgttttggaggtgtggggatatcgagaaagcaattcatgtatttgagggattgcctgagacggatagcttgagctggagttcaataatcaaaggtcttgcagtgcatgggcatgctcacaaggcaatgcattacttctcccaaatgattagtttagggtttattccaagggatgttacattcacagcggttctttcagcttgcagccacggtggattagttgaaaaagggttagagatatatgagaacatgaaaaaggatcatgggatcgagcctagactcgagcattatggttgcattgttgatatgcttggtcgtgctgggaaattagccgaagcggagaactttatccttaaaatgcatgtgaagccaaacgctcctatattgggagcattgcttggagcatgtaagatttataagaacaccgaggttgcagagagagtaggaaacatgttgataaaggtgaaaccagaacatagcggttactatgtcttactgtcaaatatatacgcgtgtgcaggacaatgggataagatagagagcttgagagacatgatgaaggagaagcttgttaagaaaccaccagggtggagcttaatagagattgatgggaaaataaacaagttcacaatgggagatgatcagaagcatcctgaaatgggtaagatcagaaggaagtgggaagagatcttggggaagataagattgatagggtataaagggaacacaggtgatgcgtttttcgatgtagacgaggaggagaaggagagttcgattcatatgcatagtgagaaacttgcaattgcatatggtatgatgaagactaagcctggtacaaccattaggatagtgaagaacttgagggtatgtgaagattgtcatacagtaacaaagcttatctctgaggtttatggtagagagttaattgtaagagaccgcaacagatttcatcattttagaaatggagtatgttcctgcagagattattggtga

SEQ ID NO: 71415 - protein, 1109 aa, Arabidopsis thaliana
  peptide (1)..(1109): Ceres Seq. ID no. 3447875
MPKCKNLLLTSKRRKSKSKRLKLHQHEPESLFPEKEVEEEDEDEGGFKLKIAAPSQEHGVQPLGNLYFNPGAVNVRNTGLGNLQILSDELVLDILGLLGANHLGVLATVTKSFYIFANHEPLWRNLVLEELKGDFLFNGSWRSTYVAAYHPKFKFAGDGESNLKIIDFYSDYLFQSWLCANLEMKPKWLRRDNITRVRGISVEDFITKFEEPNKPVLLEGCLDGWPAIEKWSRDYLTKVVGDVEFAVGPVEMKLEKYFRYSDGAREERPLYLFDPKFAEKVPVLDSEYDVPVYFREDLFGVLGNERPDYRWIIIGPAGSGSSFHIDPNSTSAWNAVITGSKKWVLFPPDVVPPGVHPSPDGAEVACPVSIIEWFMNFYDDTKDWEKKPIECICKAGEVMFVPNGWWHLVINLEESIAITQNYASRSNLLNVLEFLKKPNAKELVSGTTDRENLHDKFKKAIEEAYPGTIQELEKKAEEAKRAEEQRRMSNIVLNTLRFKHPKLALLQSCSSFSDLKIIHGFLLRTHLISDVFVASRLLALCVDDSTFNKPTNLLGYAYGIFSQIQNPNLFVFNLLIRCFSTGAEPSKAFGFYTQMLKSRIWPDNITFPFLIKASSEMECVLVGEQTHSQIVRFGFQNDVYVENSLVHMYANCGFIAAAGRIFGQMGFRDVVSWTSMVAGYCKCGMVENAREMFDEMPHRNLFTWSIMINGYAKNNCFEKAIDLFEFMKREGVVANETVMVSVISSCAHLGALEFGERAYEYVVKSHMTVNLILGTALVDMFWRCGDIEKAIHVFEGLPETDSLSWSSIIKGLAVHGHAHKAMHYFSQMISLGFIPRDVTFTAVLSACSHGGLVEKGLEIYENMKKDHGIEPRLEHYGCIVDMLGRAGKLAEAENFILKMHVKPNAPILGALLGACKIYKNTEVAERVGNMLIKVKPEHSGYYVLLSNIYACAGQWDKIESLRDMMKEKLVKKPPGWSLIEIDGKINKFTMGDDQKHPEMGKIRRKWEEILGKIRLIGYKGNTGDAFFDVDEEEKESSIHMHSEKLAIAYGMMKTKPGTTIRIVKNLRVCEDCHTVTKLISEVYGRELIVRDRNRFHHFRNGVCSCRDYW

SEQ ID NO: 71416 - protein, 926 aa, Arabidopsis thaliana
  peptide (1)..(926): Ceres Seq. ID no. 3447876
MKPKWLRRDNITRVRGISVEDFITKFEEPNKPVLLEGCLDGWPAIEKWSRDYLTKVVGDVEFAVGPVEMKLEKYFRYSDGAREERPLYLFDPKFAEKVPVLDSEYDVPVYFREDLFGVLGNERPDYRWIIIGPAGSGSSFHIDPNSTSAWNAVITGSKKWVLFPPDVVPPGVHPSPDGAEVACPVSIIEWFMNFYDDTKDWEKKPIECICKAGEVMFVPNGWWHLVINLEESIAITQNYASRSNLLNVLEFLKKPNAKELVSGTTDRENLHDKFKKAIEEAYPGTIQELEKKAEEAKRAEEQRRMSNIVLNTLRFKHPKLALLQSCSSFSDLKIIHGFLLRTHLISDVFVASRLLALCVDDSTFNKPTNLLGYAYGIFSQIQNPNLFVFNLLIRCFSTGAEPSKAFGFYTQMLKSRIWPDNITFPFLIKASSEMECVLVGEQTHSQIVRFGFQNDVYVENSLVHMYANCGFIAAAGRIFGQMGFRDVVSWTSMVAGYCKCGMVENAREMFDEMPHRNLFTWSIMINGYAKNNCFEKAIDLFEFMKREGVVANETVMVSVISSCAHLGALEFGERAYEYVVKSHMTVNLILGTALVDMFWRCGDIEKAIHVFEGLPETDSLSWSSIIKGLAVHGHAHKAMHYFSQMISLGFIPRDVTFTAVLSACSHGGLVEKGLEIYENMKKDHGIEPRLEHYGCIVDMLGRAGKLAEAENFILKMHVKPNAPILGALLGACKIYKNTEVAERVGNMLIKVKPEHSGYYVLLSNIYACAGQWDKIESLRDMMKEKLVKKPPGWSLIEIDGKINKFTMGDDQKHPEMGKIRRKWEEILGKIRLIGYKGNTGDAFFDVDEEEKESSIHMHSEKLAIAYGMMKTKPGTTIRIVKNLRVCEDCHTVTKLISEVYGRELIVRDRNRFHHFRNGVCSCRDYW

SEQ ID NO: 71417 - protein, 858 aa, Arabidopsis thaliana
  peptide (1)..(858): Ceres Seq. ID no. 3447877
MKLEKYFRYSDGAREERPLYLFDPKFAEKVPVLDSEYDVPVYFREDLFGVLGNERPDYRWIIIGPAGSGSSFHIDPNSTSAWNAVITGSKKWVLFPPDVVPPGVHPSPDGAEVACPVSIIEWFMNFYDDTKDWEKKPIECICKAGEVMFVPNGWWHLVINLEESIAITQNYASRSNLLNVLEFLKKPNAKELVSGTTDRENLHDKFKKAIEEAYPGTIQELEKKAEEAKRAEEQRRMSNIVLNTLRFKHPKLALLQSCSSFSDLKIIHGFLLRTHLISDVFVASRLLALCVDDSTFNKPTNLLGYAYGIFSQIQNPNLFVFNLLIRCFSTGAEPSKAFGFYTQMLKSRIWPDNITFPFLIKASSEMECVLVGEQTHSQIVRFGFQNDVYVENSLVHMYANCGFIAAAGRIFGQMGFRDVVSWTSMVAGYCKCGMVENAREMFDEMPHRNLFTWSIMINGYAKNNCFEKAIDLFEFMKREGVVANETVMVSVISSCAHLGALEFGERAYEYVVKSHMTVNLILGTALVDMFWRCGDIEKAIHVFEGLPETDSLSWSSIIKGLAVHGHAHKAMHYFSQMISLGFIPRDVTFTAVLSACSHGGLVEKGLEIYENMKKDHGIEPRLEHYGCIVDMLGRAGKLAEAENFILKMHVKPNAPILGALLGACKIYKNTEVAERVGNMLIKVKPEHSGYYVLLSNIYACAGQWDKIESLRDMMKEKLVKKPPGWSLIEIDGKINKFTMGDDQKHPEMGKIRRKWEEILGKIRLIGYKGNTGDAFFDVDEEEKESSIHMHSEKLAIAYGMMKTKPGTTIRIVKNLRVCEDCHTVTKLISEVYGRELIVRDRNRFHHFRNGVCSCRDYW

SEQ ID NO: 71418 - DNA, 2598 bp, Arabidopsis thaliana
  misc_feature (1)..(2598): Ceres Seq. ID no. 3598385
  misc_feature (1)..(2598): Ortholog of  Ceres SEQ ID NO 15226720 as cited in SEQ ID NO 58707
  misc_feature (1)..(2598): Ortholog of  Ceres SEQ ID NO 13654989 as cited in SEQ ID NO 63117
  misc_feature (1)..(2598): Ortholog of  Ceres SEQ ID NO 13584744 as cited in SEQ ID NO 69137
atggagagacattgtgtgttagttgccacttttttgctgatgcttcatatcgttcatgctcaggatcaaattggattcattagtgtggattgtggtttggcacctcgtgagtctccttacaatgaagccaaaactggtttaacatatacatcagatgacggtctagtcaacgttgggaaacccggtagaatcgccaaggaattcgaaccgctcgccgataagccgactttgacactgagatattttccagagggagtacgaaactgctacaatctaaatgtcaccagcgacaccaactatctgatcaaggccacattcgtatatggaaattacgatggtcttaatgttgggccaaacttcgacctttacttcggtccgaatttgtggactacggtatgtcttattaagactggaataagtataccttttataaatgttttggagctacgaccgatgaagaaaaacatgtacgttactcaaggcgaatcactgaattacttattcagggtgtatattagcaattcaagtactcgtataaggttcccggatgatgtctatgatcgtaaatggtacccgtacttcgacaactcatggacacaagtaactacgactctcgatgtaaacacaagtcttacttatgaactaccacaaagtgtaatggcaaaagccgcaacgccaattaaggctaacgacaccttgaacattacatggacagtagagcctcctactacaaagttttactcctacatgcactttgcagagcttcagactttaagagccaacgatgcaagggaattcaatgtgacgatgaatggaatatatacatatggaccttatagtcctaaaccactaaaaaccgaaaccatatacgacaaaatccctgagcaatgcgatggaggtgcatgccttttgcaggttgtgaagacacttaaatctacccttccacctttacttaatgctatcgaggctttcaccgtgattgatttcccgcagatggagactaatggagatgacgttgatgcaatcaagaatgttcaagatacgtatggaattagtagaattagttggcaaggagatccatgtgtccccaaactgtttttgtgggatggtctaaattgcaacaactccgataattcgacatcaccaatcatcacttccttagacttatcttcaagtggactaactgggagcatcacccaagccattcagaatctaactaacctgcaagaactggacttgtcagataacaatttgactggagaaatacctgatttcttaggggacattaaatcactcttggtcataaacttaagtggtaataatctaagtggctcagttcctccctcacttcttcagaagaaaggaatgaagttaaatgtcgaaggaaaccctcatcttctttgcacagctgattcatgtgtgaaaaaaggagaggatggacacaagaaaaagagtgtcatagtgccagttgttgcatcaattgcttcaatagctgttcttataggtgcattggttctgtttttcattcttagaaagaaaaagtcaccaaaagttgaaggaccaccaccatcttatatgcaagcatcagatggtagatcgccaagatcatctgaaccggcaatagtgacaaagaatagaaggtttacttactcacaagttgcgataatgacaaataacttccaaagaatccttggaaaaggagggtttggaatggtttatcatggttttgtgaacggtacagaacaagtagctgttaagatactctcccattcatcgtctcaaggatataaagaatttaaagcggaggtagaacttcttcttagagttcatcacaagaacttggtcggtcttgttgggtactgcgacgaaggagagaacatggctcttatctatgaatacatggccaatggagatctaaaagaacatatgtcaggaacacgtaaccggtttactttgaattggggaactagactgaaaatagtcgtcgagtctgcacaaggacttgagtacttgcataatggatgcaaaccaccaatggttcatagagatgtcaaaaccacaaatatattgctgaacgaacacttccaagccaaactagctgattttgggctttcaaggtcatttccaattgaaggtgaaactcatgtgtcaacagttgttgctggaacgcctggatatcttgatcccgaatactataaaacaaattggttgacagaaaagagtgatgtttatagttttgggattgtattgttggagcttatcacaaatcgacccgtgatcgacaaaagccgtgaaaagccacatatagcagaatgggtaggagtaatgcttacaaaaggagacatcaacagtatcatggatcctaatttaaatgaagattatgattctggttctgtttggaaagctgttgagctagccatgagttgtctcaatccttcttcagcaagaagaccgaccatgtcccaagttgttattgaactaaacgagtgtatagcatcagaaaattcaaggggaggagcgagtcgggatatggactcgaagagttccatagaagtgagcttgacctttgataccgaactgagcccaacggctcggtag

SEQ ID NO: 71419 - protein, 865 aa, Arabidopsis thaliana
  peptide (1)..(865): Ceres Seq. ID no. 3598386
MERHCVLVATFLLMLHIVHAQDQIGFISVDCGLAPRESPYNEAKTGLTYTSDDGLVNVGKPGRIAKEFEPLADKPTLTLRYFPEGVRNCYNLNVTSDTNYLIKATFVYGNYDGLNVGPNFDLYFGPNLWTTVCLIKTGISIPFINVLELRPMKKNMYVTQGESLNYLFRVYISNSSTRIRFPDDVYDRKWYPYFDNSWTQVTTTLDVNTSLTYELPQSVMAKAATPIKANDTLNITWTVEPPTTKFYSYMHFAELQTLRANDAREFNVTMNGIYTYGPYSPKPLKTETIYDKIPEQCDGGACLLQVVKTLKSTLPPLLNAIEAFTVIDFPQMETNGDDVDAIKNVQDTYGISRISWQGDPCVPKLFLWDGLNCNNSDNSTSPIITSLDLSSSGLTGSITQAIQNLTNLQELDLSDNNLTGEIPDFLGDIKSLLVINLSGNNLSGSVPPSLLQKKGMKLNVEGNPHLLCTADSCVKKGEDGHKKKSVIVPVVASIASIAVLIGALVLFFILRKKKSPKVEGPPPSYMQASDGRSPRSSEPAIVTKNRRFTYSQVAIMTNNFQRILGKGGFGMVYHGFVNGTEQVAVKILSHSSSQGYKEFKAEVELLLRVHHKNLVGLVGYCDEGENMALIYEYMANGDLKEHMSGTRNRFTLNWGTRLKIVVESAQGLEYLHNGCKPPMVHRDVKTTNILLNEHFQAKLADFGLSRSFPIEGETHVSTVVAGTPGYLDPEYYKTNWLTEKSDVYSFGIVLLELITNRPVIDKSREKPHIAEWVGVMLTKGDINSIMDPNLNEDYDSGSVWKAVELAMSCLNPSSARRPTMSQVVIELNECIASENSRGGASRDMDSKSSIEVSLTFDTELSPTAR

SEQ ID NO: 71420 - protein, 852 aa, Arabidopsis thaliana
  peptide (1)..(852): Ceres Seq. ID no. 3598387
MLHIVHAQDQIGFISVDCGLAPRESPYNEAKTGLTYTSDDGLVNVGKPGRIAKEFEPLADKPTLTLRYFPEGVRNCYNLNVTSDTNYLIKATFVYGNYDGLNVGPNFDLYFGPNLWTTVCLIKTGISIPFINVLELRPMKKNMYVTQGESLNYLFRVYISNSSTRIRFPDDVYDRKWYPYFDNSWTQVTTTLDVNTSLTYELPQSVMAKAATPIKANDTLNITWTVEPPTTKFYSYMHFAELQTLRANDAREFNVTMNGIYTYGPYSPKPLKTETIYDKIPEQCDGGACLLQVVKTLKSTLPPLLNAIEAFTVIDFPQMETNGDDVDAIKNVQDTYGISRISWQGDPCVPKLFLWDGLNCNNSDNSTSPIITSLDLSSSGLTGSITQAIQNLTNLQELDLSDNNLTGEIPDFLGDIKSLLVINLSGNNLSGSVPPSLLQKKGMKLNVEGNPHLLCTADSCVKKGEDGHKKKSVIVPVVASIASIAVLIGALVLFFILRKKKSPKVEGPPPSYMQASDGRSPRSSEPAIVTKNRRFTYSQVAIMTNNFQRILGKGGFGMVYHGFVNGTEQVAVKILSHSSSQGYKEFKAEVELLLRVHHKNLVGLVGYCDEGENMALIYEYMANGDLKEHMSGTRNRFTLNWGTRLKIVVESAQGLEYLHNGCKPPMVHRDVKTTNILLNEHFQAKLADFGLSRSFPIEGETHVSTVVAGTPGYLDPEYYKTNWLTEKSDVYSFGIVLLELITNRPVIDKSREKPHIAEWVGVMLTKGDINSIMDPNLNEDYDSGSVWKAVELAMSCLNPSSARRPTMSQVVIELNECIASENSRGGASRDMDSKSSIEVSLTFDTELSPTAR

SEQ ID NO: 71421 - protein, 714 aa, Arabidopsis thaliana
  peptide (1)..(714): Ceres Seq. ID no. 3598388
MKKNMYVTQGESLNYLFRVYISNSSTRIRFPDDVYDRKWYPYFDNSWTQVTTTLDVNTSLTYELPQSVMAKAATPIKANDTLNITWTVEPPTTKFYSYMHFAELQTLRANDAREFNVTMNGIYTYGPYSPKPLKTETIYDKIPEQCDGGACLLQVVKTLKSTLPPLLNAIEAFTVIDFPQMETNGDDVDAIKNVQDTYGISRISWQGDPCVPKLFLWDGLNCNNSDNSTSPIITSLDLSSSGLTGSITQAIQNLTNLQELDLSDNNLTGEIPDFLGDIKSLLVINLSGNNLSGSVPPSLLQKKGMKLNVEGNPHLLCTADSCVKKGEDGHKKKSVIVPVVASIASIAVLIGALVLFFILRKKKSPKVEGPPPSYMQASDGRSPRSSEPAIVTKNRRFTYSQVAIMTNNFQRILGKGGFGMVYHGFVNGTEQVAVKILSHSSSQGYKEFKAEVELLLRVHHKNLVGLVGYCDEGENMALIYEYMANGDLKEHMSGTRNRFTLNWGTRLKIVVESAQGLEYLHNGCKPPMVHRDVKTTNILLNEHFQAKLADFGLSRSFPIEGETHVSTVVAGTPGYLDPEYYKTNWLTEKSDVYSFGIVLLELITNRPVIDKSREKPHIAEWVGVMLTKGDINSIMDPNLNEDYDSGSVWKAVELAMSCLNPSSARRPTMSQVVIELNECIASENSRGGASRDMDSKSSIEVSLTFDTELSPTAR

SEQ ID NO: 71422 - DNA, 2682 bp, Arabidopsis thaliana
  misc_feature (1)..(2682): Ceres Seq. ID no. 3598389
  misc_feature (1)..(2682): Ortholog of  Ceres SEQ ID NO 13584744 as cited in SEQ ID NO 69137
atgaaatctcttcactggtttttgcatcttttgatcatagcttttaccgttttgagatcagtggaagctcaaaatcaagcaggatttattagtttggattgtgggttggtgcctaaggaaactacttatacagagaagtcgacgaatataacatacaaatcagacgtggattacatcgacagtggattggtcggaaagatcaatgatgcatacaaaactcagtttcagcaacaggtttgggccgtgagaagcttccctgtaggtcaaagaaactgttacaatgtcaacctcacggcaaacaacaaatatttgatcagaggaacctttgtgtatgggaattatgatggcctgaatcagttcccaagttttgatcttcatatcggtcctaacaaatggtcgtctgttaaaatactaggagtaacaaatacttctatgcatgagataatccatgtcgtaccacaagatagtcttgaagtttgtcttgttaagactggaccgacgacaccattcatttcgtcgctggaggttcgtccattgaacaatgaaagttatctcacgcaaagtggatcattgatgttgttcgccagagtatactttccatccagttcatcatctttcattaggtatgatgaggacatacatgaccgtgtttggaattcattcacagatgatgaaaccgtctggataagtacagacctcccgatcgatacaagtaactcctatgacatgcctcaatccgtgatgaagacagctgctgtccctaaaaatgctagtgagccatggctcttatggtggactcttgatgagaacaccgcacaatcatatgtatatatgcatttcgccgaagtccagaatcttacagcaaatgaaaccagagaattcaacattacttacaatggtggtctacgttggttcagctatttgaggcctcctaatctcagcatttcaacgatctttaatccaagggcagtgagttcttcaaatgggatatttaatttcacattcgcaatgacgggtaactcaactctgcctccccttctcaacgccctcgagatttatacagtcgtagacattctacagctagagacaaacaaagatgaaggcaagtgtgtttctgctatgatgaacatcaaagaaacatatggtttaagcaaaaagataagctggcaaggagatccgtgtgctcctcagctttatcggtgggaaggtttaaattgtagttatccggactccgagggatcaagaatcatatccttgaacttgaatgggagcgagttgacaggttctataacatctgacatatccaagctaacactgttgacagtattagatttatcaaataatgatttatcaggagatattccaacattttttgctgagatgaagtcgttgaaactcataaacttaagtggaaacccgaaccttaatctcacagcaattccagactctcttcagcaaagggtaaacagcaaatctttaacactaattttgggtgaaaacctgactctgactcccaaaaaagagagtaaaaaggttcccatggttgctatcgcagcgtcagtggctggcgtgttcgctctgctcgttatcttagccatattttttgtcattaaaaggaaaaatgtgaaagctcataagtctccaggaccacccccattagtcactcccggtatagttaaaagtgagacaagatcatccaatccatcaatcataacaagggaacgcaagatcacgtatccagaggtactgaagatgactaataacttcgagagagttcttggcaaaggaggctttggaacagtgtatcatggaaacttggatggtgctgaagtggcagtgaaaatgctttctcattcatcagctcaaggttataaagagttcaaagcagaggttgaacttcttttaagagttcaccatagacatttggtgggacttgtgggttactgtgatgatggagacaacttggctctgatttatgaatatatggcaaatggagacctgagggagaatatgtcaggaaaacgtggaggcaatgtccttacctgggaaaacaggatgcaaatagctgtagaggctgcacaagggctggagtatctgcacaatggatgtaggcctcctatggtacatagagatgttaaaactactaacattttattgaatgagcggtgtggagcaaaactagccgactttgggctctcgagatctttcccaatcgatggcgaatgtcatgtttcgacagtggttgcgggtacacctggttacctagacccggagtactacagaacaaactggctaagcgagaagagtgacgtgtacagcttcggtgtagtgctattagagatagtcacaaaccagcctgtgatagataaaacccgggagagacctcacatcaatgactgggttgggttcatgctcactaaaggagacatcaagagcatcgttgacccgaaactgatgggggactatgatacaaacggtgcatggaagattgtggagctagctctggcctgtgtgaacccatcttcgaaccggagaccaacaatggcacacgttgtgatggagctaaacgactgtgtggccttagaaaatgcaaggcggcaaggtagtgaagagatgtactcaatgggttctgttgactatagtctctcttctacttctgactttgctcctggagccagataa

SEQ ID NO: 71423 - protein, 893 aa, Arabidopsis thaliana
  peptide (1)..(893): Ceres Seq. ID no. 3598390
MKSLHWFLHLLIIAFTVLRSVEAQNQAGFISLDCGLVPKETTYTEKSTNITYKSDVDYIDSGLVGKINDAYKTQFQQQVWAVRSFPVGQRNCYNVNLTANNKYLIRGTFVYGNYDGLNQFPSFDLHIGPNKWSSVKILGVTNTSMHEIIHVVPQDSLEVCLVKTGPTTPFISSLEVRPLNNESYLTQSGSLMLFARVYFPSSSSSFIRYDEDIHDRVWNSFTDDETVWISTDLPIDTSNSYDMPQSVMKTAAVPKNASEPWLLWWTLDENTAQSYVYMHFAEVQNLTANETREFNITYNGGLRWFSYLRPPNLSISTIFNPRAVSSSNGIFNFTFAMTGNSTLPPLLNALEIYTVVDILQLETNKDEGKCVSAMMNIKETYGLSKKISWQGDPCAPQLYRWEGLNCSYPDSEGSRIISLNLNGSELTGSITSDISKLTLLTVLDLSNNDLSGDIPTFFAEMKSLKLINLSGNPNLNLTAIPDSLQQRVNSKSLTLILGENLTLTPKKESKKVPMVAIAASVAGVFALLVILAIFFVIKRKNVKAHKSPGPPPLVTPGIVKSETRSSNPSIITRERKITYPEVLKMTNNFERVLGKGGFGTVYHGNLDGAEVAVKMLSHSSAQGYKEFKAEVELLLRVHHRHLVGLVGYCDDGDNLALIYEYMANGDLRENMSGKRGGNVLTWENRMQIAVEAAQGLEYLHNGCRPPMVHRDVKTTNILLNERCGAKLADFGLSRSFPIDGECHVSTVVAGTPGYLDPEYYRTNWLSEKSDVYSFGVVLLEIVTNQPVIDKTRERPHINDWVGFMLTKGDIKSIVDPKLMGDYDTNGAWKIVELALACVNPSSNRRPTMAHVVMELNDCVALENARRQGSEEMYSMGSVDYSLSSTSDFAPGAR

SEQ ID NO: 71424 - protein, 749 aa, Arabidopsis thaliana
  peptide (1)..(749): Ceres Seq. ID no. 3598391
MHEIIHVVPQDSLEVCLVKTGPTTPFISSLEVRPLNNESYLTQSGSLMLFARVYFPSSSSSFIRYDEDIHDRVWNSFTDDETVWISTDLPIDTSNSYDMPQSVMKTAAVPKNASEPWLLWWTLDENTAQSYVYMHFAEVQNLTANETREFNITYNGGLRWFSYLRPPNLSISTIFNPRAVSSSNGIFNFTFAMTGNSTLPPLLNALEIYTVVDILQLETNKDEGKCVSAMMNIKETYGLSKKISWQGDPCAPQLYRWEGLNCSYPDSEGSRIISLNLNGSELTGSITSDISKLTLLTVLDLSNNDLSGDIPTFFAEMKSLKLINLSGNPNLNLTAIPDSLQQRVNSKSLTLILGENLTLTPKKESKKVPMVAIAASVAGVFALLVILAIFFVIKRKNVKAHKSPGPPPLVTPGIVKSETRSSNPSIITRERKITYPEVLKMTNNFERVLGKGGFGTVYHGNLDGAEVAVKMLSHSSAQGYKEFKAEVELLLRVHHRHLVGLVGYCDDGDNLALIYEYMANGDLRENMSGKRGGNVLTWENRMQIAVEAAQGLEYLHNGCRPPMVHRDVKTTNILLNERCGAKLADFGLSRSFPIDGECHVSTVVAGTPGYLDPEYYRTNWLSEKSDVYSFGVVLLEIVTNQPVIDKTRERPHINDWVGFMLTKGDIKSIVDPKLMGDYDTNGAWKIVELALACVNPSSNRRPTMAHVVMELNDCVALENARRQGSEEMYSMGSVDYSLSSTSDFAPGAR

SEQ ID NO: 71425 - protein, 702 aa, Arabidopsis thaliana
  peptide (1)..(702): Ceres Seq. ID no. 3598392
MLFARVYFPSSSSSFIRYDEDIHDRVWNSFTDDETVWISTDLPIDTSNSYDMPQSVMKTAAVPKNASEPWLLWWTLDENTAQSYVYMHFAEVQNLTANETREFNITYNGGLRWFSYLRPPNLSISTIFNPRAVSSSNGIFNFTFAMTGNSTLPPLLNALEIYTVVDILQLETNKDEGKCVSAMMNIKETYGLSKKISWQGDPCAPQLYRWEGLNCSYPDSEGSRIISLNLNGSELTGSITSDISKLTLLTVLDLSNNDLSGDIPTFFAEMKSLKLINLSGNPNLNLTAIPDSLQQRVNSKSLTLILGENLTLTPKKESKKVPMVAIAASVAGVFALLVILAIFFVIKRKNVKAHKSPGPPPLVTPGIVKSETRSSNPSIITRERKITYPEVLKMTNNFERVLGKGGFGTVYHGNLDGAEVAVKMLSHSSAQGYKEFKAEVELLLRVHHRHLVGLVGYCDDGDNLALIYEYMANGDLRENMSGKRGGNVLTWENRMQIAVEAAQGLEYLHNGCRPPMVHRDVKTTNILLNERCGAKLADFGLSRSFPIDGECHVSTVVAGTPGYLDPEYYRTNWLSEKSDVYSFGVVLLEIVTNQPVIDKTRERPHINDWVGFMLTKGDIKSIVDPKLMGDYDTNGAWKIVELALACVNPSSNRRPTMAHVVMELNDCVALENARRQGSEEMYSMGSVDYSLSSTSDFAPGAR

SEQ ID NO: 71426 - DNA, 2568 bp, Arabidopsis thaliana
  misc_feature (1)..(2568): Ceres Seq. ID no. 3598409
  misc_feature (1)..(2568): Ortholog of  Ceres SEQ ID NO 13654989 as cited in SEQ ID NO 63117
  misc_feature (1)..(2568): Ortholog of  Ceres SEQ ID NO 13584744 as cited in SEQ ID NO 69137
atgaagactatgaatgggtttttgcttctctcgactatagcttttgccgtttttcacttagtccaagctcaatctcaatcaggttttatcagcttggattgtggactaattcctaaggacacaacctataccgagcagataacgaacataacatacatatcagacgcggattacatcgatagtggattaaccgaaaggatcagtgattcatacaagtcacagcttcagcaacagacttggaccttaagaagcttccctgaaggtcaaagaaattgttacaacttcaatctcaaagcgaatctcaaatatctgattagaggaacgtttgtgtatgggaattatgatggtttgaatcaaatgcctaagtttgatcttcatattggtcctaataaatggacttctgttatattggaaggagtagcaaatgctaccatcttcgagataattcatgtcttaacacaagaccgtctccaagtttgtcttgtcaaaacaggacaaacgacaccgtttatatcgtcgttggaacttcgtccgttgaacaatgatacttacgtcactcaaggtgggtcgttgatgtcctttgccagaatctactttccaaagactgcatacttcctcaggtattctgatgacttgtatgaccgagtttgggttccattcagccagaatgaaacagtgtcgttaagtaccaatctaccggttgatacaagtagcaattcctacaatgtgcctcaaaatgtggcgaattccgcaattattccggcggaagctactcatcctctcaacatatggtgggatctccaaaacatcaatgcaccgtcatatgtatacatgcattttgcagaaatccaaaatcttaaagctaatgacatcagagaattcaacattacatacaatggtggtcaggtttgggaaagttccattagacctcacaatctcagcatcactacaatctctagtccaacagctttaaattcttcagatgggtttttcaatttcacttttacaatgaccacaacctctactcttcctccacttatcaatgccctcgaggtttatacacttgtagaaaatttactgctcgagacatatcaagatgaagtttctgctatgatgaacatcaagaaaacatatggattgagtaaaaagataagttggcaaggagatccatgttctcctcaaatatatagatgggaaggtctgaattgcctttatttggactctgatcaacctctgatcacatcattagatttatcagataatgatttatccggagagattccagattttcttgctgatatgaagatgttgacactagtaaacttaaaaggaaacccgaagctcaacctcacagttccagattctattaagcataggataaacaacaaatctttaaaactaattatagatgaaaaccagagtagtgaaaaacacggtataaagtttcctttggttgctatcttagcatcagtggctggtgtgatcgcattactagctatctttaccatatgtgtcatttttaaaagagaaaaacagggaagtggtgaagctccaactagggttaatactgagatcagatcatcctatcaatcaatcgaaacaaaggatcgaaaatttacgtattccgagatactaaagatgacgaataactttgagagagttcttggtaaaggaggatatggaagagtgtattatggaaaattggatgatactgaagtagctgtgaaaatgctctttcattcctcagctgaacaagattataaacatttcaaagcagaggttgaactacttttaagagtccaccatagacatttggtgggacttgttggttactgtgatgatggagataactttgccttgatttatgaatacatggcaaatggagacttgaaggagaatatgtctggaaaccgcagtggacatgttctaagttgggaaaacagaatgcaaatagctatggaggcagcacaaggattggagtatctacataatggaagtagaccacctatggtccatagagatgtgaaaactactaacattttattgaatgagctgtatcaagcgaaactagctgattttgggctctctagatcttccccggtggatggtgaatcttatgtatcaacaatcgttgccggaacacctggttacttagaccctgagtactatagaacaaacttgttaagcgagaagactgatgtgtacagctttggggtagttttattagaaatcatcacaaaccagcctgtgattgatacaacccgcgagaaagcgcatattacagattgggttggatttaagctcatggaaggagacattaggaatattattgacccgaaactgattaaggaatttgatacaaacggtgtgtggaaggctgtggagttggctttgtcttgtgtaaaccctacgtcaaaccatagaccgacgatgccacatgttgtgatggagctaaaagagtgtctggactctgagattgccaggaaacaaggtagtcaagacatgttttctagagattctattgaattaaccttctctcctactggattctcacctggaccgaggtga

SEQ ID NO: 71427 - protein, 855 aa, Arabidopsis thaliana
  peptide (1)..(855): Ceres Seq. ID no. 3598410
MKTMNGFLLLSTIAFAVFHLVQAQSQSGFISLDCGLIPKDTTYTEQITNITYISDADYIDSGLTERISDSYKSQLQQQTWTLRSFPEGQRNCYNFNLKANLKYLIRGTFVYGNYDGLNQMPKFDLHIGPNKWTSVILEGVANATIFEIIHVLTQDRLQVCLVKTGQTTPFISSLELRPLNNDTYVTQGGSLMSFARIYFPKTAYFLRYSDDLYDRVWVPFSQNETVSLSTNLPVDTSSNSYNVPQNVANSAIIPAEATHPLNIWWDLQNINAPSYVYMHFAEIQNLKANDIREFNITYNGGQVWESSIRPHNLSITTISSPTALNSSDGFFNFTFTMTTTSTLPPLINALEVYTLVENLLLETYQDEVSAMMNIKKTYGLSKKISWQGDPCSPQIYRWEGLNCLYLDSDQPLITSLDLSDNDLSGEIPDFLADMKMLTLVNLKGNPKLNLTVPDSIKHRINNKSLKLIIDENQSSEKHGIKFPLVAILASVAGVIALLAIFTICVIFKREKQGSGEAPTRVNTEIRSSYQSIETKDRKFTYSEILKMTNNFERVLGKGGYGRVYYGKLDDTEVAVKMLFHSSAEQDYKHFKAEVELLLRVHHRHLVGLVGYCDDGDNFALIYEYMANGDLKENMSGNRSGHVLSWENRMQIAMEAAQGLEYLHNGSRPPMVHRDVKTTNILLNELYQAKLADFGLSRSSPVDGESYVSTIVAGTPGYLDPEYYRTNLLSEKTDVYSFGVVLLEIITNQPVIDTTREKAHITDWVGFKLMEGDIRNIIDPKLIKEFDTNGVWKAVELALSCVNPTSNHRPTMPHVVMELKECLDSEIARKQGSQDMFSRDSIELTFSPTGFSPGPR

SEQ ID NO: 71428 - protein, 852 aa, Arabidopsis thaliana
  peptide (1)..(852): Ceres Seq. ID no. 3598411
MNGFLLLSTIAFAVFHLVQAQSQSGFISLDCGLIPKDTTYTEQITNITYISDADYIDSGLTERISDSYKSQLQQQTWTLRSFPEGQRNCYNFNLKANLKYLIRGTFVYGNYDGLNQMPKFDLHIGPNKWTSVILEGVANATIFEIIHVLTQDRLQVCLVKTGQTTPFISSLELRPLNNDTYVTQGGSLMSFARIYFPKTAYFLRYSDDLYDRVWVPFSQNETVSLSTNLPVDTSSNSYNVPQNVANSAIIPAEATHPLNIWWDLQNINAPSYVYMHFAEIQNLKANDIREFNITYNGGQVWESSIRPHNLSITTISSPTALNSSDGFFNFTFTMTTTSTLPPLINALEVYTLVENLLLETYQDEVSAMMNIKKTYGLSKKISWQGDPCSPQIYRWEGLNCLYLDSDQPLITSLDLSDNDLSGEIPDFLADMKMLTLVNLKGNPKLNLTVPDSIKHRINNKSLKLIIDENQSSEKHGIKFPLVAILASVAGVIALLAIFTICVIFKREKQGSGEAPTRVNTEIRSSYQSIETKDRKFTYSEILKMTNNFERVLGKGGYGRVYYGKLDDTEVAVKMLFHSSAEQDYKHFKAEVELLLRVHHRHLVGLVGYCDDGDNFALIYEYMANGDLKENMSGNRSGHVLSWENRMQIAMEAAQGLEYLHNGSRPPMVHRDVKTTNILLNELYQAKLADFGLSRSSPVDGESYVSTIVAGTPGYLDPEYYRTNLLSEKTDVYSFGVVLLEIITNQPVIDTTREKAHITDWVGFKLMEGDIRNIIDPKLIKEFDTNGVWKAVELALSCVNPTSNHRPTMPHVVMELKECLDSEIARKQGSQDMFSRDSIELTFSPTGFSPGPR

SEQ ID NO: 71429 - protein, 736 aa, Arabidopsis thaliana
  peptide (1)..(736): Ceres Seq. ID no. 3598412
MPKFDLHIGPNKWTSVILEGVANATIFEIIHVLTQDRLQVCLVKTGQTTPFISSLELRPLNNDTYVTQGGSLMSFARIYFPKTAYFLRYSDDLYDRVWVPFSQNETVSLSTNLPVDTSSNSYNVPQNVANSAIIPAEATHPLNIWWDLQNINAPSYVYMHFAEIQNLKANDIREFNITYNGGQVWESSIRPHNLSITTISSPTALNSSDGFFNFTFTMTTTSTLPPLINALEVYTLVENLLLETYQDEVSAMMNIKKTYGLSKKISWQGDPCSPQIYRWEGLNCLYLDSDQPLITSLDLSDNDLSGEIPDFLADMKMLTLVNLKGNPKLNLTVPDSIKHRINNKSLKLIIDENQSSEKHGIKFPLVAILASVAGVIALLAIFTICVIFKREKQGSGEAPTRVNTEIRSSYQSIETKDRKFTYSEILKMTNNFERVLGKGGYGRVYYGKLDDTEVAVKMLFHSSAEQDYKHFKAEVELLLRVHHRHLVGLVGYCDDGDNFALIYEYMANGDLKENMSGNRSGHVLSWENRMQIAMEAAQGLEYLHNGSRPPMVHRDVKTTNILLNELYQAKLADFGLSRSSPVDGESYVSTIVAGTPGYLDPEYYRTNLLSEKTDVYSFGVVLLEIITNQPVIDTTREKAHITDWVGFKLMEGDIRNIIDPKLIKEFDTNGVWKAVELALSCVNPTSNHRPTMPHVVMELKECLDSEIARKQGSQDMFSRDSIELTFSPTGFSPGPR

SEQ ID NO: 71430 - DNA, 1479 bp, Arabidopsis thaliana
  misc_feature (1)..(1479): Ceres Seq. ID no. 3598783
  misc_feature (1)..(1479): Ortholog of  Ceres SEQ ID NO 13597574 as cited in SEQ ID NO 64677
  misc_feature (1)..(1479): Ortholog of  Ceres SEQ ID NO 12617417 as cited in SEQ ID NO 65089
  misc_feature (1)..(1479): Ortholog of  Ceres SEQ ID NO 13596180 as cited in SEQ ID NO 67941
  misc_feature (1)..(1479): Ortholog of  Ceres SEQ ID NO 13591190 as cited in SEQ ID NO 68044
  misc_feature (1)..(1479): Ortholog of  Ceres SEQ ID NO 13595961 as cited in SEQ ID NO 68223
atggccgtttcatcgtcgcatcatgcggttctcttcccttacatgtcaaaaggccacacgattcctctcctccaattcgcccgtctcctcctccgtcaccgccgtatcgtctccgtagacgacgaagaaccaaccatttccgtcaccgtcttcaccaccccaaaaaaccaaccattcgtctcaaacttcctctctgacgtcgcatcatctatcaaagtaatctccctccctttccctgaaaacatcgccggaatccctcccggcgtcgagagcaccgacatgctcccttccatatcactttacgtgcccttcacgcgcgcaaccaaatctctccagcctttcttcgaagcagaactcaagaatcttgagaaagtttctttcatggtctccgatggattcttatggtggacatcggaatccgccgctaaatttgagatcccgagacttgccttctacggcatgaactcctacgcatcggctatgtgctccgccatttcggtacacgagctctttaccaaaccggaaagtgttaaatctgatactgaaccggttactgtaccggattttccatggatatgtgttaagaagtgtgagttcgatccggttttgaccgaaccggatcaatcggatccagcgttcgagctactcattgaccatcttatgtccaccaagaaaagccgtggagttatagtgaacagcttttacgagctcgagtcaacgttcgttgactaccggctccgtgataacgatgaaccaaaaccgtggtgtgttgggcctttgtgtttggtaaatcctccaaaaccggagagtgataaaccggattggattcattggttggaccggaaactagaggaaagatgtccggttatgtatgtggcgtttggaacgcaggctgagatatcgaacgagcagctcaaggaaatagcattagggttggaagattccaaggtcaatttcttgtgggtcacgagaaaggacttggaagaagtaactggaggattagggttcgaaaagagagtgaaagagcatgggatgattgtgagagattgggtagaccaatgggagatattgtcacataaaagtgtcaaagggtttttgagtcattgtggatggaactcggcgcaagagagtatttgcgctggggttccactactcgcttggccaatgatggcagagcagccactcaatgcgaagttggtagtggaggagctaaagatcggagtaagaatcgaaacagaagatgtaagtgtgaaaggattcgtgacaagagaagaacttagtcgaaaggttaaacaattgatggagggagagatggggaagacaacgatgaagaatgtaaaagagtatgcgaaaatggcgaaaaaagctatggctcaagggactggttcgtcttggaagagtttggattcgcttctggaagagctttgtaagagtagagagccagacggtgttaataagttgtcaagttctgatgcttag

SEQ ID NO: 71431 - protein, 492 aa, Arabidopsis thaliana
  peptide (1)..(492): Ceres Seq. ID no. 3598784
MAVSSSHHAVLFPYMSKGHTIPLLQFARLLLRHRRIVSVDDEEPTISVTVFTTPKNQPFVSNFLSDVASSIKVISLPFPENIAGIPPGVESTDMLPSISLYVPFTRATKSLQPFFEAELKNLEKVSFMVSDGFLWWTSESAAKFEIPRLAFYGMNSYASAMCSAISVHELFTKPESVKSDTEPVTVPDFPWICVKKCEFDPVLTEPDQSDPAFELLIDHLMSTKKSRGVIVNSFYELESTFVDYRLRDNDEPKPWCVGPLCLVNPPKPESDKPDWIHWLDRKLEERCPVMYVAFGTQAEISNEQLKEIALGLEDSKVNFLWVTRKDLEEVTGGLGFEKRVKEHGMIVRDWVDQWEILSHKSVKGFLSHCGWNSAQESICAGVPLLAWPMMAEQPLNAKLVVEELKIGVRIETEDVSVKGFVTREELSRKVKQLMEGEMGKTTMKNVKEYAKMAKKAMAQGTGSSWKSLDSLLEELCKSREPDGVNKLSSSDA

SEQ ID NO: 71432 - protein, 478 aa, Arabidopsis thaliana
  peptide (1)..(478): Ceres Seq. ID no. 3598785
MSKGHTIPLLQFARLLLRHRRIVSVDDEEPTISVTVFTTPKNQPFVSNFLSDVASSIKVISLPFPENIAGIPPGVESTDMLPSISLYVPFTRATKSLQPFFEAELKNLEKVSFMVSDGFLWWTSESAAKFEIPRLAFYGMNSYASAMCSAISVHELFTKPESVKSDTEPVTVPDFPWICVKKCEFDPVLTEPDQSDPAFELLIDHLMSTKKSRGVIVNSFYELESTFVDYRLRDNDEPKPWCVGPLCLVNPPKPESDKPDWIHWLDRKLEERCPVMYVAFGTQAEISNEQLKEIALGLEDSKVNFLWVTRKDLEEVTGGLGFEKRVKEHGMIVRDWVDQWEILSHKSVKGFLSHCGWNSAQESICAGVPLLAWPMMAEQPLNAKLVVEELKIGVRIETEDVSVKGFVTREELSRKVKQLMEGEMGKTTMKNVKEYAKMAKKAMAQGTGSSWKSLDSLLEELCKSREPDGVNKLSSSDA

SEQ ID NO: 71433 - protein, 399 aa, Arabidopsis thaliana
  peptide (1)..(399): Ceres Seq. ID no. 3598786
MLPSISLYVPFTRATKSLQPFFEAELKNLEKVSFMVSDGFLWWTSESAAKFEIPRLAFYGMNSYASAMCSAISVHELFTKPESVKSDTEPVTVPDFPWICVKKCEFDPVLTEPDQSDPAFELLIDHLMSTKKSRGVIVNSFYELESTFVDYRLRDNDEPKPWCVGPLCLVNPPKPESDKPDWIHWLDRKLEERCPVMYVAFGTQAEISNEQLKEIALGLEDSKVNFLWVTRKDLEEVTGGLGFEKRVKEHGMIVRDWVDQWEILSHKSVKGFLSHCGWNSAQESICAGVPLLAWPMMAEQPLNAKLVVEELKIGVRIETEDVSVKGFVTREELSRKVKQLMEGEMGKTTMKNVKEYAKMAKKAMAQGTGSSWKSLDSLLEELCKSREPDGVNKLSSSDA

SEQ ID NO: 71434 - DNA, 2556 bp, Arabidopsis thaliana
  misc_feature (1)..(2556): Ceres Seq. ID no. 3599601
  misc_feature (1)..(2556): Ortholog of  Ceres SEQ ID NO 13654989 as cited in SEQ ID NO 63117
atggaggatcgtcatcgttatctttttttcatatttgccattatacattatgttcaggctcaacaaggattcatcagtttggattgcgggttgccgagtaacgagcctccatatattgaaccggtaaccggattagtattctcatcggatgcggatcacatccctagtggaataagcggtagaatccagaagaatctggaagcagtacacataaagccgtatttgtttctgagatactttccagatgggctacgaaattgctatactctagatgtccttcagaaccgaagatacatgatcaaagctgtgtttgtgtatggaaattacgatggttataatgattatccgagttttgatctgtatctaggtcctaataagtgggtaagagttgacttggaaggaaaggtcaatggcagtgttgaagagattattcacataccaagttcaaactctctgcagatttgtcttgtcaagacaggtaattctttgccgttcatatccgccctggaactgaggcttttgagaaacgatacttatgttgtccaagacgtttccttgaagcatttatttcggaggtactatagacagtcagatcggttaatccggtatcctgacgatgtctatgatcgtgtttggtccccattcttcttaccggaatggacgcagataactaccagtttagatgtgaataactctaacaactacgagccaccaaaagcagcattaacatcagctgccacacctggagacaatggaacgcgattgaccattatttggactttggataaccctgatgagcaaattcacctgtatgttcactttgccgagcttgaacctgttggggaaaacactgacgaggccttgagaactttatttacaaggaccttttactttgtggtgaatggaaagattagttatgatgagagtattactcctttagacttggctgtaagtactgtagagactgtggtgaacaaatgcgatggcggtaactgcagtttgcagctggtacgcagcgaagcgtctccgggagtacgtgtacctctggttaatgctatggaggcattcactgcaatcaagtttccacattctgaaacaaatcctgatgatgtatggtatatctttaactctatgacagttatatctatcaaggttatccaagctacctatgaactgagcagagtcgactggcaaggagatccgtgtcttccccagcagtttttgtggactggcctaaactgcagctacatgaacatgtctacgtcaccaagaatcatttccttggacttgtcgaataacaagttgaccggaggtgtgcctgagtttctagccaacatgaagtcactgttgttcataaacctaagcaataacaatcttgttggttccattcctcaagcgcttcttgaccgaaaaaatctgaagttggagtttgaaggaaatccaaagctttgcgccacaggtccgtgtaacagttcaagtggaaataaagaaaccacagtcatagcacctgttgctgctgcaatagccatttttatagctgttttggttctcattattgttttcataaagaaaaggccatcaagtataagagctctacatccgtcacgggctaatttatctctggaaaataaaaaacgaaggatcacatattcagagatattgttgatgacaaataactttgaaagagttattggtgaaggagggtttggggtcgtctatcatggttatttgaatgatagtgagcaagtggctgttaaagtgctctctccgtcctcatctcaaggctataaagaattcaaagcagaggttgaacttctccttagagttcaccacataaatttggtaagccttgttggatattgtgatgaacaagcacacttagccctcatctacgagtacatggctaatggagacttaaaatcgcatctttcaggaaaacatggggactgtgttttaaaatgggaaaacagattaagcatagctgttgaaaccgcactaggattggagtacttgcatagtggatgcaaaccactaatggttcacagagatgtcaaaagcatgaatatactgttggatgagcacttccaagctaaactagcggatttcggactgtctagatctttttctgttggagaggaaagccatgtgtcgactggtgttgtaggcactcctggatacttagatcctgagtattacagaacatatcgcttgaccgaaaagagtgatgtctatagttttgggatcgtgttattggagataatcacaaatcaacccgtacttgagcaagctaacgaaaatcgacacatcgcagaacgtgtaaggactatgcttacaagaagtgatattagcaccattgttgatcctaacctcattggcgagtatgattctggttctgtgcggaaagctcttaaactagcgatgtcgtgtgtggatccatctccggttgcaagaccagacatgtcacatgttgttcaggagcttaaacagtgtatcaaatctgaaaacctgagactgaggacaggattgaaccaagtcatagactcgaaaagttcctag

SEQ ID NO: 71435 - protein, 851 aa, Arabidopsis thaliana
  peptide (1)..(851): Ceres Seq. ID no. 3599602
MEDRHRYLFFIFAIIHYVQAQQGFISLDCGLPSNEPPYIEPVTGLVFSSDADHIPSGISGRIQKNLEAVHIKPYLFLRYFPDGLRNCYTLDVLQNRRYMIKAVFVYGNYDGYNDYPSFDLYLGPNKWVRVDLEGKVNGSVEEIIHIPSSNSLQICLVKTGNSLPFISALELRLLRNDTYVVQDVSLKHLFRRYYRQSDRLIRYPDDVYDRVWSPFFLPEWTQITTSLDVNNSNNYEPPKAALTSAATPGDNGTRLTIIWTLDNPDEQIHLYVHFAELEPVGENTDEALRTLFTRTFYFVVNGKISYDESITPLDLAVSTVETVVNKCDGGNCSLQLVRSEASPGVRVPLVNAMEAFTAIKFPHSETNPDDVWYIFNSMTVISIKVIQATYELSRVDWQGDPCLPQQFLWTGLNCSYMNMSTSPRIISLDLSNNKLTGGVPEFLANMKSLLFINLSNNNLVGSIPQALLDRKNLKLEFEGNPKLCATGPCNSSSGNKETTVIAPVAAAIAIFIAVLVLIIVFIKKRPSSIRALHPSRANLSLENKKRRITYSEILLMTNNFERVIGEGGFGVVYHGYLNDSEQVAVKVLSPSSSQGYKEFKAEVELLLRVHHINLVSLVGYCDEQAHLALIYEYMANGDLKSHLSGKHGDCVLKWENRLSIAVETALGLEYLHSGCKPLMVHRDVKSMNILLDEHFQAKLADFGLSRSFSVGEESHVSTGVVGTPGYLDPEYYRTYRLTEKSDVYSFGIVLLEIITNQPVLEQANENRHIAERVRTMLTRSDISTIVDPNLIGEYDSGSVRKALKLAMSCVDPSPVARPDMSHVVQELKQCIKSENLRLRTGLNQVIDSKSS

SEQ ID NO: 71436 - protein, 753 aa, Arabidopsis thaliana
  peptide (1)..(753): Ceres Seq. ID no. 3599603
MIKAVFVYGNYDGYNDYPSFDLYLGPNKWVRVDLEGKVNGSVEEIIHIPSSNSLQICLVKTGNSLPFISALELRLLRNDTYVVQDVSLKHLFRRYYRQSDRLIRYPDDVYDRVWSPFFLPEWTQITTSLDVNNSNNYEPPKAALTSAATPGDNGTRLTIIWTLDNPDEQIHLYVHFAELEPVGENTDEALRTLFTRTFYFVVNGKISYDESITPLDLAVSTVETVVNKCDGGNCSLQLVRSEASPGVRVPLVNAMEAFTAIKFPHSETNPDDVWYIFNSMTVISIKVIQATYELSRVDWQGDPCLPQQFLWTGLNCSYMNMSTSPRIISLDLSNNKLTGGVPEFLANMKSLLFINLSNNNLVGSIPQALLDRKNLKLEFEGNPKLCATGPCNSSSGNKETTVIAPVAAAIAIFIAVLVLIIVFIKKRPSSIRALHPSRANLSLENKKRRITYSEILLMTNNFERVIGEGGFGVVYHGYLNDSEQVAVKVLSPSSSQGYKEFKAEVELLLRVHHINLVSLVGYCDEQAHLALIYEYMANGDLKSHLSGKHGDCVLKWENRLSIAVETALGLEYLHSGCKPLMVHRDVKSMNILLDEHFQAKLADFGLSRSFSVGEESHVSTGVVGTPGYLDPEYYRTYRLTEKSDVYSFGIVLLEIITNQPVLEQANENRHIAERVRTMLTRSDISTIVDPNLIGEYDSGSVRKALKLAMSCVDPSPVARPDMSHVVQELKQCIKSENLRLRTGLNQVIDSKSS

SEQ ID NO: 71437 - protein, 499 aa, Arabidopsis thaliana
  peptide (1)..(499): Ceres Seq. ID no. 3599604
MEAFTAIKFPHSETNPDDVWYIFNSMTVISIKVIQATYELSRVDWQGDPCLPQQFLWTGLNCSYMNMSTSPRIISLDLSNNKLTGGVPEFLANMKSLLFINLSNNNLVGSIPQALLDRKNLKLEFEGNPKLCATGPCNSSSGNKETTVIAPVAAAIAIFIAVLVLIIVFIKKRPSSIRALHPSRANLSLENKKRRITYSEILLMTNNFERVIGEGGFGVVYHGYLNDSEQVAVKVLSPSSSQGYKEFKAEVELLLRVHHINLVSLVGYCDEQAHLALIYEYMANGDLKSHLSGKHGDCVLKWENRLSIAVETALGLEYLHSGCKPLMVHRDVKSMNILLDEHFQAKLADFGLSRSFSVGEESHVSTGVVGTPGYLDPEYYRTYRLTEKSDVYSFGIVLLEIITNQPVLEQANENRHIAERVRTMLTRSDISTIVDPNLIGEYDSGSVRKALKLAMSCVDPSPVARPDMSHVVQELKQCIKSENLRLRTGLNQVIDSKSS

SEQ ID NO: 71438 - DNA, 936 bp, Arabidopsis thaliana
  misc_feature (1)..(936): Ceres Seq. ID no. 3599609
  misc_feature (1)..(936): Ortholog of  Ceres SEQ ID NO 13596891 as cited in SEQ ID NO 62868
  misc_feature (1)..(936): Ortholog of  Ceres SEQ ID NO 12617235 as cited in SEQ ID NO 63990
  misc_feature (1)..(936): Ortholog of  Ceres SEQ ID NO 13655371 as cited in SEQ ID NO 68945
atgacgacggcgacgaacaagcaagttatattgaaagactacgtgagtggtttccctacggaatccaatttcgatttcactaccaccaccgtcgaacttagggttccggaaggtactaactctgttctggtgaagaacctatacttgtcatgcgatccttacatgagaatttgcatggggaaacctaatccttccactgctgctcttgctcaagcttacactcccggccaatgttatcacttgactcacgagcatttcaagatccaacatactgatgttccattgtcttactacactggacttctcggtatgcctggtatgaccgcatatgttgggttttatgagatctgttctccaaagaaaggagagacagtttatgtgtcagctgcatctggtgctgttggtcagcttgtgggacaatttgctaagatgatgggctgttatgttgttggaagtgctggtagcaaagaaaaggttgatctcctgaagaccaagtttgggtttgattatgcatttaactacaaggaagaacctgaccttagtgctgcgctcaaaaggtgtttccctaatggcattgacatatactttgagaatgtaggaggcaaaatgctagatgcagtgcttatgaacatgaacatgcacgggcgtatcgctgtctgtggaatgatctcacagtacaatcttgagaaccaagaaggtgtacacaacctatccaacataatctacaaacgaatccgcattcaaggctttgtagtgtctgatttctacgacgaatactcaaagttcttggagtttctgcatccgcacattaaagaagggaagataacgtacgtggaagatgtagctgatgggctcgagaaaggtcctgaagctctcgtgggactcttccatggtaagaatgttgggaaacaagttgttgttattgctcgtgaatga

SEQ ID NO: 71439 - protein, 311 aa, Arabidopsis thaliana
  peptide (1)..(311): Ceres Seq. ID no. 3599610
MTTATNKQVILKDYVSGFPTESNFDFTTTTVELRVPEGTNSVLVKNLYLSCDPYMRICMGKPNPSTAALAQAYTPGQCYHLTHEHFKIQHTDVPLSYYTGLLGMPGMTAYVGFYEICSPKKGETVYVSAASGAVGQLVGQFAKMMGCYVVGSAGSKEKVDLLKTKFGFDYAFNYKEEPDLSAALKRCFPNGIDIYFENVGGKMLDAVLMNMNMHGRIAVCGMISQYNLENQEGVHNLSNIIYKRIRIQGFVVSDFYDEYSKFLEFLHPHIKEGKITYVEDVADGLEKGPEALVGLFHGKNVGKQVVVIARE

SEQ ID NO: 71440 - protein, 257 aa, Arabidopsis thaliana
  peptide (1)..(257): Ceres Seq. ID no. 3599611
MRICMGKPNPSTAALAQAYTPGQCYHLTHEHFKIQHTDVPLSYYTGLLGMPGMTAYVGFYEICSPKKGETVYVSAASGAVGQLVGQFAKMMGCYVVGSAGSKEKVDLLKTKFGFDYAFNYKEEPDLSAALKRCFPNGIDIYFENVGGKMLDAVLMNMNMHGRIAVCGMISQYNLENQEGVHNLSNIIYKRIRIQGFVVSDFYDEYSKFLEFLHPHIKEGKITYVEDVADGLEKGPEALVGLFHGKNVGKQVVVIARE

SEQ ID NO: 71441 - protein, 253 aa, Arabidopsis thaliana
  peptide (1)..(253): Ceres Seq. ID no. 3599612
MGKPNPSTAALAQAYTPGQCYHLTHEHFKIQHTDVPLSYYTGLLGMPGMTAYVGFYEICSPKKGETVYVSAASGAVGQLVGQFAKMMGCYVVGSAGSKEKVDLLKTKFGFDYAFNYKEEPDLSAALKRCFPNGIDIYFENVGGKMLDAVLMNMNMHGRIAVCGMISQYNLENQEGVHNLSNIIYKRIRIQGFVVSDFYDEYSKFLEFLHPHIKEGKITYVEDVADGLEKGPEALVGLFHGKNVGKQVVVIARE

SEQ ID NO: 71442 - DNA, 1323 bp, Arabidopsis thaliana
  misc_feature (1)..(1323): Ceres Seq. ID no. 3599621
  misc_feature (1)..(1323): Ortholog of  Ceres SEQ ID NO 15175785 as cited in SEQ ID NO 56970
atggcgcttgatcctgagcagcagcaaccaatctcctctgtttccagagagtcatctggtgagatcagcccagaaagggagcctcttattaaagagaatcatgtcccagaaaactactctgtcgttgccgccattctcccgtttttatttccagctctcggaggactgctttatggttatgaaattggtgcaacttcttgtgcaaccatttcacttcaggagcctatgactttgctatcttactatgctgttcccttttctgcagtcgccttcattaagtggaatttcatgaccagtggctcactttacggtgcattatttggctcaattgtggcttttactatcgctgacgttataggaagaagaaaggagctgattttggctgcattattgtatctcgttggagcccttgtgactgcactagccccaacctattccgttctgataattggacgggttatttatggggtctcagttggactggcaatgcatgcggctccgatgtacattgcagagactgctccaagtccgatacgtggacagctggtatcattaaaggaattcttcatagtccttgggatggttggaggttatggaatcggtagtcttacagtcaatgttcattctggttggcgatacatgtatgcaacaagtgtccctttggcagttattatgggaattgggatgtggtggctcccagcatcccctaggtggcttttgttgcgcgtcatacaggggaaagggaatgtggagaaccaacgagaggctgcaatcaaatctctctgctgccttagaggccctgcttttgttgattcagctgctgaacaagtaaatgagattttggctgaactaacttttgtgggcgaggataaagaagtcacatttggtgaattatttcaagggaagtgcttgaaagctctcatcataggaggaggtctagtcttgtttcagcagttgattatgacaggagtagctgttgtagttatcgacagacttggaaggagacctttacttcttggtggagttggtggcatgcgcctcaccagttgttgctgtagttgcactgctgctttatgtgggctgttaccagagatatttccccttaaactaagaggtcgaggtctcagtctagcagtgcttgtgaattttggtgcaaacgcacttgtgacatttgcgttttcacccctaaaggaactgctgggagctgggatactgttttgtgggtttggtgtgatatgtgtattgtctctggtattcatattcttcattgtgccagagacaaagggtctcactcttgaggaaattgaagccaaatgtctctaa

SEQ ID NO: 71443 - protein, 440 aa, Arabidopsis thaliana
  peptide (1)..(440): Ceres Seq. ID no. 3599622
MALDPEQQQPISSVSRESSGEISPEREPLIKENHVPENYSVVAAILPFLFPALGGLLYGYEIGATSCATISLQEPMTLLSYYAVPFSAVAFIKWNFMTSGSLYGALFGSIVAFTIADVIGRRKELILAALLYLVGALVTALAPTYSVLIIGRVIYGVSVGLAMHAAPMYIAETAPSPIRGQLVSLKEFFIVLGMVGGYGIGSLTVNVHSGWRYMYATSVPLAVIMGIGMWWLPASPRWLLLRVIQGKGNVENQREAAIKSLCCLRGPAFVDSAAEQVNEILAELTFVGEDKEVTFGELFQGKCLKALIIGGGLVLFQQLIMTGVAVVVIDRLGRRPLLLGGVGGMRLTSCCCSCTAALCGLLPEIFPLKLRGRGLSLAVLVNFGANALVTFAFSPLKELLGAGILFCGFGVICVLSLVFIFFIVPETKGLTLEEIEAKCL

SEQ ID NO: 71444 - protein, 365 aa, Arabidopsis thaliana
  peptide (1)..(365): Ceres Seq. ID no. 3599623
MTLLSYYAVPFSAVAFIKWNFMTSGSLYGALFGSIVAFTIADVIGRRKELILAALLYLVGALVTALAPTYSVLIIGRVIYGVSVGLAMHAAPMYIAETAPSPIRGQLVSLKEFFIVLGMVGGYGIGSLTVNVHSGWRYMYATSVPLAVIMGIGMWWLPASPRWLLLRVIQGKGNVENQREAAIKSLCCLRGPAFVDSAAEQVNEILAELTFVGEDKEVTFGELFQGKCLKALIIGGGLVLFQQLIMTGVAVVVIDRLGRRPLLLGGVGGMRLTSCCCSCTAALCGLLPEIFPLKLRGRGLSLAVLVNFGANALVTFAFSPLKELLGAGILFCGFGVICVLSLVFIFFIVPETKGLTLEEIEAKCL

SEQ ID NO: 71445 - protein, 344 aa, Arabidopsis thaliana
  peptide (1)..(344): Ceres Seq. ID no. 3599624
MTSGSLYGALFGSIVAFTIADVIGRRKELILAALLYLVGALVTALAPTYSVLIIGRVIYGVSVGLAMHAAPMYIAETAPSPIRGQLVSLKEFFIVLGMVGGYGIGSLTVNVHSGWRYMYATSVPLAVIMGIGMWWLPASPRWLLLRVIQGKGNVENQREAAIKSLCCLRGPAFVDSAAEQVNEILAELTFVGEDKEVTFGELFQGKCLKALIIGGGLVLFQQLIMTGVAVVVIDRLGRRPLLLGGVGGMRLTSCCCSCTAALCGLLPEIFPLKLRGRGLSLAVLVNFGANALVTFAFSPLKELLGAGILFCGFGVICVLSLVFIFFIVPETKGLTLEEIEAKCL

SEQ ID NO: 71446 - DNA, 1803 bp, Arabidopsis thaliana
  misc_feature (1)..(1803): Ceres Seq. ID no. 3599680
  misc_feature (1)..(1803): Ortholog of  Ceres SEQ ID NO 15226186 as cited in SEQ ID NO 0
atggcggccaacaattttgcgacgaagctaagcagaaacaccaatagaattaccgtaatcttggtctacgcattccttgaatggcttctcatgttctttatcttcctcaattcctttttcacttactttatcgtcaaattcgcctctttcttcggtcttaagcaaaagagcttagcggataaaccataccctaattacttgcttctcaagtcatcaatttgggggaaaactttgggtgacagagaagatggaggattgatcttagagatgatcgatgatgataaatttggagatgggtttgagatagatagagaatcttatcccttagggttcttcagagataaagcagaagaaggaaagaagcaagaccagcagcaaaatggtgaagtgatttcagatgttgagagttatggattaagcttgagagaagtgtctgaagaggatgggttaagatctatcatcagcaataattctcctgggaacgaagctaaatcaagagtttcagaggatgaacaaaggaatgatgacacaagcaatgttgccacatatggggaagatcaaatttcagggcgtgtagaagaaaaagaagaagaaacaggagtagcagatttgttgtatgaccagtttgagagcaagaatttcactggtagccaaatcgaagaagaagaagaagatagagaagaaacgactaaggagcttgatccggaaactccaacttcagtcagtactttgtttaacaagaaacttcattttcttgctagaaatgagtatgcagctgctgaagatgcaggagatgggaatgtattagtgagtgagatggacggtggcgatcctttaaggactattgaaaggttgagagagacagtgagagcagaacaagaagcactgagagatttatatgcagagctggaagaagaaagaagcgcgtctgcaatatcggctaaccagacaatggcaatgatcacgaggctacaagaagagaaagcgaaagttcagatggaagcgttgcagtatcagagaatgatggaggaacaagccgagtatgatcaagaagccttgcagctattgaatcatttgatggtgaaacgagagaaagagaaggaacaactccagagagaacttgaggtttatcgggcaaaggttttggagtatgaatcgaaagctaagaacaagatcatcgttgtggaaaacgattgtgaggctgatgatgatgataaagaggaggagaatagagaagaggataattcttctgagatggatgtggatttggagaagataacattagattgcgtacaacatatgagcatgcttggtgaatctttatcagagtttgaggaagagaggttagtgattttggatcagcttaaggtgttagaggataggctagtaacaatgcaggacaaggaatctgctgaggatccgggagaattcagcaatagttatgaagaagcgagtaatggacatggaggactaacaatggcatcaatggcaaagagtctgctacctcttctagacgcagcagagaacgaatcagaagacgggtctcaaggactaccagaatcagatgaaaagaactttggttcggacagtgagaaactggagataatcaaacaagttgatagtgtctatgagaggttacaggagctggaaacagatggagagtttctgaaaaactgtatgagttcagcgaagaaaggtgacaaaggaacagatattcttaaagatatattgcaacatctccgcgatctcagaaccattgaactcactaacacaattgaaaaccagacgacacaggaagagtga

SEQ ID NO: 71447 - protein, 600 aa, Arabidopsis thaliana
  peptide (1)..(600): Ceres Seq. ID no. 3599681
MAANNFATKLSRNTNRITVILVYAFLEWLLMFFIFLNSFFTYFIVKFASFFGLKQKSLADKPYPNYLLLKSSIWGKTLGDREDGGLILEMIDDDKFGDGFEIDRESYPLGFFRDKAEEGKKQDQQQNGEVISDVESYGLSLREVSEEDGLRSIISNNSPGNEAKSRVSEDEQRNDDTSNVATYGEDQISGRVEEKEEETGVADLLYDQFESKNFTGSQIEEEEEDREETTKELDPETPTSVSTLFNKKLHFLARNEYAAAEDAGDGNVLVSEMDGGDPLRTIERLRETVRAEQEALRDLYAELEEERSASAISANQTMAMITRLQEEKAKVQMEALQYQRMMEEQAEYDQEALQLLNHLMVKREKEKEQLQRELEVYRAKVLEYESKAKNKIIVVENDCEADDDDKEEENREEDNSSEMDVDLEKITLDCVQHMSMLGESLSEFEEERLVILDQLKVLEDRLVTMQDKESAEDPGEFSNSYEEASNGHGGLTMASMAKSLLPLLDAAENESEDGSQGLPESDEKNFGSDSEKLEIIKQVDSVYERLQELETDGEFLKNCMSSAKKGDKGTDILKDILQHLRDLRTIELTNTIENQTTQEE

SEQ ID NO: 71448 - protein, 570 aa, Arabidopsis thaliana
  peptide (1)..(570): Ceres Seq. ID no. 3599682
MFFIFLNSFFTYFIVKFASFFGLKQKSLADKPYPNYLLLKSSIWGKTLGDREDGGLILEMIDDDKFGDGFEIDRESYPLGFFRDKAEEGKKQDQQQNGEVISDVESYGLSLREVSEEDGLRSIISNNSPGNEAKSRVSEDEQRNDDTSNVATYGEDQISGRVEEKEEETGVADLLYDQFESKNFTGSQIEEEEEDREETTKELDPETPTSVSTLFNKKLHFLARNEYAAAEDAGDGNVLVSEMDGGDPLRTIERLRETVRAEQEALRDLYAELEEERSASAISANQTMAMITRLQEEKAKVQMEALQYQRMMEEQAEYDQEALQLLNHLMVKREKEKEQLQRELEVYRAKVLEYESKAKNKIIVVENDCEADDDDKEEENREEDNSSEMDVDLEKITLDCVQHMSMLGESLSEFEEERLVILDQLKVLEDRLVTMQDKESAEDPGEFSNSYEEASNGHGGLTMASMAKSLLPLLDAAENESEDGSQGLPESDEKNFGSDSEKLEIIKQVDSVYERLQELETDGEFLKNCMSSAKKGDKGTDILKDILQHLRDLRTIELTNTIENQTTQEE

SEQ ID NO: 71449 - protein, 511 aa, Arabidopsis thaliana
  peptide (1)..(511): Ceres Seq. ID no. 3599683
MIDDDKFGDGFEIDRESYPLGFFRDKAEEGKKQDQQQNGEVISDVESYGLSLREVSEEDGLRSIISNNSPGNEAKSRVSEDEQRNDDTSNVATYGEDQISGRVEEKEEETGVADLLYDQFESKNFTGSQIEEEEEDREETTKELDPETPTSVSTLFNKKLHFLARNEYAAAEDAGDGNVLVSEMDGGDPLRTIERLRETVRAEQEALRDLYAELEEERSASAISANQTMAMITRLQEEKAKVQMEALQYQRMMEEQAEYDQEALQLLNHLMVKREKEKEQLQRELEVYRAKVLEYESKAKNKIIVVENDCEADDDDKEEENREEDNSSEMDVDLEKITLDCVQHMSMLGESLSEFEEERLVILDQLKVLEDRLVTMQDKESAEDPGEFSNSYEEASNGHGGLTMASMAKSLLPLLDAAENESEDGSQGLPESDEKNFGSDSEKLEIIKQVDSVYERLQELETDGEFLKNCMSSAKKGDKGTDILKDILQHLRDLRTIELTNTIENQTTQEE

SEQ ID NO: 71450 - DNA, 1461 bp, Arabidopsis thaliana
  misc_feature (1)..(1461): Ceres Seq. ID no. 3599727
  misc_feature (1)..(1461): Ortholog of  Ceres SEQ ID NO 13594345 as cited in SEQ ID NO 58043
  misc_feature (1)..(1461): Ortholog of  Ceres SEQ ID NO 13597574 as cited in SEQ ID NO 64677
  misc_feature (1)..(1461): Ortholog of  Ceres SEQ ID NO 12617417 as cited in SEQ ID NO 65089
  misc_feature (1)..(1461): Ortholog of  Ceres SEQ ID NO 13596180 as cited in SEQ ID NO 67941
  misc_feature (1)..(1461): Ortholog of  Ceres SEQ ID NO 13591190 as cited in SEQ ID NO 68044
  misc_feature (1)..(1461): Ortholog of  Ceres SEQ ID NO 13595961 as cited in SEQ ID NO 68223
atggccgtttcatcgtcgcatcatgcggttctcttcccttacatgtcaaaaggccacacgattcctctcctccaattcgcccgtctcctcctccgtcaccgccgtatcgtctccgtagacgacgaagaaccaaccatttccgtcaccgtcttcaccaccccaaaaaaccaaccattcgtctcaaacttcctctctgacgtcgcatcatctatcaaagtaatctccctccctttccctgaaaacatcgccggaatccctcccggcgtcgagagcaccgacatgctcccttccatatcactttacgtgcccttcacgcgcgcaaccaaatctctccagcctttcttcgaagcagaactcaagaatcttgagaaagtttctttcatggtctccgatggattcttatggtggacatcggaatccgccgctaaatttgagatcccgagacttgccttctacggcatgaactcctacgcatcggctatgtgctccgccatttcggtacacgagctctttaccaaaccggaaagtgttaaatctgatactgaaccggttactgtaccggattttccatggatatgtgttaagaagtgtgagttcgatccggttttgaccgaaccggatcaatcggatccagcgttcgagctactcattgaccatcttatgtccaccaagaaaagccgtggagttatagtgaacagcttttacgagctcgagtcaacgttcgttgactaccggctccgtgataacgatgaaccaaaaccgtggtgtgttgggcctttgtgtttggtaaatcctccaaaaccggagagtgataaaccggattggattcattggttggaccggaaactagaggaaagatgtccggttatgtatgtggcgtttggaacgcaggctgagatatcgaacgagcagctcaaggaaatagcattagggttggaagattccaaggtcaatttcttgtgggtcacgagaaaggacttggaagaagtaactggaggattagggttcgaaaagagagtgaaagagcatgggatgattgtgagagattgggtagaccaatgggagatattgtcacataaaagtgtcaaagggtttttgagtcattgtggatggaactcggcgcaagagagtatttgcgctggggttccactactcgcttggccaatgatggcagagcagccactcaatgcgaagttggtagtggaggagctaaagatcggagtaagaatcgaaacagaagatgtaagtgtgaaaggattcgtgacaagagaagaacttagtcgaaagggagagatggggaagacaacgatgaagaatgtaaaagagtatgcgaaaatggcgaaaaaagctatggctcaagggactggttcgtcttggaagagtttggattcgcttctggaagagctttgtaagagtagagagccagacggtgttaataagttgtcaagttctgatgcttag

SEQ ID NO: 71451 - protein, 486 aa, Arabidopsis thaliana
  peptide (1)..(486): Ceres Seq. ID no. 3599728
MAVSSSHHAVLFPYMSKGHTIPLLQFARLLLRHRRIVSVDDEEPTISVTVFTTPKNQPFVSNFLSDVASSIKVISLPFPENIAGIPPGVESTDMLPSISLYVPFTRATKSLQPFFEAELKNLEKVSFMVSDGFLWWTSESAAKFEIPRLAFYGMNSYASAMCSAISVHELFTKPESVKSDTEPVTVPDFPWICVKKCEFDPVLTEPDQSDPAFELLIDHLMSTKKSRGVIVNSFYELESTFVDYRLRDNDEPKPWCVGPLCLVNPPKPESDKPDWIHWLDRKLEERCPVMYVAFGTQAEISNEQLKEIALGLEDSKVNFLWVTRKDLEEVTGGLGFEKRVKEHGMIVRDWVDQWEILSHKSVKGFLSHCGWNSAQESICAGVPLLAWPMMAEQPLNAKLVVEELKIGVRIETEDVSVKGFVTREELSRKGEMGKTTMKNVKEYAKMAKKAMAQGTGSSWKSLDSLLEELCKSREPDGVNKLSSSDA

SEQ ID NO: 71452 - protein, 472 aa, Arabidopsis thaliana
  peptide (1)..(472): Ceres Seq. ID no. 3599729
MSKGHTIPLLQFARLLLRHRRIVSVDDEEPTISVTVFTTPKNQPFVSNFLSDVASSIKVISLPFPENIAGIPPGVESTDMLPSISLYVPFTRATKSLQPFFEAELKNLEKVSFMVSDGFLWWTSESAAKFEIPRLAFYGMNSYASAMCSAISVHELFTKPESVKSDTEPVTVPDFPWICVKKCEFDPVLTEPDQSDPAFELLIDHLMSTKKSRGVIVNSFYELESTFVDYRLRDNDEPKPWCVGPLCLVNPPKPESDKPDWIHWLDRKLEERCPVMYVAFGTQAEISNEQLKEIALGLEDSKVNFLWVTRKDLEEVTGGLGFEKRVKEHGMIVRDWVDQWEILSHKSVKGFLSHCGWNSAQESICAGVPLLAWPMMAEQPLNAKLVVEELKIGVRIETEDVSVKGFVTREELSRKGEMGKTTMKNVKEYAKMAKKAMAQGTGSSWKSLDSLLEELCKSREPDGVNKLSSSDA

SEQ ID NO: 71453 - protein, 393 aa, Arabidopsis thaliana
  peptide (1)..(393): Ceres Seq. ID no. 3599730
MLPSISLYVPFTRATKSLQPFFEAELKNLEKVSFMVSDGFLWWTSESAAKFEIPRLAFYGMNSYASAMCSAISVHELFTKPESVKSDTEPVTVPDFPWICVKKCEFDPVLTEPDQSDPAFELLIDHLMSTKKSRGVIVNSFYELESTFVDYRLRDNDEPKPWCVGPLCLVNPPKPESDKPDWIHWLDRKLEERCPVMYVAFGTQAEISNEQLKEIALGLEDSKVNFLWVTRKDLEEVTGGLGFEKRVKEHGMIVRDWVDQWEILSHKSVKGFLSHCGWNSAQESICAGVPLLAWPMMAEQPLNAKLVVEELKIGVRIETEDVSVKGFVTREELSRKGEMGKTTMKNVKEYAKMAKKAMAQGTGSSWKSLDSLLEELCKSREPDGVNKLSSSDA

SEQ ID NO: 71454 - DNA, 522 bp, Arabidopsis thaliana
  misc_feature (1)..(522): Ceres Seq. ID no. 3599785
  misc_feature (1)..(522): Ortholog of  Ceres SEQ ID NO 13587227 as cited in SEQ ID NO 513
  misc_feature (1)..(522): Ortholog of  Ceres SEQ ID NO 13594494 as cited in SEQ ID NO 51293
  misc_feature (1)..(522): Ortholog of  Ceres SEQ ID NO 13595538 as cited in SEQ ID NO 59858
  misc_feature (1)..(522): Ortholog of  Ceres SEQ ID NO 12598249 as cited in SEQ ID NO 61073
  misc_feature (1)..(522): Ortholog of  Ceres SEQ ID NO 13582815 as cited in SEQ ID NO 68106
atgggaaatgatcaacataaccacagtgacagaggattcttccacaacttagcagggtttgcaggcggccaatacccgcctcacggtcatggttacggtcatcatggtcacggttatggatcttcttatccatacccgcctcctcctcctcctcatggctatccaccagttgcttatcctccacatggtggttaccctcctgctggttatcctcccgctggttatcctccagccggttatcctgctcacggttatccatctcacggttatccccgtccatctcactcaggacatcaccatggaggcataggagcgattatagcgggtggagtggctgcagcagctggtgctcaccatatgtctcaccaccatggacactatggtcaccaccatggtcatggctatggctacgggtatcacggtcacgggaagttcaaacacggtaagttcaagcacggaaaattcggtaaacacggcatgtttgggaagcataaagggaaattcttcaagaaatggaagtga

SEQ ID NO: 71455 - protein, 173 aa, Arabidopsis thaliana
  peptide (1)..(173): Ceres Seq. ID no. 3599786
MGNDQHNHSDRGFFHNLAGFAGGQYPPHGHGYGHHGHGYGSSYPYPPPPPPHGYPPVAYPPHGGYPPAGYPPAGYPPAGYPAHGYPSHGYPRPSHSGHHHGGIGAIIAGGVAAAAGAHHMSHHHGHYGHHHGHGYGYGYHGHGKFKHGKFKHGKFGKHGMFGKHKGKFFKKWK

SEQ ID NO: 71456 - DNA, 1296 bp, Arabidopsis thaliana
  misc_feature (1)..(1296): Ceres Seq. ID no. 3600122
  misc_feature (1)..(1296): Ortholog of  Ceres SEQ ID NO 15171245 as cited in SEQ ID NO 52264
  misc_feature (1)..(1296): Ortholog of  Ceres SEQ ID NO 14303576 as cited in SEQ ID NO 68428
atgaggctcctcttcagcttctgcttcttcttcttcatgatcatctttaccgcaactgcttatgatccattagatcctagtggtaacattacaatcaaatgggatattatgtcctggacggcagatggctatgtggctacggtaactatgaacaacttccaaatctaccggcacatacaaaaccctggttggacattaggttggacatgggcaaagaaagaggtgatttggtcaatggttggtgcacaaacaacagaacaaggagactgttccaagtttaagggaaatgtacctcattgctgtaagaaaacccctacagttgttgatctcttgccaggtgtgccttataatcaacagttctcaaactgttgcaaaggaggtgtaattggagcttggggtcaagatccatcagccgctgtatcccagtttcaggttagtgctggtttagctggaactacaaacaagactgtcaagcttcctaagaacttcactttgcttggtcccggccctggttacacttgcggtcctgccaaaatcgtgccctctaccgtttttctcacaactgacaaacggcgaaaaacacaagctttgatgacatggaatgttacctgcacatactcacagtttttagcaagaaagcatccaagctgttgtgtctccttctcttctttctacaacgacaccataactccttgcccgtcttgtgcctgtggctgcgagaacaaaaagagctgcgtcaaggctgattctaagattctaaccaagaaaggtctcaacacaccaaaaaaggacaacactcctttgttgcaatgcacacatcacatgtgccctgttagagtccactggcacgttaaaactaactacaaagactattggcgagtgaagatagcaatcacaaatttcaattaccggatgaatcatacactctggactttagcaattcagcatccaaatctcaacaatgtgactcaagttttcagctttgactacaaaccagtctctccttacggatccataaatgatactggaatgttctatggaacgaagttttacaatgatttattaatggaagctggaccttcagggaatgtgcaatcagaggttttgctacagaaagatcaaaagacttttactttcaagcaaggttgggcttttcctagaaaagtttactttaatggtgatgaatgtatgttacctccaccagattcatacccttttctaccaaactctgcacaagggaactttgcttcgttctcactcaccattcttcttctcctattcatctcaatatggtga

SEQ ID NO: 71457 - protein, 431 aa, Arabidopsis thaliana
  peptide (1)..(431): Ceres Seq. ID no. 3600123
MRLLFSFCFFFFMIIFTATAYDPLDPSGNITIKWDIMSWTADGYVATVTMNNFQIYRHIQNPGWTLGWTWAKKEVIWSMVGAQTTEQGDCSKFKGNVPHCCKKTPTVVDLLPGVPYNQQFSNCCKGGVIGAWGQDPSAAVSQFQVSAGLAGTTNKTVKLPKNFTLLGPGPGYTCGPAKIVPSTVFLTTDKRRKTQALMTWNVTCTYSQFLARKHPSCCVSFSSFYNDTITPCPSCACGCENKKSCVKADSKILTKKGLNTPKKDNTPLLQCTHHMCPVRVHWHVKTNYKDYWRVKIAITNFNYRMNHTLWTLAIQHPNLNNVTQVFSFDYKPVSPYGSINDTGMFYGTKFYNDLLMEAGPSGNVQSEVLLQKDQKTFTFKQGWAFPRKVYFNGDECMLPPPDSYPFLPNSAQGNFASFSLTILLLLFISIW

SEQ ID NO: 71458 - protein, 419 aa, Arabidopsis thaliana
  peptide (1)..(419): Ceres Seq. ID no. 3600124
MIIFTATAYDPLDPSGNITIKWDIMSWTADGYVATVTMNNFQIYRHIQNPGWTLGWTWAKKEVIWSMVGAQTTEQGDCSKFKGNVPHCCKKTPTVVDLLPGVPYNQQFSNCCKGGVIGAWGQDPSAAVSQFQVSAGLAGTTNKTVKLPKNFTLLGPGPGYTCGPAKIVPSTVFLTTDKRRKTQALMTWNVTCTYSQFLARKHPSCCVSFSSFYNDTITPCPSCACGCENKKSCVKADSKILTKKGLNTPKKDNTPLLQCTHHMCPVRVHWHVKTNYKDYWRVKIAITNFNYRMNHTLWTLAIQHPNLNNVTQVFSFDYKPVSPYGSINDTGMFYGTKFYNDLLMEAGPSGNVQSEVLLQKDQKTFTFKQGWAFPRKVYFNGDECMLPPPDSYPFLPNSAQGNFASFSLTILLLLFISIW

SEQ ID NO: 71459 - protein, 395 aa, Arabidopsis thaliana
  peptide (1)..(395): Ceres Seq. ID no. 3600125
MSWTADGYVATVTMNNFQIYRHIQNPGWTLGWTWAKKEVIWSMVGAQTTEQGDCSKFKGNVPHCCKKTPTVVDLLPGVPYNQQFSNCCKGGVIGAWGQDPSAAVSQFQVSAGLAGTTNKTVKLPKNFTLLGPGPGYTCGPAKIVPSTVFLTTDKRRKTQALMTWNVTCTYSQFLARKHPSCCVSFSSFYNDTITPCPSCACGCENKKSCVKADSKILTKKGLNTPKKDNTPLLQCTHHMCPVRVHWHVKTNYKDYWRVKIAITNFNYRMNHTLWTLAIQHPNLNNVTQVFSFDYKPVSPYGSINDTGMFYGTKFYNDLLMEAGPSGNVQSEVLLQKDQKTFTFKQGWAFPRKVYFNGDECMLPPPDSYPFLPNSAQGNFASFSLTILLLLFISIW

SEQ ID NO: 71460 - DNA, 624 bp, Arabidopsis thaliana
  misc_feature (1)..(624): Ceres Seq. ID no. 3630021
  misc_feature (1)..(624): Ortholog of  Ceres SEQ ID NO 13598653 as cited in SEQ ID NO 65049
atggaatcagagagcgttaagtttggaggtcctagagaattgggtggtgcactagatcttataacacaatacaagttgttgccacaccatgaattcttttgcaagagatcacttccagagtcactgtcagatgctcattatcttcataatttggttggagacacagagattagaaaaggagaaggaatgcaattagatcagcttattcctaatgcatcacttagtagccgagatacgaatgctcgcatccaaccttttgttcttgatgaacttaaggaggcttttgagcttaatgatacagctcctgttgaattgcctccagcagagaagggagctcctaccactgtatcaaaatcaaaaagtgagtcaaaagataaggataggaaacatagaaaacataaagacaagaaggagaaagatagggaacataagaagcacaagcacaagcataaagataggatcaaagataaggataaagacaaggatcgagacaaaaagaaggaaaaaagtggacaccatgataagaaaaggaagaacaatgggactgaagatgctgatgacgttcagaggcacaaaaagagtaagcataagagctcaaagcttgatgagatgggagcgatgtag

SEQ ID NO: 71461 - protein, 207 aa, Arabidopsis thaliana
  peptide (1)..(207): Ceres Seq. ID no. 3630022
MESESVKFGGPRELGGALDLITQYKLLPHHEFFCKRSLPESLSDAHYLHNLVGDTEIRKGEGMQLDQLIPNASLSSRDTNARIQPFVLDELKEAFELNDTAPVELPPAEKGAPTTVSKSKSESKDKDRKHRKHKDKKEKDREHKKHKHKHKDRIKDKDKDKDRDKKKEKSGHHDKKRKNNGTEDADDVQRHKKSKHKSSKLDEMGAM

SEQ ID NO: 71462 - protein, 145 aa, Arabidopsis thaliana
  peptide (1)..(145): Ceres Seq. ID no. 3630023
MQLDQLIPNASLSSRDTNARIQPFVLDELKEAFELNDTAPVELPPAEKGAPTTVSKSKSESKDKDRKHRKHKDKKEKDREHKKHKHKHKDRIKDKDKDKDRDKKKEKSGHHDKKRKNNGTEDADDVQRHKKSKHKSSKLDEMGAM

SEQ ID NO: 71463 - protein, 137 aa, Arabidopsis thaliana
  peptide (1)..(137): Ceres Seq. ID no. 3630024
MHHLVAEIRMLASNLLFLMNLRRLLSLMIQLLLNCLQQRRELLPLYQNQKVSQKIRIGNIENIKTRRRKIGNIRSTSTSIKIGSKIRIKTRIETKRRKKVDTMIRKGRTMGLKMLMTFRGTKRVSIRAQSLMRWERC

SEQ ID NO: 71464 - DNA, 2361 bp, Arabidopsis thaliana
  misc_feature (1)..(2361): Ceres Seq. ID no. 3630609
  misc_feature (1)..(2361): Ortholog of  Ceres SEQ ID NO 15226393 as cited in SEQ ID NO 53476
atggccactcaaggagaagcgacgttctccgcggccgcgacgacgacgtcgagctatccgacgggaggtgttggtggcaaattgaagcggcaatcggcgaggaggcatgcggcgacaccttattctcgaccaacacagaaccaggtacaacggaggccgtggatctcgagaatcgtcgatcctgcttatcggattatttccggcggcgctaccagaatacttccatatttcttctcgaacgccgcctccgctcctgctcttgctgctcctccagaggatcaaaatcaacatcaaggagtatctagggttttgttgaaattgtttcgatgctgtaaattagatgtgccaatcgccaggatagaagaaggtgagttgcagaataatccacaggacaatgatcccagtgtaaccccaatttcaaataaaccggagccagcatcaattgaagtgggaggtcctagtggtactgcaaacgtgaacgaaggcaatttcagtatcagtgcacagagaagagggaaagcagctttaaatgacgacgttgcaatctcggagcttgaaaggctaatggaaggaaaaacgttttcacaagctgaaattgatcgtctcatagagatgataagttcgagggctattgatctacctgatgtcaagagagacgagagaaatttggagattcctttgagagagggagccaagaaaaatatgagtttatttgataaggcaaaagagcccattggtggcaaggatgctaatagtgaaatatgggctacaccaaccccacttgcaaagtcaataatacttgacggagacaaaatacgagatgaagttggtctttcaccggcagaacttgccaaggcatatatgggaggtcagacatcatcaagtagttcccaaggttttgtagcaagaaatgaaaaggattgtttagataggagtatgcttgtagggaaatcatcacttgcatcaccatcaagcaagccttctgcttgttggcctggtatcaagtcaagtgagcaatctggttttgcaactcctcaaagccgacgagagagctatgggcttcaaaattttccaaggactccttattctagaaccattctttcaaattctaagtcaaagttgatgcaattgcagaacgatagtagcaagcacctaagcaacctccagtctccctctcaaagtgtggagagaagatatggccagcttagcaagggaagggatggtggactttttggacccagtagaagaactcgtcagagcgccacgccgtccatggtgtctccttattcacgaccttcccgtggtgcatctcgttttgaaaattctgctatcatgaagagctctgaagcaggggaatcaagttacctatctaggtcccagataacaacttatggtaagcataaagaggcagaagttggtaccctgactgtgcctacacattctagtcagattgctaggacaatattggatcaccttgaacggacccaatcccaatccaccccaaaaaataaaactgccgagttaaagcttgccacttcctggagacatccacagtcttcgaaaaccgttgaaaaaagcagctcggacgtcaccaatgtgaaaaaggatggctcagctaaattgcatgaagatatccagaacattttctctcagaatcagccatcctctgttcttaaaccacctgcaactaccactggtgacattcaaaatggaatgaacaagaccgcttcagcgacaaatggaatattccgtggaacacaagcagcaagtagcggtggtaacgcactccaatatgagtttgggaagcctaagggttctctttccagaagcatgcatgatgagttgggtacttcttctcaggacgctgcaaaagctgttccctattcttttggaggggaaactgcaaatctccccaaaccaccatctcactcactgggaaataacaaaccggtacttccatcgatctcagtagccaagcccttccaaaaatgggcagtcccttcgggttcaaacgctggcttcacattcccggtctcttcatctgatggaacaacatcatcagagcccacaactccatccatcatgcccttcacaacaagcccaccagtagcaagtggtggtggtgttgccattacgaatcatcacgaagcgagaaaagattacgagattcctcaatttagtttcgacggcagcaacagaagaggagataagtcgcccctggtgttttcgtttccctctgtaagcgaagaggtggtcagtgaggatgatgatgcgaggtttggtatcaaatacacatttgggtcagaaaagccggagaggatatcattcagctcagcaggaagtgacggtgtctgctgttaa

SEQ ID NO: 71465 - protein, 786 aa, Arabidopsis thaliana
  peptide (1)..(786): Ceres Seq. ID no. 3630610
MATQGEATFSAAATTTSSYPTGGVGGKLKRQSARRHAATPYSRPTQNQVQRRPWISRIVDPAYRIISGGATRILPYFFSNAASAPALAAPPEDQNQHQGVSRVLLKLFRCCKLDVPIARIEEGELQNNPQDNDPSVTPISNKPEPASIEVGGPSGTANVNEGNFSISAQRRGKAALNDDVAISELERLMEGKTFSQAEIDRLIEMISSRAIDLPDVKRDERNLEIPLREGAKKNMSLFDKAKEPIGGKDANSEIWATPTPLAKSIILDGDKIRDEVGLSPAELAKAYMGGQTSSSSSQGFVARNEKDCLDRSMLVGKSSLASPSSKPSACWPGIKSSEQSGFATPQSRRESYGLQNFPRTPYSRTILSNSKSKLMQLQNDSSKHLSNLQSPSQSVERRYGQLSKGRDGGLFGPSRRTRQSATPSMVSPYSRPSRGASRFENSAIMKSSEAGESSYLSRSQITTYGKHKEAEVGTLTVPTHSSQIARTILDHLERTQSQSTPKNKTAELKLATSWRHPQSSKTVEKSSSDVTNVKKDGSAKLHEDIQNIFSQNQPSSVLKPPATTTGDIQNGMNKTASATNGIFRGTQAASSGGNALQYEFGKPKGSLSRSMHDELGTSSQDAAKAVPYSFGGETANLPKPPSHSLGNNKPVLPSISVAKPFQKWAVPSGSNAGFTFPVSSSDGTTSSEPTTPSIMPFTTSPPVASGGGVAITNHHEARKDYEIPQFSFDGSNRRGDKSPLVFSFPSVSEEVVSEDDDARFGIKYTFGSEKPERISFSSAGSDGVCC

SEQ ID NO: 71466 - protein, 598 aa, Arabidopsis thaliana
  peptide (1)..(598): Ceres Seq. ID no. 3630611
MEGKTFSQAEIDRLIEMISSRAIDLPDVKRDERNLEIPLREGAKKNMSLFDKAKEPIGGKDANSEIWATPTPLAKSIILDGDKIRDEVGLSPAELAKAYMGGQTSSSSSQGFVARNEKDCLDRSMLVGKSSLASPSSKPSACWPGIKSSEQSGFATPQSRRESYGLQNFPRTPYSRTILSNSKSKLMQLQNDSSKHLSNLQSPSQSVERRYGQLSKGRDGGLFGPSRRTRQSATPSMVSPYSRPSRGASRFENSAIMKSSEAGESSYLSRSQITTYGKHKEAEVGTLTVPTHSSQIARTILDHLERTQSQSTPKNKTAELKLATSWRHPQSSKTVEKSSSDVTNVKKDGSAKLHEDIQNIFSQNQPSSVLKPPATTTGDIQNGMNKTASATNGIFRGTQAASSGGNALQYEFGKPKGSLSRSMHDELGTSSQDAAKAVPYSFGGETANLPKPPSHSLGNNKPVLPSISVAKPFQKWAVPSGSNAGFTFPVSSSDGTTSSEPTTPSIMPFTTSPPVASGGGVAITNHHEARKDYEIPQFSFDGSNRRGDKSPLVFSFPSVSEEVVSEDDDARFGIKYTFGSEKPERISFSSAGSDGVCC

SEQ ID NO: 71467 - protein, 582 aa, Arabidopsis thaliana
  peptide (1)..(582): Ceres Seq. ID no. 3630612
MISSRAIDLPDVKRDERNLEIPLREGAKKNMSLFDKAKEPIGGKDANSEIWATPTPLAKSIILDGDKIRDEVGLSPAELAKAYMGGQTSSSSSQGFVARNEKDCLDRSMLVGKSSLASPSSKPSACWPGIKSSEQSGFATPQSRRESYGLQNFPRTPYSRTILSNSKSKLMQLQNDSSKHLSNLQSPSQSVERRYGQLSKGRDGGLFGPSRRTRQSATPSMVSPYSRPSRGASRFENSAIMKSSEAGESSYLSRSQITTYGKHKEAEVGTLTVPTHSSQIARTILDHLERTQSQSTPKNKTAELKLATSWRHPQSSKTVEKSSSDVTNVKKDGSAKLHEDIQNIFSQNQPSSVLKPPATTTGDIQNGMNKTASATNGIFRGTQAASSGGNALQYEFGKPKGSLSRSMHDELGTSSQDAAKAVPYSFGGETANLPKPPSHSLGNNKPVLPSISVAKPFQKWAVPSGSNAGFTFPVSSSDGTTSSEPTTPSIMPFTTSPPVASGGGVAITNHHEARKDYEIPQFSFDGSNRRGDKSPLVFSFPSVSEEVVSEDDDARFGIKYTFGSEKPERISFSSAGSDGVCC

SEQ ID NO: 71468 - DNA, 1953 bp, Arabidopsis thaliana
  misc_feature (1)..(1953): Ceres Seq. ID no. 3631006
  misc_feature (1)..(1953): Ortholog of  Ceres SEQ ID NO 13574398 as cited in SEQ ID NO 0
  misc_feature (1)..(1953): Ortholog of  Ceres SEQ ID NO 14309497 as cited in SEQ ID NO 0
  misc_feature (1)..(1953): Ortholog of  Ceres SEQ ID NO 15180320 as cited in SEQ ID NO 0
atggtgcggacattaggacgtaaactaagctggccaagatcttttagttttagaaagatgttcgatggtcggaactctggacattcatctttctcttctcgtggggatggcatgcatacacccgagcacgaactcgccggacatgctgcaccatccactcgtagaggcaagcaaaataggagatcagacatggaagtgatgaaggaaagattcgcaaaactgcttcttggagaggacatgtcaggcggtgggacaggggagacctctgcgttagctttgtcaaacgccatcaccaaactcgctgattcgatgtttggagagcagatgaaattgcagcctatgtatccggagacaaaagagaattggaggaaagaaatgggttggttattatctgtgattgatcacattgtccagtttgttccttctagacaaatgggtaaaaatggccaattcactgagatcatggttacaaaacaaagagatgatttgctgacgaacattccagctttacgcaaacttgactcggttcttctcgaaactttggacaacttcaaggatcagaaagacttttggtatgtgccaagagatatggaggatgcagatcacaatggagattggaggagggatgagaactggtggttaccagttgttaaggttccaacagatggcttgtctgaggaatcacgtagatggttgcagaatcagaaagattctgtggctcaagtccttaaagccgccacggccatcaatgctcatgtattgtctgaaatgcacgttcctgaaaactacattgattcccttccaaagaatgggaagacaagcttgggagattttctttacaagagcataacagaggagagctttgatcctgactactttgtctctttcttggatttgtcaacggaacacaaagtacttgatctaaagaacaggattgaagcttccatggtgatctggaagaggaagatgtgccagaaagagaaagacgggaaatctcagtggggatccactgttagcttagagaagagggagcttttcgaagtccgagctgagaccattttggttatgctcaaacaacaatttcctgggatcccacaatcctcccttgaagtctccaagattaaaaacaacaaggatgttggacaggcgattttggagagctattcaagggtactagagagtcttgcttcaaagataatgtcaagaatagaggatgttcttgaagccgatcggctagttcaaagacagttgatgggagaggcagagacaagatcagaaagcgaggcagaatcagaatacgaggaaactgaaaaggtggttgcagcggaaacaccaaactcgaggaaactatcagacttcatagggtggagattgtcatctgatactaagaagcatagttcaatgagtgatatagaattcttccacaaagttgagcaggagaaggagaagcccatgatgaagtctccaagagctctaccgaagaaattttcatatctagcaaaaacaacggaaaaggcaaatcgggatcagccaccggcgatgaaggaagacatggataagatggtggcggtagggctcgtatggggagccaccaatgctctgatccgtcgtggcgctcttgcctgggataaaacaaagtcttcttcgacaacagaatctcattctcctcctcttcagatccgccgcaaaatcatgattgctctccgcgactggatcaatctcctcctcttctggcaatactcaattcctttcctcataaacctctccgcctccgccacattcttcgcccttctcagtcacgctcccatctctcttgccgttccggtgactaacgccacaacctttgccgcaaccgccgcttttgggatccttttaggggaagaaactcaaatcggacttgctttgttaggtacgagctttattgtatttggaatttggctttgtgttctgtga

SEQ ID NO: 71469 - protein, 650 aa, Arabidopsis thaliana
  peptide (1)..(650): Ceres Seq. ID no. 3631007
MVRTLGRKLSWPRSFSFRKMFDGRNSGHSSFSSRGDGMHTPEHELAGHAAPSTRRGKQNRRSDMEVMKERFAKLLLGEDMSGGGTGETSALALSNAITKLADSMFGEQMKLQPMYPETKENWRKEMGWLLSVIDHIVQFVPSRQMGKNGQFTEIMVTKQRDDLLTNIPALRKLDSVLLETLDNFKDQKDFWYVPRDMEDADHNGDWRRDENWWLPVVKVPTDGLSEESRRWLQNQKDSVAQVLKAATAINAHVLSEMHVPENYIDSLPKNGKTSLGDFLYKSITEESFDPDYFVSFLDLSTEHKVLDLKNRIEASMVIWKRKMCQKEKDGKSQWGSTVSLEKRELFEVRAETILVMLKQQFPGIPQSSLEVSKIKNNKDVGQAILESYSRVLESLASKIMSRIEDVLEADRLVQRQLMGEAETRSESEAESEYEETEKVVAAETPNSRKLSDFIGWRLSSDTKKHSSMSDIEFFHKVEQEKEKPMMKSPRALPKKFSYLAKTTEKANRDQPPAMKEDMDKMVAVGLVWGATNALIRRGALAWDKTKSSSTTESHSPPLQIRRKIMIALRDWINLLLFWQYSIPFLINLSASATFFALLSHAPISLAVPVTNATTFAATAAFGILLGEETQIGLALLGTSFIVFGIWLCVL

SEQ ID NO: 71470 - protein, 631 aa, Arabidopsis thaliana
  peptide (1)..(631): Ceres Seq. ID no. 3631008
MFDGRNSGHSSFSSRGDGMHTPEHELAGHAAPSTRRGKQNRRSDMEVMKERFAKLLLGEDMSGGGTGETSALALSNAITKLADSMFGEQMKLQPMYPETKENWRKEMGWLLSVIDHIVQFVPSRQMGKNGQFTEIMVTKQRDDLLTNIPALRKLDSVLLETLDNFKDQKDFWYVPRDMEDADHNGDWRRDENWWLPVVKVPTDGLSEESRRWLQNQKDSVAQVLKAATAINAHVLSEMHVPENYIDSLPKNGKTSLGDFLYKSITEESFDPDYFVSFLDLSTEHKVLDLKNRIEASMVIWKRKMCQKEKDGKSQWGSTVSLEKRELFEVRAETILVMLKQQFPGIPQSSLEVSKIKNNKDVGQAILESYSRVLESLASKIMSRIEDVLEADRLVQRQLMGEAETRSESEAESEYEETEKVVAAETPNSRKLSDFIGWRLSSDTKKHSSMSDIEFFHKVEQEKEKPMMKSPRALPKKFSYLAKTTEKANRDQPPAMKEDMDKMVAVGLVWGATNALIRRGALAWDKTKSSSTTESHSPPLQIRRKIMIALRDWINLLLFWQYSIPFLINLSASATFFALLSHAPISLAVPVTNATTFAATAAFGILLGEETQIGLALLGTSFIVFGIWLCVL

SEQ ID NO: 71471 - protein, 613 aa, Arabidopsis thaliana
  peptide (1)..(613): Ceres Seq. ID no. 3631009
MHTPEHELAGHAAPSTRRGKQNRRSDMEVMKERFAKLLLGEDMSGGGTGETSALALSNAITKLADSMFGEQMKLQPMYPETKENWRKEMGWLLSVIDHIVQFVPSRQMGKNGQFTEIMVTKQRDDLLTNIPALRKLDSVLLETLDNFKDQKDFWYVPRDMEDADHNGDWRRDENWWLPVVKVPTDGLSEESRRWLQNQKDSVAQVLKAATAINAHVLSEMHVPENYIDSLPKNGKTSLGDFLYKSITEESFDPDYFVSFLDLSTEHKVLDLKNRIEASMVIWKRKMCQKEKDGKSQWGSTVSLEKRELFEVRAETILVMLKQQFPGIPQSSLEVSKIKNNKDVGQAILESYSRVLESLASKIMSRIEDVLEADRLVQRQLMGEAETRSESEAESEYEETEKVVAAETPNSRKLSDFIGWRLSSDTKKHSSMSDIEFFHKVEQEKEKPMMKSPRALPKKFSYLAKTTEKANRDQPPAMKEDMDKMVAVGLVWGATNALIRRGALAWDKTKSSSTTESHSPPLQIRRKIMIALRDWINLLLFWQYSIPFLINLSASATFFALLSHAPISLAVPVTNATTFAATAAFGILLGEETQIGLALLGTSFIVFGIWLCVL

SEQ ID NO: 71472 - DNA, 783 bp, Arabidopsis thaliana
  misc_feature (1)..(783): Ceres Seq. ID no. 3631246
  misc_feature (1)..(783): Ortholog of  Ceres SEQ ID NO 14314434 as cited in SEQ ID NO 52401
  misc_feature (1)..(783): Ortholog of  Ceres SEQ ID NO 14303939 as cited in SEQ ID NO 54286
  misc_feature (1)..(783): Ortholog of  Ceres SEQ ID NO 14307760 as cited in SEQ ID NO 54741
  misc_feature (1)..(783): Ortholog of  Ceres SEQ ID NO 14313391 as cited in SEQ ID NO 58556
  misc_feature (1)..(783): Ortholog of  Ceres SEQ ID NO 15179003 as cited in SEQ ID NO 0
atggaaggaggaactgcgcactacagccctcgaactgtcgaagaagtctttcgagattttaagggccgtcgagctggcatcatccaagctctcaccactgatgtggaagattttttccagcaatgcgaccctgagaagcagaatctctgcttgtatggattcccaaatgaagtgtgggaagttaacttaccagctgaagaagtgcctcctgagcttcccgaacctgcactcggcattaactttgccagagatgggatgcaggaaagaaactggctttctctcgttgctgtccacagtgatgcgtggttactttctgtgtctttttactttggttcaagatttggtttcgatagagctgacaggaagcgcttgtttagtatgataaatgaggttcctactgtatatgaagttgtaactggaaatgcagagaagcaaacaaaggaaatgccctcttcagcaaatcaaaatggcaacagatccaagtcaaattcaaaaatgagaggtttagaaagtaaaagttcaaagacgatacatgccaaggatgaggaagaaggattagagttagaagaaggggaagaggaagaggatgaggatgaagacgaacacggtgaaaccctatgtggagcatgtggagataactatgcttctgatgaattctggatttgctgtgacatgtgcgagaaatggttccacggggagtgtgtgaagatcactccagctagagcggagcatatcaagcattacaagtgccctacttgcagcaacaaaagagcacgaccctag

SEQ ID NO: 71473 - protein, 260 aa, Arabidopsis thaliana
  peptide (1)..(260): Ceres Seq. ID no. 3631247
MEGGTAHYSPRTVEEVFRDFKGRRAGIIQALTTDVEDFFQQCDPEKQNLCLYGFPNEVWEVNLPAEEVPPELPEPALGINFARDGMQERNWLSLVAVHSDAWLLSVSFYFGSRFGFDRADRKRLFSMINEVPTVYEVVTGNAEKQTKEMPSSANQNGNRSKSNSKMRGLESKSSKTIHAKDEEEGLELEEGEEEEDEDEDEHGETLCGACGDNYASDEFWICCDMCEKWFHGECVKITPARAEHIKHYKCPTCSNKRARP

SEQ ID NO: 71474 - protein, 175 aa, Arabidopsis thaliana
  peptide (1)..(175): Ceres Seq. ID no. 3631248
MQERNWLSLVAVHSDAWLLSVSFYFGSRFGFDRADRKRLFSMINEVPTVYEVVTGNAEKQTKEMPSSANQNGNRSKSNSKMRGLESKSSKTIHAKDEEEGLELEEGEEEEDEDEDEHGETLCGACGDNYASDEFWICCDMCEKWFHGECVKITPARAEHIKHYKCPTCSNKRARP

SEQ ID NO: 71475 - protein, 134 aa, Arabidopsis thaliana
  peptide (1)..(134): Ceres Seq. ID no. 3631249
MINEVPTVYEVVTGNAEKQTKEMPSSANQNGNRSKSNSKMRGLESKSSKTIHAKDEEEGLELEEGEEEEDEDEDEHGETLCGACGDNYASDEFWICCDMCEKWFHGECVKITPARAEHIKHYKCPTCSNKRARP

SEQ ID NO: 71476 - DNA, 1851 bp, Arabidopsis thaliana
  misc_feature (1)..(1851): Ceres Seq. ID no. 3658934
  misc_feature (1)..(1851): Ortholog of  Ceres SEQ ID NO 15176579 as cited in SEQ ID NO 54513
atgtcgaatacgctttctttgattcaaagcaatgcctcgaatcccaaagtttgggtagtgatcggcgtgacggtggccgggatcgtgattctggcggagacccggaagcggcggattagagcccttagagaagaagactttggtgctttcttagatcgtttcgagcttcttcctttccctccgcctcctcctcctgctgctaaacaatctctctctggtcttaccttctccatctccgacgcgttcgatgttaaggattatatcacaggatttggttgtccacaatggaagaagactcatgaggctgctgagaaaactgctgtggttgtcacgacgctcttgaaaaatggagctacttgtgttggcaagactataatggatgagctgggttttgggattattggagaaaacaagcactatggaactcctattaatccattgatgccagataatgttcctggaggatgttccagtggctcagcagtttctgttggggctgaactcgttgacttttcacttgggattgataccactggtggtgttagagtcccagcagccttttgtggtattcttggttttcgaccatctcaggggactgtttcttcagttggagttttgcccaattctcagagcctagagactgttggatggtttgcctctgatccatccgttttgtgtcaagttggacatgccttactaaatctgagtgcagtaacacatagaaggcaaagatctttaatctttgctgatgatttattcgagctctctgacattcctaagcaaaagtcggtgcaagttgtcagaaaggcaatcgagaatctatctggctacaagactccaaaacatgttaacgttggccaatatgtcgcttcaaatgtaccaagtcttgcggaattctgtgagcaatctgggaaatcccaaaattcagcatcaactttaagggctctttcatctgtgatgttggctatacaaaggcatgagttcaaaacaaatcatgaagaatggtggcaaacatgcaaatcgtttctagggccaagattttccaatgatgttgttacagctctgaagagcaaaaacgagagcattaaatccctctacagagtgaaaaatgagatgcgggccaccattcaaagccttttaaaggaagatggaattctggtaatccccacagttgctgatccccctccaaggcttaacacaaagagaaataaatctttgaatgagtttcttgatcgtacttatgcactctcctgcattgcaagcatgtctggatgttgtcaggttacaattcctttaggggaacatggtgatcgtccaatatccgtgtcgcttcttacttactatggaggtgataagttccttctcgatacaactctcgatgtatatgcatcccttcaagaccaagccaaacttgcatccaacttagctccagtgtctgacaccaatggtaacatggaggcttctgaagttatgaaagaaaagggcaatgctgcatacaaggggaaacaatggaataaggcggtaaacttttatacagaagctataaaattgaatggagcaaatgctacttattattgcaatagagctgcagctttcttggaactttgctgcttccaacaagccgaacaagattgtaccaaggccatgttgatcgataagaagaatgtgaaggcatatttgagacgagggactgctagagaatcacttgtacggtacaaggaagctgctgcagggtattggagcgtaacattatggttgatcatctctgcagatttcaggcacgcattggtccttgaaccacagaacaagacggcaaaggttgctgagaagagactccgaaaacacatatga

SEQ ID NO: 71477 - protein, 616 aa, Arabidopsis thaliana
  peptide (1)..(616): Ceres Seq. ID no. 3658935
MSNTLSLIQSNASNPKVWVVIGVTVAGIVILAETRKRRIRALREEDFGAFLDRFELLPFPPPPPPAAKQSLSGLTFSISDAFDVKDYITGFGCPQWKKTHEAAEKTAVVVTTLLKNGATCVGKTIMDELGFGIIGENKHYGTPINPLMPDNVPGGCSSGSAVSVGAELVDFSLGIDTTGGVRVPAAFCGILGFRPSQGTVSSVGVLPNSQSLETVGWFASDPSVLCQVGHALLNLSAVTHRRQRSLIFADDLFELSDIPKQKSVQVVRKAIENLSGYKTPKHVNVGQYVASNVPSLAEFCEQSGKSQNSASTLRALSSVMLAIQRHEFKTNHEEWWQTCKSFLGPRFSNDVVTALKSKNESIKSLYRVKNEMRATIQSLLKEDGILVIPTVADPPPRLNTKRNKSLNEFLDRTYALSCIASMSGCCQVTIPLGEHGDRPISVSLLTYYGGDKFLLDTTLDVYASLQDQAKLASNLAPVSDTNGNMEASEVMKEKGNAAYKGKQWNKAVNFYTEAIKLNGANATYYCNRAAAFLELCCFQQAEQDCTKAMLIDKKNVKAYLRRGTARESLVRYKEAAAGYWSVTLWLIISADFRHALVLEPQNKTAKVAEKRLRKHI

SEQ ID NO: 71478 - protein, 491 aa, Arabidopsis thaliana
  peptide (1)..(491): Ceres Seq. ID no. 3658936
MDELGFGIIGENKHYGTPINPLMPDNVPGGCSSGSAVSVGAELVDFSLGIDTTGGVRVPAAFCGILGFRPSQGTVSSVGVLPNSQSLETVGWFASDPSVLCQVGHALLNLSAVTHRRQRSLIFADDLFELSDIPKQKSVQVVRKAIENLSGYKTPKHVNVGQYVASNVPSLAEFCEQSGKSQNSASTLRALSSVMLAIQRHEFKTNHEEWWQTCKSFLGPRFSNDVVTALKSKNESIKSLYRVKNEMRATIQSLLKEDGILVIPTVADPPPRLNTKRNKSLNEFLDRTYALSCIASMSGCCQVTIPLGEHGDRPISVSLLTYYGGDKFLLDTTLDVYASLQDQAKLASNLAPVSDTNGNMEASEVMKEKGNAAYKGKQWNKAVNFYTEAIKLNGANATYYCNRAAAFLELCCFQQAEQDCTKAMLIDKKNVKAYLRRGTARESLVRYKEAAAGYWSVTLWLIISADFRHALVLEPQNKTAKVAEKRLRKHI

SEQ ID NO: 71479 - protein, 469 aa, Arabidopsis thaliana
  peptide (1)..(469): Ceres Seq. ID no. 3658937
MPDNVPGGCSSGSAVSVGAELVDFSLGIDTTGGVRVPAAFCGILGFRPSQGTVSSVGVLPNSQSLETVGWFASDPSVLCQVGHALLNLSAVTHRRQRSLIFADDLFELSDIPKQKSVQVVRKAIENLSGYKTPKHVNVGQYVASNVPSLAEFCEQSGKSQNSASTLRALSSVMLAIQRHEFKTNHEEWWQTCKSFLGPRFSNDVVTALKSKNESIKSLYRVKNEMRATIQSLLKEDGILVIPTVADPPPRLNTKRNKSLNEFLDRTYALSCIASMSGCCQVTIPLGEHGDRPISVSLLTYYGGDKFLLDTTLDVYASLQDQAKLASNLAPVSDTNGNMEASEVMKEKGNAAYKGKQWNKAVNFYTEAIKLNGANATYYCNRAAAFLELCCFQQAEQDCTKAMLIDKKNVKAYLRRGTARESLVRYKEAAAGYWSVTLWLIISADFRHALVLEPQNKTAKVAEKRLRKHI

SEQ ID NO: 71480 - DNA, 912 bp, Arabidopsis thaliana
  misc_feature (1)..(912): Ceres Seq. ID no. 3658938
  misc_feature (1)..(912): Ortholog of  Ceres SEQ ID NO 12562983 as cited in SEQ ID NO 53309
  misc_feature (1)..(912): Ortholog of  Ceres SEQ ID NO 14309224 as cited in SEQ ID NO 0
atgtttgatcatatgaaactgctgcgatgcttcagcttcacggcgtcgcgagattggttattccggcaatcattcgcaaacgccggtctacgttccgtaacgacagatctctcccacggcaattcaatcgcatcaacagctatgcattgttggattcctaaatccccgaatcgatctaaacctaatctcctcctcctccacggattcggcgccaacgcaatgtggcaatacggagaacatctccgagctttcaccggccgattcaacgtctacgttcccgatctcctcttcttcgggttatcatccacatcggaaccaaaccgaaccgaatctttccaggctcggtgtctgatgaggttaatggaagcgcacggagtccagaggatgaacatcgtcgggattagttacggtggattcgttgggtatagtttagcggcgcagtttccggagaacgttgagaagcttgtgctgtgctgcgcaggggtttgtttggaggagaaagatatggaggacggattgtttaaggtgccgaatctagaagaagctaccggaattttgattcctcagacgccggaaaagcttaaggaactcataagattctctttcgttaaaccaatcaaaggtgttccttcgttttttctctgggattttatcgatgagaagagagatttgatcaaatcaatactcaaagataggagactttctgatcttcctaggatcaaacagaaatcgttgatcatatggggagaagaagatcaaatatttccactggaactaggttacagattaaaaagacatataggagagagtgcagagatagtggtgatcaagaaagcaggacatgctgtgaatttggagaagtccaaggaatttgtcaagcatttgaaatcttttctcattgactctttgtga

SEQ ID NO: 71481 - protein, 303 aa, Arabidopsis thaliana
  peptide (1)..(303): Ceres Seq. ID no. 3658939
MFDHMKLLRCFSFTASRDWLFRQSFANAGLRSVTTDLSHGNSIASTAMHCWIPKSPNRSKPNLLLLHGFGANAMWQYGEHLRAFTGRFNVYVPDLLFFGLSSTSEPNRTESFQARCLMRLMEAHGVQRMNIVGISYGGFVGYSLAAQFPENVEKLVLCCAGVCLEEKDMEDGLFKVPNLEEATGILIPQTPEKLKELIRFSFVKPIKGVPSFFLWDFIDEKRDLIKSILKDRRLSDLPRIKQKSLIIWGEEDQIFPLELGYRLKRHIGESAEIVVIKKAGHAVNLEKSKEFVKHLKSFLIDSL

SEQ ID NO: 71482 - protein, 299 aa, Arabidopsis thaliana
  peptide (1)..(299): Ceres Seq. ID no. 3658940
MKLLRCFSFTASRDWLFRQSFANAGLRSVTTDLSHGNSIASTAMHCWIPKSPNRSKPNLLLLHGFGANAMWQYGEHLRAFTGRFNVYVPDLLFFGLSSTSEPNRTESFQARCLMRLMEAHGVQRMNIVGISYGGFVGYSLAAQFPENVEKLVLCCAGVCLEEKDMEDGLFKVPNLEEATGILIPQTPEKLKELIRFSFVKPIKGVPSFFLWDFIDEKRDLIKSILKDRRLSDLPRIKQKSLIIWGEEDQIFPLELGYRLKRHIGESAEIVVIKKAGHAVNLEKSKEFVKHLKSFLIDSL

SEQ ID NO: 71483 - protein, 256 aa, Arabidopsis thaliana
  peptide (1)..(256): Ceres Seq. ID no. 3658941
MHCWIPKSPNRSKPNLLLLHGFGANAMWQYGEHLRAFTGRFNVYVPDLLFFGLSSTSEPNRTESFQARCLMRLMEAHGVQRMNIVGISYGGFVGYSLAAQFPENVEKLVLCCAGVCLEEKDMEDGLFKVPNLEEATGILIPQTPEKLKELIRFSFVKPIKGVPSFFLWDFIDEKRDLIKSILKDRRLSDLPRIKQKSLIIWGEEDQIFPLELGYRLKRHIGESAEIVVIKKAGHAVNLEKSKEFVKHLKSFLIDSL

SEQ ID NO: 71484 - DNA, 855 bp, Arabidopsis thaliana
  misc_feature (1)..(855): Ceres Seq. ID no. 3659026
  misc_feature (1)..(855): Ortholog of  Ceres SEQ ID NO 14302780 as cited in SEQ ID NO 65368
atgggtttcgtgtattacgtcacactgtttgttttcatcgatgattgggttggtttacaaagctcagctgggaaattaaacgccttactcttcagcttattggcgtctctctgtctcttctcgctctcaatttgcgttcttgtagatccaggtcgtgttcctgcatcttatgctcctgatgttgaggactctggctggtccaatagtaacgtgaaagtcgatggcttttttctttggtgttacaaaaggaggtttgatgttggtgttaagcttaggaagaatggctttatcgttgatgctgttacagaaacaaggaaatgtgataagtgctttgcatataagcctcttcggactcaccattgccgggtttgcagaagatgcgtcttgaagatggaccatcattgcctctggataaataactgtgttggttatgcaaactataaggctttcttcattcttgtgttttatgcaaccgtggcttccatctactctacagtgttgctggtttgctgtgcattcaagaacggagattcctatgcgggaaatgttccgctcaaaactttcattgtttcttgtgggatcttcatgatcggactaagcataacacttgggactctcctttgttggcatatctacctcatcacacacaatatgaccaccattgagcattatgattcaaagcgggcctcatggttagctagaaaatcaggacaaagctataggcatcaattcgatgttggcttttacaaaaacctcacctcggtgttaggccctaacatgatcaaatggctatgccccacatttactaggaatcctgaagacggtattagcttttctgcatcgagagacagctag

SEQ ID NO: 71485 - protein, 284 aa, Arabidopsis thaliana
  peptide (1)..(284): Ceres Seq. ID no. 3659027
MGFVYYVTLFVFIDDWVGLQSSAGKLNALLFSLLASLCLFSLSICVLVDPGRVPASYAPDVEDSGWSNSNVKVDGFFLWCYKRRFDVGVKLRKNGFIVDAVTETRKCDKCFAYKPLRTHHCRVCRRCVLKMDHHCLWINNCVGYANYKAFFILVFYATVASIYSTVLLVCCAFKNGDSYAGNVPLKTFIVSCGIFMIGLSITLGTLLCWHIYLITHNMTTIEHYDSKRASWLARKSGQSYRHQFDVGFYKNLTSVLGPNMIKWLCPTFTRNPEDGISFSASRDS

SEQ ID NO: 71486 - protein, 154 aa, Arabidopsis thaliana
  peptide (1)..(154): Ceres Seq. ID no. 3659028
MDHHCLWINNCVGYANYKAFFILVFYATVASIYSTVLLVCCAFKNGDSYAGNVPLKTFIVSCGIFMIGLSITLGTLLCWHIYLITHNMTTIEHYDSKRASWLARKSGQSYRHQFDVGFYKNLTSVLGPNMIKWLCPTFTRNPEDGISFSASRDS

SEQ ID NO: 71487 - DNA, 1812 bp, Arabidopsis thaliana
  misc_feature (1)..(1812): Ceres Seq. ID no. 3659142
  misc_feature (1)..(1812): Ortholog of  Ceres SEQ ID NO 15176579 as cited in SEQ ID NO 54513
atgtcgaatacgctttctttgattcaaagcaatgcctcgaatcccaaagtttgggtagtgatcggcgtgacggtggccgggatcgtgattctggcggagacccggaagcggcggattagagcccttagagaagaagactttggtgctttcttagatcgtttcgagcttcttcctttccctccgcctcctcctcctgctgctaaacaatctctctctggtcttaccttctccatctccgacgcgttcgatgttaaggattatatcacaggatttggttgtccacaatggaagaagactcatgaggctgctgagaaaactgctgtggttgtcacgacgctcttgaaaaatggagctacttgtgttggcaagactataatggatgagctgggttttgggattattggagaaaacaagcactatggaactcctattaatccattgatgccagataatgttcctggaggatgttccagtggctcagcagtttctgttggggctgaactcgttgacttttcacttgggattgataccactggtggtgttagagtcccagcagccttttgtggtattcttggttttcgaccatctcaggggactgtttcttcagttggagttttgcccaattctcagagcctagagactgttggatggtttgcctctgatccatccgttttgtgtcaagttggacatgccttactaaatctgagtgcagtaacacatagaaggcaaagatctttaatctttgctgatgatttattcgagctctctgacattcctaagcaaaagtcggtgcaagttgtcagaaaggcaatcgagaatctatctggctacaagactccaaaacatgttaacgttggccaatatgtcgcttcaaatgtaccaagtcttgcggaattctgtgagcaatctgggaaatcccaaaattcagcatcaactttaagggctctttcatctgtgatgttggctatacaaaggcatgagttcaaaacaaatcatgaagaatggtggcaaacatgcaaatcgtttctagggccaagattttccaatgatgttgttacagctctgaagagcaaaaacgagagcattaaatccctctacagagtgaaaaatgagatgcgggccaccattcaaagccttttaaaggaagatggaattctggtaatccccacagttgctgatccccctccaaggcttaacacaaagagaaataaatctttgaatgagtttcttgatcgtacttatgcactctcctgcattgcaagcatgtctggatgttgtcaggttacaattcctttaggggaacatggtgatcgtccaatatccgtgtcgcttcttacttactatggaggtgataagttccttctcgatacaactctcgatgtatatgcatcccttcaagaccaagccaaacttgcatccaacttagctccagtgtctgacaccaatggtaacatggaggcttctgaagttatgaaagaaaagggcaatgctgcatacaaggggaaacaatggaataaggcggtaaacttttatacagaagctataaaattgaatggagcaaatgctacttattattgcaatagagctgcagctttcttggaactttgctgcttccaacaagccgaacaagattgtaccaaggccatgttgatcgataagaagaatgtgaaggcatatttgagacgagggactgctagagaatcacttgtacggtacaaggaagctgctgcagatttcaggcacgcattggtccttgaaccacagaacaagacggcaaaggttgctgagaagagactccgaaaacacatatga

SEQ ID NO: 71488 - protein, 603 aa, Arabidopsis thaliana
  peptide (1)..(603): Ceres Seq. ID no. 3659143
MSNTLSLIQSNASNPKVWVVIGVTVAGIVILAETRKRRIRALREEDFGAFLDRFELLPFPPPPPPAAKQSLSGLTFSISDAFDVKDYITGFGCPQWKKTHEAAEKTAVVVTTLLKNGATCVGKTIMDELGFGIIGENKHYGTPINPLMPDNVPGGCSSGSAVSVGAELVDFSLGIDTTGGVRVPAAFCGILGFRPSQGTVSSVGVLPNSQSLETVGWFASDPSVLCQVGHALLNLSAVTHRRQRSLIFADDLFELSDIPKQKSVQVVRKAIENLSGYKTPKHVNVGQYVASNVPSLAEFCEQSGKSQNSASTLRALSSVMLAIQRHEFKTNHEEWWQTCKSFLGPRFSNDVVTALKSKNESIKSLYRVKNEMRATIQSLLKEDGILVIPTVADPPPRLNTKRNKSLNEFLDRTYALSCIASMSGCCQVTIPLGEHGDRPISVSLLTYYGGDKFLLDTTLDVYASLQDQAKLASNLAPVSDTNGNMEASEVMKEKGNAAYKGKQWNKAVNFYTEAIKLNGANATYYCNRAAAFLELCCFQQAEQDCTKAMLIDKKNVKAYLRRGTARESLVRYKEAAADFRHALVLEPQNKTAKVAEKRLRKHI

SEQ ID NO: 71489 - protein, 478 aa, Arabidopsis thaliana
  peptide (1)..(478): Ceres Seq. ID no. 3659144
MDELGFGIIGENKHYGTPINPLMPDNVPGGCSSGSAVSVGAELVDFSLGIDTTGGVRVPAAFCGILGFRPSQGTVSSVGVLPNSQSLETVGWFASDPSVLCQVGHALLNLSAVTHRRQRSLIFADDLFELSDIPKQKSVQVVRKAIENLSGYKTPKHVNVGQYVASNVPSLAEFCEQSGKSQNSASTLRALSSVMLAIQRHEFKTNHEEWWQTCKSFLGPRFSNDVVTALKSKNESIKSLYRVKNEMRATIQSLLKEDGILVIPTVADPPPRLNTKRNKSLNEFLDRTYALSCIASMSGCCQVTIPLGEHGDRPISVSLLTYYGGDKFLLDTTLDVYASLQDQAKLASNLAPVSDTNGNMEASEVMKEKGNAAYKGKQWNKAVNFYTEAIKLNGANATYYCNRAAAFLELCCFQQAEQDCTKAMLIDKKNVKAYLRRGTARESLVRYKEAAADFRHALVLEPQNKTAKVAEKRLRKHI

SEQ ID NO: 71490 - protein, 456 aa, Arabidopsis thaliana
  peptide (1)..(456): Ceres Seq. ID no. 3659145
MPDNVPGGCSSGSAVSVGAELVDFSLGIDTTGGVRVPAAFCGILGFRPSQGTVSSVGVLPNSQSLETVGWFASDPSVLCQVGHALLNLSAVTHRRQRSLIFADDLFELSDIPKQKSVQVVRKAIENLSGYKTPKHVNVGQYVASNVPSLAEFCEQSGKSQNSASTLRALSSVMLAIQRHEFKTNHEEWWQTCKSFLGPRFSNDVVTALKSKNESIKSLYRVKNEMRATIQSLLKEDGILVIPTVADPPPRLNTKRNKSLNEFLDRTYALSCIASMSGCCQVTIPLGEHGDRPISVSLLTYYGGDKFLLDTTLDVYASLQDQAKLASNLAPVSDTNGNMEASEVMKEKGNAAYKGKQWNKAVNFYTEAIKLNGANATYYCNRAAAFLELCCFQQAEQDCTKAMLIDKKNVKAYLRRGTARESLVRYKEAAADFRHALVLEPQNKTAKVAEKRLRKHI

SEQ ID NO: 71491 - DNA, 936 bp, Arabidopsis thaliana
  misc_feature (1)..(936): Ceres Seq. ID no. 3659146
  misc_feature (1)..(936): Ortholog of  Ceres SEQ ID NO 12562983 as cited in SEQ ID NO 53309
  misc_feature (1)..(936): Ortholog of  Ceres SEQ ID NO 14309224 as cited in SEQ ID NO 0
atgtttgatcatatgaaactgctgcgatgcttcagcttcacggcgtcgcgagattggttattccggcaatcattcgcaaacgccggtctacgttccgtaacgacagatctctcccacggcaattcaatcgcatcaacagctatgcattgttggattcctaaatccccgaatcgatctaaacctaatctcctcctcctccacggattcggcgccaacgcaatgtggcaatacggagaacatctccgagctttcaccggccgattcaacgtctacgttcccgatctcctcttcttcgggttatcatccacatcggaaccaaaccgaaccgaatctttccaggctcggtgtctgatgaggttaatggaagcgcacggagtccagaggatgaacatcgtcgggattagttacggtggattcgttgggtatagtttagcggcgcagtttccggagaacgttgagaagcttgtgctgtgctgcgcaggggtttgtttggaggagaaagatatggaggacggattgtttaaggtgccgaatctagaagaagctaccggaattttgattcctcagacgccggaaaagcttaaggaactcataagattctctttcgttaaaccaatcaaaggtgttccttcgttttttctctgggattttatcgatgtaatgtgtacggagtttgtagaggagaagagagatttgatcaaatcaatactcaaagataggagactttctgatcttcctaggatcaaacagaaatcgttgatcatatggggagaagaagatcaaatatttccactggaactaggttacagattaaaaagacatataggagagagtgcagagatagtggtgatcaagaaagcaggacatgctgtgaatttggagaagtccaaggaatttgtcaagcatttgaaatcttttctcattgactctttgtga

SEQ ID NO: 71492 - protein, 311 aa, Arabidopsis thaliana
  peptide (1)..(311): Ceres Seq. ID no. 3659147
MFDHMKLLRCFSFTASRDWLFRQSFANAGLRSVTTDLSHGNSIASTAMHCWIPKSPNRSKPNLLLLHGFGANAMWQYGEHLRAFTGRFNVYVPDLLFFGLSSTSEPNRTESFQARCLMRLMEAHGVQRMNIVGISYGGFVGYSLAAQFPENVEKLVLCCAGVCLEEKDMEDGLFKVPNLEEATGILIPQTPEKLKELIRFSFVKPIKGVPSFFLWDFIDVMCTEFVEEKRDLIKSILKDRRLSDLPRIKQKSLIIWGEEDQIFPLELGYRLKRHIGESAEIVVIKKAGHAVNLEKSKEFVKHLKSFLIDSL

SEQ ID NO: 71493 - protein, 307 aa, Arabidopsis thaliana
  peptide (1)..(307): Ceres Seq. ID no. 3659148
MKLLRCFSFTASRDWLFRQSFANAGLRSVTTDLSHGNSIASTAMHCWIPKSPNRSKPNLLLLHGFGANAMWQYGEHLRAFTGRFNVYVPDLLFFGLSSTSEPNRTESFQARCLMRLMEAHGVQRMNIVGISYGGFVGYSLAAQFPENVEKLVLCCAGVCLEEKDMEDGLFKVPNLEEATGILIPQTPEKLKELIRFSFVKPIKGVPSFFLWDFIDVMCTEFVEEKRDLIKSILKDRRLSDLPRIKQKSLIIWGEEDQIFPLELGYRLKRHIGESAEIVVIKKAGHAVNLEKSKEFVKHLKSFLIDSL

SEQ ID NO: 71494 - protein, 264 aa, Arabidopsis thaliana
  peptide (1)..(264): Ceres Seq. ID no. 3659149
MHCWIPKSPNRSKPNLLLLHGFGANAMWQYGEHLRAFTGRFNVYVPDLLFFGLSSTSEPNRTESFQARCLMRLMEAHGVQRMNIVGISYGGFVGYSLAAQFPENVEKLVLCCAGVCLEEKDMEDGLFKVPNLEEATGILIPQTPEKLKELIRFSFVKPIKGVPSFFLWDFIDVMCTEFVEEKRDLIKSILKDRRLSDLPRIKQKSLIIWGEEDQIFPLELGYRLKRHIGESAEIVVIKKAGHAVNLEKSKEFVKHLKSFLIDSL

SEQ ID NO: 71495 - DNA, 3984 bp, Arabidopsis thaliana
  misc_feature (1)..(3984): Ceres Seq. ID no. 3659406
  misc_feature (1)..(3984): Ortholog of  Ceres SEQ ID NO 13597129 as cited in SEQ ID NO 64175
atgggtaatgttgaaattccgaattggcttaaagctttgccattggcacctgtgtttagacctacagacactgaatttgcagatcccattgcttacatatcgaaaatcgaaaaggaagctagtgcctttgggatttgcaagatcattcctcctttacccaagccatcgaaaaagtatgttttctacaacttgaacaagtctcttttgaagtgtcccgaattggtttcagatgttgacatttcgaaggtgtgtaaagaggatagagctgtattcaccactaggcagcaagagttaggccaaactgtgaaaaaaaacaaaggagagaagggtaagagtaattctcaaaggagtggtgttaagcaggtttggcaaagtggaggcgtttatacattggatcagtttgaagctaagtcgaaagctttctacaaaacccaattaggaacggttaaggaactggcaccagttgtcattgaggcattgttctggaaagcggctttagagaagcctatatatatagagtatgctaatgacgtgcctggctctgctttcggtgagccagaggatcatttcaggcatttccggcagaggaagaggaggggcaggggattttatcagaggaagacagaaaataatgatccatcaggtaagaacggtgaaaagtcatcgcctgaggtagaaaaggcaccccttgcttctacaagtttatcatctcaggattcgtccaagcagaagaacatggatattgttgatgaaatggaaggtactgcaggctggaagctctccaacagttcgtggaaccttcagatgattgcacgttcacctggttctgttacacgtttcatgccagatgacattcctggtgttacatctcccatggtttatatcggtatgttgttcagttggtttgcctggcacgttgaggatcatgagcttcacagtatgaattatcttcacactggctcaccaaagacttggtacgctgtcccttgtgattatgcgcttgactttgaagaggttatccgcaaaaattcttatggcaggaacattgaccaactggctgctctcacccaactaggcgaaaagacaactcttgtatcacctgagatgatagttgcatctggcattccctgctgtaggttggtacaaaatcctggtgaatttgttgtgacttttccgaggtcttatcatgtaggattcagccacgtggctcaacgtagcaaaggaagctgctgtgcgtcgggcagccatgaattatctacccatgctgtcccatcagcagctgctatatctcttgactatgtcctttgtttcaaggcagtgccacgatcattgctaccaggtggtcgtagctcccgactaagagatcggcagagagaagaaagagagttccttgtgaaaagagcttttgtagaagatatattgaacgaaaacaagaatttatctgttcttcttcgagaaccaggctctcgtttggtgatgtgggaccctgatttacttccgcgtcatagcgcactggctcttgcagctgctggagttgctggtgcttctgctgtttcacctccagcagtggcaaaaaaagaacttgaggagggtcattctgaattgcagaataaagaaaagacttctcttttagaggaattgagcttgttcatggagaagctgaatgatgtatactacgacgatgatgatggtctgcttaacgatttccaagttgatactggaaccttgccatgtgtggcttgtggcgttcttggcttcccctttatgtctgtggtacagccttctgaaaaagcattaaaagatctctcagagagacaaggagagacagatgctcaggaaattatgacactgtcatcagaaaagtctgactgcgaatggaaaacgtcttctagatatataagacctcgcattttctgcctcgaacacactattgaacttcagagactgctgcaatcaagaggtggattgaaattccttgttatttgccataaagactttcaaaaattcaaggcacatgcggctatagtggcagaggaggtcaaagtccctttcagctatgatgatgtcctgttagagagtgcatctcaggaagagttgagtctaattgatcttgcaattgaagatgaagaaaaatacgaacacagtgtagactggacctcagaacttggcatcaatttacggtactgtgtgaaagtgaggaaaaattcccctactaagaaaattcagcatgcactgtcactaggtggcttgttctccgatacaagccagatgctagattttacaactatcagatggctgcagagaaaatcacgctcaaaagctaaacccagttctacctcaagtttcacaccttgtgaacatcttgaagtaaaagcagatggaaaattaagggataatttggattctcagaccggaaaaaaggaagaaaagatcatccagtactcgagaaagaaaaagttgaatccaaagccttcagcagaacaagttcaggagctagctaccctagctaaatcaaaagattttgataagacatgtaaaaattttagcagtaggtcacatctggatagtgcaattcgttctgagatgaacagtgagattggagactctggaagggtcattggggtatcattttccataaatccttgtagctcatctttcactgtgggacatgggcaagaacatcccgagatcactgtcaagtttggttcagatttagatgggaatgtcacaaatagtttgagtatggtgaatggagactctgctgacctaaccttaacctccatatccagagagcagcaccaaggacactctatgaccagcaataataatggctccaactcaggtagtcatgttgtggcaagccagaccatacttgtttctacaggtgataatcatgacggaccaagaaaattgtctggtgattatgtctgcagtgatgtgtctgtacgtggtattcaggaagcggttgaaatgagtgaccaagagtttggagaacctaggtctactgtcactaatattgaggatgaacagcaatcacagattgtgaaaccaacccaaagagaagctgtatttggtgatcacgaacaggtggagggagcagaagctgtgtctaccagagaaaacttgtgctctgaaataattctgcacactgagcattcttcagctcatgtgggtatggaaattcctgacataaacacggccagtgagaacttagttgttgacatgacccatgatggtgaacctttggaaagtagcgatatattaagttcgagcaatggtgatgaagcttcttcaaatggattgcaagttctaaatgatgagcttagcatggagagtgaagtttcaagctcagaaaacaccgaagttattgaggctcccaattctatgggagaagcaaagaagaagcggaaaatagaatcagagtctgagacaaatgataatccagagagtagcattggtttcataaggagtccttgtgaagggttgaggtcaaggggcaagaggaaagcaacatgtgaaacttcattaaagcacactgaaacgagtgatgaagagaagaaacccattgcgaaaaggctgaagaaaacaccaaaggcttgctcagggagtcgtcagcaagaagtccccacgacaactcaccccaaccgttgttacctagagggatgcaagatgacttttgagagtaaagcgaaattacaaactcacaagagaaaccgttgcactcacgaagggtgtggaaagaaattcagggctcacaaatatctggtgcttcatcaacgtgtgcataaggatgaaagacctttcgagtgctcttggaaaggatgttcaatgactttcaaatggcaatgggcgaggacagaacatttgcgtctgcacacgggagagcgaccatacatatgcaaggtcgatggatgtggattgtcgtttaggtttgtatctgactatagtcgccacagacgtaaaaccatgcactatgtcacatag

SEQ ID NO: 71496 - protein, 1327 aa, Arabidopsis thaliana
  peptide (1)..(1327): Ceres Seq. ID no. 3659407
MGNVEIPNWLKALPLAPVFRPTDTEFADPIAYISKIEKEASAFGICKIIPPLPKPSKKYVFYNLNKSLLKCPELVSDVDISKVCKEDRAVFTTRQQELGQTVKKNKGEKGKSNSQRSGVKQVWQSGGVYTLDQFEAKSKAFYKTQLGTVKELAPVVIEALFWKAALEKPIYIEYANDVPGSAFGEPEDHFRHFRQRKRRGRGFYQRKTENNDPSGKNGEKSSPEVEKAPLASTSLSSQDSSKQKNMDIVDEMEGTAGWKLSNSSWNLQMIARSPGSVTRFMPDDIPGVTSPMVYIGMLFSWFAWHVEDHELHSMNYLHTGSPKTWYAVPCDYALDFEEVIRKNSYGRNIDQLAALTQLGEKTTLVSPEMIVASGIPCCRLVQNPGEFVVTFPRSYHVGFSHVAQRSKGSCCASGSHELSTHAVPSAAAISLDYVLCFKAVPRSLLPGGRSSRLRDRQREEREFLVKRAFVEDILNENKNLSVLLREPGSRLVMWDPDLLPRHSALALAAAGVAGASAVSPPAVAKKELEEGHSELQNKEKTSLLEELSLFMEKLNDVYYDDDDGLLNDFQVDTGTLPCVACGVLGFPFMSVVQPSEKALKDLSERQGETDAQEIMTLSSEKSDCEWKTSSRYIRPRIFCLEHTIELQRLLQSRGGLKFLVICHKDFQKFKAHAAIVAEEVKVPFSYDDVLLESASQEELSLIDLAIEDEEKYEHSVDWTSELGINLRYCVKVRKNSPTKKIQHALSLGGLFSDTSQMLDFTTIRWLQRKSRSKAKPSSTSSFTPCEHLEVKADGKLRDNLDSQTGKKEEKIIQYSRKKKLNPKPSAEQVQELATLAKSKDFDKTCKNFSSRSHLDSAIRSEMNSEIGDSGRVIGVSFSINPCSSSFTVGHGQEHPEITVKFGSDLDGNVTNSLSMVNGDSADLTLTSISREQHQGHSMTSNNNGSNSGSHVVASQTILVSTGDNHDGPRKLSGDYVCSDVSVRGIQEAVEMSDQEFGEPRSTVTNIEDEQQSQIVKPTQREAVFGDHEQVEGAEAVSTRENLCSEIILHTEHSSAHVGMEIPDINTASENLVVDMTHDGEPLESSDILSSSNGDEASSNGLQVLNDELSMESEVSSSENTEVIEAPNSMGEAKKKRKIESESETNDNPESSIGFIRSPCEGLRSRGKRKATCETSLKHTETSDEEKKPIAKRLKKTPKACSGSRQQEVPTTTHPNRCYLEGCKMTFESKAKLQTHKRNRCTHEGCGKKFRAHKYLVLHQRVHKDERPFECSWKGCSMTFKWQWARTEHLRLHTGERPYICKVDGCGLSFRFVSDYSRHRRKTMHYVT

SEQ ID NO: 71497 - protein, 1082 aa, Arabidopsis thaliana
  peptide (1)..(1082): Ceres Seq. ID no. 3659408
MDIVDEMEGTAGWKLSNSSWNLQMIARSPGSVTRFMPDDIPGVTSPMVYIGMLFSWFAWHVEDHELHSMNYLHTGSPKTWYAVPCDYALDFEEVIRKNSYGRNIDQLAALTQLGEKTTLVSPEMIVASGIPCCRLVQNPGEFVVTFPRSYHVGFSHVAQRSKGSCCASGSHELSTHAVPSAAAISLDYVLCFKAVPRSLLPGGRSSRLRDRQREEREFLVKRAFVEDILNENKNLSVLLREPGSRLVMWDPDLLPRHSALALAAAGVAGASAVSPPAVAKKELEEGHSELQNKEKTSLLEELSLFMEKLNDVYYDDDDGLLNDFQVDTGTLPCVACGVLGFPFMSVVQPSEKALKDLSERQGETDAQEIMTLSSEKSDCEWKTSSRYIRPRIFCLEHTIELQRLLQSRGGLKFLVICHKDFQKFKAHAAIVAEEVKVPFSYDDVLLESASQEELSLIDLAIEDEEKYEHSVDWTSELGINLRYCVKVRKNSPTKKIQHALSLGGLFSDTSQMLDFTTIRWLQRKSRSKAKPSSTSSFTPCEHLEVKADGKLRDNLDSQTGKKEEKIIQYSRKKKLNPKPSAEQVQELATLAKSKDFDKTCKNFSSRSHLDSAIRSEMNSEIGDSGRVIGVSFSINPCSSSFTVGHGQEHPEITVKFGSDLDGNVTNSLSMVNGDSADLTLTSISREQHQGHSMTSNNNGSNSGSHVVASQTILVSTGDNHDGPRKLSGDYVCSDVSVRGIQEAVEMSDQEFGEPRSTVTNIEDEQQSQIVKPTQREAVFGDHEQVEGAEAVSTRENLCSEIILHTEHSSAHVGMEIPDINTASENLVVDMTHDGEPLESSDILSSSNGDEASSNGLQVLNDELSMESEVSSSENTEVIEAPNSMGEAKKKRKIESESETNDNPESSIGFIRSPCEGLRSRGKRKATCETSLKHTETSDEEKKPIAKRLKKTPKACSGSRQQEVPTTTHPNRCYLEGCKMTFESKAKLQTHKRNRCTHEGCGKKFRAHKYLVLHQRVHKDERPFECSWKGCSMTFKWQWARTEHLRLHTGERPYICKVDGCGLSFRFVSDYSRHRRKTMHYVT

SEQ ID NO: 71498 - protein, 1076 aa, Arabidopsis thaliana
  peptide (1)..(1076): Ceres Seq. ID no. 3659409
MEGTAGWKLSNSSWNLQMIARSPGSVTRFMPDDIPGVTSPMVYIGMLFSWFAWHVEDHELHSMNYLHTGSPKTWYAVPCDYALDFEEVIRKNSYGRNIDQLAALTQLGEKTTLVSPEMIVASGIPCCRLVQNPGEFVVTFPRSYHVGFSHVAQRSKGSCCASGSHELSTHAVPSAAAISLDYVLCFKAVPRSLLPGGRSSRLRDRQREEREFLVKRAFVEDILNENKNLSVLLREPGSRLVMWDPDLLPRHSALALAAAGVAGASAVSPPAVAKKELEEGHSELQNKEKTSLLEELSLFMEKLNDVYYDDDDGLLNDFQVDTGTLPCVACGVLGFPFMSVVQPSEKALKDLSERQGETDAQEIMTLSSEKSDCEWKTSSRYIRPRIFCLEHTIELQRLLQSRGGLKFLVICHKDFQKFKAHAAIVAEEVKVPFSYDDVLLESASQEELSLIDLAIEDEEKYEHSVDWTSELGINLRYCVKVRKNSPTKKIQHALSLGGLFSDTSQMLDFTTIRWLQRKSRSKAKPSSTSSFTPCEHLEVKADGKLRDNLDSQTGKKEEKIIQYSRKKKLNPKPSAEQVQELATLAKSKDFDKTCKNFSSRSHLDSAIRSEMNSEIGDSGRVIGVSFSINPCSSSFTVGHGQEHPEITVKFGSDLDGNVTNSLSMVNGDSADLTLTSISREQHQGHSMTSNNNGSNSGSHVVASQTILVSTGDNHDGPRKLSGDYVCSDVSVRGIQEAVEMSDQEFGEPRSTVTNIEDEQQSQIVKPTQREAVFGDHEQVEGAEAVSTRENLCSEIILHTEHSSAHVGMEIPDINTASENLVVDMTHDGEPLESSDILSSSNGDEASSNGLQVLNDELSMESEVSSSENTEVIEAPNSMGEAKKKRKIESESETNDNPESSIGFIRSPCEGLRSRGKRKATCETSLKHTETSDEEKKPIAKRLKKTPKACSGSRQQEVPTTTHPNRCYLEGCKMTFESKAKLQTHKRNRCTHEGCGKKFRAHKYLVLHQRVHKDERPFECSWKGCSMTFKWQWARTEHLRLHTGERPYICKVDGCGLSFRFVSDYSRHRRKTMHYVT

SEQ ID NO: 71499 - DNA, 1248 bp, Arabidopsis thaliana
  misc_feature (1)..(1248): Ceres Seq. ID no. 3659606
  misc_feature (1)..(1248): Ortholog of  Ceres SEQ ID NO 13594189 as cited in SEQ ID NO 58890
atgcttcaatgtatctttctcatctccgattctggagaggtaatgctagagaagcagcttactggtcatcgcgttgatagatccatatgtgcttggttctgggatcaatatatttctcaaggcgattcctttaaggcacttccagtgattgcttcaccaacacattatctatttcaaattgttcgtgacggaattacgttcttagcttgtagtcaagttgaaatgccaccgttgatggcaatcgagttcctttgcagagttgctgatgttttgtctgagtaccttggtgggctaaatgaagatctcattaaggataatttcatcattgtctatgagcttttggatgagatgatcgataatggtttccctctcacaacagaacctagtatcctgaaggaaatgatagctccaccgaatctagtcagcaaaatgttgagtgttgtaacgggaaatgcttcgaatgttagtgacacgcttccgagtggggcgggctcttgtgttccttggcgaccgacagatccaaagtactctagcaacgaagtttatgtcgaccttgttgaagagatggatgcaattgtaaacagggatggagaattggtaaaatgcgagatttatggcgaagtccaaatgaattctcagctcactggttttccagatttgacattgtcgtttgcgaatccatcaatcctagaagacatgaggtttcacccgtgtgtccgctacagaccatgggaatctcatcaagttctctcctttgtccctccagatggagagttcaagcttatgagttacagggtgaagaagctaaagaacacacctgtatatgtaaaacctcaaataacatcagattcgggtacatgtcgaattagcgtgctagtgggaatccgaagcgatccagggaaaacaattgagtcgataaccttgagtttccagcttcctcactgtgtatcatctgcagatctctcatcaaatcatggaactgtaacaatcctctctaacaagacatgtacatggacaatcgggcgaatcccaaaggacaaaactccgtgtttgtcgggaacactagcgctggaaccagggttagaacggcttcacgtgtttccgacattcaaactcgggtttaagataatgggcattgctctttctggcctaagaatcgagaaacttgatcttcaaactatccctcctcgtttgtacaaagggtttcgtgctcagacacgcgctggtgagttcgatgtcaggttgtag

SEQ ID NO: 71500 - protein, 415 aa, Arabidopsis thaliana
  peptide (1)..(415): Ceres Seq. ID no. 3659607
MLQCIFLISDSGEVMLEKQLTGHRVDRSICAWFWDQYISQGDSFKALPVIASPTHYLFQIVRDGITFLACSQVEMPPLMAIEFLCRVADVLSEYLGGLNEDLIKDNFIIVYELLDEMIDNGFPLTTEPSILKEMIAPPNLVSKMLSVVTGNASNVSDTLPSGAGSCVPWRPTDPKYSSNEVYVDLVEEMDAIVNRDGELVKCEIYGEVQMNSQLTGFPDLTLSFANPSILEDMRFHPCVRYRPWESHQVLSFVPPDGEFKLMSYRVKKLKNTPVYVKPQITSDSGTCRISVLVGIRSDPGKTIESITLSFQLPHCVSSADLSSNHGTVTILSNKTCTWTIGRIPKDKTPCLSGTLALEPGLERLHVFPTFKLGFKIMGIALSGLRIEKLDLQTIPPRLYKGFRAQTRAGEFDVRL

SEQ ID NO: 71501 - protein, 401 aa, Arabidopsis thaliana
  peptide (1)..(401): Ceres Seq. ID no. 3659608
MLEKQLTGHRVDRSICAWFWDQYISQGDSFKALPVIASPTHYLFQIVRDGITFLACSQVEMPPLMAIEFLCRVADVLSEYLGGLNEDLIKDNFIIVYELLDEMIDNGFPLTTEPSILKEMIAPPNLVSKMLSVVTGNASNVSDTLPSGAGSCVPWRPTDPKYSSNEVYVDLVEEMDAIVNRDGELVKCEIYGEVQMNSQLTGFPDLTLSFANPSILEDMRFHPCVRYRPWESHQVLSFVPPDGEFKLMSYRVKKLKNTPVYVKPQITSDSGTCRISVLVGIRSDPGKTIESITLSFQLPHCVSSADLSSNHGTVTILSNKTCTWTIGRIPKDKTPCLSGTLALEPGLERLHVFPTFKLGFKIMGIALSGLRIEKLDLQTIPPRLYKGFRAQTRAGEFDVRL

SEQ ID NO: 71502 - protein, 341 aa, Arabidopsis thaliana
  peptide (1)..(341): Ceres Seq. ID no. 3659609
MPPLMAIEFLCRVADVLSEYLGGLNEDLIKDNFIIVYELLDEMIDNGFPLTTEPSILKEMIAPPNLVSKMLSVVTGNASNVSDTLPSGAGSCVPWRPTDPKYSSNEVYVDLVEEMDAIVNRDGELVKCEIYGEVQMNSQLTGFPDLTLSFANPSILEDMRFHPCVRYRPWESHQVLSFVPPDGEFKLMSYRVKKLKNTPVYVKPQITSDSGTCRISVLVGIRSDPGKTIESITLSFQLPHCVSSADLSSNHGTVTILSNKTCTWTIGRIPKDKTPCLSGTLALEPGLERLHVFPTFKLGFKIMGIALSGLRIEKLDLQTIPPRLYKGFRAQTRAGEFDVRL

SEQ ID NO: 71503 - DNA, 1314 bp, Arabidopsis thaliana
  misc_feature (1)..(1314): Ceres Seq. ID no. 4263684
  misc_feature (1)..(1314): Ortholog of  Ceres SEQ ID NO 13663419 as cited in SEQ ID NO 66561
atggggaaagagtgctactacttgtcatggatactcaagtttcatcttctacttgttttgattcagcttgttgattcaggatctaccatcagatttcttcctggtttccaaggccctcttcctttcgagctcgagaccgggtacattggtgtgggtgaggcagagaaagatcaaatgttctactacttcatcaaatctgagagtaatccagagaaagaccctcttcttctctggttaagtggaggtcctttctgttcttcgttcactgctcttatttatgagaatgggccaattgctttcaaggctgaggaatacaatggaagtatcccctctttggtctctaccacatatgcatggactaaggtggcgagcattctctatttggatcagcctgttgggactggcttctcctactccagaaatccacttgctgatataccaagtgacacaggggtagctaagccggtcaacgagtttcttcataagtggctagacaaacatcctgagttcttatccaatccgctctatgtcgccggaaattcttattccggtattgtcattccgaccatcgttcaagaaatctcaaatggaaaccatttagacagcaaacctcaaataaatcttcagggctttgtactcggaaacccggcaacagacactgatattgatcttaactctcgcattccatttgctcatggaaaggcactgatctctgatgaacactatgagtctctaaagagaagttgtcaagggaattatattagcgtgaatcctcgtaacacaaaatgcttgaaactccttgaagactttaaaaagtgtgtttctggaataagtgaagaatatattctaaaacctgactgcatgtggctttattcttgtatggcaaatctgcattcgctatctgaatattgggcaaatgagaaaagcgtgcgcaaagctcttctagtgaacgagggtaccgtaagaaaatggatacgatgtaatacggaaatcgcatacaataaggacattaggagtagtgtgccatatcataagtatattagcattgaagggtatcgatctctcgtcttcagtggtgatcacgacatgttagtacctttccttggaactcaagcatggataagatctctcaactattccattgttgacgattggagaccatggatggttcagaatcaagttgctggatacacaaggacttatgcgaataagatgacatttgccactgtcaaaggaggcgggcacacgagtgagtataaaccagtggagacctatatcatgatcaagaggtggttaagtggtcaacctctataa

SEQ ID NO: 71504 - protein, 437 aa, Arabidopsis thaliana
  peptide (1)..(437): Ceres Seq. ID no. 4263685
MGKECYYLSWILKFHLLLVLIQLVDSGSTIRFLPGFQGPLPFELETGYIGVGEAEKDQMFYYFIKSESNPEKDPLLLWLSGGPFCSSFTALIYENGPIAFKAEEYNGSIPSLVSTTYAWTKVASILYLDQPVGTGFSYSRNPLADIPSDTGVAKPVNEFLHKWLDKHPEFLSNPLYVAGNSYSGIVIPTIVQEISNGNHLDSKPQINLQGFVLGNPATDTDIDLNSRIPFAHGKALISDEHYESLKRSCQGNYISVNPRNTKCLKLLEDFKKCVSGISEEYILKPDCMWLYSCMANLHSLSEYWANEKSVRKALLVNEGTVRKWIRCNTEIAYNKDIRSSVPYHKYISIEGYRSLVFSGDHDMLVPFLGTQAWIRSLNYSIVDDWRPWMVQNQVAGYTRTYANKMTFATVKGGGHTSEYKPVETYIMIKRWLSGQPL

SEQ ID NO: 71505 - protein, 379 aa, Arabidopsis thaliana
  peptide (1)..(379): Ceres Seq. ID no. 4263686
MFYYFIKSESNPEKDPLLLWLSGGPFCSSFTALIYENGPIAFKAEEYNGSIPSLVSTTYAWTKVASILYLDQPVGTGFSYSRNPLADIPSDTGVAKPVNEFLHKWLDKHPEFLSNPLYVAGNSYSGIVIPTIVQEISNGNHLDSKPQINLQGFVLGNPATDTDIDLNSRIPFAHGKALISDEHYESLKRSCQGNYISVNPRNTKCLKLLEDFKKCVSGISEEYILKPDCMWLYSCMANLHSLSEYWANEKSVRKALLVNEGTVRKWIRCNTEIAYNKDIRSSVPYHKYISIEGYRSLVFSGDHDMLVPFLGTQAWIRSLNYSIVDDWRPWMVQNQVAGYTRTYANKMTFATVKGGGHTSEYKPVETYIMIKRWLSGQPL

SEQ ID NO: 71506 - DNA, 678 bp, Arabidopsis thaliana
  misc_feature (1)..(678): Ceres Seq. ID no. 4265244
  misc_feature (1)..(678): Ortholog of  Ceres SEQ ID NO 13594390 as cited in SEQ ID NO 51060
  misc_feature (1)..(678): Ortholog of  Ceres SEQ ID NO 14309565 as cited in SEQ ID NO 52731
atgggaaacagcattactgtgaagagaaaaagagctaaagtaatgaagatcgacggcgaaactttccgaattaaaactccggtgacggcgagagaagtcaccgcggattatcccggttacgttttgttagattctcaagccgttaaacactttggagttcgctctaagccgcttgaaccgaaccaaaccttgaagccgaaaaagacttattttctcgtcgagcttcctaagcttccaccggagacgacggcggtggatacagaaaataagctaccgtaccggagagtgatgtctggtatccacgttggcgcaaaggagcggttagatatgttgatgttgtctcggagaacggtttctgacgtcacaatcggaagatctgacggtggagatgggtttgggcctgagcttgggcctggacatacgagtgtgaggttgaggttgcctcgttctcagatcacgaagcttatggaagagaataataatgatgcttcggccatagctgagaagattttaggtatctatatggagaggtctggcgagcttggcggcggtagaggtggtgttgacggccgccgggaacttggaagtggggagattaaagcgcgtgagaagcaggtgagtttcgccggagaaggtggacgggagcttcctgttctatggagtagaagtggaaaataa

SEQ ID NO: 71507 - protein, 225 aa, Arabidopsis thaliana
  peptide (1)..(225): Ceres Seq. ID no. 4265245
MGNSITVKRKRAKVMKIDGETFRIKTPVTAREVTADYPGYVLLDSQAVKHFGVRSKPLEPNQTLKPKKTYFLVELPKLPPETTAVDTENKLPYRRVMSGIHVGAKERLDMLMLSRRTVSDVTIGRSDGGDGFGPELGPGHTSVRLRLPRSQITKLMEENNNDASAIAEKILGIYMERSGELGGGRGGVDGRRELGSGEIKAREKQVSFAGEGGRELPVLWSRSGK

SEQ ID NO: 71508 - protein, 211 aa, Arabidopsis thaliana
  peptide (1)..(211): Ceres Seq. ID no. 4265246
MKIDGETFRIKTPVTAREVTADYPGYVLLDSQAVKHFGVRSKPLEPNQTLKPKKTYFLVELPKLPPETTAVDTENKLPYRRVMSGIHVGAKERLDMLMLSRRTVSDVTIGRSDGGDGFGPELGPGHTSVRLRLPRSQITKLMEENNNDASAIAEKILGIYMERSGELGGGRGGVDGRRELGSGEIKAREKQVSFAGEGGRELPVLWSRSGK

SEQ ID NO: 71509 - protein, 129 aa, Arabidopsis thaliana
  peptide (1)..(129): Ceres Seq. ID no. 4265247
MSGIHVGAKERLDMLMLSRRTVSDVTIGRSDGGDGFGPELGPGHTSVRLRLPRSQITKLMEENNNDASAIAEKILGIYMERSGELGGGRGGVDGRRELGSGEIKAREKQVSFAGEGGRELPVLWSRSGK

SEQ ID NO: 71510 - DNA, 1431 bp, Arabidopsis thaliana
  misc_feature (1)..(1431): Ceres Seq. ID no. 4265882
  misc_feature (1)..(1431): Ortholog of  Ceres SEQ ID NO 14304288 as cited in SEQ ID NO 53234
  misc_feature (1)..(1431): Ortholog of  Ceres SEQ ID NO 13662646 as cited in SEQ ID NO 60746
atggctaggtcaccgagcaaacacggccgcgatcaaactcaggatttccagggatttttcaatgacttgcaggattgggaactctcattgaaggataaagacaagaagattaagcaacaacctgctaattcgtcgaatccgagtagtgagacgttcagaccaagtgggtcagggaaatatgactttgctaaaaagtatcgttccattagggatttgtcgagtagtttgattggagaaagtctattggattctagttcagagaaggagcagggtaatgaattcttcaagcagaagaagttcaatgaggcgattgattgttactctcggagcattgctttatcgccaaatgctgtgacttatgcaaatcgagcaatggcttaccttaaaatcaaaagatatcgagaggctgaggttgactgcacagaagctttaaatctggatgatcgatatataaaagcttactcacgccgagcaacagcaagaaaagaactcggcatgattaaagaagccaaagaagatgctgagtttgccttaagattggagcctgagagccaggaacttaagaagcaatatgccgatatcaaatctttgctcgagaaagaaatcattgagaaagccactggagcaatgcaaagcactgcacaagaattactcaaaacatcaggtttagataagaaaatacaaaagccaaagacagaaatgacttcaaagccagtgaccctagtggccaaaacgaacagggatattgttcagcctgttctaggtagcaatgaaagttcgggaaagaagctcattgaaaatatacaacctgaggagaaaagcaaagaaggttccatgaaaattccagctatcacggaaattctagacagcaagaaagtgacgcctggaagccaaagttatgaaaaggaggcgaagccttctgacagaaatggtactcagccttctggaccggaaaaccaggtttctaaacagctggaactaaagccatcagtacaagagcttgctgctcatgcagcgtcacttgcgatgactgaagcttctaaaaacattaaaaccccaaaatctgcttacgaatttgagaactcttggcggagtttttccggcgacagtgccctacgaagccaattgttgaaggtcacgactccgagctctttacctcagattttcaagaacgccctgacctctccggtgctggttgacataatcaaatgtgtagcctcattcttcactgaagacatggatttggcagttaaatacattgagaacctaacaaaggttcctagattcaacatgctcgtcatgtgccttacctcaaccgagaaaaacgagctactgaagatatgggaagatgttttctgcaataaagcaaccccaatggagtatgcagaggtcttagacaaactaaggtcaagatactgccttaaacagtaa

SEQ ID NO: 71511 - protein, 476 aa, Arabidopsis thaliana
  peptide (1)..(476): Ceres Seq. ID no. 4265883
MARSPSKHGRDQTQDFQGFFNDLQDWELSLKDKDKKIKQQPANSSNPSSETFRPSGSGKYDFAKKYRSIRDLSSSLIGESLLDSSSEKEQGNEFFKQKKFNEAIDCYSRSIALSPNAVTYANRAMAYLKIKRYREAEVDCTEALNLDDRYIKAYSRRATARKELGMIKEAKEDAEFALRLEPESQELKKQYADIKSLLEKEIIEKATGAMQSTAQELLKTSGLDKKIQKPKTEMTSKPVTLVAKTNRDIVQPVLGSNESSGKKLIENIQPEEKSKEGSMKIPAITEILDSKKVTPGSQSYEKEAKPSDRNGTQPSGPENQVSKQLELKPSVQELAAHAASLAMTEASKNIKTPKSAYEFENSWRSFSGDSALRSQLLKVTTPSSLPQIFKNALTSPVLVDIIKCVASFFTEDMDLAVKYIENLTKVPRFNMLVMCLTSTEKNELLKIWEDVFCNKATPMEYAEVLDKLRSRYCLKQ

SEQ ID NO: 71512 - protein, 352 aa, Arabidopsis thaliana
  peptide (1)..(352): Ceres Seq. ID no. 4265884
MAYLKIKRYREAEVDCTEALNLDDRYIKAYSRRATARKELGMIKEAKEDAEFALRLEPESQELKKQYADIKSLLEKEIIEKATGAMQSTAQELLKTSGLDKKIQKPKTEMTSKPVTLVAKTNRDIVQPVLGSNESSGKKLIENIQPEEKSKEGSMKIPAITEILDSKKVTPGSQSYEKEAKPSDRNGTQPSGPENQVSKQLELKPSVQELAAHAASLAMTEASKNIKTPKSAYEFENSWRSFSGDSALRSQLLKVTTPSSLPQIFKNALTSPVLVDIIKCVASFFTEDMDLAVKYIENLTKVPRFNMLVMCLTSTEKNELLKIWEDVFCNKATPMEYAEVLDKLRSRYCLKQ

SEQ ID NO: 71513 - protein, 311 aa, Arabidopsis thaliana
  peptide (1)..(311): Ceres Seq. ID no. 4265885
MIKEAKEDAEFALRLEPESQELKKQYADIKSLLEKEIIEKATGAMQSTAQELLKTSGLDKKIQKPKTEMTSKPVTLVAKTNRDIVQPVLGSNESSGKKLIENIQPEEKSKEGSMKIPAITEILDSKKVTPGSQSYEKEAKPSDRNGTQPSGPENQVSKQLELKPSVQELAAHAASLAMTEASKNIKTPKSAYEFENSWRSFSGDSALRSQLLKVTTPSSLPQIFKNALTSPVLVDIIKCVASFFTEDMDLAVKYIENLTKVPRFNMLVMCLTSTEKNELLKIWEDVFCNKATPMEYAEVLDKLRSRYCLKQ

SEQ ID NO: 71514 - DNA, 2250 bp, Arabidopsis thaliana
  misc_feature (1)..(2250): Ceres Seq. ID no. 4266693
  misc_feature (1)..(2250): Ortholog of  Ceres SEQ ID NO 15226186 as cited in SEQ ID NO 0
atggcggctaacaaattcgcgactctgattcatcggaaaacaaaccgaatcactttaatcctcgtatacgcttttctcgaatggtcactcattttcttcattttgctcaactctctcttttcttatttcatactcagattcgctgattatttcggtcttaaacgtccttgtctcttctgctctagactcgatcgtttcttcgatgcttctggtaaatctccttctcatcgagatcttctctgcgatgatcatgctctccaattacattcaaaacctgttgaagaatctaattgtggtttcggagaatttcacaatgatttggttcatcgtggttgttgcgtagagaagataagttcgtcactatgtgctccgattgagtctgactttgggaatttagattatccaattggagatgaaggtcagatttacaatggtcttaagtttcctcgatcgatcttcgtctttgaagaagagaaagtaggatctgtaaatttgaatgattctcaggaagaaacagaggagaagaaagttccccaatctcatgagaaacttgaagatgatgatgttgatgaggagttttcatgctatgtatcaagcttcgattgtaagaacaaagaaattgcaacagagaaggaagaagaaaacagagtggatctacctatagaggtggaaactgcagaatcagctccgaaaaacctcgagttctatattgatgaagaagactgtcatttgattccagttgaattctataaaccgagtgaagaagttcgagagatttccgacattaacggagattttatcctcgatttcggcgttgagcatgatttcacggcggcggcggagacggaggaaatctccgactttgcttcgccgggtgaatcgaaaccggaggatgcagagacgaatctagttgcttcggaaatggaaaacgacgacgaagaaacagacgcagaggtttctataggtacagagattcctgatcatgagcaaatcggagatattccttctcaccagctcattcctcaccacgatgacgatgatcatgaggaggaaacgttggagttcaaaacagtaacgattgaaaccaagatgccagtcttaaacatcaacgaagagcggattttagaagctcaaggctcgatggaaagctcgcatagtagtctacataacgctatgtttcacttagagcaaagagtatctgttgatggtattgaatgtcctgaaggagtactcactgttgataagttgaagtttgagttacaagaagagagaaaagcacttcacgcgttatacgaggagctggaggtagagaggaatgcgtctgctgttgctgccagtgaaacaatggcgatgatcaataggttgcatgaggagaaagctgcgatgcagatggaagcgttgcagtatcagagaatgatggaggagcaagctgagtttgatcaagaagctttgcagttgttgaatgagcttatggtgaatagagagaaggagaatgctgagcttgagaaggagctagaggtgtatagaaagagaatggaggagtatgaagctaaagagaaaatggggatgttgaggaggagattgagagattcctctgttgattcgtatagaaataatggcgattctgatgagaatagcaatggagagttacagtttaagaacgttgaaggggttacggattggaaatatagagagaatgagatggagaatacgccggtggatgttgtacttcgtcttgatgagtgtttagatgattatgatggagagaggctttcgattcttgggagattgaagtttcttgaagagaaactcacagatcttaataacgaagaggacgacgaggaggaggctaaaacgtttgagagtaatggtagcatcaatggaaatgagcatattcatggcaaagaaacaaacgggaagcacagagttatcaagtcaaagagattacttcccctgtttgatgcggtcgatggagagatggaaaacgggttaagtaacggaaaccatcacgaaaacgggtttgatgattcggagaagggtgagaatgtgacgatagaagaagaagtggatgagctttacgagaggttagaagctctagaggcagatagagagttcttaagacattgtgttggttcattgaaaaaaggagacaaaggtgtacatctcctccatgagattctgcaacatcttcgtgatctaaggaatatcgatcttactcgcgtcagagaaaacggagacatgagtttatga

SEQ ID NO: 71515 - protein, 749 aa, Arabidopsis thaliana
  peptide (1)..(749): Ceres Seq. ID no. 4266694
MAANKFATLIHRKTNRITLILVYAFLEWSLIFFILLNSLFSYFILRFADYFGLKRPCLFCSRLDRFFDASGKSPSHRDLLCDDHALQLHSKPVEESNCGFGEFHNDLVHRGCCVEKISSSLCAPIESDFGNLDYPIGDEGQIYNGLKFPRSIFVFEEEKVGSVNLNDSQEETEEKKVPQSHEKLEDDDVDEEFSCYVSSFDCKNKEIATEKEEENRVDLPIEVETAESAPKNLEFYIDEEDCHLIPVEFYKPSEEVREISDINGDFILDFGVEHDFTAAAETEEISDFASPGESKPEDAETNLVASEMENDDEETDAEVSIGTEIPDHEQIGDIPSHQLIPHHDDDDHEEETLEFKTVTIETKMPVLNINEERILEAQGSMESSHSSLHNAMFHLEQRVSVDGIECPEGVLTVDKLKFELQEERKALHALYEELEVERNASAVAASETMAMINRLHEEKAAMQMEALQYQRMMEEQAEFDQEALQLLNELMVNREKENAELEKELEVYRKRMEEYEAKEKMGMLRRRLRDSSVDSYRNNGDSDENSNGELQFKNVEGVTDWKYRENEMENTPVDVVLRLDECLDDYDGERLSILGRLKFLEEKLTDLNNEEDDEEEAKTFESNGSINGNEHIHGKETNGKHRVIKSKRLLPLFDAVDGEMENGLSNGNHHENGFDDSEKGENVTIEEEVDELYERLEALEADREFLRHCVGSLKKGDKGVHLLHEILQHLRDLRNIDLTRVRENGDMSL

SEQ ID NO: 71516 - protein, 442 aa, Arabidopsis thaliana
  peptide (1)..(442): Ceres Seq. ID no. 4266695
MENDDEETDAEVSIGTEIPDHEQIGDIPSHQLIPHHDDDDHEEETLEFKTVTIETKMPVLNINEERILEAQGSMESSHSSLHNAMFHLEQRVSVDGIECPEGVLTVDKLKFELQEERKALHALYEELEVERNASAVAASETMAMINRLHEEKAAMQMEALQYQRMMEEQAEFDQEALQLLNELMVNREKENAELEKELEVYRKRMEEYEAKEKMGMLRRRLRDSSVDSYRNNGDSDENSNGELQFKNVEGVTDWKYRENEMENTPVDVVLRLDECLDDYDGERLSILGRLKFLEEKLTDLNNEEDDEEEAKTFESNGSINGNEHIHGKETNGKHRVIKSKRLLPLFDAVDGEMENGLSNGNHHENGFDDSEKGENVTIEEEVDELYERLEALEADREFLRHCVGSLKKGDKGVHLLHEILQHLRDLRNIDLTRVRENGDMSL

SEQ ID NO: 71517 - protein, 386 aa, Arabidopsis thaliana
  peptide (1)..(386): Ceres Seq. ID no. 4266696
MPVLNINEERILEAQGSMESSHSSLHNAMFHLEQRVSVDGIECPEGVLTVDKLKFELQEERKALHALYEELEVERNASAVAASETMAMINRLHEEKAAMQMEALQYQRMMEEQAEFDQEALQLLNELMVNREKENAELEKELEVYRKRMEEYEAKEKMGMLRRRLRDSSVDSYRNNGDSDENSNGELQFKNVEGVTDWKYRENEMENTPVDVVLRLDECLDDYDGERLSILGRLKFLEEKLTDLNNEEDDEEEAKTFESNGSINGNEHIHGKETNGKHRVIKSKRLLPLFDAVDGEMENGLSNGNHHENGFDDSEKGENVTIEEEVDELYERLEALEADREFLRHCVGSLKKGDKGVHLLHEILQHLRDLRNIDLTRVRENGDMSL

SEQ ID NO: 71518 - DNA, 1050 bp, Arabidopsis thaliana
  misc_feature (1)..(1050): Ceres Seq. ID no. 4267268
  misc_feature (1)..(1050): Ortholog of  Ceres SEQ ID NO 13597380 as cited in SEQ ID NO 64054
  misc_feature (1)..(1050): Ortholog of  Ceres SEQ ID NO 12625474 as cited in SEQ ID NO 64169
  misc_feature (1)..(1050): Ortholog of  Ceres SEQ ID NO 13597502 as cited in SEQ ID NO 64681
atgaagattcaaattatatggctcactttggttttaatcgtcgttgaagctaatgcagtcaaacaagggaaaaacgcaacgatcccggccctaatagtttttggagattcaataatggatacaggaaataacaataatcttcccactcttcttaaatgtaacttccctccatacggtaaagattatcctggaggctttgccactggaagattttctgatggaagagttccttctgatcttattgcggaaaaaataggattggctaagacattaccagcatatatgaatccatatttgaagccagaggatcttcttaaaggtgtaacatttgcatcaggaggaactggttatgatccattgacagcaaaaattatgtcagtgatatcagtgtgggatcaactcatatatttcaaagaatatatatcaaagatcaagaggcatttcggagaagaaaaagcaaaagatatcttggaacatagtttctttcttgtggtgtctagtagcaatgaccttgctcacacttatttagctcaagctcatagatatgatcgtacctcttatgccaatttcttggctgactctgctgttcatttcgtgagagaattacacaagcttggagctcaaaaaattggagtgtttagtgcagtccctgttggttgtgttccactccaaagaacagtttttggaggtttttttacaagaggatgtaatcaacctctaaacaacatggcaaaacaattcaacgcaagactttctccagcactagattctttagataaagagttggatggtgttatcctttacattaatgtttatgatactcttttcgacatgatccaacaccctaaaaaatacggttttgaagtggctgatagaggatgttgcggtaaaggactgctcacgatctcctatttatgtaactcattgaaccaatttacgtgttctaactcttcagcttatatattttgggatagctatcatccaagtaaaagagcttatcaagttattgtcgacaatttacttgacaaatatttgagcaaagtatattga

SEQ ID NO: 71519 - protein, 349 aa, Arabidopsis thaliana
  peptide (1)..(349): Ceres Seq. ID no. 4267269
MKIQIIWLTLVLIVVEANAVKQGKNATIPALIVFGDSIMDTGNNNNLPTLLKCNFPPYGKDYPGGFATGRFSDGRVPSDLIAEKIGLAKTLPAYMNPYLKPEDLLKGVTFASGGTGYDPLTAKIMSVISVWDQLIYFKEYISKIKRHFGEEKAKDILEHSFFLVVSSSNDLAHTYLAQAHRYDRTSYANFLADSAVHFVRELHKLGAQKIGVFSAVPVGCVPLQRTVFGGFFTRGCNQPLNNMAKQFNARLSPALDSLDKELDGVILYINVYDTLFDMIQHPKKYGFEVADRGCCGKGLLTISYLCNSLNQFTCSNSSAYIFWDSYHPSKRAYQVIVDNLLDKYLSKVY

SEQ ID NO: 71520 - protein, 311 aa, Arabidopsis thaliana
  peptide (1)..(311): Ceres Seq. ID no. 4267270
MDTGNNNNLPTLLKCNFPPYGKDYPGGFATGRFSDGRVPSDLIAEKIGLAKTLPAYMNPYLKPEDLLKGVTFASGGTGYDPLTAKIMSVISVWDQLIYFKEYISKIKRHFGEEKAKDILEHSFFLVVSSSNDLAHTYLAQAHRYDRTSYANFLADSAVHFVRELHKLGAQKIGVFSAVPVGCVPLQRTVFGGFFTRGCNQPLNNMAKQFNARLSPALDSLDKELDGVILYINVYDTLFDMIQHPKKYGFEVADRGCCGKGLLTISYLCNSLNQFTCSNSSAYIFWDSYHPSKRAYQVIVDNLLDKYLSKVY

SEQ ID NO: 71521 - protein, 255 aa, Arabidopsis thaliana
  peptide (1)..(255): Ceres Seq. ID no. 4267271
MNPYLKPEDLLKGVTFASGGTGYDPLTAKIMSVISVWDQLIYFKEYISKIKRHFGEEKAKDILEHSFFLVVSSSNDLAHTYLAQAHRYDRTSYANFLADSAVHFVRELHKLGAQKIGVFSAVPVGCVPLQRTVFGGFFTRGCNQPLNNMAKQFNARLSPALDSLDKELDGVILYINVYDTLFDMIQHPKKYGFEVADRGCCGKGLLTISYLCNSLNQFTCSNSSAYIFWDSYHPSKRAYQVIVDNLLDKYLSKVY

SEQ ID NO: 71522 - DNA, 918 bp, Arabidopsis thaliana
  misc_feature (1)..(918): Ceres Seq. ID no. 4267728
  misc_feature (1)..(918): Ortholog of  Ceres SEQ ID NO 13582619 as cited in SEQ ID NO 56520
  misc_feature (1)..(918): Ortholog of  Ceres SEQ ID NO 14315846 as cited in SEQ ID NO 58094
  misc_feature (1)..(918): Ortholog of  Ceres SEQ ID NO 13660872 as cited in SEQ ID NO 60830
  misc_feature (1)..(918): Ortholog of  Ceres SEQ ID NO 15226831 as cited in SEQ ID NO 62916
  misc_feature (1)..(918): Ortholog of  Ceres SEQ ID NO 12616221 as cited in SEQ ID NO 63291
atgagttcgtctaacggaggtgtaccgcctggttttcggtttcatccaacggacgaagaacttcttcattactacttgaagaagaagatttcttatgaaaagtttgagatggaagtcatcaaagaggttgatttgaacaagattgagccgtgggatttacaagatagatgcaaaataggatcaacgccacaaaatgagtggtatttcttcagccacaaggataggaaatatccgacagggtcaaggacaaaccgtgcaacccactccggtttttggaaggcgacaggacgtgacaaatgcataagaaattcttacaagaagatcggcatgaggaagactcttgtattctacaaaggaagagctcctcatggccaaaagacagattggatcatgcacgagtaccgtatcgaagacactgaagatgacccttgtgaagatggatgggttgtttgtagagtgttcaagaagaaaaatctgttcaaagtagggaatgatgttggctcaaacatcagcaataataggcttgaagctcgtagtttcatccgaagagaaagcccttaccaaggaatctcaatgtttgagcttaacaagcctgaagagattagtgttcatcaatatcctcaaccaccaatgtttcaacctcatcacaagcctctttcaataggctatgactattcattggctcttctaccaagagaaagcgagtaccaacaagcgtgtcagccatcaggggttgaggttggcacgtgcaaggcagtaagtgaatggggaatagtgaattgtaacatggtgagtcatgaggactcgtctagagcgatgaggtttgaagatgacggtaacaacacttcttccacggtccagccaccttctaatctgctttcattgcgcggtgaaaatggatttcttgggttgttttaa

SEQ ID NO: 71523 - protein, 305 aa, Arabidopsis thaliana
  peptide (1)..(305): Ceres Seq. ID no. 4267729
MSSSNGGVPPGFRFHPTDEELLHYYLKKKISYEKFEMEVIKEVDLNKIEPWDLQDRCKIGSTPQNEWYFFSHKDRKYPTGSRTNRATHSGFWKATGRDKCIRNSYKKIGMRKTLVFYKGRAPHGQKTDWIMHEYRIEDTEDDPCEDGWVVCRVFKKKNLFKVGNDVGSNISNNRLEARSFIRRESPYQGISMFELNKPEEISVHQYPQPPMFQPHHKPLSIGYDYSLALLPRESEYQQACQPSGVEVGTCKAVSEWGIVNCNMVSHEDSSRAMRFEDDGNNTSSTVQPPSNLLSLRGENGFLGLF

SEQ ID NO: 71524 - protein, 269 aa, Arabidopsis thaliana
  peptide (1)..(269): Ceres Seq. ID no. 4267730
MEVIKEVDLNKIEPWDLQDRCKIGSTPQNEWYFFSHKDRKYPTGSRTNRATHSGFWKATGRDKCIRNSYKKIGMRKTLVFYKGRAPHGQKTDWIMHEYRIEDTEDDPCEDGWVVCRVFKKKNLFKVGNDVGSNISNNRLEARSFIRRESPYQGISMFELNKPEEISVHQYPQPPMFQPHHKPLSIGYDYSLALLPRESEYQQACQPSGVEVGTCKAVSEWGIVNCNMVSHEDSSRAMRFEDDGNNTSSTVQPPSNLLSLRGENGFLGLF

SEQ ID NO: 71525 - protein, 196 aa, Arabidopsis thaliana
  peptide (1)..(196): Ceres Seq. ID no. 4267731
MRKTLVFYKGRAPHGQKTDWIMHEYRIEDTEDDPCEDGWVVCRVFKKKNLFKVGNDVGSNISNNRLEARSFIRRESPYQGISMFELNKPEEISVHQYPQPPMFQPHHKPLSIGYDYSLALLPRESEYQQACQPSGVEVGTCKAVSEWGIVNCNMVSHEDSSRAMRFEDDGNNTSSTVQPPSNLLSLRGENGFLGLF

SEQ ID NO: 71526 - DNA, 672 bp, Arabidopsis thaliana
  misc_feature (1)..(672): Ceres Seq. ID no. 4267806
  misc_feature (1)..(672): Ortholog of  Ceres SEQ ID NO 13594390 as cited in SEQ ID NO 51060
  misc_feature (1)..(672): Ortholog of  Ceres SEQ ID NO 14309565 as cited in SEQ ID NO 52731
atgggaaacagcattactgtgaagagaaaaagagctaaagtaatgaagatcgacggcgaaactttccgaattaaaactccggtgacggcgagagaagtcaccgcggattatcccggttacgttttgttagattctcaagccgttaaacactttggagttcgctctaagccgcttgaaccgaaccaaaccttgaagccgaaaaagacttattttctcgtcgagcttcctaagcttccaccggagacgacggcggtggatacagaaaataagctaccgtaccggagagtgatgtctggtatccacgttggcgcaaaggagcggttagatatgttgatgttgtctcggagaacggtttctgacgtcacaatcggaagatctgacggtggagatgggtttgggcctgagcttgggcctggacatacgagtgtgaggttgaggttgcctcgttctcagatcacgaagcttatggaagagaataataatgatgcttcggccatagctgagaagattttaggtatctatatggagaggtctggcgagcttggcggcggtagaggtggtgttgacggccgccgggaacttggaagtggggagattaaagcgcgtgaggtgagtttcgccggagaaggtggacgggagcttcctgttctatggagtagaagtggaaaataa

SEQ ID NO: 71527 - protein, 223 aa, Arabidopsis thaliana
  peptide (1)..(223): Ceres Seq. ID no. 4267807
MGNSITVKRKRAKVMKIDGETFRIKTPVTAREVTADYPGYVLLDSQAVKHFGVRSKPLEPNQTLKPKKTYFLVELPKLPPETTAVDTENKLPYRRVMSGIHVGAKERLDMLMLSRRTVSDVTIGRSDGGDGFGPELGPGHTSVRLRLPRSQITKLMEENNNDASAIAEKILGIYMERSGELGGGRGGVDGRRELGSGEIKAREVSFAGEGGRELPVLWSRSGK

SEQ ID NO: 71528 - protein, 209 aa, Arabidopsis thaliana
  peptide (1)..(209): Ceres Seq. ID no. 4267808
MKIDGETFRIKTPVTAREVTADYPGYVLLDSQAVKHFGVRSKPLEPNQTLKPKKTYFLVELPKLPPETTAVDTENKLPYRRVMSGIHVGAKERLDMLMLSRRTVSDVTIGRSDGGDGFGPELGPGHTSVRLRLPRSQITKLMEENNNDASAIAEKILGIYMERSGELGGGRGGVDGRRELGSGEIKAREVSFAGEGGRELPVLWSRSGK

SEQ ID NO: 71529 - protein, 127 aa, Arabidopsis thaliana
  peptide (1)..(127): Ceres Seq. ID no. 4267809
MSGIHVGAKERLDMLMLSRRTVSDVTIGRSDGGDGFGPELGPGHTSVRLRLPRSQITKLMEENNNDASAIAEKILGIYMERSGELGGGRGGVDGRRELGSGEIKAREVSFAGEGGRELPVLWSRSGK

SEQ ID NO: 71530 - DNA, 3861 bp, Arabidopsis thaliana
  misc_feature (1)..(3861): Ceres Seq. ID no. 4267818
  misc_feature (1)..(3861): Ortholog of  Ceres SEQ ID NO 14306268 as cited in SEQ ID NO 51135
  misc_feature (1)..(3861): Ortholog of  Ceres SEQ ID NO 15225368 as cited in SEQ ID NO 58345
  misc_feature (1)..(3861): Ortholog of  Ceres SEQ ID NO 13584744 as cited in SEQ ID NO 69137
atgaagaacatgaactttgagcgactctctgagctcatggctttctaccacttgatggggaagatctctagtgagtgtgggaatatcaccgctggtttccccttctggggagggaatcgtctaaaacattgcggtcttccatcgctggagcttcactgcagcaaaaacatcacctctttattcatctcaagtcaagagttctatgttttacatctaaatcaaacgtctaaaacacttaaacttgctagaacagaccttttaggttcaatttgcaactctactttcactaccataaccttgcctccaaatattttcgagctttctccaacttacaagaggctcaccgttttctactactgcttcttattgactcattacgtttcgagttataaatgtcctatgagaggttttatctttgtgtctgaaaaccatgaatatcataaaatctgcggtgacactttcaccgtgattgttcctacacgttttggtgcaggagagaaagagttgaatatgaccaatttggaaagtgttttaagtaaaggatttgaagtaaaagtgaagatcgatgatacatcatgtcaagaatgtttatcctctcatggaagttgtggctttaatgaaaccttgccagtgggaggtaaatgcagtccactcaatccaacaacacaaccaccgccacaacctggggatcgtcacaaacattgcggtcatccattgctagagcttcgctgcgaccaaaacaagagtacctctttattcatctcagaccaagagttctttgttctccatgtcgatcaaacatcttacagtcttacactcgccagaccagaccttttacattccttttgctcccttacattcaccaacacaaccttaccaccagaaattttcgaactttctccggcctacaagagcgtcacattctaccactgttacccggttcttcctgacctttcgaattatacatgtcctgttataggtccaatctcagtgtctggaaaccctgaagatcacgaaacctgctttcccaattttgccgcaaacgttcccacgagtttcgtcacgaaagagaaaaaattgaatatagccaatttggaaagtgttttggaaaagggctttgaggtgaacatgaatgtcatcatgaaagcttgtcaagcatgttcatactctaatgaatcctgtggcttcgatgaaaactttccattcgaagtcaaatgcaaaccacaccattcaccaactgctaagtttcagtgtgggaacatcaccgctggtttccctttctccggtgggaatcgtcctcaaatttgcggtcatccatcgttggagcttcactgctataacaacatggcctctataatcatctcagaccacttttacaatgttctccatatagatcaaacatctaacactcttagacttgctagagcagagctggaaggttctttttgcaacgctacttacacagccacaaccttgccttccaaaatctttgagatttcatcaacctacaagagcctcactgttttctacctctgcgaccctaaggtttcttaccgttcgagttatacatgtcctggtagaggccttgtctcagtgtctcaaaattctgattaccataactcctgccaagacagtttcacgattaacgttccaaagagctttgttccagaagagaaagagttggatgtgaccaatttggaaagtgctttaagagaaggatttgaggtgaaggtaaaggttgatgagaaaacttgtcaaaaatgtacatcctctggtggaacctgcggcttccaaaattcaacacagatttgctgcaaggaagcctcatcattaggatgcaataaagtccatccactacctgatgctactgagcttgagcttcacagacgctgcaatggcacgtttagctgcggcgatcagagagaactcttttaccctttctggacatctggtagagaagactgtggccaccctgacttcaagctcgacgactgtagcggaagattcgcagagcttagcatttcctctgtgaaatttagaattctagcgtcggtttatggctctaatatcataagactcggcagatccgaatatataggcgatctctgtccccaagatcctataaatgcaccattcagcgaaagtgtccttccatttgctcctaacaccgagctgctgactattttttacaactgcagccgagactttccacagcaagttactaattttggagactttgcttgtggggatgatagtgatgatgatagaagttactatgtgacgagaaacctctcgtttcctccactcagtgagattaatgaccttttatacgacttcagtcaatcttgcgatagaaacgtcagtattcccgcatctggatcgacgcttaacatactgcagagcactccgagtaacgataatctaaagaaggctctcgaatacggtttcgagcttgaacttaaccaagattgtcggacgtgcatagactctaagggtgcttgtggatatagtcaaacctcaagtagattcgtctgctattctatagaagagccacaaacccctactccaccaaaccctactagaaacaagggcattgcggttgcttctgtatcgggtttggccattcttctactcgcaggtttgttcttatgcatcagacggagaaggaagactcaggacgctcaatacacaagcaaaagcttgcctatcacatcatactcgagtagagatacatcaagaaatccaacttccacaacaatctcctccagtagcaatcactctcttcttccctcaatctctaaccttgcaaaccgaagcgactactgtggagtccaagtctttagctatgaagaacttgaagaagcaactgagaatttctctagagaactcggggatggtggcttcggtactgtctactacggcgtgttgaaagacggacgagctgtagcagtgaaacgactctacgaaagatcactaaaacgcgtagaacaattcaagaacgaaatcgaaatcttgaaatcactaaaacatccgaacctcgtgatcctctacggatgcacatcaagacacagcagagagcttctactagtctacgaatacatctcaaacggaactctagccgaacatctacacggcaaccgcgcagaagctcgtcctctctgctggtcaacccgattaaacatcgcaatcgaaaccgcaagcgcattatcattcctccacataaaaggaatcatacacagagacatcaagactactaacatactcttagacgataactaccaagtcaaagtcgccgatttcggactttcacggttgtttccaatggatcaaacacacatatcaaccgcaccacaaggcacaccaggctacgtggatccagagtattaccaatgttaccaattaaacgagaagagcgatgtctacagcttcggagtcgtactaacggaactaatctcatcaaaagaagcagtagacattactcgacaccgtcacgatatcaatctagcgaacatggctgtatctaagattcagaacaatgcattacacgagcttgtggattcgagtttaggatacgataatgatcctgaagttaggaggaagatgatggcggtggcggaattagcgtttcgatgtttgcaacaagagagagatgttagaccggcgatggatgagattgtggagattttgagagggattaaggatgatgagaagaagcgtgtgttggtgaagtcgccggatgttgtggatattgaatgcggtggtggtgatgatgttggattgttgaggaatagtgttccgccgccgatttcgccggagactgataagtggactagtagttctgatacggcggcgagtttgtaa

SEQ ID NO: 71531 - protein, 1286 aa, Arabidopsis thaliana
  peptide (1)..(1286): Ceres Seq. ID no. 4267819
MKNMNFERLSELMAFYHLMGKISSECGNITAGFPFWGGNRLKHCGLPSLELHCSKNITSLFISSQEFYVLHLNQTSKTLKLARTDLLGSICNSTFTTITLPPNIFELSPTYKRLTVFYYCFLLTHYVSSYKCPMRGFIFVSENHEYHKICGDTFTVIVPTRFGAGEKELNMTNLESVLSKGFEVKVKIDDTSCQECLSSHGSCGFNETLPVGGKCSPLNPTTQPPPQPGDRHKHCGHPLLELRCDQNKSTSLFISDQEFFVLHVDQTSYSLTLARPDLLHSFCSLTFTNTTLPPEIFELSPAYKSVTFYHCYPVLPDLSNYTCPVIGPISVSGNPEDHETCFPNFAANVPTSFVTKEKKLNIANLESVLEKGFEVNMNVIMKACQACSYSNESCGFDENFPFEVKCKPHHSPTAKFQCGNITAGFPFSGGNRPQICGHPSLELHCYNNMASIIISDHFYNVLHIDQTSNTLRLARAELEGSFCNATYTATTLPSKIFEISSTYKSLTVFYLCDPKVSYRSSYTCPGRGLVSVSQNSDYHNSCQDSFTINVPKSFVPEEKELDVTNLESALREGFEVKVKVDEKTCQKCTSSGGTCGFQNSTQICCKEASSLGCNKVHPLPDATELELHRRCNGTFSCGDQRELFYPFWTSGREDCGHPDFKLDDCSGRFAELSISSVKFRILASVYGSNIIRLGRSEYIGDLCPQDPINAPFSESVLPFAPNTELLTIFYNCSRDFPQQVTNFGDFACGDDSDDDRSYYVTRNLSFPPLSEINDLLYDFSQSCDRNVSIPASGSTLNILQSTPSNDNLKKALEYGFELELNQDCRTCIDSKGACGYSQTSSRFVCYSIEEPQTPTPPNPTRNKGIAVASVSGLAILLLAGLFLCIRRRRKTQDAQYTSKSLPITSYSSRDTSRNPTSTTISSSSNHSLLPSISNLANRSDYCGVQVFSYEELEEATENFSRELGDGGFGTVYYGVLKDGRAVAVKRLYERSLKRVEQFKNEIEILKSLKHPNLVILYGCTSRHSRELLLVYEYISNGTLAEHLHGNRAEARPLCWSTRLNIAIETASALSFLHIKGIIHRDIKTTNILLDDNYQVKVADFGLSRLFPMDQTHISTAPQGTPGYVDPEYYQCYQLNEKSDVYSFGVVLTELISSKEAVDITRHRHDINLANMAVSKIQNNALHELVDSSLGYDNDPEVRRKMMAVAELAFRCLQQERDVRPAMDEIVEILRGIKDDEKKRVLVKSPDVVDIECGGGDDVGLLRNSVPPPISPETDKWTSSSDTAASL

SEQ ID NO: 71532 - protein, 1283 aa, Arabidopsis thaliana
  peptide (1)..(1283): Ceres Seq. ID no. 4267820
MNFERLSELMAFYHLMGKISSECGNITAGFPFWGGNRLKHCGLPSLELHCSKNITSLFISSQEFYVLHLNQTSKTLKLARTDLLGSICNSTFTTITLPPNIFELSPTYKRLTVFYYCFLLTHYVSSYKCPMRGFIFVSENHEYHKICGDTFTVIVPTRFGAGEKELNMTNLESVLSKGFEVKVKIDDTSCQECLSSHGSCGFNETLPVGGKCSPLNPTTQPPPQPGDRHKHCGHPLLELRCDQNKSTSLFISDQEFFVLHVDQTSYSLTLARPDLLHSFCSLTFTNTTLPPEIFELSPAYKSVTFYHCYPVLPDLSNYTCPVIGPISVSGNPEDHETCFPNFAANVPTSFVTKEKKLNIANLESVLEKGFEVNMNVIMKACQACSYSNESCGFDENFPFEVKCKPHHSPTAKFQCGNITAGFPFSGGNRPQICGHPSLELHCYNNMASIIISDHFYNVLHIDQTSNTLRLARAELEGSFCNATYTATTLPSKIFEISSTYKSLTVFYLCDPKVSYRSSYTCPGRGLVSVSQNSDYHNSCQDSFTINVPKSFVPEEKELDVTNLESALREGFEVKVKVDEKTCQKCTSSGGTCGFQNSTQICCKEASSLGCNKVHPLPDATELELHRRCNGTFSCGDQRELFYPFWTSGREDCGHPDFKLDDCSGRFAELSISSVKFRILASVYGSNIIRLGRSEYIGDLCPQDPINAPFSESVLPFAPNTELLTIFYNCSRDFPQQVTNFGDFACGDDSDDDRSYYVTRNLSFPPLSEINDLLYDFSQSCDRNVSIPASGSTLNILQSTPSNDNLKKALEYGFELELNQDCRTCIDSKGACGYSQTSSRFVCYSIEEPQTPTPPNPTRNKGIAVASVSGLAILLLAGLFLCIRRRRKTQDAQYTSKSLPITSYSSRDTSRNPTSTTISSSSNHSLLPSISNLANRSDYCGVQVFSYEELEEATENFSRELGDGGFGTVYYGVLKDGRAVAVKRLYERSLKRVEQFKNEIEILKSLKHPNLVILYGCTSRHSRELLLVYEYISNGTLAEHLHGNRAEARPLCWSTRLNIAIETASALSFLHIKGIIHRDIKTTNILLDDNYQVKVADFGLSRLFPMDQTHISTAPQGTPGYVDPEYYQCYQLNEKSDVYSFGVVLTELISSKEAVDITRHRHDINLANMAVSKIQNNALHELVDSSLGYDNDPEVRRKMMAVAELAFRCLQQERDVRPAMDEIVEILRGIKDDEKKRVLVKSPDVVDIECGGGDDVGLLRNSVPPPISPETDKWTSSSDTAASL

SEQ ID NO: 71533 - protein, 1274 aa, Arabidopsis thaliana
  peptide (1)..(1274): Ceres Seq. ID no. 4267821
MAFYHLMGKISSECGNITAGFPFWGGNRLKHCGLPSLELHCSKNITSLFISSQEFYVLHLNQTSKTLKLARTDLLGSICNSTFTTITLPPNIFELSPTYKRLTVFYYCFLLTHYVSSYKCPMRGFIFVSENHEYHKICGDTFTVIVPTRFGAGEKELNMTNLESVLSKGFEVKVKIDDTSCQECLSSHGSCGFNETLPVGGKCSPLNPTTQPPPQPGDRHKHCGHPLLELRCDQNKSTSLFISDQEFFVLHVDQTSYSLTLARPDLLHSFCSLTFTNTTLPPEIFELSPAYKSVTFYHCYPVLPDLSNYTCPVIGPISVSGNPEDHETCFPNFAANVPTSFVTKEKKLNIANLESVLEKGFEVNMNVIMKACQACSYSNESCGFDENFPFEVKCKPHHSPTAKFQCGNITAGFPFSGGNRPQICGHPSLELHCYNNMASIIISDHFYNVLHIDQTSNTLRLARAELEGSFCNATYTATTLPSKIFEISSTYKSLTVFYLCDPKVSYRSSYTCPGRGLVSVSQNSDYHNSCQDSFTINVPKSFVPEEKELDVTNLESALREGFEVKVKVDEKTCQKCTSSGGTCGFQNSTQICCKEASSLGCNKVHPLPDATELELHRRCNGTFSCGDQRELFYPFWTSGREDCGHPDFKLDDCSGRFAELSISSVKFRILASVYGSNIIRLGRSEYIGDLCPQDPINAPFSESVLPFAPNTELLTIFYNCSRDFPQQVTNFGDFACGDDSDDDRSYYVTRNLSFPPLSEINDLLYDFSQSCDRNVSIPASGSTLNILQSTPSNDNLKKALEYGFELELNQDCRTCIDSKGACGYSQTSSRFVCYSIEEPQTPTPPNPTRNKGIAVASVSGLAILLLAGLFLCIRRRRKTQDAQYTSKSLPITSYSSRDTSRNPTSTTISSSSNHSLLPSISNLANRSDYCGVQVFSYEELEEATENFSRELGDGGFGTVYYGVLKDGRAVAVKRLYERSLKRVEQFKNEIEILKSLKHPNLVILYGCTSRHSRELLLVYEYISNGTLAEHLHGNRAEARPLCWSTRLNIAIETASALSFLHIKGIIHRDIKTTNILLDDNYQVKVADFGLSRLFPMDQTHISTAPQGTPGYVDPEYYQCYQLNEKSDVYSFGVVLTELISSKEAVDITRHRHDINLANMAVSKIQNNALHELVDSSLGYDNDPEVRRKMMAVAELAFRCLQQERDVRPAMDEIVEILRGIKDDEKKRVLVKSPDVVDIECGGGDDVGLLRNSVPPPISPETDKWTSSSDTAASL

SEQ ID NO: 71534 - DNA, 1722 bp, Arabidopsis thaliana
  misc_feature (1)..(1722): Ceres Seq. ID no. 4268147
  misc_feature (1)..(1722): Ortholog of  Ceres SEQ ID NO 15177463 as cited in SEQ ID NO 0
atgagtttaagcgttgagctcaaggatttggaggtcttaacaacgaacgcaaagcaaatacaagatgatgtattgaaggagatactcacacttaacgccaacacagagtatctcaaacgttttctcgatggaagctctgataaagagttgttcaagaagaacgtaccggtggtgagctacaatgatgtcaagccttatatcgaacgtgttgcgaatggagagccctcggatgtgatttcaggtggaaccattacaagattcgtccaaagcacgggaacttcaggagggatacataaaatatttccagtgaacgataagtacatagagaatcttggataccttttggctgtatcctctctcattacttccaatgacaaggtagatgagaaaggaaagaaaatggcgtttctttacaacagattagaatccaaaactccctccggattagccctttcttcatcatttacaagctatttcatgagcgattacttcaaaaaccggtcatcaaaatgtaattctgagtacacaagccccgaccaagtcatattgtgccccgacaacaaccaaagtgtgtattgtcatcttctatgtgggctttcccagagagaaaaggttgtgggagttagtgcaacatttgctcatgccttaatcaaagcaataaatgctcttcaaatttactggaaggaattgtctagtaatatccggtcaggtcatgttagtgagtggatcactgaccttgactgcaaaaatgctgtctcagccattcttggaggacctgaccctgaattggctgatgtgattgaacaagaatgcagccacaagtcatgggaaggtatcatcacacgactttggcccaaagcaaagtttattgaatgcattgttacaggacaaatggcccaatacattccaacattggacttctattccaacaagcttcctatagtttccatggtatatgggtcttctgaaagtatatttggggtgaatgtggatcctttatccaaaccacaagatgtgtcctacacatttctgcccaatatctcctactttgagtttctacctattgatcatgaggaagatatgaacaccattgttgatcttgtcggtgtcaagctagggtgctattatgaaaccgtggttactagttattttggtctacacaggtatcttattggagatattctacaggtgactggattctacaataacacacctcaatttagattcgtacgcagaaagaatattgtgttaagcgtcaatagtgaagcaacaactgaacaggacattttaaaggggttggctagtgcgacccttgttcttgagtcttcaaattcaatgttgacgggtttcacatgttatgcggatatctccagttttccaggtcactacgtcttttactgggaactcaaagcaaaagatgttgacgatgttgttgagcttgatgaaaatgtattggaagaatgttgctatgcgttagaggaatcgtttgatgctctttataaaagactaaggagtaaagaagggtcaattggagctctagagataaaagtggtgcaacaaggaacatttgattctctcatggaatatttcatctccaaaggtggttcggttgctcaatacaagacacctatgtgtatcaactcttcggaaaccttagcagttcttgaagataaggttattgctcgattctacagccaaaaatctcctcctcttaacttatag

SEQ ID NO: 71535 - protein, 573 aa, Arabidopsis thaliana
  peptide (1)..(573): Ceres Seq. ID no. 4268148
MSLSVELKDLEVLTTNAKQIQDDVLKEILTLNANTEYLKRFLDGSSDKELFKKNVPVVSYNDVKPYIERVANGEPSDVISGGTITRFVQSTGTSGGIHKIFPVNDKYIENLGYLLAVSSLITSNDKVDEKGKKMAFLYNRLESKTPSGLALSSSFTSYFMSDYFKNRSSKCNSEYTSPDQVILCPDNNQSVYCHLLCGLSQREKVVGVSATFAHALIKAINALQIYWKELSSNIRSGHVSEWITDLDCKNAVSAILGGPDPELADVIEQECSHKSWEGIITRLWPKAKFIECIVTGQMAQYIPTLDFYSNKLPIVSMVYGSSESIFGVNVDPLSKPQDVSYTFLPNISYFEFLPIDHEEDMNTIVDLVGVKLGCYYETVVTSYFGLHRYLIGDILQVTGFYNNTPQFRFVRRKNIVLSVNSEATTEQDILKGLASATLVLESSNSMLTGFTCYADISSFPGHYVFYWELKAKDVDDVVELDENVLEECCYALEESFDALYKRLRSKEGSIGALEIKVVQQGTFDSLMEYFISKGGSVAQYKTPMCINSSETLAVLEDKVIARFYSQKSPPLNL

SEQ ID NO: 71536 - protein, 440 aa, Arabidopsis thaliana
  peptide (1)..(440): Ceres Seq. ID no. 4268149
MAFLYNRLESKTPSGLALSSSFTSYFMSDYFKNRSSKCNSEYTSPDQVILCPDNNQSVYCHLLCGLSQREKVVGVSATFAHALIKAINALQIYWKELSSNIRSGHVSEWITDLDCKNAVSAILGGPDPELADVIEQECSHKSWEGIITRLWPKAKFIECIVTGQMAQYIPTLDFYSNKLPIVSMVYGSSESIFGVNVDPLSKPQDVSYTFLPNISYFEFLPIDHEEDMNTIVDLVGVKLGCYYETVVTSYFGLHRYLIGDILQVTGFYNNTPQFRFVRRKNIVLSVNSEATTEQDILKGLASATLVLESSNSMLTGFTCYADISSFPGHYVFYWELKAKDVDDVVELDENVLEECCYALEESFDALYKRLRSKEGSIGALEIKVVQQGTFDSLMEYFISKGGSVAQYKTPMCINSSETLAVLEDKVIARFYSQKSPPLNL

SEQ ID NO: 71537 - protein, 414 aa, Arabidopsis thaliana
  peptide (1)..(414): Ceres Seq. ID no. 4268150
MSDYFKNRSSKCNSEYTSPDQVILCPDNNQSVYCHLLCGLSQREKVVGVSATFAHALIKAINALQIYWKELSSNIRSGHVSEWITDLDCKNAVSAILGGPDPELADVIEQECSHKSWEGIITRLWPKAKFIECIVTGQMAQYIPTLDFYSNKLPIVSMVYGSSESIFGVNVDPLSKPQDVSYTFLPNISYFEFLPIDHEEDMNTIVDLVGVKLGCYYETVVTSYFGLHRYLIGDILQVTGFYNNTPQFRFVRRKNIVLSVNSEATTEQDILKGLASATLVLESSNSMLTGFTCYADISSFPGHYVFYWELKAKDVDDVVELDENVLEECCYALEESFDALYKRLRSKEGSIGALEIKVVQQGTFDSLMEYFISKGGSVAQYKTPMCINSSETLAVLEDKVIARFYSQKSPPLNL

SEQ ID NO: 71538 - DNA, 3111 bp, Arabidopsis thaliana
  misc_feature (1)..(3111): Ceres Seq. ID no. 4268263
  misc_feature (1)..(3111): Ortholog of  Ceres SEQ ID NO 13648101 as cited in SEQ ID NO 169
  misc_feature (1)..(3111): Ortholog of  Ceres SEQ ID NO 13600617 as cited in SEQ ID NO 0
atggaagctttgcacgaacccatttggagaaaagctgggatttttgaggcaataaaggcatcgatgtacaaaatccgtaaaaatcagtctttgcttctagctcttgttgagaaatggtgtcctgaaaccaaatctttcctcttcccttggggtgaagcaacgataacgcttgaggatgtgcttgtgcttttagggttttctgttcagggttctcctgtttttgcccctttagaaagctcagagatgagagattccgtagagaaactggagaaagctagattggagaatagaggccaggatgggctagtgagacaaaacttatgggtttcgagcttcttgggtagaggtgatcaaatggagcatgaagcttttcttgcattttggctttcgcagttcgtttttccggatatgtgtcgtcgttctatttcgacaaaagttctccctatggctgttcgtttagctagaggcgaaaggattgcttttgctcctgctgttctagctagactatacagagatttgggtcaaattcaagcgtctgctagagaaaagtccactccaaatgtcactctgaaatcactgtttaagttagtccaactctgggcatgggagagattcaagagtaccagtccaaaagctagagtgataccaaaaggtgaacctaggatatctcggtggcactcacaaacatctaagaatgtgagattgaatcttgttgattttgattggcgtccttacactaaacctttacagatttggaaccctcctcggttttaccctgaagaagctatgtggatgactgttgatgacaatcttgatgatggattcgtttcctttgctcgatgtatgagagtttctcagcttgttggggttggtattgtggaggattactatccaaaccgagtggcaatgcagttcgggctggctcaagatcttcctggtttggttactgatcatagcagcttcacagaaaaagaagcatgggatggttacaataagtctcttgatggtttaatgctttacataccttctcgtgtcgctacgacttctgttactgaaagatatcgtgactggtggttgaaatctatttcaaagttttttctggattcttcagaatcaactgaaacgtttgatgcaagtaacacaattgatcattatgataataatgatgaggatgatgagctactgcctttgggtcaagtgcttcagaattttggagagagctttcttaagaaactcgaaagatgtagggcgcgtaggctagctaaaaatcatcgattcaagataaataaagacaagattggtgatggtggtgcatcagcttcaacagaattaccacttagtcagttgtttaaaaaggaggtgatgaagagaacaagtgagcatttgaaaaacaagggacggaagcgagctcgtgaggatgatgtaagttctatggatcacaaagatgatgacgttaccatcgctcagatgatcaaatctagaaggaatgatgaatgtggaagcaaaggaaagaagagtagtatggttcaaagaccatctaacgaaaacaactcttcagatcctcttgttgattctaatggaggtataattgacatttctgtgtcaccatcagagacaaggcaaacgtgtgatgatgagcttcatgtagatagaagcaagaaagaagagttggtccatgaagatgaagaaaagcaaagaagcaatgagaatttgtgcagtgaagctgagaaagaagaagatattgatgaaagattgaaacagagaaagcttgctatagaggagatagcattgaagctggagacacgtgttatggaggttgagaagaggttatgtcaaggtagaagagacagaacaaagatagatatggtaaggaagcagaagtacgggaaggtagtgttggtttcttgcatcgcgcttctagcaaccggactcattgccgactttctctgggctacttctcatcgattctcctccgccgcaatctccgccggattatctctaccttcttcacttaccaccgtaatcgttcctggccaggagaaagatacaaagaagaagaaggatagtgtgaaggaaaggaaactgtctaatacgtttcaagatttgcctgctcctgaattgaaatgggagaagatggcagcttcacctgtacctcgtctagacggagctgcaattcagattagggatcttctttatgtatttgctggatatggaaccattgatcttgtgcattcacatgtcgatatctacaatttcactgataactcgtggggaggaagattcaatatgccaaaagatatggcgcattctcatttagggatggtaacggatgggcgatacatttatattgttactggtcagtttggtccacaatgcagaggtcctacagctaaaacatttgtgcttgatactgatacaaatacatggaaggactttgttcctttaccagttcctaggtatgcaccagctactcagctttggagaggaagacttcatgtgatgggtggaagcaaagagaatcgatttacaccaggacttgaacattggagcatcgcagtgaaagatggcaaatctttggaaaatgagtggagaagtgaaatcccgatccctcgtggaggacctcacagggcatgtgtagtagttgatgaccgactatttgtaattggtggtcaagaaggtgatttcatggctaaacctggatctccaatcttcaaatgctcacgccgtatggaggtggtattcagtgatgtctacatgttggatgaggaaatgaaatggaaagttatgccgccgatgccaaaaccggactcccatatcgaatttgcttggaaagtcgttaataactccattgtaatcgttggaggcacaacagagaaacatcctgaaaccaaaaagatggttctcgttggtgaaatcttccagttcaacttaaatacactgaaatggtatgtgattgggaaattaccataccgtgtgaagacaacgctggctgggtattgggatggacagttatacttcacctcaggacaaagagacaaaggtccagatgatcccgccccgaggaaggtcatggcagagatgtggagaaccaaattgatactcaacccatga

SEQ ID NO: 71539 - protein, 1036 aa, Arabidopsis thaliana
  peptide (1)..(1036): Ceres Seq. ID no. 4268264
MEALHEPIWRKAGIFEAIKASMYKIRKNQSLLLALVEKWCPETKSFLFPWGEATITLEDVLVLLGFSVQGSPVFAPLESSEMRDSVEKLEKARLENRGQDGLVRQNLWVSSFLGRGDQMEHEAFLAFWLSQFVFPDMCRRSISTKVLPMAVRLARGERIAFAPAVLARLYRDLGQIQASAREKSTPNVTLKSLFKLVQLWAWERFKSTSPKARVIPKGEPRISRWHSQTSKNVRLNLVDFDWRPYTKPLQIWNPPRFYPEEAMWMTVDDNLDDGFVSFARCMRVSQLVGVGIVEDYYPNRVAMQFGLAQDLPGLVTDHSSFTEKEAWDGYNKSLDGLMLYIPSRVATTSVTERYRDWWLKSISKFFLDSSESTETFDASNTIDHYDNNDEDDELLPLGQVLQNFGESFLKKLERCRARRLAKNHRFKINKDKIGDGGASASTELPLSQLFKKEVMKRTSEHLKNKGRKRAREDDVSSMDHKDDDVTIAQMIKSRRNDECGSKGKKSSMVQRPSNENNSSDPLVDSNGGIIDISVSPSETRQTCDDELHVDRSKKEELVHEDEEKQRSNENLCSEAEKEEDIDERLKQRKLAIEEIALKLETRVMEVEKRLCQGRRDRTKIDMVRKQKYGKVVLVSCIALLATGLIADFLWATSHRFSSAAISAGLSLPSSLTTVIVPGQEKDTKKKKDSVKERKLSNTFQDLPAPELKWEKMAASPVPRLDGAAIQIRDLLYVFAGYGTIDLVHSHVDIYNFTDNSWGGRFNMPKDMAHSHLGMVTDGRYIYIVTGQFGPQCRGPTAKTFVLDTDTNTWKDFVPLPVPRYAPATQLWRGRLHVMGGSKENRFTPGLEHWSIAVKDGKSLENEWRSEIPIPRGGPHRACVVVDDRLFVIGGQEGDFMAKPGSPIFKCSRRMEVVFSDVYMLDEEMKWKVMPPMPKPDSHIEFAWKVVNNSIVIVGGTTEKHPETKKMVLVGEIFQFNLNTLKWYVIGKLPYRVKTTLAGYWDGQLYFTSGQRDKGPDDPAPRKVMAEMWRTKLILNP

SEQ ID NO: 71540 - protein, 1015 aa, Arabidopsis thaliana
  peptide (1)..(1015): Ceres Seq. ID no. 4268265
MYKIRKNQSLLLALVEKWCPETKSFLFPWGEATITLEDVLVLLGFSVQGSPVFAPLESSEMRDSVEKLEKARLENRGQDGLVRQNLWVSSFLGRGDQMEHEAFLAFWLSQFVFPDMCRRSISTKVLPMAVRLARGERIAFAPAVLARLYRDLGQIQASAREKSTPNVTLKSLFKLVQLWAWERFKSTSPKARVIPKGEPRISRWHSQTSKNVRLNLVDFDWRPYTKPLQIWNPPRFYPEEAMWMTVDDNLDDGFVSFARCMRVSQLVGVGIVEDYYPNRVAMQFGLAQDLPGLVTDHSSFTEKEAWDGYNKSLDGLMLYIPSRVATTSVTERYRDWWLKSISKFFLDSSESTETFDASNTIDHYDNNDEDDELLPLGQVLQNFGESFLKKLERCRARRLAKNHRFKINKDKIGDGGASASTELPLSQLFKKEVMKRTSEHLKNKGRKRAREDDVSSMDHKDDDVTIAQMIKSRRNDECGSKGKKSSMVQRPSNENNSSDPLVDSNGGIIDISVSPSETRQTCDDELHVDRSKKEELVHEDEEKQRSNENLCSEAEKEEDIDERLKQRKLAIEEIALKLETRVMEVEKRLCQGRRDRTKIDMVRKQKYGKVVLVSCIALLATGLIADFLWATSHRFSSAAISAGLSLPSSLTTVIVPGQEKDTKKKKDSVKERKLSNTFQDLPAPELKWEKMAASPVPRLDGAAIQIRDLLYVFAGYGTIDLVHSHVDIYNFTDNSWGGRFNMPKDMAHSHLGMVTDGRYIYIVTGQFGPQCRGPTAKTFVLDTDTNTWKDFVPLPVPRYAPATQLWRGRLHVMGGSKENRFTPGLEHWSIAVKDGKSLENEWRSEIPIPRGGPHRACVVVDDRLFVIGGQEGDFMAKPGSPIFKCSRRMEVVFSDVYMLDEEMKWKVMPPMPKPDSHIEFAWKVVNNSIVIVGGTTEKHPETKKMVLVGEIFQFNLNTLKWYVIGKLPYRVKTTLAGYWDGQLYFTSGQRDKGPDDPAPRKVMAEMWRTKLILNP

SEQ ID NO: 71541 - protein, 955 aa, Arabidopsis thaliana
  peptide (1)..(955): Ceres Seq. ID no. 4268266
MRDSVEKLEKARLENRGQDGLVRQNLWVSSFLGRGDQMEHEAFLAFWLSQFVFPDMCRRSISTKVLPMAVRLARGERIAFAPAVLARLYRDLGQIQASAREKSTPNVTLKSLFKLVQLWAWERFKSTSPKARVIPKGEPRISRWHSQTSKNVRLNLVDFDWRPYTKPLQIWNPPRFYPEEAMWMTVDDNLDDGFVSFARCMRVSQLVGVGIVEDYYPNRVAMQFGLAQDLPGLVTDHSSFTEKEAWDGYNKSLDGLMLYIPSRVATTSVTERYRDWWLKSISKFFLDSSESTETFDASNTIDHYDNNDEDDELLPLGQVLQNFGESFLKKLERCRARRLAKNHRFKINKDKIGDGGASASTELPLSQLFKKEVMKRTSEHLKNKGRKRAREDDVSSMDHKDDDVTIAQMIKSRRNDECGSKGKKSSMVQRPSNENNSSDPLVDSNGGIIDISVSPSETRQTCDDELHVDRSKKEELVHEDEEKQRSNENLCSEAEKEEDIDERLKQRKLAIEEIALKLETRVMEVEKRLCQGRRDRTKIDMVRKQKYGKVVLVSCIALLATGLIADFLWATSHRFSSAAISAGLSLPSSLTTVIVPGQEKDTKKKKDSVKERKLSNTFQDLPAPELKWEKMAASPVPRLDGAAIQIRDLLYVFAGYGTIDLVHSHVDIYNFTDNSWGGRFNMPKDMAHSHLGMVTDGRYIYIVTGQFGPQCRGPTAKTFVLDTDTNTWKDFVPLPVPRYAPATQLWRGRLHVMGGSKENRFTPGLEHWSIAVKDGKSLENEWRSEIPIPRGGPHRACVVVDDRLFVIGGQEGDFMAKPGSPIFKCSRRMEVVFSDVYMLDEEMKWKVMPPMPKPDSHIEFAWKVVNNSIVIVGGTTEKHPETKKMVLVGEIFQFNLNTLKWYVIGKLPYRVKTTLAGYWDGQLYFTSGQRDKGPDDPAPRKVMAEMWRTKLILNP

SEQ ID NO: 71542 - DNA, 2430 bp, Arabidopsis thaliana
  misc_feature (1)..(2430): Ceres Seq. ID no. 4268292
  misc_feature (1)..(2430): Ortholog of  Ceres SEQ ID NO 14311596 as cited in SEQ ID NO 51728
  misc_feature (1)..(2430): Ortholog of  Ceres SEQ ID NO 14308120 as cited in SEQ ID NO 58423
  misc_feature (1)..(2430): Ortholog of  Ceres SEQ ID NO 14307004 as cited in SEQ ID NO 59551
  misc_feature (1)..(2430): Ortholog of  Ceres SEQ ID NO 15177031 as cited in SEQ ID NO 60171
  misc_feature (1)..(2430): Ortholog of  Ceres SEQ ID NO 12617197 as cited in SEQ ID NO 63406
  misc_feature (1)..(2430): Ortholog of  Ceres SEQ ID NO 13597804 as cited in SEQ ID NO 64182
  misc_feature (1)..(2430): Ortholog of  Ceres SEQ ID NO 15179788 as cited in SEQ ID NO 64818
  misc_feature (1)..(2430): Ortholog of  Ceres SEQ ID NO 14302768 as cited in SEQ ID NO 64889
  misc_feature (1)..(2430): Ortholog of  Ceres SEQ ID NO 13598565 as cited in SEQ ID NO 65250
  misc_feature (1)..(2430): Ortholog of  Ceres SEQ ID NO 13598597 as cited in SEQ ID NO 65496
  misc_feature (1)..(2430): Ortholog of  Ceres SEQ ID NO 13596284 as cited in SEQ ID NO 68273
  misc_feature (1)..(2430): Ortholog of  Ceres SEQ ID NO 15178902 as cited in SEQ ID NO 0
  misc_feature (1)..(2430): Ortholog of  Ceres SEQ ID NO 15179068 as cited in SEQ ID NO 0
atggagagacgtaacgaagcgttgatgattaggaaatcgaagtggcagtacccacaagtgggttctccgacgccgaggattcttcagttgccacggaggcatagtgttcgacgaaatgcttcaaagggcttgaagacaacagtttcttcgtcgtctcagaaggatcggagagtgaaactggaggttttgtttcatcaagagaggacttttgatcggggggcatcgattgtgatggtgaatgataatggtggtgagaagaaggatgaagaagagggaaggagaagagggaaagttgcagatgggagagagattggtgtgtctgggttgtcttcttcttctgcggttgatgaagttgaggaagctaagtggaggtttcaagcggagatgttgagatcagagtgtaatttgttaagaatagaaaaagagattgctttgaagaagatggagaggaggaagaagcgaatggagcggacgctgagatctgctgttcttactcttctatctgggaaagagagaatctctgaagggacgaaagagagcaaggttttggaagatgagataagctatttggttgagaaactgaatgagttaaagtctccaaaggttaaggacatggaagctagaaacttcaaacataattttgataagcaagcttctgttttaagaagagagctagagaggttcgatgaagcagtttccgaagaggtttgtgtcaaagggattcagaaaatggcagaggctagcttctccgtccattctgatcaaaacgctcttaggaacaataatggaaatatagatacattgagtagtaaaatggaggcgttgtcaaaaggggttttgttggaaagaatggagaaagaatatggatcgagtctcgttgcaccgtcttcaagctctgtacaagacatgtattgtaagggaattaaagcgcatgaggaaaagaaagactgttctagacactgcaaagtagttatgaggaagattgcggatgaagtaagagctgaagcagagcaatggtcacaaatgcaagagatgttgaatcaagtgagaaaagaaatggaggaacttcaatcttgtcgtgatttctggcaaaaccgcgccctcgaagcagattccgagatacaaaatctacattcctctgttgaaggatggcgaagaaaggcgttatcatcagaggcaaagttgaaaaacctacaagcagaggtttgcggattacaagaagagatcaagagactgagaaaggaagataagttagaaccagagaagaacaaattgccatcagagtcagagaaaagggtattgatttgtcggttaaaagaaaaccgacatagcaacaatggagattggtccaagtacagtgaaggaagaacaacaaaaccgtcgagctcgagaccgcctttgagggaagttaagaacagttcagtcatagcaaggcagagaaactccaatatcatgaaaatcgaagaagagaagacagtgtgtgtgacaggagcttcaggttacattgcttcatggatcgttaagcttcttcttctccgtggttacaccgttaaagcctctgttcgtgatccaaatgatccaaggaaaacagagcatttgcttgcattggaaggagcagaggaaaggcttaaattgttcaaagcaaacttgttagaagaaggctctttcgattcagcaatcgatggttgcgaaggagttttccacaccgcatcgccattctatcatgacgtcaaggaccctcaggctgagttacttgatccggcagtgaaaggaacaatcaatgttctaagctcttgtttgaagacttcctcggttaagagagtcgtcttaacctcatcgatagcagctgttgctttcaatggaatgcctcgaacacccgaaaccatagttgacgaaacttggttcgccgatcctgactattgcagagcttccaagctatggtatgtactctcgaagacattagctgaaaacgcagcgtggaaattcgcaaaagagaacaatttacagctggtttcgataaatccggctatggtgattggtcctctcttacagccaacgctaaacactagtgctgctgcagtactaagcttgatcaaaggagcacaaacgtttcctaatgcgacgttcgggtgggttaacgttaaagatgtagcgaacgctcatattcaagcgtttgagaatccagatgctgatgggagatactgtttagtggagagagttgctcattactctgaagttgttaacattttgcatgatctttaccctgattttcaactccctgagaagtgtgcagatgaaaagatatatattccaacatataaagtgtctaaagagaaagcagagtctcttggggttgagtttgtgccattggaagttagcattaaagagactgtagagagcttgagagataaagggttcatcagattttga

SEQ ID NO: 71543 - protein, 809 aa, Arabidopsis thaliana
  peptide (1)..(809): Ceres Seq. ID no. 4268293
MERRNEALMIRKSKWQYPQVGSPTPRILQLPRRHSVRRNASKGLKTTVSSSSQKDRRVKLEVLFHQERTFDRGASIVMVNDNGGEKKDEEEGRRRGKVADGREIGVSGLSSSSAVDEVEEAKWRFQAEMLRSECNLLRIEKEIALKKMERRKKRMERTLRSAVLTLLSGKERISEGTKESKVLEDEISYLVEKLNELKSPKVKDMEARNFKHNFDKQASVLRRELERFDEAVSEEVCVKGIQKMAEASFSVHSDQNALRNNNGNIDTLSSKMEALSKGVLLERMEKEYGSSLVAPSSSSVQDMYCKGIKAHEEKKDCSRHCKVVMRKIADEVRAEAEQWSQMQEMLNQVRKEMEELQSCRDFWQNRALEADSEIQNLHSSVEGWRRKALSSEAKLKNLQAEVCGLQEEIKRLRKEDKLEPEKNKLPSESEKRVLICRLKENRHSNNGDWSKYSEGRTTKPSSSRPPLREVKNSSVIARQRNSNIMKIEEEKTVCVTGASGYIASWIVKLLLLRGYTVKASVRDPNDPRKTEHLLALEGAEERLKLFKANLLEEGSFDSAIDGCEGVFHTASPFYHDVKDPQAELLDPAVKGTINVLSSCLKTSSVKRVVLTSSIAAVAFNGMPRTPETIVDETWFADPDYCRASKLWYVLSKTLAENAAWKFAKENNLQLVSINPAMVIGPLLQPTLNTSAAAVLSLIKGAQTFPNATFGWVNVKDVANAHIQAFENPDADGRYCLVERVAHYSEVVNILHDLYPDFQLPEKCADEKIYIPTYKVSKEKAESLGVEFVPLEVSIKETVESLRDKGFIRF

SEQ ID NO: 71544 - protein, 801 aa, Arabidopsis thaliana
  peptide (1)..(801): Ceres Seq. ID no. 4268294
MIRKSKWQYPQVGSPTPRILQLPRRHSVRRNASKGLKTTVSSSSQKDRRVKLEVLFHQERTFDRGASIVMVNDNGGEKKDEEEGRRRGKVADGREIGVSGLSSSSAVDEVEEAKWRFQAEMLRSECNLLRIEKEIALKKMERRKKRMERTLRSAVLTLLSGKERISEGTKESKVLEDEISYLVEKLNELKSPKVKDMEARNFKHNFDKQASVLRRELERFDEAVSEEVCVKGIQKMAEASFSVHSDQNALRNNNGNIDTLSSKMEALSKGVLLERMEKEYGSSLVAPSSSSVQDMYCKGIKAHEEKKDCSRHCKVVMRKIADEVRAEAEQWSQMQEMLNQVRKEMEELQSCRDFWQNRALEADSEIQNLHSSVEGWRRKALSSEAKLKNLQAEVCGLQEEIKRLRKEDKLEPEKNKLPSESEKRVLICRLKENRHSNNGDWSKYSEGRTTKPSSSRPPLREVKNSSVIARQRNSNIMKIEEEKTVCVTGASGYIASWIVKLLLLRGYTVKASVRDPNDPRKTEHLLALEGAEERLKLFKANLLEEGSFDSAIDGCEGVFHTASPFYHDVKDPQAELLDPAVKGTINVLSSCLKTSSVKRVVLTSSIAAVAFNGMPRTPETIVDETWFADPDYCRASKLWYVLSKTLAENAAWKFAKENNLQLVSINPAMVIGPLLQPTLNTSAAAVLSLIKGAQTFPNATFGWVNVKDVANAHIQAFENPDADGRYCLVERVAHYSEVVNILHDLYPDFQLPEKCADEKIYIPTYKVSKEKAESLGVEFVPLEVSIKETVESLRDKGFIRF

SEQ ID NO: 71545 - protein, 732 aa, Arabidopsis thaliana
  peptide (1)..(732): Ceres Seq. ID no. 4268295
MVNDNGGEKKDEEEGRRRGKVADGREIGVSGLSSSSAVDEVEEAKWRFQAEMLRSECNLLRIEKEIALKKMERRKKRMERTLRSAVLTLLSGKERISEGTKESKVLEDEISYLVEKLNELKSPKVKDMEARNFKHNFDKQASVLRRELERFDEAVSEEVCVKGIQKMAEASFSVHSDQNALRNNNGNIDTLSSKMEALSKGVLLERMEKEYGSSLVAPSSSSVQDMYCKGIKAHEEKKDCSRHCKVVMRKIADEVRAEAEQWSQMQEMLNQVRKEMEELQSCRDFWQNRALEADSEIQNLHSSVEGWRRKALSSEAKLKNLQAEVCGLQEEIKRLRKEDKLEPEKNKLPSESEKRVLICRLKENRHSNNGDWSKYSEGRTTKPSSSRPPLREVKNSSVIARQRNSNIMKIEEEKTVCVTGASGYIASWIVKLLLLRGYTVKASVRDPNDPRKTEHLLALEGAEERLKLFKANLLEEGSFDSAIDGCEGVFHTASPFYHDVKDPQAELLDPAVKGTINVLSSCLKTSSVKRVVLTSSIAAVAFNGMPRTPETIVDETWFADPDYCRASKLWYVLSKTLAENAAWKFAKENNLQLVSINPAMVIGPLLQPTLNTSAAAVLSLIKGAQTFPNATFGWVNVKDVANAHIQAFENPDADGRYCLVERVAHYSEVVNILHDLYPDFQLPEKCADEKIYIPTYKVSKEKAESLGVEFVPLEVSIKETVESLRDKGFIRF

SEQ ID NO: 71546 - DNA, 828 bp, Arabidopsis thaliana
  misc_feature (1)..(828): Ceres Seq. ID no. 4268296
  misc_feature (1)..(828): Ortholog of  Ceres SEQ ID NO 14310291 as cited in SEQ ID NO 20682
  misc_feature (1)..(828): Ortholog of  Ceres SEQ ID NO 14311256 as cited in SEQ ID NO 59050
  misc_feature (1)..(828): Ortholog of  Ceres SEQ ID NO 13656079 as cited in SEQ ID NO 64220
atgaaagggcttacgaggcttctcaattctctttcgcgacatacagcttccgtaacttgttctccatcttcttcttctcttctgatatcacgtcgctctctgtttatctcggcggcgacacactttccggtgaatttctcggagtcgataacaactaatgcttctcgtaactgttcgagatcttcttcatttcccttcaattggatcgagcaaaggaggacaatgtttatccaaacacaatcaacaccaaacccctcttctctaatgtttagtcctggtaaaccagttatggagattggaagtgctgacttccctaattctcgctctgctatgagttcacctttagctaaagccattttcgccattgatggtgtagttcgagttttctatgggtcagattttgttactgtaacaaagtcagatgatgtaacatgggatatactcaagcctgatatctttgcagtggtaatggacttttactcttctggtcagcctttgtttctcgactcacaagctacagctgccaaggataccgctattcatgaggatgactctgaaactgtagcaatgattaaggaactcttggagacgcgtatccgaccatcagtccaagatgatggaggggacatcgagtattgtggattcgatacggaaactggtatagtgaagcttagaatgcaaggagcttgtagcggttgtccaagttcatctgttactttgaaatccggaattgagaatatgcttatgcattatgtttccgaggtcaaaggtgttgagcaagaattcgatggtgaagaggagggaacatcttctggtccaatggagtag

SEQ ID NO: 71547 - protein, 275 aa, Arabidopsis thaliana
  peptide (1)..(275): Ceres Seq. ID no. 4268297
MKGLTRLLNSLSRHTASVTCSPSSSSLLISRRSLFISAATHFPVNFSESITTNASRNCSRSSSFPFNWIEQRRTMFIQTQSTPNPSSLMFSPGKPVMEIGSADFPNSRSAMSSPLAKAIFAIDGVVRVFYGSDFVTVTKSDDVTWDILKPDIFAVVMDFYSSGQPLFLDSQATAAKDTAIHEDDSETVAMIKELLETRIRPSVQDDGGDIEYCGFDTETGIVKLRMQGACSGCPSSSVTLKSGIENMLMHYVSEVKGVEQEFDGEEEGTSSGPME

SEQ ID NO: 71548 - protein, 201 aa, Arabidopsis thaliana; identical to SEQ ID NO: 45569
  peptide (1)..(201): Ceres Seq. ID no. 4268298

SEQ ID NO: 71549 - protein, 187 aa, Arabidopsis thaliana; identical to SEQ ID NO: 45570
  peptide (1)..(187): Ceres Seq. ID no. 4268299

SEQ ID NO: 71550 - DNA, 963 bp, Arabidopsis thaliana
  misc_feature (1)..(963): Ceres Seq. ID no. 4268818
  misc_feature (1)..(963): Ortholog of  Ceres SEQ ID NO 13597380 as cited in SEQ ID NO 64054
  misc_feature (1)..(963): Ortholog of  Ceres SEQ ID NO 12625474 as cited in SEQ ID NO 64169
atgaagattcaaattatatggctcactttggttttaatcgtcgttgaagctaatgcagtcaaacaagggaaaaacgcaacgatcccggccctaatagtttttggagattcaataatggatacaggaaataacaataatcttcccactcttcttaaatgtaacttccctccatacggtaaagattatcctggaggctttgccactggaagattttctgatggaagagttccttctgatcttattgcggaaaaaataggattggctaagacattaccagcatatatgaatccatatttgaagccagaggatcttcttaaaggtgtaacatttgcatcaggaggaactggttatgatccattgacagcaaaaattatgtcagtgatatcagtgtgggatcaactcatatatttcaaagaatatatatcaaagatcaagaggcatttcggagaagaaaaagcaaaagatatcttggaacatagtttctttcttgtggtgtctagtagcaatgaccttgctcacacttatttagctcaagctcatagatatgatcgtacctcttatgccaatttcttggctgactctgctgttcatttcgtgagagaattacacaagcttggagctcaaaaaattggagtgtttagtgcagtccctgttggttgtgttccactccaaagaacagtttttggagataaagagttggatggtgttatcctttacattaatgtttatgatactcttttcgacatgatccaacaccctaaaaaatacggttttgaagtggctgatagaggatgttgcggtaaaggactgctcacgatctcctatttatgtaactcattgaaccaatttacgtgttctaactcttcagcttatatattttgggatagctatcatccaagtaaaagagcttatcaagttattgtcgacaatttacttgacaaatatttgagcaaagtatattga

SEQ ID NO: 71551 - protein, 320 aa, Arabidopsis thaliana
  peptide (1)..(320): Ceres Seq. ID no. 4268819
MKIQIIWLTLVLIVVEANAVKQGKNATIPALIVFGDSIMDTGNNNNLPTLLKCNFPPYGKDYPGGFATGRFSDGRVPSDLIAEKIGLAKTLPAYMNPYLKPEDLLKGVTFASGGTGYDPLTAKIMSVISVWDQLIYFKEYISKIKRHFGEEKAKDILEHSFFLVVSSSNDLAHTYLAQAHRYDRTSYANFLADSAVHFVRELHKLGAQKIGVFSAVPVGCVPLQRTVFGDKELDGVILYINVYDTLFDMIQHPKKYGFEVADRGCCGKGLLTISYLCNSLNQFTCSNSSAYIFWDSYHPSKRAYQVIVDNLLDKYLSKVY

SEQ ID NO: 71552 - protein, 282 aa, Arabidopsis thaliana
  peptide (1)..(282): Ceres Seq. ID no. 4268820
MDTGNNNNLPTLLKCNFPPYGKDYPGGFATGRFSDGRVPSDLIAEKIGLAKTLPAYMNPYLKPEDLLKGVTFASGGTGYDPLTAKIMSVISVWDQLIYFKEYISKIKRHFGEEKAKDILEHSFFLVVSSSNDLAHTYLAQAHRYDRTSYANFLADSAVHFVRELHKLGAQKIGVFSAVPVGCVPLQRTVFGDKELDGVILYINVYDTLFDMIQHPKKYGFEVADRGCCGKGLLTISYLCNSLNQFTCSNSSAYIFWDSYHPSKRAYQVIVDNLLDKYLSKVY

SEQ ID NO: 71553 - protein, 226 aa, Arabidopsis thaliana
  peptide (1)..(226): Ceres Seq. ID no. 4268821
MNPYLKPEDLLKGVTFASGGTGYDPLTAKIMSVISVWDQLIYFKEYISKIKRHFGEEKAKDILEHSFFLVVSSSNDLAHTYLAQAHRYDRTSYANFLADSAVHFVRELHKLGAQKIGVFSAVPVGCVPLQRTVFGDKELDGVILYINVYDTLFDMIQHPKKYGFEVADRGCCGKGLLTISYLCNSLNQFTCSNSSAYIFWDSYHPSKRAYQVIVDNLLDKYLSKVY

SEQ ID NO: 71554 - DNA, 1017 bp, Arabidopsis thaliana
  misc_feature (1)..(1017): Ceres Seq. ID no. 4268897
  misc_feature (1)..(1017): Ortholog of  Ceres SEQ ID NO 13594037 as cited in SEQ ID NO 55666
atggtgttcgcagatgatgtgacaccaatcccagagggcaaaccccaagtggcgcagtggttcaatgccaacgttggtccattggctcaacgtaaaggcttagatcctgctcttgtagctgctgaggctgctccacgtatcatcaacggtggtgaattcaaaacactaacggacgcaataaagagcgttcctgcagggaacacaaagcgggtgatcataaagatggctcctggtgaatacaaagagaaggtcactatcgacaggaacaaacccttcattacattgatgggacaacccaatgccatgcctgttatcacctatgacggtaccgccgccaagtatggaaccgttgatagcgcctctctcattatcttatccgactatttcatggccgttaacatcgtcgttaagaacactgcgccggcaccagatggtaaaactaagggagcacaagctttatccatgagaatctccggaaattttgctgctttctacaactgcaaattctacggtttccaagacacaatctgtgacgatacaggaaaccatttcttcaaggattgttacgttgaaggaacattcgatttcatcttcggaagtggaacctctatgtacttgggaacacaattgcacgtggttggagacggtattagagtgatagcagcgcatgcaggaaagagcgcagaagagaagagtggatactctttcgtgcactgcaaggtgactggaaccggtggaggaatttatttgggaagagcatggatgagccaccctaaggttgtttatgcctacaccgagatgaccagcgttgtcaaccccaccggatggcaagaaaacaagactcccgcacatgacaaaaccgtgttctacggagagtacaagtgttcaggaccaggatcacacaaagccaagagagtaccattcacacaagacattgacgacaaagaagctaaccgtttcctatccctcggctacatccaaggatccaagtggcttctcccaccacccgctttgtaa

SEQ ID NO: 71555 - protein, 338 aa, Arabidopsis thaliana
  peptide (1)..(338): Ceres Seq. ID no. 4268898
MVFADDVTPIPEGKPQVAQWFNANVGPLAQRKGLDPALVAAEAAPRIINGGEFKTLTDAIKSVPAGNTKRVIIKMAPGEYKEKVTIDRNKPFITLMGQPNAMPVITYDGTAAKYGTVDSASLIILSDYFMAVNIVVKNTAPAPDGKTKGAQALSMRISGNFAAFYNCKFYGFQDTICDDTGNHFFKDCYVEGTFDFIFGSGTSMYLGTQLHVVGDGIRVIAAHAGKSAEEKSGYSFVHCKVTGTGGGIYLGRAWMSHPKVVYAYTEMTSVVNPTGWQENKTPAHDKTVFYGEYKCSGPGSHKAKRVPFTQDIDDKEANRFLSLGYIQGSKWLLPPPAL

SEQ ID NO: 71556 - protein, 264 aa, Arabidopsis thaliana; identical to SEQ ID NO: 49969
  peptide (1)..(264): Ceres Seq. ID no. 4268899

SEQ ID NO: 71557 - protein, 243 aa, Arabidopsis thaliana
  peptide (1)..(243): Ceres Seq. ID no. 4268900
MGQPNAMPVITYDGTAAKYGTVDSASLIILSDYFMAVNIVVKNTAPAPDGKTKGAQALSMRISGNFAAFYNCKFYGFQDTICDDTGNHFFKDCYVEGTFDFIFGSGTSMYLGTQLHVVGDGIRVIAAHAGKSAEEKSGYSFVHCKVTGTGGGIYLGRAWMSHPKVVYAYTEMTSVVNPTGWQENKTPAHDKTVFYGEYKCSGPGSHKAKRVPFTQDIDDKEANRFLSLGYIQGSKWLLPPPAL

SEQ ID NO: 71558 - DNA, 576 bp, Arabidopsis thaliana
  misc_feature (1)..(576): Ceres Seq. ID no. 4268917
  misc_feature (1)..(576): Ortholog of  Ceres SEQ ID NO 14305409 as cited in SEQ ID NO 55679
atgaaccttggggatccggattttgtcgatgtttctaaggttatttctgatatgttgtctacaaattttgcacaaggcttgaagaaaaagataaacgacaacaaaacctttgatccaaattattacggtggcaggtgggatcagattaacgaccatgggacaagccatttatcaatcatagatagcgagaggaatgttgtttcactgactagtacaataaacagttactttggggcattgatgttatctccaagcaccggaattgttctgaacaacgaaatggatgatttctcaatccccatgaaatccagcagtaacctaactgtgccaccaccggcaccggccaatttcattcgtcctgggaaacgacctctgtcttctatgacacccaccattgtactcaaggatggtaaagtgaaagcctccgtgggtgcgagcggaggactgtacatcatcgctgggacaacagaagtttttctgaattatttcttcctcaagatggatcctctttcttccgttttggctccaagaatctaccatcagctgataccaaacatagtttcgtatgaaaactag

SEQ ID NO: 71559 - protein, 191 aa, Arabidopsis thaliana
  peptide (1)..(191): Ceres Seq. ID no. 4268918
MNLGDPDFVDVSKVISDMLSTNFAQGLKKKINDNKTFDPNYYGGRWDQINDHGTSHLSIIDSERNVVSLTSTINSYFGALMLSPSTGIVLNNEMDDFSIPMKSSSNLTVPPPAPANFIRPGKRPLSSMTPTIVLKDGKVKASVGASGGLYIIAGTTEVFLNYFFLKMDPLSSVLAPRIYHQLIPNIVSYEN

SEQ ID NO: 71560 - protein, 174 aa, Arabidopsis thaliana
  peptide (1)..(174): Ceres Seq. ID no. 4268919
MLSTNFAQGLKKKINDNKTFDPNYYGGRWDQINDHGTSHLSIIDSERNVVSLTSTINSYFGALMLSPSTGIVLNNEMDDFSIPMKSSSNLTVPPPAPANFIRPGKRPLSSMTPTIVLKDGKVKASVGASGGLYIIAGTTEVFLNYFFLKMDPLSSVLAPRIYHQLIPNIVSYEN

SEQ ID NO: 71561 - protein, 111 aa, Arabidopsis thaliana
  peptide (1)..(111): Ceres Seq. ID no. 4268920
MLSPSTGIVLNNEMDDFSIPMKSSSNLTVPPPAPANFIRPGKRPLSSMTPTIVLKDGKVKASVGASGGLYIIAGTTEVFLNYFFLKMDPLSSVLAPRIYHQLIPNIVSYEN

SEQ ID NO: 71562 - DNA, 2295 bp, Arabidopsis thaliana
  misc_feature (1)..(2295): Ceres Seq. ID no. 4269931
  misc_feature (1)..(2295): Ortholog of  Ceres SEQ ID NO 13655744 as cited in SEQ ID NO 64032
atgcctcgtaaaggattatccaatttcgatgattatgatgatggttttgatgatgatgacgatgcttttgattatgactatgatgttgatatagatgaacatgaagaagaagctgctgctgaaccaaaggaagaaattgctaaaacgcaagggctttggcgatgtgctatctgtacatatgacaatgttgagactatgtttgtgtgtgatatctgcggtgttcttcgtcatcctgtcgccggaaatcaaagtatcaataagaatacagttgagagcagatgcaaagaacctgtggtatccaaattggcaaagtcccttttcggatcagtcccatctaataaaccgaaaagagctgttctttgtctgcctgaacacacgaatcttgtgatggaacagggacctctgcctggaatttcccgtgggaatattcatgatctttacaaggcctttagttctaaaaattcctgcgttagtatagctgttcgtgttgtgagtctctttgcaattgtggtgttgcaaaggcgttattctgacagttccttttcaacttatgtagcacctttcaagtttgatgctccatcgccagatgatttagtctccaatggactaacatcctcaaaaactggtccaaaaggctcaggtgatgctagcatgagacagaaggagaagcaagatagcgtagaacagaaacctttaaagaaaggaggagatagttcagaaacaagctcccgaggtagacatgataaacttgatgataagggcggtgctggcggcataaaatcaggcaaaagtttgccaaaagcaaaagcagatatgtctaatgagacaagttcgtcctctaaatatatggagacgtcggagagtcttactggtactatgaacaagatgtctttgattggggaaacagaaaactctagcgatattaaaattagaggaccaaaatcacaatctaagcataagccagaggagtggatgcttcttgataaagaatcagatgcactaagccagcttaatcttgccatcgtggggcatgttgattccggtaagtctacactttcgggtagattattgcatcttttgggaagaatatcgcagaagcaaatgcacaagtatgagaaagaagcaaagttgcagggcaaagggtcctttgcatatgcctgggcattggatgagagtgctgaagagagggaacgaggaataacaatgactgtggctgttgcttatttcaattccaaaagacatcatgttgttttgctcgactctcctggacacaaagattttgttccaaacatgatagcaggagcaacacaagcagatgctgcgattcttgtcatagatgcatctgttggtgcttttgaagctggttttgataatttgaaagggcagacaagggagcatgcacgggttctgagaggttttggcgtggagcaagtcatagttgcaatcaacaaaatggatattgttggctactcaaaggaaagatttgatttgattaagcagcacgttggatcttttttgcaatcctgtcgttttaaggattcttctctgacatggattccattaagtgccatggaaaaccaaaacttggtggcagctccctctgataaccgcctatcctcatggtatcaaggtccatgtttattggatgccgtcgactctgtcaagtctcctgatagagacgtctcaaagcctctactcatgcctatatgtgacgctgtaagatcaacttcgcaagggcaggtatctgcatgtggcaaacttgaagctggagctgtccggccaggatctaaggtaatggttatgccatcaggagatcaaggaaccatacgatcactagagcgtgactctcaggcttgcaccattgcaagagctggagataacgtagcgttagcgttgcaagggatcgatgcaaatcaagtaatggcaggagatgtattgtgccatcctgatttccctgtatcagtagcaactcatttggaattgatggtgctcgtcttggaaggcgcaacaccgatcttgctcggttctcagttggagtttcatgtgcatcatgcaaaggaagcagcaacagttgtgaaacttgtggcaatgcttgatcccaaaacagggcagccaacaaagaagtctcctcgttgtctaactgctaaacagagcgcaatgcttgaggttagtctccaaaatccagtatgtgtggagacattttctgagagtagagctcttggaagagtgttccttagatcatcgggaagaactgttgctatgggcaaagttactcggattatccaagactcataa

SEQ ID NO: 71563 - protein, 764 aa, Arabidopsis thaliana
  peptide (1)..(764): Ceres Seq. ID no. 4269932
MPRKGLSNFDDYDDGFDDDDDAFDYDYDVDIDEHEEEAAAEPKEEIAKTQGLWRCAICTYDNVETMFVCDICGVLRHPVAGNQSINKNTVESRCKEPVVSKLAKSLFGSVPSNKPKRAVLCLPEHTNLVMEQGPLPGISRGNIHDLYKAFSSKNSCVSIAVRVVSLFAIVVLQRRYSDSSFSTYVAPFKFDAPSPDDLVSNGLTSSKTGPKGSGDASMRQKEKQDSVEQKPLKKGGDSSETSSRGRHDKLDDKGGAGGIKSGKSLPKAKADMSNETSSSSKYMETSESLTGTMNKMSLIGETENSSDIKIRGPKSQSKHKPEEWMLLDKESDALSQLNLAIVGHVDSGKSTLSGRLLHLLGRISQKQMHKYEKEAKLQGKGSFAYAWALDESAEERERGITMTVAVAYFNSKRHHVVLLDSPGHKDFVPNMIAGATQADAAILVIDASVGAFEAGFDNLKGQTREHARVLRGFGVEQVIVAINKMDIVGYSKERFDLIKQHVGSFLQSCRFKDSSLTWIPLSAMENQNLVAAPSDNRLSSWYQGPCLLDAVDSVKSPDRDVSKPLLMPICDAVRSTSQGQVSACGKLEAGAVRPGSKVMVMPSGDQGTIRSLERDSQACTIARAGDNVALALQGIDANQVMAGDVLCHPDFPVSVATHLELMVLVLEGATPILLGSQLEFHVHHAKEAATVVKLVAMLDPKTGQPTKKSPRCLTAKQSAMLEVSLQNPVCVETFSESRALGRVFLRSSGRTVAMGKVTRIIQDS

SEQ ID NO: 71564 - protein, 699 aa, Arabidopsis thaliana
  peptide (1)..(699): Ceres Seq. ID no. 4269933
MFVCDICGVLRHPVAGNQSINKNTVESRCKEPVVSKLAKSLFGSVPSNKPKRAVLCLPEHTNLVMEQGPLPGISRGNIHDLYKAFSSKNSCVSIAVRVVSLFAIVVLQRRYSDSSFSTYVAPFKFDAPSPDDLVSNGLTSSKTGPKGSGDASMRQKEKQDSVEQKPLKKGGDSSETSSRGRHDKLDDKGGAGGIKSGKSLPKAKADMSNETSSSSKYMETSESLTGTMNKMSLIGETENSSDIKIRGPKSQSKHKPEEWMLLDKESDALSQLNLAIVGHVDSGKSTLSGRLLHLLGRISQKQMHKYEKEAKLQGKGSFAYAWALDESAEERERGITMTVAVAYFNSKRHHVVLLDSPGHKDFVPNMIAGATQADAAILVIDASVGAFEAGFDNLKGQTREHARVLRGFGVEQVIVAINKMDIVGYSKERFDLIKQHVGSFLQSCRFKDSSLTWIPLSAMENQNLVAAPSDNRLSSWYQGPCLLDAVDSVKSPDRDVSKPLLMPICDAVRSTSQGQVSACGKLEAGAVRPGSKVMVMPSGDQGTIRSLERDSQACTIARAGDNVALALQGIDANQVMAGDVLCHPDFPVSVATHLELMVLVLEGATPILLGSQLEFHVHHAKEAATVVKLVAMLDPKTGQPTKKSPRCLTAKQSAMLEVSLQNPVCVETFSESRALGRVFLRSSGRTVAMGKVTRIIQDS

SEQ ID NO: 71565 - protein, 635 aa, Arabidopsis thaliana
  peptide (1)..(635): Ceres Seq. ID no. 4269934
MEQGPLPGISRGNIHDLYKAFSSKNSCVSIAVRVVSLFAIVVLQRRYSDSSFSTYVAPFKFDAPSPDDLVSNGLTSSKTGPKGSGDASMRQKEKQDSVEQKPLKKGGDSSETSSRGRHDKLDDKGGAGGIKSGKSLPKAKADMSNETSSSSKYMETSESLTGTMNKMSLIGETENSSDIKIRGPKSQSKHKPEEWMLLDKESDALSQLNLAIVGHVDSGKSTLSGRLLHLLGRISQKQMHKYEKEAKLQGKGSFAYAWALDESAEERERGITMTVAVAYFNSKRHHVVLLDSPGHKDFVPNMIAGATQADAAILVIDASVGAFEAGFDNLKGQTREHARVLRGFGVEQVIVAINKMDIVGYSKERFDLIKQHVGSFLQSCRFKDSSLTWIPLSAMENQNLVAAPSDNRLSSWYQGPCLLDAVDSVKSPDRDVSKPLLMPICDAVRSTSQGQVSACGKLEAGAVRPGSKVMVMPSGDQGTIRSLERDSQACTIARAGDNVALALQGIDANQVMAGDVLCHPDFPVSVATHLELMVLVLEGATPILLGSQLEFHVHHAKEAATVVKLVAMLDPKTGQPTKKSPRCLTAKQSAMLEVSLQNPVCVETFSESRALGRVFLRSSGRTVAMGKVTRIIQDS

SEQ ID NO: 71566 - DNA, 1653 bp, Arabidopsis thaliana
  misc_feature (1)..(1653): Ceres Seq. ID no. 4270211
  misc_feature (1)..(1653): Ortholog of  Ceres SEQ ID NO 13648571 as cited in SEQ ID NO 197
atggcgaattctcaaagatcatcatctctgatcgatccaaggaacggtttctgcacatcaaactccacattttacagtaaacgcaaaccattggcacttccttcaaaagaatcactcgacatcacaacattcatctcctcccaaacgtaccgtggcaaaaccgccttcatagacgcagccacggaccaccgcataagcttctccgatttatggatggccgtggatcgtgtcgccgactgtctcctccacgacgtgggaatacggagaggtgacgtggtcctagtcctctctcccaacaccatctccatccccattgtctgcctctccgtgatgtctcttggcgctgtcttaactaccgctaatcctctcaacaccgctagtgaaatcttaagacaaatcgcggatagcaatccaaaactcgccttcacaacaccggaactggctcccaaaatcgccagttccggtatctctatcgtcctcgagcgcgtagaagacactctacgcgttccgagaggactcaaagtggttgggaatctaactgaaatgatgaagaaagaaccaagtggacaagcagtcagaaaccaagttcataaagacgacacggcgatgttgctttactcctcggggacgacgggacgaagcaaaggagtgaattcgtctcacgggaacttaatagcacacgtggcgagatacatcgcggagccattcgagcagccacaacagaccttcatttgcactgttccgttgttccacacttttggtttactaaacttcgttttggccaccttagcgttaggtacgaccgttgtcatcctcccgaggtttgacctcggagagatgatggcggctgtcgagaaatacagagcgacgactctgattctcgtgccgccagttttagtaactatgataaacaaagcggatcaaataatgaagaagtacgacgtgagcttcttgagaacggtgcggtgcggtggagcacctttgagcaaggaagttactcaagggtttatgaagaaatatccaacggttgatgtttatcaaggatacgcattgacggaatctaacggtgcaggagcttcgatagaatcagtggaggagagtcggaggtacggtgcggtggggttgttgtcatgtggtgtagaagcgaggattgtggatccgaatacgggtcaggtcatgggtttgaaccaaacgggcgaactttggcttaaagggccttctatcgccaaaggttatttcaggaatgaagaagaaattataacttcagaaggatggcttaaaacaggagatctatgctatatagacaacgatggatttctttttatcgttgatcgattgaaagagcttatcaaatacaaaggttaccaggtacctccagctgaactagaggctctcttactaaaccatccagatattctcgatgcagccgttattccgtttccagataaagaagcaggacaatttccgatggcttacgtagcacgaaagcctgagagtaatctttgtgagaaaaaggttatcgactttatttctaaacaggtggcaccatataagaaaataagaaaagtcgcatttatagactctataccaaagactccatcgggcaaaacacttcgcaaggatctaatcaaatttgccatttcaaaaatttaa

SEQ ID NO: 71567 - protein, 550 aa, Arabidopsis thaliana
  peptide (1)..(550): Ceres Seq. ID no. 4270212
MANSQRSSSLIDPRNGFCTSNSTFYSKRKPLALPSKESLDITTFISSQTYRGKTAFIDAATDHRISFSDLWMAVDRVADCLLHDVGIRRGDVVLVLSPNTISIPIVCLSVMSLGAVLTTANPLNTASEILRQIADSNPKLAFTTPELAPKIASSGISIVLERVEDTLRVPRGLKVVGNLTEMMKKEPSGQAVRNQVHKDDTAMLLYSSGTTGRSKGVNSSHGNLIAHVARYIAEPFEQPQQTFICTVPLFHTFGLLNFVLATLALGTTVVILPRFDLGEMMAAVEKYRATTLILVPPVLVTMINKADQIMKKYDVSFLRTVRCGGAPLSKEVTQGFMKKYPTVDVYQGYALTESNGAGASIESVEESRRYGAVGLLSCGVEARIVDPNTGQVMGLNQTGELWLKGPSIAKGYFRNEEEIITSEGWLKTGDLCYIDNDGFLFIVDRLKELIKYKGYQVPPAELEALLLNHPDILDAAVIPFPDKEAGQFPMAYVARKPESNLCEKKVIDFISKQVAPYKKIRKVAFIDSIPKTPSGKTLRKDLIKFAISKI

SEQ ID NO: 71568 - protein, 479 aa, Arabidopsis thaliana
  peptide (1)..(479): Ceres Seq. ID no. 4270213
MAVDRVADCLLHDVGIRRGDVVLVLSPNTISIPIVCLSVMSLGAVLTTANPLNTASEILRQIADSNPKLAFTTPELAPKIASSGISIVLERVEDTLRVPRGLKVVGNLTEMMKKEPSGQAVRNQVHKDDTAMLLYSSGTTGRSKGVNSSHGNLIAHVARYIAEPFEQPQQTFICTVPLFHTFGLLNFVLATLALGTTVVILPRFDLGEMMAAVEKYRATTLILVPPVLVTMINKADQIMKKYDVSFLRTVRCGGAPLSKEVTQGFMKKYPTVDVYQGYALTESNGAGASIESVEESRRYGAVGLLSCGVEARIVDPNTGQVMGLNQTGELWLKGPSIAKGYFRNEEEIITSEGWLKTGDLCYIDNDGFLFIVDRLKELIKYKGYQVPPAELEALLLNHPDILDAAVIPFPDKEAGQFPMAYVARKPESNLCEKKVIDFISKQVAPYKKIRKVAFIDSIPKTPSGKTLRKDLIKFAISKI

SEQ ID NO: 71569 - protein, 440 aa, Arabidopsis thaliana
  peptide (1)..(440): Ceres Seq. ID no. 4270214
MSLGAVLTTANPLNTASEILRQIADSNPKLAFTTPELAPKIASSGISIVLERVEDTLRVPRGLKVVGNLTEMMKKEPSGQAVRNQVHKDDTAMLLYSSGTTGRSKGVNSSHGNLIAHVARYIAEPFEQPQQTFICTVPLFHTFGLLNFVLATLALGTTVVILPRFDLGEMMAAVEKYRATTLILVPPVLVTMINKADQIMKKYDVSFLRTVRCGGAPLSKEVTQGFMKKYPTVDVYQGYALTESNGAGASIESVEESRRYGAVGLLSCGVEARIVDPNTGQVMGLNQTGELWLKGPSIAKGYFRNEEEIITSEGWLKTGDLCYIDNDGFLFIVDRLKELIKYKGYQVPPAELEALLLNHPDILDAAVIPFPDKEAGQFPMAYVARKPESNLCEKKVIDFISKQVAPYKKIRKVAFIDSIPKTPSGKTLRKDLIKFAISKI

SEQ ID NO: 71570 - DNA, 2160 bp, Arabidopsis thaliana
  misc_feature (1)..(2160): Ceres Seq. ID no. 4305462
  misc_feature (1)..(2160): Ortholog of  Ceres SEQ ID NO 13584744 as cited in SEQ ID NO 69137
atgagggagaattgggcggtggtggctctgtttacactatgcattgtagggtttgagcttagattcatccatggagctactgatgcatcagacacttcagcattgaacacattgttcagtggtatgcattctccagctcagctaacacaatggactgcagcagctggtgatccttgtggccagaattggagaggcgtcacttgttccggctcacgagttactcaaataaagttgtcaggtcttgagctctctggaactcttggaggatacatgcttgataaattgacttctcttaccgagcttgatctaagcagcaataatcttggaggtgatttaccatatcagtttcctccaaatctgcaacgattgaaccttgcgaataatcaattcactggagctgcttcgtactcactttctcagattacaccacttaagtatctcaatcttggtcacaatcagtttaaggggcagatagctatcgacttctccaagctcgactctctcacaaccttggacttctctttcaattctttcacgaactctttaccggcaacgttttcctctctaacaagtttaaaatcactataccttcagaacaatcagttctcaggcacagtcgatgtcttagccggtcttcctcttgagactctgaacattgcgaacaatgacttcacggggtggatccccagttctttaaagggcatcacattaataaaagatggcaactcattcaatactggacctgcacctccaccaccacctggtacacctcctatccgtggctccccgagccgtaaatctggaggacgtgaaagccggtctagtgatgagtccaccagaaatggagattccaagaaatcaggaatcggagcgggggcaattgcgggcataatcatttcattgttagtagttacagctcttcttgttgctttcttcttgttcagaagaaaaaaatcaaagaggtcatcacccatggacattgagaaaaccgataaccagcctttcactcttgcttcaaacgactttcacgaaaacaattccattcagagttcttcatcagttgagacaaagaaactggacacttcattgtctattaatcttcgacctccaccaattgatagaaacaaatcatttgatgatgaagattcgacaagaaagcctattgctgtcaagaaatccacagtggtggttccttcaaatgtgagactctattcagttgcagatctccaaattgctactggcagtttcagcgtagataatcttcttggagaagggacttttggacgagtatacagagctgagtttgatgatggaaaggttcttgctgtgaagaaaattgattcgtctgctctcccacatggcatgaccgatgatttcattgaaatggtatcgaaaatagccaatttggatcatccaaatgtgaccaagcttgttggttactgtgctgagcacggacaacatctcgtggtctatgaattccacaaaaatggatcattacatgacttcttacacttatcagaagaggaaagtaaagcattggtgtggaattcacgagtcaagatcgctcttgggactgcacgcgcattggagtatctgcatgaagtttgctcaccgtctatagtggacaagaatatcaaatcagctaatattttactcgattcagagctgaatcctcacttatcagattctggtctcgcaagcttccttcccacagctaatgagttattaaaccaaaccgatgaagggtatagcgcacctgaagtatcaatgtcaggccaatattctttgaagagtgacatttacagttttggagtagtgatgcttgaacttttaactgggagaaaaccatttgacagcacaaggtcaagatctgagcagtcactggttcgatgggcgacaccacaacttcacgacattgatgctttagccaaaatggttgatccagctcttaaagggctttatcctgtcaaatccctttctcgatttgcagatgttatcgctctctgtgtccagccggagccggagtttagaccaccaatgtctgaagttgtgcaggctctagttgtgttagtgcagagagctaacatgagcaagagaactgtcggagttgatccatcgcaacgtgctggtagtgccgacacgaccagtgattacatgtaa

SEQ ID NO: 71571 - protein, 719 aa, Arabidopsis thaliana
  peptide (1)..(719): Ceres Seq. ID no. 4305463
MRENWAVVALFTLCIVGFELRFIHGATDASDTSALNTLFSGMHSPAQLTQWTAAAGDPCGQNWRGVTCSGSRVTQIKLSGLELSGTLGGYMLDKLTSLTELDLSSNNLGGDLPYQFPPNLQRLNLANNQFTGAASYSLSQITPLKYLNLGHNQFKGQIAIDFSKLDSLTTLDFSFNSFTNSLPATFSSLTSLKSLYLQNNQFSGTVDVLAGLPLETLNIANNDFTGWIPSSLKGITLIKDGNSFNTGPAPPPPPGTPPIRGSPSRKSGGRESRSSDESTRNGDSKKSGIGAGAIAGIIISLLVVTALLVAFFLFRRKKSKRSSPMDIEKTDNQPFTLASNDFHENNSIQSSSSVETKKLDTSLSINLRPPPIDRNKSFDDEDSTRKPIAVKKSTVVVPSNVRLYSVADLQIATGSFSVDNLLGEGTFGRVYRAEFDDGKVLAVKKIDSSALPHGMTDDFIEMVSKIANLDHPNVTKLVGYCAEHGQHLVVYEFHKNGSLHDFLHLSEEESKALVWNSRVKIALGTARALEYLHEVCSPSIVDKNIKSANILLDSELNPHLSDSGLASFLPTANELLNQTDEGYSAPEVSMSGQYSLKSDIYSFGVVMLELLTGRKPFDSTRSRSEQSLVRWATPQLHDIDALAKMVDPALKGLYPVKSLSRFADVIALCVQPEPEFRPPMSEVVQALVVLVQRANMSKRTVGVDPSQRAGSADTTSDYM

SEQ ID NO: 71572 - protein, 678 aa, Arabidopsis thaliana
  peptide (1)..(678): Ceres Seq. ID no. 4305464
MHSPAQLTQWTAAAGDPCGQNWRGVTCSGSRVTQIKLSGLELSGTLGGYMLDKLTSLTELDLSSNNLGGDLPYQFPPNLQRLNLANNQFTGAASYSLSQITPLKYLNLGHNQFKGQIAIDFSKLDSLTTLDFSFNSFTNSLPATFSSLTSLKSLYLQNNQFSGTVDVLAGLPLETLNIANNDFTGWIPSSLKGITLIKDGNSFNTGPAPPPPPGTPPIRGSPSRKSGGRESRSSDESTRNGDSKKSGIGAGAIAGIIISLLVVTALLVAFFLFRRKKSKRSSPMDIEKTDNQPFTLASNDFHENNSIQSSSSVETKKLDTSLSINLRPPPIDRNKSFDDEDSTRKPIAVKKSTVVVPSNVRLYSVADLQIATGSFSVDNLLGEGTFGRVYRAEFDDGKVLAVKKIDSSALPHGMTDDFIEMVSKIANLDHPNVTKLVGYCAEHGQHLVVYEFHKNGSLHDFLHLSEEESKALVWNSRVKIALGTARALEYLHEVCSPSIVDKNIKSANILLDSELNPHLSDSGLASFLPTANELLNQTDEGYSAPEVSMSGQYSLKSDIYSFGVVMLELLTGRKPFDSTRSRSEQSLVRWATPQLHDIDALAKMVDPALKGLYPVKSLSRFADVIALCVQPEPEFRPPMSEVVQALVVLVQRANMSKRTVGVDPSQRAGSADTTSDYM

SEQ ID NO: 71573 - protein, 629 aa, Arabidopsis thaliana
  peptide (1)..(629): Ceres Seq. ID no. 4305465
MLDKLTSLTELDLSSNNLGGDLPYQFPPNLQRLNLANNQFTGAASYSLSQITPLKYLNLGHNQFKGQIAIDFSKLDSLTTLDFSFNSFTNSLPATFSSLTSLKSLYLQNNQFSGTVDVLAGLPLETLNIANNDFTGWIPSSLKGITLIKDGNSFNTGPAPPPPPGTPPIRGSPSRKSGGRESRSSDESTRNGDSKKSGIGAGAIAGIIISLLVVTALLVAFFLFRRKKSKRSSPMDIEKTDNQPFTLASNDFHENNSIQSSSSVETKKLDTSLSINLRPPPIDRNKSFDDEDSTRKPIAVKKSTVVVPSNVRLYSVADLQIATGSFSVDNLLGEGTFGRVYRAEFDDGKVLAVKKIDSSALPHGMTDDFIEMVSKIANLDHPNVTKLVGYCAEHGQHLVVYEFHKNGSLHDFLHLSEEESKALVWNSRVKIALGTARALEYLHEVCSPSIVDKNIKSANILLDSELNPHLSDSGLASFLPTANELLNQTDEGYSAPEVSMSGQYSLKSDIYSFGVVMLELLTGRKPFDSTRSRSEQSLVRWATPQLHDIDALAKMVDPALKGLYPVKSLSRFADVIALCVQPEPEFRPPMSEVVQALVVLVQRANMSKRTVGVDPSQRAGSADTTSDYM

SEQ ID NO: 71574 - DNA, 1215 bp, Arabidopsis thaliana
  misc_feature (1)..(1215): Ceres Seq. ID no. 4307910
  misc_feature (1)..(1215): Ortholog of  Ceres SEQ ID NO 14312333 as cited in SEQ ID NO 54757
  misc_feature (1)..(1215): Ortholog of  Ceres SEQ ID NO 15168584 as cited in SEQ ID NO 57127
atgggaggaagaggtggtggtagtactgattatgatgataaggttggtaggaagaggaagaaggagaaagagagaagtagtagtggtagtgggaaggagaagaggcataagtttccgaatcgtggcgaaaggaagtcagaagagattgatgagatgtggaaatctattgctcataacccagagaatgatgaagaaggtgttaggactatggatgatgataatttcattgacgatactggtttggatccttctgagaggtatggaggtgacgctggagaccgttctccaactcattatcctcaggcagaagagggtgaggatgaagatgaggtaaataaccttttcaaaatggggaagaaaaagaaaaagactgaaagaaatcctgcggaaattgcgcttttggttgagaatgtgatggctgagcttgaggttactgctgaggaagatgcagaacttaatagacaggggaagcctgctatcaacaagcttaagaaactttcgcttcttaccgatgtacttggaaagaagcagcttcaaacagaattcctggaccatggagttttaaccctgttgaagaattggcttgagcctcttccagatggaagcttgccaaatataaacatccgtgcagctattctaagagttcttactgattttccgattgacttggaccagtatgatagaagggagcaattgaaaaagagtgggcttggaaaggtcattatgttcttatcaaagtccgacgaggaaactaattccaacagacgacttgctaaggatttggttgataaatggtctcgtccaattttcaacaagagtactaggtttgaggacatgagaaatctcgatgaagatagggttccctatagaagaccaccagtgaagaaacctagcaacaaagcgacaatggagtccagagatggtgactttgacttggaaattcgggaacgtaaaactggtctgacttcgggtcagagttcaaggggagacaggcaaatgacgatgaggccggaagcaaccccattggactttttgatccgtcctcaatccaagattgatccagatgagatcatagcccgtgcaaaacaggtttctcaggaccagcgtcgggtcaagatgaacaagaaacttcagcagctaaaaggaacaaagaagaagcggctacaagctacgaaagtgagcgttgaaggtcggggtatgatcaagtacctctag

SEQ ID NO: 71575 - protein, 404 aa, Arabidopsis thaliana
  peptide (1)..(404): Ceres Seq. ID no. 4307911
MGGRGGGSTDYDDKVGRKRKKEKERSSSGSGKEKRHKFPNRGERKSEEIDEMWKSIAHNPENDEEGVRTMDDDNFIDDTGLDPSERYGGDAGDRSPTHYPQAEEGEDEDEVNNLFKMGKKKKKTERNPAEIALLVENVMAELEVTAEEDAELNRQGKPAINKLKKLSLLTDVLGKKQLQTEFLDHGVLTLLKNWLEPLPDGSLPNINIRAAILRVLTDFPIDLDQYDRREQLKKSGLGKVIMFLSKSDEETNSNRRLAKDLVDKWSRPIFNKSTRFEDMRNLDEDRVPYRRPPVKKPSNKATMESRDGDFDLEIRERKTGLTSGQSSRGDRQMTMRPEATPLDFLIRPQSKIDPDEIIARAKQVSQDQRRVKMNKKLQQLKGTKKKRLQATKVSVEGRGMIKYL

SEQ ID NO: 71576 - protein, 353 aa, Arabidopsis thaliana
  peptide (1)..(353): Ceres Seq. ID no. 4307912
MWKSIAHNPENDEEGVRTMDDDNFIDDTGLDPSERYGGDAGDRSPTHYPQAEEGEDEDEVNNLFKMGKKKKKTERNPAEIALLVENVMAELEVTAEEDAELNRQGKPAINKLKKLSLLTDVLGKKQLQTEFLDHGVLTLLKNWLEPLPDGSLPNINIRAAILRVLTDFPIDLDQYDRREQLKKSGLGKVIMFLSKSDEETNSNRRLAKDLVDKWSRPIFNKSTRFEDMRNLDEDRVPYRRPPVKKPSNKATMESRDGDFDLEIRERKTGLTSGQSSRGDRQMTMRPEATPLDFLIRPQSKIDPDEIIARAKQVSQDQRRVKMNKKLQQLKGTKKKRLQATKVSVEGRGMIKYL

SEQ ID NO: 71577 - protein, 335 aa, Arabidopsis thaliana
  peptide (1)..(335): Ceres Seq. ID no. 4307913
MDDDNFIDDTGLDPSERYGGDAGDRSPTHYPQAEEGEDEDEVNNLFKMGKKKKKTERNPAEIALLVENVMAELEVTAEEDAELNRQGKPAINKLKKLSLLTDVLGKKQLQTEFLDHGVLTLLKNWLEPLPDGSLPNINIRAAILRVLTDFPIDLDQYDRREQLKKSGLGKVIMFLSKSDEETNSNRRLAKDLVDKWSRPIFNKSTRFEDMRNLDEDRVPYRRPPVKKPSNKATMESRDGDFDLEIRERKTGLTSGQSSRGDRQMTMRPEATPLDFLIRPQSKIDPDEIIARAKQVSQDQRRVKMNKKLQQLKGTKKKRLQATKVSVEGRGMIKYL

SEQ ID NO: 71578 - DNA, 861 bp, Arabidopsis thaliana
  misc_feature (1)..(861): Ceres Seq. ID no. 4360073
  misc_feature (1)..(861): Ortholog of  Ceres SEQ ID NO 13595414 as cited in SEQ ID NO 56539
atggcgtttacactaggtggaagagctcgtcgtctagtctctgcaacatcagttcatcaaaatggttgcttacacaaactgcaacaaattggatcggatcggtttcagcttggtgaagcaaaagcaataagattactacccaggagaacaaacatggttcaagaattaggaatcagggaagaatttatggatctaaacagagaaacagagacaagttatgattttctggatgaaatgagacacagatttctgaaattcaagagacaaaagtatctaccggagatagaaaagtttaaagctttggccatagctcaatcaccaaaggtaatggtgataggatgtgcagattcaagggtatgtccatcttatgtactaggatttcaacctggtgaagcttttactatccgaaatgtcgccaatctcgttaccccggttcagaatggaccaacagaaaccaactcggctcttgagtttgcggtcaccactcttcaggttgagaacattatagttatgggtcatagcaattgtggaggaattgcagcacttatgagtcatcaaaaccaccaagggcaacactctaggtgggttatgaatgggaaagccgctaagttaagaacacaattagcttcatcacatttatcctttgatgaacaatgcagaaactgtgagaaggaatctataaaggattctgtgatgaatttgataacttattcatggataagagatagagtaaagagaggtgaagtcaagattcatggatgttattacaatttgtcagattgtagtcttgagaagtggagattaagttcagacaagactaactatggattctatatttcagacagagagatatggagttga

SEQ ID NO: 71579 - protein, 286 aa, Arabidopsis thaliana
  peptide (1)..(286): Ceres Seq. ID no. 4360074
MAFTLGGRARRLVSATSVHQNGCLHKLQQIGSDRFQLGEAKAIRLLPRRTNMVQELGIREEFMDLNRETETSYDFLDEMRHRFLKFKRQKYLPEIEKFKALAIAQSPKVMVIGCADSRVCPSYVLGFQPGEAFTIRNVANLVTPVQNGPTETNSALEFAVTTLQVENIIVMGHSNCGGIAALMSHQNHQGQHSRWVMNGKAAKLRTQLASSHLSFDEQCRNCEKESIKDSVMNLITYSWIRDRVKRGEVKIHGCYYNLSDCSLEKWRLSSDKTNYGFYISDREIWS

SEQ ID NO: 71580 - protein, 235 aa, Arabidopsis thaliana
  peptide (1)..(235): Ceres Seq. ID no. 4360075
MVQELGIREEFMDLNRETETSYDFLDEMRHRFLKFKRQKYLPEIEKFKALAIAQSPKVMVIGCADSRVCPSYVLGFQPGEAFTIRNVANLVTPVQNGPTETNSALEFAVTTLQVENIIVMGHSNCGGIAALMSHQNHQGQHSRWVMNGKAAKLRTQLASSHLSFDEQCRNCEKESIKDSVMNLITYSWIRDRVKRGEVKIHGCYYNLSDCSLEKWRLSSDKTNYGFYISDREIWS

SEQ ID NO: 71581 - protein, 224 aa, Arabidopsis thaliana
  peptide (1)..(224): Ceres Seq. ID no. 4360076
MDLNRETETSYDFLDEMRHRFLKFKRQKYLPEIEKFKALAIAQSPKVMVIGCADSRVCPSYVLGFQPGEAFTIRNVANLVTPVQNGPTETNSALEFAVTTLQVENIIVMGHSNCGGIAALMSHQNHQGQHSRWVMNGKAAKLRTQLASSHLSFDEQCRNCEKESIKDSVMNLITYSWIRDRVKRGEVKIHGCYYNLSDCSLEKWRLSSDKTNYGFYISDREIWS

SEQ ID NO: 71582 - DNA, 3288 bp, Arabidopsis thaliana
  misc_feature (1)..(3288): Ceres Seq. ID no. 4360097
  misc_feature (1)..(3288): Ortholog of  Ceres SEQ ID NO 12613725 as cited in SEQ ID NO 68196
atgacgactacttcagaaatttctcttcaagaagaatacgtcaccgacgccgttgaccaccgtggacttgccgccagaagatccaataccggtagatggagagccgccttgttcataatcggtgtggaggtggctgagaggttcgcttactatggaatcggatcaaacttaataagctacttgactggaccacttggtgaatccacggctgtagccgccgctaatgtcaacgcgtggtcaggaattgccactcttcttcctgttcttggagcttttgtcgccgacgcatttctcggtcgttaccgaacaattatcatctcttctcttatctacgtcctgggattggcgtttctgactttatctgcgtttctgattcccaatactactgaagtgacatcttcaacttcttcttttctcaatgtactcttcttcttctctctgtatttggtggctattggacaaagtggacacaagccttgtgttcaagcttttggtgctgaccagtttgatgaaaaagactctcaagagaaatctgacagaagctccttcttcaactggtggtaccttagtctgtctgcaggaatctgctttgcgattttagttgttgtatacatccaggaagagttcagctgggcttttgggtttggaatcccatgtgtgttcatggtgatctctcttgttcttttcgtgtcagggagaaggatttataggtacagtaaaagaagacatgaagaggaaataaacccttttacgaggataggtagagtcttctttgtagcactcaagaaccaaagattgagttcatcagacttgtgcaaagttgagctagaggcaaatacatccccagagaaacagagttttttcaacaaagcattgcttgtacccaatgattcttctcaaggagaaaacgcatccaagtctagtgatgttgaagatgccacagctcttatcaggctaattccagtatggtttacgactctggcttacgcgataccctacgcgcaatacatgacatttttcactaagcaaggcgtcacaatggatagaacaattcttcctggtgttaagatcccacctgcttctcttcaggtctttatcggcatatcaatagtcctctttgtccccatctacgaccgagttttcgtccccatcgccaggttaataaccaaagaaccttgtggcatcacaaccctcaaaagaattggaactggaattgtactgtcgactatcactatggtaattgcagctctggttgagttcaagcggctcgagactgcgaaagaacacgggcttatagaccaaccggaagcaactcttccaatgtcgatatggtggttaatccctcagtacttgttgctgggattggctgacgtatatactttagtgggaatgcaagagttcttctacagccaagtccctactgagctgagaagcatcggtctcgcgctttacttaagcgcgttgggcgtgggaagcttattaagcagcttactcatctctctgatagacttggccactggaggagacgcaggaaacagctggtttaacagtaatctgaacagagctcatcttgattacttctattggttactagcgattaaaatgacgacgacttccaaaacttctcttcaagaagaatacgtcatcgacgccgttgaccaccgtggcttttccgccagaaggtctattaccggtagatggagagctgcatggttcattatcggtgtggaggtggcggagaggttcgcgaactacgggatcggatcaaacctgataagctacttgactggaccacttggtcaatctacggcggtcgccgccgctaatgtcaacgcttggtctggaatttccactattcttcctcttcttggagcttttgtcgccgacgcttttcttggtcgctacataacaattatcatcgcttcttttatctatgtcctgggactggcgtttctgactttatctgcgtttctgattcccaacaatactgaagtgacctcgtcaccttcttcttttctcaatgcactcttcttcttctctctttatttggtggctattggacaaagtggacacaagccttgtgttcaggcttttggtgcagatcagtttgatgagaagaacccgcaagagaatagtgatagaagctctttcttcaactggtggtaccttagtatgtgtgcaggaatcggcctagcgattttagtggttgtgtacatccaagaaaatgtaagctgggcacttgggtttggaatcccatgtgtgttcatggtgatctctcttgttcttttcgttttagggagaaagagttataggtttagtaaaacaagacaagaagaggaaacaaacccgtttacgagaataggtagagtcttctttgtagcattcaagaaccagagattgaattcatcagacttgtgcaaagttgagctaatagaggcaaatcgatctcaagaatctccagaggagctgagttttctcaacaaagcattgcttgtcccaaatgattctgatgaaggagaagtggcatgcaagtctagagatgtcgaagatgctacagctcttgtcaggcttattccagtatggcttacaactttggcttacgcgatacctttcgcgcagtacatgactttctttacaaagcaaggtgtcacaatggaaagaacaatatttccaggtgtagagatcccacctgcttctcttcaggttcttatcagcatatcaattgttctctttgtccccatctatgaccgtgttttggtcccaatcggaaggtcaataactaaagatccttgtggcatcacaactctcaaaagaattggaaccggaatggtactagcaactctcactatggtggtggctgctttggttgagtcaaagcggctcgagactgcaaaagaatacggacttatagaccaaccgaaaacaactcttccaatgtcgatatggtggttattccctcagtatatgttactgggattggctgacgtacacactttagtaggaatgcaagagttcttctacagccaagtccccactgagctgagaagcctcggtctcgcgatttacttaagtgcaatgggcgttggaagcttattaagcagcttactcatctatctgatcgatttggccactggaggagacgccggaaacagctggttcaacagtaatctgaacagagcccatctagattacttctattggttacttgcggttgttagtgccgttgggttctttacgttcttgttcatctccaagtcctatatatatcgccgggtggacgtagtgtag

SEQ ID NO: 71583 - protein, 1095 aa, Arabidopsis thaliana
  peptide (1)..(1095): Ceres Seq. ID no. 4360098
MTTTSEISLQEEYVTDAVDHRGLAARRSNTGRWRAALFIIGVEVAERFAYYGIGSNLISYLTGPLGESTAVAAANVNAWSGIATLLPVLGAFVADAFLGRYRTIIISSLIYVLGLAFLTLSAFLIPNTTEVTSSTSSFLNVLFFFSLYLVAIGQSGHKPCVQAFGADQFDEKDSQEKSDRSSFFNWWYLSLSAGICFAILVVVYIQEEFSWAFGFGIPCVFMVISLVLFVSGRRIYRYSKRRHEEEINPFTRIGRVFFVALKNQRLSSSDLCKVELEANTSPEKQSFFNKALLVPNDSSQGENASKSSDVEDATALIRLIPVWFTTLAYAIPYAQYMTFFTKQGVTMDRTILPGVKIPPASLQVFIGISIVLFVPIYDRVFVPIARLITKEPCGITTLKRIGTGIVLSTITMVIAALVEFKRLETAKEHGLIDQPEATLPMSIWWLIPQYLLLGLADVYTLVGMQEFFYSQVPTELRSIGLALYLSALGVGSLLSSLLISLIDLATGGDAGNSWFNSNLNRAHLDYFYWLLAIKMTTTSKTSLQEEYVIDAVDHRGFSARRSITGRWRAAWFIIGVEVAERFANYGIGSNLISYLTGPLGQSTAVAAANVNAWSGISTILPLLGAFVADAFLGRYITIIIASFIYVLGLAFLTLSAFLIPNNTEVTSSPSSFLNALFFFSLYLVAIGQSGHKPCVQAFGADQFDEKNPQENSDRSSFFNWWYLSMCAGIGLAILVVVYIQENVSWALGFGIPCVFMVISLVLFVLGRKSYRFSKTRQEEETNPFTRIGRVFFVAFKNQRLNSSDLCKVELIEANRSQESPEELSFLNKALLVPNDSDEGEVACKSRDVEDATALVRLIPVWLTTLAYAIPFAQYMTFFTKQGVTMERTIFPGVEIPPASLQVLISISIVLFVPIYDRVLVPIGRSITKDPCGITTLKRIGTGMVLATLTMVVAALVESKRLETAKEYGLIDQPKTTLPMSIWWLFPQYMLLGLADVHTLVGMQEFFYSQVPTELRSLGLAIYLSAMGVGSLLSSLLIYLIDLATGGDAGNSWFNSNLNRAHLDYFYWLLAVVSAVGFFTFLFISKSYIYRRVDVV

SEQ ID NO: 71584 - protein, 874 aa, Arabidopsis thaliana
  peptide (1)..(874): Ceres Seq. ID no. 4360099
MVISLVLFVSGRRIYRYSKRRHEEEINPFTRIGRVFFVALKNQRLSSSDLCKVELEANTSPEKQSFFNKALLVPNDSSQGENASKSSDVEDATALIRLIPVWFTTLAYAIPYAQYMTFFTKQGVTMDRTILPGVKIPPASLQVFIGISIVLFVPIYDRVFVPIARLITKEPCGITTLKRIGTGIVLSTITMVIAALVEFKRLETAKEHGLIDQPEATLPMSIWWLIPQYLLLGLADVYTLVGMQEFFYSQVPTELRSIGLALYLSALGVGSLLSSLLISLIDLATGGDAGNSWFNSNLNRAHLDYFYWLLAIKMTTTSKTSLQEEYVIDAVDHRGFSARRSITGRWRAAWFIIGVEVAERFANYGIGSNLISYLTGPLGQSTAVAAANVNAWSGISTILPLLGAFVADAFLGRYITIIIASFIYVLGLAFLTLSAFLIPNNTEVTSSPSSFLNALFFFSLYLVAIGQSGHKPCVQAFGADQFDEKNPQENSDRSSFFNWWYLSMCAGIGLAILVVVYIQENVSWALGFGIPCVFMVISLVLFVLGRKSYRFSKTRQEEETNPFTRIGRVFFVAFKNQRLNSSDLCKVELIEANRSQESPEELSFLNKALLVPNDSDEGEVACKSRDVEDATALVRLIPVWLTTLAYAIPFAQYMTFFTKQGVTMERTIFPGVEIPPASLQVLISISIVLFVPIYDRVLVPIGRSITKDPCGITTLKRIGTGMVLATLTMVVAALVESKRLETAKEYGLIDQPKTTLPMSIWWLFPQYMLLGLADVHTLVGMQEFFYSQVPTELRSLGLAIYLSAMGVGSLLSSLLIYLIDLATGGDAGNSWFNSNLNRAHLDYFYWLLAVVSAVGFFTFLFISKSYIYRRVDVV

SEQ ID NO: 71585 - protein, 759 aa, Arabidopsis thaliana
  peptide (1)..(759): Ceres Seq. ID no. 4360100
MTFFTKQGVTMDRTILPGVKIPPASLQVFIGISIVLFVPIYDRVFVPIARLITKEPCGITTLKRIGTGIVLSTITMVIAALVEFKRLETAKEHGLIDQPEATLPMSIWWLIPQYLLLGLADVYTLVGMQEFFYSQVPTELRSIGLALYLSALGVGSLLSSLLISLIDLATGGDAGNSWFNSNLNRAHLDYFYWLLAIKMTTTSKTSLQEEYVIDAVDHRGFSARRSITGRWRAAWFIIGVEVAERFANYGIGSNLISYLTGPLGQSTAVAAANVNAWSGISTILPLLGAFVADAFLGRYITIIIASFIYVLGLAFLTLSAFLIPNNTEVTSSPSSFLNALFFFSLYLVAIGQSGHKPCVQAFGADQFDEKNPQENSDRSSFFNWWYLSMCAGIGLAILVVVYIQENVSWALGFGIPCVFMVISLVLFVLGRKSYRFSKTRQEEETNPFTRIGRVFFVAFKNQRLNSSDLCKVELIEANRSQESPEELSFLNKALLVPNDSDEGEVACKSRDVEDATALVRLIPVWLTTLAYAIPFAQYMTFFTKQGVTMERTIFPGVEIPPASLQVLISISIVLFVPIYDRVLVPIGRSITKDPCGITTLKRIGTGMVLATLTMVVAALVESKRLETAKEYGLIDQPKTTLPMSIWWLFPQYMLLGLADVHTLVGMQEFFYSQVPTELRSLGLAIYLSAMGVGSLLSSLLIYLIDLATGGDAGNSWFNSNLNRAHLDYFYWLLAVVSAVGFFTFLFISKSYIYRRVDVV

SEQ ID NO: 71586 - DNA, 1152 bp, Arabidopsis thaliana
  misc_feature (1)..(1152): Ceres Seq. ID no. 4360904
  misc_feature (1)..(1152): Ortholog of  Ceres SEQ ID NO 15170956 as cited in SEQ ID NO 55034
atggagaccgtagtggtgattgtgggagctggaccggccggtttagcaacatcggtttgtctaaaccaacactcaatcccaaacgtgatcctcgagaaagaagacatctatgcatccctttggaagaaacgagcgtacgatcgtctcaaacttcacttagccaaagaattttgccagcttcctttcatgccacacggtcgtgaggttccaacctttatgtccaaagagcttttcgtcaactaccttgacgcttacgttgcccgtttcgacatcaaccctaggtacaaccgtaccgtgaagtcctcaacgttcgatgagtccaataacaagtggagggtcgtggccgaaaacacggtaaccggagaaaccgaggtgtattggtcggagtttctggtggttgcgaccggggagaacggagatgggaatattccgatggtggaggggattgacacttttgggggagagattatgcactcgagtgagtacaagtccggtcgtgattttaaagataaaaatgttcttgtggtcggaggtggaaattccggtatggagattagttttgatctttgcaacttcggagctaatacgaccattctaattagaactccaagacacgtggtgactaaagaagtgatacacttggggatgacacttctgaagtatgctccagtggcgatggtcgacacattggtgacgactatggcaaaaattttgtacggagatctctccaagtacggactcttccgaccaaaacaaggtcctttcgccaccaaactctttaccggaaaagctcctgtcattgatgttggaactgtcgagaagattcgcgatggcgagattcaggttatcaatggtgggattggaagcatcaacgggaagaccttgacgttcgaaaacggacataaacaagatttcgatgcgattgtgtttgctactggttacaaaagctccgtttgcaattggttagaggactatgaatacgtgatgaagaaggatggattccccaaagcaccgatgccaaaacattggaaaggagagaagaatctttactgtgccggattttcaagaaaaggaatcgccggaggtgctgaggatgctatgtctgtagccgacgacatcagatctatcttggctaccttaaaaaataattga

SEQ ID NO: 71587 - protein, 383 aa, Arabidopsis thaliana
  peptide (1)..(383): Ceres Seq. ID no. 4360905
METVVVIVGAGPAGLATSVCLNQHSIPNVILEKEDIYASLWKKRAYDRLKLHLAKEFCQLPFMPHGREVPTFMSKELFVNYLDAYVARFDINPRYNRTVKSSTFDESNNKWRVVAENTVTGETEVYWSEFLVVATGENGDGNIPMVEGIDTFGGEIMHSSEYKSGRDFKDKNVLVVGGGNSGMEISFDLCNFGANTTILIRTPRHVVTKEVIHLGMTLLKYAPVAMVDTLVTTMAKILYGDLSKYGLFRPKQGPFATKLFTGKAPVIDVGTVEKIRDGEIQVINGGIGSINGKTLTFENGHKQDFDAIVFATGYKSSVCNWLEDYEYVMKKDGFPKAPMPKHWKGEKNLYCAGFSRKGIAGGAEDAMSVADDIRSILATLKNN

SEQ ID NO: 71588 - protein, 321 aa, Arabidopsis thaliana
  peptide (1)..(321): Ceres Seq. ID no. 4360906
MPHGREVPTFMSKELFVNYLDAYVARFDINPRYNRTVKSSTFDESNNKWRVVAENTVTGETEVYWSEFLVVATGENGDGNIPMVEGIDTFGGEIMHSSEYKSGRDFKDKNVLVVGGGNSGMEISFDLCNFGANTTILIRTPRHVVTKEVIHLGMTLLKYAPVAMVDTLVTTMAKILYGDLSKYGLFRPKQGPFATKLFTGKAPVIDVGTVEKIRDGEIQVINGGIGSINGKTLTFENGHKQDFDAIVFATGYKSSVCNWLEDYEYVMKKDGFPKAPMPKHWKGEKNLYCAGFSRKGIAGGAEDAMSVADDIRSILATLKNN

SEQ ID NO: 71589 - protein, 311 aa, Arabidopsis thaliana
  peptide (1)..(311): Ceres Seq. ID no. 4360907
MSKELFVNYLDAYVARFDINPRYNRTVKSSTFDESNNKWRVVAENTVTGETEVYWSEFLVVATGENGDGNIPMVEGIDTFGGEIMHSSEYKSGRDFKDKNVLVVGGGNSGMEISFDLCNFGANTTILIRTPRHVVTKEVIHLGMTLLKYAPVAMVDTLVTTMAKILYGDLSKYGLFRPKQGPFATKLFTGKAPVIDVGTVEKIRDGEIQVINGGIGSINGKTLTFENGHKQDFDAIVFATGYKSSVCNWLEDYEYVMKKDGFPKAPMPKHWKGEKNLYCAGFSRKGIAGGAEDAMSVADDIRSILATLKNN

SEQ ID NO: 71590 - DNA, 1539 bp, Arabidopsis thaliana
  misc_feature (1)..(1539): Ceres Seq. ID no. 4361900
  misc_feature (1)..(1539): Ortholog of  Ceres SEQ ID NO 15176532 as cited in SEQ ID NO 58184
  misc_feature (1)..(1539): Ortholog of  Ceres SEQ ID NO 13597546 as cited in SEQ ID NO 65017
  misc_feature (1)..(1539): Ortholog of  Ceres SEQ ID NO 14307908 as cited in SEQ ID NO 67189
  misc_feature (1)..(1539): Ortholog of  Ceres SEQ ID NO 13654353 as cited in SEQ ID NO 68318
atggcggaatctgcaggagaatcctataggcttctctctgtttcttcatcaaccacatttcttgccttcataatcatcttcttacttgcgggtatagcaagaagaaagagaagagcgcctcacaggctgcctccgggaagcagaggatggcctttgatcggagataccttcgcttggctcaacgccgtcgctggttctcatccttcaagcttcgtcgagaaacaaataaaaaagttcgtctctttgctatgctctgttttgttattaatactcaagaggcctgataatagtggttttaatgaaattaggtatgggaggatattctcgtgtagcttgtttgggaaatgggcagtggtatcagcagacccggattttaaccggtttataatgcagaacgaaggaaagctatttcagtcaagttatccaaagtctttcagggatttggttgggaaagatggagtgatcacagtgcatggtgatcagcagagacggcttcactcgattgcatcgagcatgatgcgtcatgaccagctcaagactcattttcttgaggttattcccgtcgttatgctccagacactgagtaatttcaaggacggtgaagtcgtgcttctccaagatatctgcagaaaggttgccattcatcttatggttaaccaacttctcggtgtgtcgagcgaatcagaagtcgatgaaatgtctcagcttttctctgattttgttgatggatgtctctctgttcctattgacttgcctggtttcacatacaacaaagcaatgaaggcacgaaaggagatcataaggaagataaacaagacgatagaaaagcggttgcaaaacaaagcagcatcagatactgctggtaatggtgtacttggaagattgcttgaagaagaaagtttaccaaacgaatcaatggcagattttatcatcaatctactgtttgccggaaatgaaacaacctcaaaaacaatgctgtttgcggtttacttcctcactcattgtcctaaggccatgacccaactcctggaggaacatgataggctcgcgggtggaatgttaacatggcaagattacaagacaatggacttcactcaatgcgtaatagatgaaacactcaggcttggtggaattgcgatatggcttatgagagaggccaaagaagatgtctcatatcaagattatgtcattcccaagggatgcttcgtagttccgtttctctcggcagtgcacttagacgagagctattacaaagaaagtctctccttcaatccatggcgatggcttgaccctgaaactcagcaaaagaggaattggagaacgagccctttttattgcccatttggtggaggaactcggttttgcccaggagcagaactggctcgccttcaaattgctctctttctgcattacttcatcaccacatataagtggacacaacttaaggaagatcgtatctccttcttcccttcggctcgtctagtgaatggcttcaaaatccagttgaacagacgagacagtgatcctccgaatcaataa

SEQ ID NO: 71591 - protein, 512 aa, Arabidopsis thaliana
  peptide (1)..(512): Ceres Seq. ID no. 4361901
MAESAGESYRLLSVSSSTTFLAFIIIFLLAGIARRKRRAPHRLPPGSRGWPLIGDTFAWLNAVAGSHPSSFVEKQIKKFVSLLCSVLLLILKRPDNSGFNEIRYGRIFSCSLFGKWAVVSADPDFNRFIMQNEGKLFQSSYPKSFRDLVGKDGVITVHGDQQRRLHSIASSMMRHDQLKTHFLEVIPVVMLQTLSNFKDGEVVLLQDICRKVAIHLMVNQLLGVSSESEVDEMSQLFSDFVDGCLSVPIDLPGFTYNKAMKARKEIIRKINKTIEKRLQNKAASDTAGNGVLGRLLEEESLPNESMADFIINLLFAGNETTSKTMLFAVYFLTHCPKAMTQLLEEHDRLAGGMLTWQDYKTMDFTQCVIDETLRLGGIAIWLMREAKEDVSYQDYVIPKGCFVVPFLSAVHLDESYYKESLSFNPWRWLDPETQQKRNWRTSPFYCPFGGGTRFCPGAELARLQIALFLHYFITTYKWTQLKEDRISFFPSARLVNGFKIQLNRRDSDPPNQ

SEQ ID NO: 71592 - protein, 383 aa, Arabidopsis thaliana
  peptide (1)..(383): Ceres Seq. ID no. 4361902
MQNEGKLFQSSYPKSFRDLVGKDGVITVHGDQQRRLHSIASSMMRHDQLKTHFLEVIPVVMLQTLSNFKDGEVVLLQDICRKVAIHLMVNQLLGVSSESEVDEMSQLFSDFVDGCLSVPIDLPGFTYNKAMKARKEIIRKINKTIEKRLQNKAASDTAGNGVLGRLLEEESLPNESMADFIINLLFAGNETTSKTMLFAVYFLTHCPKAMTQLLEEHDRLAGGMLTWQDYKTMDFTQCVIDETLRLGGIAIWLMREAKEDVSYQDYVIPKGCFVVPFLSAVHLDESYYKESLSFNPWRWLDPETQQKRNWRTSPFYCPFGGGTRFCPGAELARLQIALFLHYFITTYKWTQLKEDRISFFPSARLVNGFKIQLNRRDSDPPNQ

SEQ ID NO: 71593 - protein, 341 aa, Arabidopsis thaliana
  peptide (1)..(341): Ceres Seq. ID no. 4361903
MMRHDQLKTHFLEVIPVVMLQTLSNFKDGEVVLLQDICRKVAIHLMVNQLLGVSSESEVDEMSQLFSDFVDGCLSVPIDLPGFTYNKAMKARKEIIRKINKTIEKRLQNKAASDTAGNGVLGRLLEEESLPNESMADFIINLLFAGNETTSKTMLFAVYFLTHCPKAMTQLLEEHDRLAGGMLTWQDYKTMDFTQCVIDETLRLGGIAIWLMREAKEDVSYQDYVIPKGCFVVPFLSAVHLDESYYKESLSFNPWRWLDPETQQKRNWRTSPFYCPFGGGTRFCPGAELARLQIALFLHYFITTYKWTQLKEDRISFFPSARLVNGFKIQLNRRDSDPPNQ

SEQ ID NO: 71594 - DNA, 981 bp, Arabidopsis thaliana
  misc_feature (1)..(981): Ceres Seq. ID no. 4362003
  misc_feature (1)..(981): Ortholog of  Ceres SEQ ID NO 13596911 as cited in SEQ ID NO 60640
atgtggaagcattgtttatgtcagaaacatgagaaatccgaaaagtgggttgatattgtccctagtcacaagcctcatcgtagtaacggcagatttcgagtcgtctcttacaacaccctagctcatcggatggcgtcgtcgtctctcatgtatgtctctcctccagagtctatcctgtgggagaaacgttcgaaggcgattcttgataatataaagaattttgaagctgatttcatctgtctacaagaagtagacgagtaccatagttttttcgatagaaacatggaagctcaaggatactctggaattcctattgaaaataaagaaggctatgaatgcgcaatctttttcaagcccaaatttgcagagttcattacataccaaacaaccagaatccaaggatacaccaaatatgaaaacctttgcgtggcgccgagtagtagtaccgtaagtagtgagtctagtgacgttgttaacgctgaagagctttctgtggtaatggtagcgttcaagattttaaaaccatttaatcatgtcgttattattgcaagctctcatttaaaatccgggaaacctgatcgatgggatgatttaaagctagctcaagtcaagactctaatgactgaattagcctcgttcaaggagattatatcagcgctaacaaattgcagtccatcggtgatccttgctggtgacttcaattcgaaaccctacgtgcataaatacataaattcagacaatataccgtctgatattgatctacgaagtgtgtatgaatttacgaaaggagagccaaggttcacaaataatgtgccagggtttgctgaaacactcgattacatgttctacacgcattctgaaattatttctcctgtgaagctcctggattcgccggacgaagtcgatttcttacccaatgaaattcatccgagtgatcatttacccatcggcgttgagtttgagatcaaccgaaacatatag

SEQ ID NO: 71595 - protein, 326 aa, Arabidopsis thaliana
  peptide (1)..(326): Ceres Seq. ID no. 4362004
MWKHCLCQKHEKSEKWVDIVPSHKPHRSNGRFRVVSYNTLAHRMASSSLMYVSPPESILWEKRSKAILDNIKNFEADFICLQEVDEYHSFFDRNMEAQGYSGIPIENKEGYECAIFFKPKFAEFITYQTTRIQGYTKYENLCVAPSSSTVSSESSDVVNAEELSVVMVAFKILKPFNHVVIIASSHLKSGKPDRWDDLKLAQVKTLMTELASFKEIISALTNCSPSVILAGDFNSKPYVHKYINSDNIPSDIDLRSVYEFTKGEPRFTNNVPGFAETLDYMFYTHSEIISPVKLLDSPDEVDFLPNEIHPSDHLPIGVEFEINRNI

SEQ ID NO: 71596 - protein, 283 aa, Arabidopsis thaliana
  peptide (1)..(283): Ceres Seq. ID no. 4362005
MASSSLMYVSPPESILWEKRSKAILDNIKNFEADFICLQEVDEYHSFFDRNMEAQGYSGIPIENKEGYECAIFFKPKFAEFITYQTTRIQGYTKYENLCVAPSSSTVSSESSDVVNAEELSVVMVAFKILKPFNHVVIIASSHLKSGKPDRWDDLKLAQVKTLMTELASFKEIISALTNCSPSVILAGDFNSKPYVHKYINSDNIPSDIDLRSVYEFTKGEPRFTNNVPGFAETLDYMFYTHSEIISPVKLLDSPDEVDFLPNEIHPSDHLPIGVEFEINRNI

SEQ ID NO: 71597 - protein, 277 aa, Arabidopsis thaliana
  peptide (1)..(277): Ceres Seq. ID no. 4362006
MYVSPPESILWEKRSKAILDNIKNFEADFICLQEVDEYHSFFDRNMEAQGYSGIPIENKEGYECAIFFKPKFAEFITYQTTRIQGYTKYENLCVAPSSSTVSSESSDVVNAEELSVVMVAFKILKPFNHVVIIASSHLKSGKPDRWDDLKLAQVKTLMTELASFKEIISALTNCSPSVILAGDFNSKPYVHKYINSDNIPSDIDLRSVYEFTKGEPRFTNNVPGFAETLDYMFYTHSEIISPVKLLDSPDEVDFLPNEIHPSDHLPIGVEFEINRNI

SEQ ID NO: 71598 - DNA, 1020 bp, Arabidopsis thaliana
  misc_feature (1)..(1020): Ceres Seq. ID no. 4362265
  misc_feature (1)..(1020): Ortholog of  Ceres SEQ ID NO 14302757 as cited in SEQ ID NO 56631
  misc_feature (1)..(1020): Ortholog of  Ceres SEQ ID NO 13662567 as cited in SEQ ID NO 62884
atgactttggtgccggccattggtcgcgagctctcgaatccaccgtccgatgggatttctaatcttcgattttctaataacagcgatcatttactagtctcttcatgggataagagtgtaagattgtatgatgcgaacggcgatttgatgagaggggagtttaaacatggtggagcggtactcgattgctgcttccatgatgattcttctggattcagtgtttgcgccgatactaaagttagaagaattgacttcaatgctggcaaagaagacgttttgggtacgcatgagaagccagttcgatgtgttgagtattcttatgctgcagggcaagtgatcactggaagttgggataaaacgattaaatgttgggatccaagaggtgcaagtgggactgagcgcacacagattggaacttatatgcaacctgagcgtgttaactctctttctcttgttggaaatcgtttggtagtggcaacagcaggaaggcatgtcaacatttatgatcttagaaatatgtcccagcctgagcaaagaagagagtcctcacttaaataccagacaagatgtgtacgttgttatcccaacggaacaggatatgcccttagctctgttgaagggagggtttcaatggagttttttgatctatcagaagctgctcaggctaaaaaatatgctttcaaatgtcaccggaaatcagaggatggaagggacattgtctaccctgtaaatgcaattgctttccatccgatttatggcacttttgcttccggaggctgtgatggttttgtcaacatttgggacggtaacaataagaagaggctttatcagtactctaagtatccaacaagtattgcggcgctgtcattcagccgagatggtggattactggctgttgcttctagttacacgtttgaagagggagacaaaccgcatgaaccggacgccatctttgttagaagtgttaatgaaattgaagtgaaaccgaaacccaaagtatacccaaatcccccggtatag

SEQ ID NO: 71599 - protein, 339 aa, Arabidopsis thaliana
  peptide (1)..(339): Ceres Seq. ID no. 4362266
MTLVPAIGRELSNPPSDGISNLRFSNNSDHLLVSSWDKSVRLYDANGDLMRGEFKHGGAVLDCCFHDDSSGFSVCADTKVRRIDFNAGKEDVLGTHEKPVRCVEYSYAAGQVITGSWDKTIKCWDPRGASGTERTQIGTYMQPERVNSLSLVGNRLVVATAGRHVNIYDLRNMSQPEQRRESSLKYQTRCVRCYPNGTGYALSSVEGRVSMEFFDLSEAAQAKKYAFKCHRKSEDGRDIVYPVNAIAFHPIYGTFASGGCDGFVNIWDGNNKKRLYQYSKYPTSIAALSFSRDGGLLAVASSYTFEEGDKPHEPDAIFVRSVNEIEVKPKPKVYPNPPV

SEQ ID NO: 71600 - protein, 290 aa, Arabidopsis thaliana
  peptide (1)..(290): Ceres Seq. ID no. 4362267
MRGEFKHGGAVLDCCFHDDSSGFSVCADTKVRRIDFNAGKEDVLGTHEKPVRCVEYSYAAGQVITGSWDKTIKCWDPRGASGTERTQIGTYMQPERVNSLSLVGNRLVVATAGRHVNIYDLRNMSQPEQRRESSLKYQTRCVRCYPNGTGYALSSVEGRVSMEFFDLSEAAQAKKYAFKCHRKSEDGRDIVYPVNAIAFHPIYGTFASGGCDGFVNIWDGNNKKRLYQYSKYPTSIAALSFSRDGGLLAVASSYTFEEGDKPHEPDAIFVRSVNEIEVKPKPKVYPNPPV

SEQ ID NO: 71601 - protein, 199 aa, Arabidopsis thaliana
  peptide (1)..(199): Ceres Seq. ID no. 4362268
MQPERVNSLSLVGNRLVVATAGRHVNIYDLRNMSQPEQRRESSLKYQTRCVRCYPNGTGYALSSVEGRVSMEFFDLSEAAQAKKYAFKCHRKSEDGRDIVYPVNAIAFHPIYGTFASGGCDGFVNIWDGNNKKRLYQYSKYPTSIAALSFSRDGGLLAVASSYTFEEGDKPHEPDAIFVRSVNEIEVKPKPKVYPNPPV

SEQ ID NO: 71602 - DNA, 2373 bp, Arabidopsis thaliana
  misc_feature (1)..(2373): Ceres Seq. ID no. 4370992
  misc_feature (1)..(2373): Ortholog of  Ceres SEQ ID NO 12586556 as cited in SEQ ID NO 64667
  misc_feature (1)..(2373): Ortholog of  Ceres SEQ ID NO 13660894 as cited in SEQ ID NO 67475
atgcaaccgaatccagaccttgtccgagccatcgccaaccgctacgccgcgaatctccgcctctgtttgccgctccgacgaacatctctgcagctcgcgcgagccgtccatggaaatatcattactttcgggtttcagccacgtgcccatatcctgaaccgtttgattgatgtttattgtaaatcgtcagagctaaattatgcacgccaactgttcgatgaaatctctgaaccagataaaattgctagaaccaccatggtctctggctattgtgcttccggtgatatcaccctcgctcgaggggtttttgagaaagctcctgtgtgtatgcgtgatactgtaatgtacaatgcgatgatcactggcttttcacataacaatgatggttactctgctattaacctcttttgtaagatgaagcatgaaggattcaaacctgacaacttcactttcgcaagtgttctcgcgggtttagcgttagttgccgatgacgagaagcaatgtgtgcaatttcatgccgcagctctgaaatctggtgctggttatattacttcggtttctaacgctctggtgtctgtgtattcgaaatgtgcgtcttctccgtctctgctacattcagctagaaaagtgtttgatgagattcttgagaaagatgagaggtcgtggacgactatgatgacgggttatgtaaagaatggttattttgatttaggggaagagttgcttgaggggatggacgacaatatgaagctggttgcttataatgctatgatttctggttatgttaatcgtggtttttatcaggaggcattggagatggtaagaaggatggtttcatctggaattgagctcgatgagtttacatatcctagcgttattagggcgtgtgccacagctggattgcttcagttgggaaagcaagttcatgcttatgtattaagaagggaggatttctcgtttcattttgacaattcgttagtttcgttatactacaaatgcggtaagtttgatgaggcgagagccatttttgagaaaatgccggcaaaagacttggtttcctggaatgcgttgttgtcagggtatgttagttctgggcacataggtgaggcgaagttgattttcaaagagatgaaagagaagaatattctatcatggatgataatgatatccgggttagctgaaaatgggtttggagaagaaggtttgaagctgttttcttgtatgaagagagaaggtttcgagccttgtgattacgctttttccggggcaatcaaatcatgtgccgtgctgggagcatattgcaatgggcaacagtaccatgcacagttgcttaaaatagggtttgactctagcctctctgctggaaacgctctgattacaatgtatgcgaaatgcggggttgtggaggaagctcgacaggtgtttcgaactatgccttgtctggattcggtttcctggaatgcgttgattgctgcattgggacagcatggccatggtgctgaagcagtagatgtgtatgaggagatgctaaagaaagggataagaccggatcggattacgttgcttacagttttgacagcatgtagccacgcgggtttagtggaccagggacggaaatattttgattctatggagactgtttaccgtatacctccaggtgcagatcattacgcaaggctgatcgatttgctttgtcgttctgggaaattctctgatgcggaaagtgtaatcgaatcattacctttcaaacctactgcagaaatctgggaagctcttctttctggttgcagagtgcatggaaacatggaactagggatcatcgctgcagacaaactcttcggtctcataccagaacatgatgggacatacatgctcttatcaaacatgcacgcagctactggccagtgggaggaagtggcaagggtacgtaaactaatgcgggatcgaggtgtaaaaaaagaagtagcttgtagttggattgaaatggagacacaagtgcatacatttctagttgatgatacatcacatccagaagcagaagctgtttacatctatcttcaagacctgggtaaagagatgaggagactcgggtatgtaccagacacgagcttcgtgttgcacgacgtagagtctgatggtcacaaggaagatatgttgacaactcatagtgagaagattgcggttgcttttgggctaatgaaacttcctccgggaacaactattaggattttcaagaacttgaggacttgtggagattgccataacttcttcaggttcttgtcgtgggtggtgcagcgagacattatcttgagagacaggaagaggtttcatcatttccggaatggcgagtgttcttgtggtaacttctggtag

SEQ ID NO: 71603 - protein, 790 aa, Arabidopsis thaliana
  peptide (1)..(790): Ceres Seq. ID no. 4370993
MQPNPDLVRAIANRYAANLRLCLPLRRTSLQLARAVHGNIITFGFQPRAHILNRLIDVYCKSSELNYARQLFDEISEPDKIARTTMVSGYCASGDITLARGVFEKAPVCMRDTVMYNAMITGFSHNNDGYSAINLFCKMKHEGFKPDNFTFASVLAGLALVADDEKQCVQFHAAALKSGAGYITSVSNALVSVYSKCASSPSLLHSARKVFDEILEKDERSWTTMMTGYVKNGYFDLGEELLEGMDDNMKLVAYNAMISGYVNRGFYQEALEMVRRMVSSGIELDEFTYPSVIRACATAGLLQLGKQVHAYVLRREDFSFHFDNSLVSLYYKCGKFDEARAIFEKMPAKDLVSWNALLSGYVSSGHIGEAKLIFKEMKEKNILSWMIMISGLAENGFGEEGLKLFSCMKREGFEPCDYAFSGAIKSCAVLGAYCNGQQYHAQLLKIGFDSSLSAGNALITMYAKCGVVEEARQVFRTMPCLDSVSWNALIAALGQHGHGAEAVDVYEEMLKKGIRPDRITLLTVLTACSHAGLVDQGRKYFDSMETVYRIPPGADHYARLIDLLCRSGKFSDAESVIESLPFKPTAEIWEALLSGCRVHGNMELGIIAADKLFGLIPEHDGTYMLLSNMHAATGQWEEVARVRKLMRDRGVKKEVACSWIEMETQVHTFLVDDTSHPEAEAVYIYLQDLGKEMRRLGYVPDTSFVLHDVESDGHKEDMLTTHSEKIAVAFGLMKLPPGTTIRIFKNLRTCGDCHNFFRFLSWVVQRDIILRDRKRFHHFRNGECSCGNFW

SEQ ID NO: 71604 - protein, 705 aa, Arabidopsis thaliana
  peptide (1)..(705): Ceres Seq. ID no. 4370994
MVSGYCASGDITLARGVFEKAPVCMRDTVMYNAMITGFSHNNDGYSAINLFCKMKHEGFKPDNFTFASVLAGLALVADDEKQCVQFHAAALKSGAGYITSVSNALVSVYSKCASSPSLLHSARKVFDEILEKDERSWTTMMTGYVKNGYFDLGEELLEGMDDNMKLVAYNAMISGYVNRGFYQEALEMVRRMVSSGIELDEFTYPSVIRACATAGLLQLGKQVHAYVLRREDFSFHFDNSLVSLYYKCGKFDEARAIFEKMPAKDLVSWNALLSGYVSSGHIGEAKLIFKEMKEKNILSWMIMISGLAENGFGEEGLKLFSCMKREGFEPCDYAFSGAIKSCAVLGAYCNGQQYHAQLLKIGFDSSLSAGNALITMYAKCGVVEEARQVFRTMPCLDSVSWNALIAALGQHGHGAEAVDVYEEMLKKGIRPDRITLLTVLTACSHAGLVDQGRKYFDSMETVYRIPPGADHYARLIDLLCRSGKFSDAESVIESLPFKPTAEIWEALLSGCRVHGNMELGIIAADKLFGLIPEHDGTYMLLSNMHAATGQWEEVARVRKLMRDRGVKKEVACSWIEMETQVHTFLVDDTSHPEAEAVYIYLQDLGKEMRRLGYVPDTSFVLHDVESDGHKEDMLTTHSEKIAVAFGLMKLPPGTTIRIFKNLRTCGDCHNFFRFLSWVVQRDIILRDRKRFHHFRNGECSCGNFW

SEQ ID NO: 71605 - protein, 681 aa, Arabidopsis thaliana
  peptide (1)..(681): Ceres Seq. ID no. 4370995
MRDTVMYNAMITGFSHNNDGYSAINLFCKMKHEGFKPDNFTFASVLAGLALVADDEKQCVQFHAAALKSGAGYITSVSNALVSVYSKCASSPSLLHSARKVFDEILEKDERSWTTMMTGYVKNGYFDLGEELLEGMDDNMKLVAYNAMISGYVNRGFYQEALEMVRRMVSSGIELDEFTYPSVIRACATAGLLQLGKQVHAYVLRREDFSFHFDNSLVSLYYKCGKFDEARAIFEKMPAKDLVSWNALLSGYVSSGHIGEAKLIFKEMKEKNILSWMIMISGLAENGFGEEGLKLFSCMKREGFEPCDYAFSGAIKSCAVLGAYCNGQQYHAQLLKIGFDSSLSAGNALITMYAKCGVVEEARQVFRTMPCLDSVSWNALIAALGQHGHGAEAVDVYEEMLKKGIRPDRITLLTVLTACSHAGLVDQGRKYFDSMETVYRIPPGADHYARLIDLLCRSGKFSDAESVIESLPFKPTAEIWEALLSGCRVHGNMELGIIAADKLFGLIPEHDGTYMLLSNMHAATGQWEEVARVRKLMRDRGVKKEVACSWIEMETQVHTFLVDDTSHPEAEAVYIYLQDLGKEMRRLGYVPDTSFVLHDVESDGHKEDMLTTHSEKIAVAFGLMKLPPGTTIRIFKNLRTCGDCHNFFRFLSWVVQRDIILRDRKRFHHFRNGECSCGNFW

SEQ ID NO: 71606 - DNA, 1110 bp, Arabidopsis thaliana
  misc_feature (1)..(1110): Ceres Seq. ID no. 4585252
  misc_feature (1)..(1110): Ortholog of  Ceres SEQ ID NO 14311675 as cited in SEQ ID NO 57981
  misc_feature (1)..(1110): Ortholog of  Ceres SEQ ID NO 14313551 as cited in SEQ ID NO 68436
atggtatcagtgtcattatctcatcataatctctggccaccggaatctggatctacggcgtttcgtggtttcgcaaccgccgcttccgtacacgcctgccaccatgttagccgtcacctccgccttgatttccatcttcgctcttcccttaaggttcacctactcatcttcgctcgcgcttctgatttctgggttaatctcattttatttgactatgctctgcttctacagaaactgcagcatttttctgatgatgcaagaatgaagtttgcaagataccaaagagtatttgtattcaatggggctaattttctcaagtctagagttgatatccggttgtcccaatcttcgccatttgtatgtttctttaatggtggagagagtagattaaaccctagaggtggtgaggaaggatcatcgaacccggagacttccaagagaaacacagttaacggacggagatggaccaatgtccttcttgccattaacgttataatgtatattgcacaaattgcatccgatgggaaggtcctgacatggggagccaagataaacagtttaatcgaaagaggtcagctatggagactggctacagcttctgttcttcatgcgaatcctatgcatctcatgataaattgctattctttgaattctattggaccaactgctgagagtttaggtggcccaaagagatttcttgctgtttacttgacatccgcagttgcaaaacccatcttaagagttctaggttcagcaatgagctactggttcaacaaagcgccatcagttggtgcttcaggtgcaatattcggattggttggctcggtagctgtatttgttataagacacaaacagatggtcagaggtggcaatgaggatctaatgcagatagctcaaattattgccctaaacatggcaatgggtctaatgtccagacgtatagataactggggacatattggtggcttacttggtggaaccgcaatgacatggcttcttggaccacagtggaagtatgaatatacaacaagagacggtcggagagtcttcatggacagtgctcctattcctctccttttgcggtggagaaatgaacagcgacggctttga

SEQ ID NO: 71607 - protein, 369 aa, Arabidopsis thaliana
  peptide (1)..(369): Ceres Seq. ID no. 4585253
MVSVSLSHHNLWPPESGSTAFRGFATAASVHACHHVSRHLRLDFHLRSSLKVHLLIFARASDFWVNLILFDYALLLQKLQHFSDDARMKFARYQRVFVFNGANFLKSRVDIRLSQSSPFVCFFNGGESRLNPRGGEEGSSNPETSKRNTVNGRRWTNVLLAINVIMYIAQIASDGKVLTWGAKINSLIERGQLWRLATASVLHANPMHLMINCYSLNSIGPTAESLGGPKRFLAVYLTSAVAKPILRVLGSAMSYWFNKAPSVGASGAIFGLVGSVAVFVIRHKQMVRGGNEDLMQIAQIIALNMAMGLMSRRIDNWGHIGGLLGGTAMTWLLGPQWKYEYTTRDGRRVFMDSAPIPLLLRWRNEQRRL

SEQ ID NO: 71608 - protein, 282 aa, Arabidopsis thaliana
  peptide (1)..(282): Ceres Seq. ID no. 4585254
MKFARYQRVFVFNGANFLKSRVDIRLSQSSPFVCFFNGGESRLNPRGGEEGSSNPETSKRNTVNGRRWTNVLLAINVIMYIAQIASDGKVLTWGAKINSLIERGQLWRLATASVLHANPMHLMINCYSLNSIGPTAESLGGPKRFLAVYLTSAVAKPILRVLGSAMSYWFNKAPSVGASGAIFGLVGSVAVFVIRHKQMVRGGNEDLMQIAQIIALNMAMGLMSRRIDNWGHIGGLLGGTAMTWLLGPQWKYEYTTRDGRRVFMDSAPIPLLLRWRNEQRRL

SEQ ID NO: 71609 - protein, 204 aa, Arabidopsis thaliana
  peptide (1)..(204): Ceres Seq. ID no. 4585255
MYIAQIASDGKVLTWGAKINSLIERGQLWRLATASVLHANPMHLMINCYSLNSIGPTAESLGGPKRFLAVYLTSAVAKPILRVLGSAMSYWFNKAPSVGASGAIFGLVGSVAVFVIRHKQMVRGGNEDLMQIAQIIALNMAMGLMSRRIDNWGHIGGLLGGTAMTWLLGPQWKYEYTTRDGRRVFMDSAPIPLLLRWRNEQRRL

SEQ ID NO: 71610 - DNA, 1098 bp, Arabidopsis thaliana
  misc_feature (1)..(1098): Ceres Seq. ID no. 4607554
  misc_feature (1)..(1098): Ortholog of  Ceres SEQ ID NO 15178899 as cited in SEQ ID NO 0
atgctcagattagcgattcctttgtttctttttgcattatgctctttcacattattttcttctgcaagatccttcatcaccacaaaacctcttccgattgattcatttattcctaaaccaaagctagagaatgcggctgcgtgttcttacacggtgatcattaagacaagctgttcctctgtgtcttacactagagataagatcagtatatcgtttggtgatgtctacggcaacgaggtgtatgtgaagagactagacgatccatcgtcgaggacgttcgaaaagtgttcatcagacacatacaagatatcgggaccgtgtatgcgcgacgtttgttatctctacctcctcaggcaaggatccgacggctggaaaccagagaatgttaagatctacggctcatccatcagatcagtcactttctactacaaccttttcttgcctaactctgtttggtacggctttaatgtctgcaatggcattggcaataccaagtcttctcaacccattagtactacctcttccgttgcagctataaatctaagaagattccataattcttatcagcggaagagcatgccggagaccagctctttcaatatacacaagcggtgggacaaaaaaaaacatatatatagccatatagggttcattgaagaattggcgaacagatttgaggaagaagatgtgcaactactgcgagttctccagcaacagctgcgggaaaaggtggagagattacggtttttgatcaagagaatgactggaaaagacgacgatgctcatttcaccgagctgcaagcacttgaaagtcgtcttaaggatgttagtcgcactgtgttggaccaaaaggagaagatgataaagctagaagaagacgaaaggaagaaggaagctcagaatgagagtgatggtacgaggagaggggttttggtcccatgcaacaggagaatgaacggtagagagctcgagggtatgtcatctcgtgacctgctctcacttgacaatcagatattaaatgctttgttgggtttgcttgtccaaatgaatagaccaagggaggaacaagttgctgcaaggcagcgcgagaaggtatag

SEQ ID NO: 71611 - protein, 365 aa, Arabidopsis thaliana
  peptide (1)..(365): Ceres Seq. ID no. 4607555
MLRLAIPLFLFALCSFTLFSSARSFITTKPLPIDSFIPKPKLENAAACSYTVIIKTSCSSVSYTRDKISISFGDVYGNEVYVKRLDDPSSRTFEKCSSDTYKISGPCMRDVCYLYLLRQGSDGWKPENVKIYGSSIRSVTFYYNLFLPNSVWYGFNVCNGIGNTKSSQPISTTSSVAAINLRRFHNSYQRKSMPETSSFNIHKRWDKKKHIYSHIGFIEELANRFEEEDVQLLRVLQQQLREKVERLRFLIKRMTGKDDDAHFTELQALESRLKDVSRTVLDQKEKMIKLEEDERKKEAQNESDGTRRGVLVPCNRRMNGRELEGMSSRDLLSLDNQILNALLGLLVQMNRPREEQVAARQREKV

SEQ ID NO: 71612 - protein, 258 aa, Arabidopsis thaliana
  peptide (1)..(258): Ceres Seq. ID no. 4607556
MRDVCYLYLLRQGSDGWKPENVKIYGSSIRSVTFYYNLFLPNSVWYGFNVCNGIGNTKSSQPISTTSSVAAINLRRFHNSYQRKSMPETSSFNIHKRWDKKKHIYSHIGFIEELANRFEEEDVQLLRVLQQQLREKVERLRFLIKRMTGKDDDAHFTELQALESRLKDVSRTVLDQKEKMIKLEEDERKKEAQNESDGTRRGVLVPCNRRMNGRELEGMSSRDLLSLDNQILNALLGLLVQMNRPREEQVAARQREKV

SEQ ID NO: 71613 - DNA, 2646 bp, Arabidopsis thaliana
  misc_feature (1)..(2646): Ceres Seq. ID no. 4630411
  misc_feature (1)..(2646): Ortholog of  Ceres SEQ ID NO 13593911 as cited in SEQ ID NO 52935
atggcggctgtcgattcaactgatcggcgggacttcatagtgaacatcaacggccaagagagtggagccgtcggtgctacagggtcaagcagcaatgctgagggaggtaatatttggaaagagtcaagctatgacttttgggatggtgaaaagggtaagaatgataagaaaggagacgacgaagacgaagacggcggcagtttccatttcaggcagcggggagagcggaggcattcgtcagctgagttatctgatccgccgtcgaagctaattggtcagtttcttcacaagcagagagcttcaggagatgagatctctttagatgttgagcttaacatggcagagctacagagcaacacgccgccacgtcctgcaactgctagcaacacgccgcgacgtggcttaacgacgatttctgaatcttcttctccggttaagactaaagttaaagcagacgcagtaagacggaggcagaacagaacatcgctaggtggaagtagcgacgaggaaggtcgaaacagagacgaagcagaggttttgaagtgtggttcgaagaaaccgatgttgagtaggaacaagaccaaatcaagattgcaggatcctccaacaccgacacatccagcgattgacaagacagagatgaagtctggtcggagatccgggatttttaaatctgggtttcttgggaaaagccctaaagcgggtactccgggtcggaatgggtttgaggaagaagaagaggaggatccgtttctagacgaggatttaccggaggaattcaaaagggacaaacttagcttctgggttttccttgaatggataagtctagttctgatagtcacaagtttggtctgtagcttaaccatacataacttgcaacgcaagacatggtggaagctggatttgtggaaatgggaagtgactgttttggtgttgatatgtgggagattagtctcgagttggatagtgagaatcattgtcttcttggtcgagaaaaacttcacttggaggaaaagggttttgtatttcgtctacggagtgagaaaatctgttcaaaactgcttgtggttagggctagtgttgctcgcgtggcatttcttgttcgataagaaagtcgaaagagagactcggagcactgctcttcggtatgtgacgagagtgttggtatgtttgcttgtggctcttatcatttggttggttaaaacaattctggttaaagttttggcttcatcgttccacatgagcacttactttgatcggattcaggagtcgttgttcactcaatacgtgattgaaactctctccggtcctcctttgatggagattcagagaatggaggaagaagagcaacaagtagcagaagatgttaagagcttagagaaattagccggagctaagctgcctccagctctaaaagcgaccgtcaagagttttatgaaagtcgggaaaagtccgggactgaatcggattggttctaagagaggagaagatggcgaagggattaggattgatcagttgaagagaatgaacacaaagaatgtgtctgcttggaacatgaagagattgatgaatataatactaaaaggcgctatttctactttggatcaaaatatgcaggacactactcaggaggatgaggacgctacgcatataagaagcgagtacgaagctaaatgcgcagctaggaagatttttcacaacgtcaccgagccaggttctaggtacatatatttggaagacttcttgcgttttctatgtgaagaggaggctgaaagagccatggctctctttgaaggagcttcagagagcgataagatcagcaagtcttgcctcaagaattgggtggttaaggcgtttagagaaaggagagctctggctttgaccttaaacgatacaaaaacagcagtggacagacttcaccgtataatcaacgtggtaattggcattataatcataatcatctggcttcttatactaggaatcgccacaaccagattcttgctagtcttaagctctcagctccttctagtagcctttgtatttggaaactcctgcaaaaccatcttcgaagccatcattttcctttttgttatgcacccatttgatgtcggtgaccgatgtgaaatcgacggtgttcagttggtagtggaggagatgaacatattgacgactgttttcttgcgatatgataatcaaaagatcatatatccgaatagtgtcctcggcacaaaacctatagctaactattaccgaagtcccgatatgggagacgcggttgaattctgtgttcatatagcaactcctcctgaaaagatcactgccattaaacagagaatactaagttacgtagacaacaagaaggattattggtatcctgcacctatgattgtgttcctaagcatggatgacttgaatagtgtgaagatagcggtgtggttgacacatagaatgaatcatcaagacatgggagagaggtatataagaagaggtctattactagaggaagtgggaaaaacttgtagagagctagatatcgagtatcgcttatatcctcttaacattaatgttcgaagtctccctcctacggctaatccaacttcttcagaccgcattcctccttcatggatgcaacaacgcggtccttga

SEQ ID NO: 71614 - protein, 881 aa, Arabidopsis thaliana
  peptide (1)..(881): Ceres Seq. ID no. 4630412
MAAVDSTDRRDFIVNINGQESGAVGATGSSSNAEGGNIWKESSYDFWDGEKGKNDKKGDDEDEDGGSFHFRQRGERRHSSAELSDPPSKLIGQFLHKQRASGDEISLDVELNMAELQSNTPPRPATASNTPRRGLTTISESSSPVKTKVKADAVRRRQNRTSLGGSSDEEGRNRDEAEVLKCGSKKPMLSRNKTKSRLQDPPTPTHPAIDKTEMKSGRRSGIFKSGFLGKSPKAGTPGRNGFEEEEEEDPFLDEDLPEEFKRDKLSFWVFLEWISLVLIVTSLVCSLTIHNLQRKTWWKLDLWKWEVTVLVLICGRLVSSWIVRIIVFLVEKNFTWRKRVLYFVYGVRKSVQNCLWLGLVLLAWHFLFDKKVERETRSTALRYVTRVLVCLLVALIIWLVKTILVKVLASSFHMSTYFDRIQESLFTQYVIETLSGPPLMEIQRMEEEEQQVAEDVKSLEKLAGAKLPPALKATVKSFMKVGKSPGLNRIGSKRGEDGEGIRIDQLKRMNTKNVSAWNMKRLMNIILKGAISTLDQNMQDTTQEDEDATHIRSEYEAKCAARKIFHNVTEPGSRYIYLEDFLRFLCEEEAERAMALFEGASESDKISKSCLKNWVVKAFRERRALALTLNDTKTAVDRLHRIINVVIGIIIIIIWLLILGIATTRFLLVLSSQLLLVAFVFGNSCKTIFEAIIFLFVMHPFDVGDRCEIDGVQLVVEEMNILTTVFLRYDNQKIIYPNSVLGTKPIANYYRSPDMGDAVEFCVHIATPPEKITAIKQRILSYVDNKKDYWYPAPMIVFLSMDDLNSVKIAVWLTHRMNHQDMGERYIRRGLLLEEVGKTCRELDIEYRLYPLNINVRSLPPTANPTSSDRIPPSWMQQRGP

SEQ ID NO: 71615 - protein, 769 aa, Arabidopsis thaliana
  peptide (1)..(769): Ceres Seq. ID no. 4630413
MAELQSNTPPRPATASNTPRRGLTTISESSSPVKTKVKADAVRRRQNRTSLGGSSDEEGRNRDEAEVLKCGSKKPMLSRNKTKSRLQDPPTPTHPAIDKTEMKSGRRSGIFKSGFLGKSPKAGTPGRNGFEEEEEEDPFLDEDLPEEFKRDKLSFWVFLEWISLVLIVTSLVCSLTIHNLQRKTWWKLDLWKWEVTVLVLICGRLVSSWIVRIIVFLVEKNFTWRKRVLYFVYGVRKSVQNCLWLGLVLLAWHFLFDKKVERETRSTALRYVTRVLVCLLVALIIWLVKTILVKVLASSFHMSTYFDRIQESLFTQYVIETLSGPPLMEIQRMEEEEQQVAEDVKSLEKLAGAKLPPALKATVKSFMKVGKSPGLNRIGSKRGEDGEGIRIDQLKRMNTKNVSAWNMKRLMNIILKGAISTLDQNMQDTTQEDEDATHIRSEYEAKCAARKIFHNVTEPGSRYIYLEDFLRFLCEEEAERAMALFEGASESDKISKSCLKNWVVKAFRERRALALTLNDTKTAVDRLHRIINVVIGIIIIIIWLLILGIATTRFLLVLSSQLLLVAFVFGNSCKTIFEAIIFLFVMHPFDVGDRCEIDGVQLVVEEMNILTTVFLRYDNQKIIYPNSVLGTKPIANYYRSPDMGDAVEFCVHIATPPEKITAIKQRILSYVDNKKDYWYPAPMIVFLSMDDLNSVKIAVWLTHRMNHQDMGERYIRRGLLLEEVGKTCRELDIEYRLYPLNINVRSLPPTANPTSSDRIPPSWMQQRGP

SEQ ID NO: 71616 - protein, 694 aa, Arabidopsis thaliana
  peptide (1)..(694): Ceres Seq. ID no. 4630414
MLSRNKTKSRLQDPPTPTHPAIDKTEMKSGRRSGIFKSGFLGKSPKAGTPGRNGFEEEEEEDPFLDEDLPEEFKRDKLSFWVFLEWISLVLIVTSLVCSLTIHNLQRKTWWKLDLWKWEVTVLVLICGRLVSSWIVRIIVFLVEKNFTWRKRVLYFVYGVRKSVQNCLWLGLVLLAWHFLFDKKVERETRSTALRYVTRVLVCLLVALIIWLVKTILVKVLASSFHMSTYFDRIQESLFTQYVIETLSGPPLMEIQRMEEEEQQVAEDVKSLEKLAGAKLPPALKATVKSFMKVGKSPGLNRIGSKRGEDGEGIRIDQLKRMNTKNVSAWNMKRLMNIILKGAISTLDQNMQDTTQEDEDATHIRSEYEAKCAARKIFHNVTEPGSRYIYLEDFLRFLCEEEAERAMALFEGASESDKISKSCLKNWVVKAFRERRALALTLNDTKTAVDRLHRIINVVIGIIIIIIWLLILGIATTRFLLVLSSQLLLVAFVFGNSCKTIFEAIIFLFVMHPFDVGDRCEIDGVQLVVEEMNILTTVFLRYDNQKIIYPNSVLGTKPIANYYRSPDMGDAVEFCVHIATPPEKITAIKQRILSYVDNKKDYWYPAPMIVFLSMDDLNSVKIAVWLTHRMNHQDMGERYIRRGLLLEEVGKTCRELDIEYRLYPLNINVRSLPPTANPTSSDRIPPSWMQQRGP

SEQ ID NO: 71617 - DNA, 1515 bp, Arabidopsis thaliana
  misc_feature (1)..(1515): Ceres Seq. ID no. 4774563
  misc_feature (1)..(1515): Ortholog of  Ceres SEQ ID NO 15169037 as cited in SEQ ID NO 58715
atgtcgacggtgtacgtgctagagccgccgacaaagggaaaggtcattgtaaatactactcatggtccaatcgacgtcgagctttggcctaaggaagcgcccaaatccgtacggaacttcgttcaactatgcctcgagggttactttgacaacaccatcttccatcgtgtcattcccggttttctcgttcaaggcggcgatcccaccggctccggaaccggtggagatagtatatatggaggtgtctttgccgatgagttccattcaaggctgagatttagccaccgtgggattgttgccatggctaatgcgagctcacctaattctaatggaagtcagttctttttcactttggataagtgtgattggcttgataagaagcacactatctttggcaaggtaacgggcgattcaatctacaatcttttaagactaggagaggttgacacgagtaaggatgatcgacctctggatcctgctccgaaaatattatctgtcgaggttttgtggaacccttttgaagatattgttcctagagtgttagcaaagacatcagaagaatctgctgctgaaatcaaggaacccccaacaaagcccgtgaagaaattgaatttactgtcattcggagaagaagctgaagaagaggaaaaggaactggctgttgtaaagcaaaagattaagagcagtcatgacgtattgaatgatcctcgacttttgaaggcagaagcttcagataaagagaggaacgcatctgagtccaaggaggtactatctgtgcgagaagctctgaatgctaagaaagaagcggctcaaaaagataaaagcttttctgtatctgatacagttggaaatagtgatgatgacgatgatggtgaagatgagactaaatttgatgcaaagatgaggaatcaagtgctcagcagaaggaaggagattggagatacgccttcaaagccgactcagaaaaaaaagagctctagcctgaaaggccgtgaagagtctacgcaaaggtctgatgctgtaagtagtgaagatgagaaaccaaggatggaaaagttgtccttgaagaaaaaaggaataggctcagaagccaaagccgaacatatggagaaaggagacactgatttacagctttacaacgcttctgaacgcgcccggcagttgcataagttgaaaaagcgcagactgcaaggaaatgaggattctgtgttagcaaaactcgagaagtttaagcagtctatctctgcaaaaccgtttacctcgagtaatgaaccagtagtgttgacctcgagtagtgaaccagttgacaataaagaagaagatctctctgattggaagaatgtaaagctcaagtttgctcctgagcgtggcaaggataaaatgtcacgcagggatgatccagatgcgtatatggtggttgaccctcttcttgaaaagggaaaagagaagttcaacagaatgcaagccaaacaaaaacgaagggagcgagaatggtctggaaaatctcttgcctga

SEQ ID NO: 71618 - protein, 504 aa, Arabidopsis thaliana
  peptide (1)..(504): Ceres Seq. ID no. 4774564
MSTVYVLEPPTKGKVIVNTTHGPIDVELWPKEAPKSVRNFVQLCLEGYFDNTIFHRVIPGFLVQGGDPTGSGTGGDSIYGGVFADEFHSRLRFSHRGIVAMANASSPNSNGSQFFFTLDKCDWLDKKHTIFGKVTGDSIYNLLRLGEVDTSKDDRPLDPAPKILSVEVLWNPFEDIVPRVLAKTSEESAAEIKEPPTKPVKKLNLLSFGEEAEEEEKELAVVKQKIKSSHDVLNDPRLLKAEASDKERNASESKEVLSVREALNAKKEAAQKDKSFSVSDTVGNSDDDDDGEDETKFDAKMRNQVLSRRKEIGDTPSKPTQKKKSSSLKGREESTQRSDAVSSEDEKPRMEKLSLKKKGIGSEAKAEHMEKGDTDLQLYNASERARQLHKLKKRRLQGNEDSVLAKLEKFKQSISAKPFTSSNEPVVLTSSSEPVDNKEEDLSDWKNVKLKFAPERGKDKMSRRDDPDAYMVVDPLLEKGKEKFNRMQAKQKRREREWSGKSLA

SEQ ID NO: 71619 - protein, 404 aa, Arabidopsis thaliana
  peptide (1)..(404): Ceres Seq. ID no. 4774565
MANASSPNSNGSQFFFTLDKCDWLDKKHTIFGKVTGDSIYNLLRLGEVDTSKDDRPLDPAPKILSVEVLWNPFEDIVPRVLAKTSEESAAEIKEPPTKPVKKLNLLSFGEEAEEEEKELAVVKQKIKSSHDVLNDPRLLKAEASDKERNASESKEVLSVREALNAKKEAAQKDKSFSVSDTVGNSDDDDDGEDETKFDAKMRNQVLSRRKEIGDTPSKPTQKKKSSSLKGREESTQRSDAVSSEDEKPRMEKLSLKKKGIGSEAKAEHMEKGDTDLQLYNASERARQLHKLKKRRLQGNEDSVLAKLEKFKQSISAKPFTSSNEPVVLTSSSEPVDNKEEDLSDWKNVKLKFAPERGKDKMSRRDDPDAYMVVDPLLEKGKEKFNRMQAKQKRREREWSGKSLA

SEQ ID NO: 71620 - DNA, 1686 bp, Arabidopsis thaliana
  misc_feature (1)..(1686): Ceres Seq. ID no. 4802897
  misc_feature (1)..(1686): Ortholog of  Ceres SEQ ID NO 12607856 as cited in SEQ ID NO 55419
atgaaactggaagacttacttgtggaagacgaaaccaaagatcaacctggcgctagcgttgcgtctcttcttgatcatcatcgtcgtcacccccagccttcccttcaacaacaaccatcaaaagtgaatgagcataagagcgaagaagagaagaatgatttgatcaagaagaagcaaaagcgaagtcttcaaagagaagtgatgaaaatgcaaggagagctagaggacgaacaagccttaaacaaggctctacgtgatatgcatcgtggtcccgtcatgtctcagcctcgtctctctttattgcttcttcctcctcaggttcaagagctaatagaggagcttgcgacggttgaggcagagatactctgtcttgagaaacgaatccaagacttgaaacttgatgtgtatagtgagaaaaaagagaacaaagaacttgaagacagtattgatgaaggagaagaagagaggatgatgaaccctaagagactactacaaaggcagaatcatcttccttgcgacgctgacaatgaccttataaagatgagatctgaggatctaaaacagagatcaaagtcccagagttatggagatcatcatgttgtcaaggatattcaaatgaacagtccacgtactcatgcgtcaattggatcaaccatggagttctcatcaagaatccattcttcgactttttctgatggaatgtcaagaacacaagagaagaataatgtgcaagagacgacaccaaatggagtatcggaagatctggtgaagtgcttgatgggaatctatctggaactcaacaggtcatcgcgtgagcgagaagggtcaaaaactgtttcaaagctgagcctcacacacctcaagaacgcttctttcaaacgcaaatcggtgtatgaccataacgcatctaatcttgatccatatggagctgtcatggggacttctcttagagacataggagaatacaagaacttcatccatatcactcgaacctccattgatgttagccgtttatccgattgctccacttctcttgtcaatttgagggttttgaaggagaagttgagcaaagtggatttgagtttcttgaaccacaagaaaaagatggcattctggatcaatacctacaacgcctgcgttatgaatggatttttggaacacggactaccttcatcaaaggaaaaactgctgaccattctcaaaatggcaacaattgacgtgggaggtacacaactgtctgctctagatatcgaaggatccatcttgcagagtccatgcgaacctagggaatctcgaagtgagaatacagacacgctacggattcagatgcgtagagccaaacctaatgttcgtgctttgtcgtggagattggtcttcacctgcacagaagatgtggtgaacgaactaatcaaagcaagaacagagtatctagaagcttccatcggtgtctcgggaaggaaaaagattgtgattccgcgattcttgcataaacgtctacgggatttcgctgaggatgaaggctcgttaattgaatggatatgcagccaattaccaccagcccaacgttgctttcagctcaaggaaacagcgatggaggggttgaacaagaaaagtgaatctcaattgaaaaaactgatagaagtgaggtctcacgaatacgagtttcgttatctcttggcattgtaa

SEQ ID NO: 71621 - protein, 561 aa, Arabidopsis thaliana
  peptide (1)..(561): Ceres Seq. ID no. 4802898
MKLEDLLVEDETKDQPGASVASLLDHHRRHPQPSLQQQPSKVNEHKSEEEKNDLIKKKQKRSLQREVMKMQGELEDEQALNKALRDMHRGPVMSQPRLSLLLLPPQVQELIEELATVEAEILCLEKRIQDLKLDVYSEKKENKELEDSIDEGEEERMMNPKRLLQRQNHLPCDADNDLIKMRSEDLKQRSKSQSYGDHHVVKDIQMNSPRTHASIGSTMEFSSRIHSSTFSDGMSRTQEKNNVQETTPNGVSEDLVKCLMGIYLELNRSSREREGSKTVSKLSLTHLKNASFKRKSVYDHNASNLDPYGAVMGTSLRDIGEYKNFIHITRTSIDVSRLSDCSTSLVNLRVLKEKLSKVDLSFLNHKKKMAFWINTYNACVMNGFLEHGLPSSKEKLLTILKMATIDVGGTQLSALDIEGSILQSPCEPRESRSENTDTLRIQMRRAKPNVRALSWRLVFTCTEDVVNELIKARTEYLEASIGVSGRKKIVIPRFLHKRLRDFAEDEGSLIEWICSQLPPAQRCFQLKETAMEGLNKKSESQLKKLIEVRSHEYEFRYLLAL

SEQ ID NO: 71622 - protein, 494 aa, Arabidopsis thaliana
  peptide (1)..(494): Ceres Seq. ID no. 4802899
MKMQGELEDEQALNKALRDMHRGPVMSQPRLSLLLLPPQVQELIEELATVEAEILCLEKRIQDLKLDVYSEKKENKELEDSIDEGEEERMMNPKRLLQRQNHLPCDADNDLIKMRSEDLKQRSKSQSYGDHHVVKDIQMNSPRTHASIGSTMEFSSRIHSSTFSDGMSRTQEKNNVQETTPNGVSEDLVKCLMGIYLELNRSSREREGSKTVSKLSLTHLKNASFKRKSVYDHNASNLDPYGAVMGTSLRDIGEYKNFIHITRTSIDVSRLSDCSTSLVNLRVLKEKLSKVDLSFLNHKKKMAFWINTYNACVMNGFLEHGLPSSKEKLLTILKMATIDVGGTQLSALDIEGSILQSPCEPRESRSENTDTLRIQMRRAKPNVRALSWRLVFTCTEDVVNELIKARTEYLEASIGVSGRKKIVIPRFLHKRLRDFAEDEGSLIEWICSQLPPAQRCFQLKETAMEGLNKKSESQLKKLIEVRSHEYEFRYLLAL

SEQ ID NO: 71623 - protein, 492 aa, Arabidopsis thaliana
  peptide (1)..(492): Ceres Seq. ID no. 4802900
MQGELEDEQALNKALRDMHRGPVMSQPRLSLLLLPPQVQELIEELATVEAEILCLEKRIQDLKLDVYSEKKENKELEDSIDEGEEERMMNPKRLLQRQNHLPCDADNDLIKMRSEDLKQRSKSQSYGDHHVVKDIQMNSPRTHASIGSTMEFSSRIHSSTFSDGMSRTQEKNNVQETTPNGVSEDLVKCLMGIYLELNRSSREREGSKTVSKLSLTHLKNASFKRKSVYDHNASNLDPYGAVMGTSLRDIGEYKNFIHITRTSIDVSRLSDCSTSLVNLRVLKEKLSKVDLSFLNHKKKMAFWINTYNACVMNGFLEHGLPSSKEKLLTILKMATIDVGGTQLSALDIEGSILQSPCEPRESRSENTDTLRIQMRRAKPNVRALSWRLVFTCTEDVVNELIKARTEYLEASIGVSGRKKIVIPRFLHKRLRDFAEDEGSLIEWICSQLPPAQRCFQLKETAMEGLNKKSESQLKKLIEVRSHEYEFRYLLAL

SEQ ID NO: 71624 - DNA, 1110 bp, Arabidopsis thaliana
  misc_feature (1)..(1110): Ceres Seq. ID no. 4803117
  misc_feature (1)..(1110): Ortholog of  Ceres SEQ ID NO 14311957 as cited in SEQ ID NO 51628
atggtggagctcaaagatcaacaagacatgggagaaggtatgcaatgcattacacatccttacacaaagaacccaggtgggatctgtgctttatgtctccaggaaaagcttggtaagctcgtcacttcctctttccctgttcctaaacccaaccatctctcttcttcttctcctaaatccttcactccttccacgacctctctcgctctgtctctctcatcggcaagcaatggcagagactccactaacaacaacaatctcccgtttcttctggctaagaagaagaagaacatgctcgcagcttcttcttcatcttcttcttcttcctcttcgtcttcttctgcgaatcttatctacaagagaagcaaatcgactgctgctgcttacggtgagagtttcagccaaaggaaacgaagtgggttttggtcttttttccatctctactcttcaaaacatcagatcagcaacaccaccaaaaaagtcgataactttagccatttaaggaggaaccagagaacagagtcaaaaacagagacttcttccatgagggtcggtggtggtggaggcattgatgtgatagttgaggaagaagatgagagtcctaacaaagtggtttcagaaacgccaacgaatggtataggtggtggtggtggttcgtcgtttgggaggaaagtgttgagatctagatctgttggttgtggtagtagaagcttctctggtgatttctttgagaggatctctaatgggtttggtgattgtgccttgagaaggattgagtcacagagagaagccactaaggtcattagtaatggtggtggtggtgaagcagcagatgcaatgagtgaaatggtcaaatgtggtggcatctttggtgggtttatgatcatgacatcatcatctacaacatcatcaacaacatcatcaacggttgatcatcatcataatcataagatggggaacagaaactggggatgggctttcgcaagtccaatgagagccaaagctactgctactcatagaggtcgtaccattacagagtccacagctgacaacaagaacacatcttcaaatttggactcaatcccttcattgttggctttgaaaagctaa

SEQ ID NO: 71625 - protein, 369 aa, Arabidopsis thaliana
  peptide (1)..(369): Ceres Seq. ID no. 4803118
MVELKDQQDMGEGMQCITHPYTKNPGGICALCLQEKLGKLVTSSFPVPKPNHLSSSSPKSFTPSTTSLALSLSSASNGRDSTNNNNLPFLLAKKKKNMLAASSSSSSSSSSSSSANLIYKRSKSTAAAYGESFSQRKRSGFWSFFHLYSSKHQISNTTKKVDNFSHLRRNQRTESKTETSSMRVGGGGGIDVIVEEEDESPNKVVSETPTNGIGGGGGSSFGRKVLRSRSVGCGSRSFSGDFFERISNGFGDCALRRIESQREATKVISNGGGGEAADAMSEMVKCGGIFGGFMIMTSSSTTSSTTSSTVDHHHNHKMGNRNWGWAFASPMRAKATATHRGRTITESTADNKNTSSNLDSIPSLLALKS

SEQ ID NO: 71626 - protein, 360 aa, Arabidopsis thaliana
  peptide (1)..(360): Ceres Seq. ID no. 4803119
MGEGMQCITHPYTKNPGGICALCLQEKLGKLVTSSFPVPKPNHLSSSSPKSFTPSTTSLALSLSSASNGRDSTNNNNLPFLLAKKKKNMLAASSSSSSSSSSSSSANLIYKRSKSTAAAYGESFSQRKRSGFWSFFHLYSSKHQISNTTKKVDNFSHLRRNQRTESKTETSSMRVGGGGGIDVIVEEEDESPNKVVSETPTNGIGGGGGSSFGRKVLRSRSVGCGSRSFSGDFFERISNGFGDCALRRIESQREATKVISNGGGGEAADAMSEMVKCGGIFGGFMIMTSSSTTSSTTSSTVDHHHNHKMGNRNWGWAFASPMRAKATATHRGRTITESTADNKNTSSNLDSIPSLLALKS

SEQ ID NO: 71627 - protein, 356 aa, Arabidopsis thaliana
  peptide (1)..(356): Ceres Seq. ID no. 4803120
MQCITHPYTKNPGGICALCLQEKLGKLVTSSFPVPKPNHLSSSSPKSFTPSTTSLALSLSSASNGRDSTNNNNLPFLLAKKKKNMLAASSSSSSSSSSSSSANLIYKRSKSTAAAYGESFSQRKRSGFWSFFHLYSSKHQISNTTKKVDNFSHLRRNQRTESKTETSSMRVGGGGGIDVIVEEEDESPNKVVSETPTNGIGGGGGSSFGRKVLRSRSVGCGSRSFSGDFFERISNGFGDCALRRIESQREATKVISNGGGGEAADAMSEMVKCGGIFGGFMIMTSSSTTSSTTSSTVDHHHNHKMGNRNWGWAFASPMRAKATATHRGRTITESTADNKNTSSNLDSIPSLLALKS

SEQ ID NO: 71628 - DNA, 2520 bp, Arabidopsis thaliana
  misc_feature (1)..(2520): Ceres Seq. ID no. 4803127
  misc_feature (1)..(2520): Ortholog of  Ceres SEQ ID NO 13657677 as cited in SEQ ID NO 66119
atggcgaaaatcatgagaaaccatatacatttgaggactggtccatggggaccttcagctgagaatactctatctgctctaagttttaaaccacaaccagaatttgtcattggggttttacggaggctgaaagatgttaatcgggctattgagtatttccgttggtatgagagaagaaccgagctgcctcattgtcctgaatcatacaactccttgcttttggtgatggctcgttgtagaaattttgatgctttggaccagattcttggagaaatgagtgttgcaggatttggcccttctgttaacacttgtattgagatggttttgggctgcgttaaggctaataagcttagggaaggttatgatgttgtgcagatgatgaggaagttcaagttccgacctgctttttcagcttacacaactcttatcggtgctttctcggcagttaatcattctgatatgatgttgacactctttcagcaaatgcaggagttaggatatgaaccgaccgttcatctgtttacaacattgattcggggatttgccaaagagggtcgagttgattctgctctatctttacttgatgagatgaagagcagctctcttgatgccgacattgttctttataatgtatgtattgatagctttggtaaagtgggcaaggttgatatggcatggaaattttttcatgagattgaagcgaatggtttaaagcctgatgaagtcacttataccagcatgataggagttctgtgcaaggcaaacagattggatgaagctgtagagatgtttgagcatctagagaagaatagacgggttccttgcacttatgcttacaacacgatgattatgggttatggttcggctggaaaatttgatgaagcatacagtctcctagagagacagagggctaaagggtctataccgagtgtgattgcatataattgcattcttacatgcttaaggaaaatgggaaaagtggacgaagctttgaaagttttcgaggagatgaaaaaagacgctgctccaaatctttcaacctataatattctcattgacatgctgtgtagagctggtaaacttgacactgcttttgagctacgcgattctatgcagaaggctggtctgtttcctaatgtgaggactgtgaacataatggttgatcggctctgtaaatcccaaaaacttgatgaagcatgtgctatgttcgaggagatggattataaggtttgtaccccagatgagattacattttgctccctcatagatggcttaggaaaggtcggaagagttgatgacgcttacaaagtctatgaaaagatgttggattctgattgtcgtactaactctatcgtttacacatccctcataaaaaacttcttcaaccacggtagaaaagaagatggacacaagatatacaaggacatgattaatcaaaactgttctcctgatttacagcttcttaatacgtacatggattgcatgttcaaggctggagaaccagaaaagggaagggccatgtttgaagaaataaaagcccgtcggtttgtcccagatgctcgaagctactcgattttaattcatggactaataaaagcaggatttgcaaatgaaacttatgagttgttttattccatgaaagagcaagggtgtgtcttggacacacgtgcttacaatattgtcattgacggtttctgcaagtgtggaaaagttaacaaagcttatcagctgctggaggaaatgaagacaaaaggttttgagccaactgttgttacgtatggttcagtcatcgacgggcttgcaaaaatagatcggcttgatgaagcttatatgctctttgaggaagcaaaatcgaagagaatagagctaaacgtggtgatttacagtagtcttattgatgggtttggaaaagttggtaggatagatgaagcttaccttatcttggaagagcttatgcagaaaggattaacacctaatctttacacatggaactcattgcttgatgcattggtcaaagctgaggaaatcaacgaagcgcttgtctgttttcagtcgatgaaagaactgaaatgcacgccaaaccaagttacttatggtatcctaataaatggtctttgtaaggtcaggaagttcaataaagcctttgtcttttggcaggagatgcagaaacaggggatgaaacccagtactatttcttacaccaccatgatatcaggacttgcaaaggctgggaatattgcagaggctggggcgctcttcgatcggttcaaggcaaacggtggtgttccagactctgcttgttataatgccatgatcgaaggtctaagtaacggaaacagggcaatggatgctttttctctttttgaggaaacacgtcgaagaggattacctatccataacaaaacctgtgttgttcttttggatactttgcataagaatgattgtcttgagcaagcagctattgtgggagctgttttgagggaaacgggaaaggcacggcatgctgcccgatcttggtag

SEQ ID NO: 71629 - protein, 839 aa, Arabidopsis thaliana
  peptide (1)..(839): Ceres Seq. ID no. 4803128
MAKIMRNHIHLRTGPWGPSAENTLSALSFKPQPEFVIGVLRRLKDVNRAIEYFRWYERRTELPHCPESYNSLLLVMARCRNFDALDQILGEMSVAGFGPSVNTCIEMVLGCVKANKLREGYDVVQMMRKFKFRPAFSAYTTLIGAFSAVNHSDMMLTLFQQMQELGYEPTVHLFTTLIRGFAKEGRVDSALSLLDEMKSSSLDADIVLYNVCIDSFGKVGKVDMAWKFFHEIEANGLKPDEVTYTSMIGVLCKANRLDEAVEMFEHLEKNRRVPCTYAYNTMIMGYGSAGKFDEAYSLLERQRAKGSIPSVIAYNCILTCLRKMGKVDEALKVFEEMKKDAAPNLSTYNILIDMLCRAGKLDTAFELRDSMQKAGLFPNVRTVNIMVDRLCKSQKLDEACAMFEEMDYKVCTPDEITFCSLIDGLGKVGRVDDAYKVYEKMLDSDCRTNSIVYTSLIKNFFNHGRKEDGHKIYKDMINQNCSPDLQLLNTYMDCMFKAGEPEKGRAMFEEIKARRFVPDARSYSILIHGLIKAGFANETYELFYSMKEQGCVLDTRAYNIVIDGFCKCGKVNKAYQLLEEMKTKGFEPTVVTYGSVIDGLAKIDRLDEAYMLFEEAKSKRIELNVVIYSSLIDGFGKVGRIDEAYLILEELMQKGLTPNLYTWNSLLDALVKAEEINEALVCFQSMKELKCTPNQVTYGILINGLCKVRKFNKAFVFWQEMQKQGMKPSTISYTTMISGLAKAGNIAEAGALFDRFKANGGVPDSACYNAMIEGLSNGNRAMDAFSLFEETRRRGLPIHNKTCVVLLDTLHKNDCLEQAAIVGAVLRETGKARHAARSW

SEQ ID NO: 71630 - protein, 835 aa, Arabidopsis thaliana
  peptide (1)..(835): Ceres Seq. ID no. 4803129
MRNHIHLRTGPWGPSAENTLSALSFKPQPEFVIGVLRRLKDVNRAIEYFRWYERRTELPHCPESYNSLLLVMARCRNFDALDQILGEMSVAGFGPSVNTCIEMVLGCVKANKLREGYDVVQMMRKFKFRPAFSAYTTLIGAFSAVNHSDMMLTLFQQMQELGYEPTVHLFTTLIRGFAKEGRVDSALSLLDEMKSSSLDADIVLYNVCIDSFGKVGKVDMAWKFFHEIEANGLKPDEVTYTSMIGVLCKANRLDEAVEMFEHLEKNRRVPCTYAYNTMIMGYGSAGKFDEAYSLLERQRAKGSIPSVIAYNCILTCLRKMGKVDEALKVFEEMKKDAAPNLSTYNILIDMLCRAGKLDTAFELRDSMQKAGLFPNVRTVNIMVDRLCKSQKLDEACAMFEEMDYKVCTPDEITFCSLIDGLGKVGRVDDAYKVYEKMLDSDCRTNSIVYTSLIKNFFNHGRKEDGHKIYKDMINQNCSPDLQLLNTYMDCMFKAGEPEKGRAMFEEIKARRFVPDARSYSILIHGLIKAGFANETYELFYSMKEQGCVLDTRAYNIVIDGFCKCGKVNKAYQLLEEMKTKGFEPTVVTYGSVIDGLAKIDRLDEAYMLFEEAKSKRIELNVVIYSSLIDGFGKVGRIDEAYLILEELMQKGLTPNLYTWNSLLDALVKAEEINEALVCFQSMKELKCTPNQVTYGILINGLCKVRKFNKAFVFWQEMQKQGMKPSTISYTTMISGLAKAGNIAEAGALFDRFKANGGVPDSACYNAMIEGLSNGNRAMDAFSLFEETRRRGLPIHNKTCVVLLDTLHKNDCLEQAAIVGAVLRETGKARHAARSW

SEQ ID NO: 71631 - protein, 764 aa, Arabidopsis thaliana
  peptide (1)..(764): Ceres Seq. ID no. 4803130
MARCRNFDALDQILGEMSVAGFGPSVNTCIEMVLGCVKANKLREGYDVVQMMRKFKFRPAFSAYTTLIGAFSAVNHSDMMLTLFQQMQELGYEPTVHLFTTLIRGFAKEGRVDSALSLLDEMKSSSLDADIVLYNVCIDSFGKVGKVDMAWKFFHEIEANGLKPDEVTYTSMIGVLCKANRLDEAVEMFEHLEKNRRVPCTYAYNTMIMGYGSAGKFDEAYSLLERQRAKGSIPSVIAYNCILTCLRKMGKVDEALKVFEEMKKDAAPNLSTYNILIDMLCRAGKLDTAFELRDSMQKAGLFPNVRTVNIMVDRLCKSQKLDEACAMFEEMDYKVCTPDEITFCSLIDGLGKVGRVDDAYKVYEKMLDSDCRTNSIVYTSLIKNFFNHGRKEDGHKIYKDMINQNCSPDLQLLNTYMDCMFKAGEPEKGRAMFEEIKARRFVPDARSYSILIHGLIKAGFANETYELFYSMKEQGCVLDTRAYNIVIDGFCKCGKVNKAYQLLEEMKTKGFEPTVVTYGSVIDGLAKIDRLDEAYMLFEEAKSKRIELNVVIYSSLIDGFGKVGRIDEAYLILEELMQKGLTPNLYTWNSLLDALVKAEEINEALVCFQSMKELKCTPNQVTYGILINGLCKVRKFNKAFVFWQEMQKQGMKPSTISYTTMISGLAKAGNIAEAGALFDRFKANGGVPDSACYNAMIEGLSNGNRAMDAFSLFEETRRRGLPIHNKTCVVLLDTLHKNDCLEQAAIVGAVLRETGKARHAARSW

SEQ ID NO: 71632 - DNA, 612 bp, Arabidopsis thaliana
  misc_feature (1)..(612): Ceres Seq. ID no. 4803276
  misc_feature (1)..(612): Ortholog of  Ceres SEQ ID NO 14316436 as cited in SEQ ID NO 59213
atgtgtttgattatggaaacggatgatcacaacggtgatgttttagcgccgccgtcgaatttctcgatggttgaagatggaatttatcgatctgggtttcctcgacctgagaatttcagtttccttaaaaccctaaatcttcgttccatcatttatctgtgtcctgaaccatacccagaggagaatctcaagtttcttgaggctaacaacattaagctttaccaatttggaatcgaaggcaaaacggatcctccaactcctatgccaaaagatacagttttggatgctctcaaagttttagttgatgtgagaaaccatccaattctcatacattgcaaacgcgggaagcataggacaggttgtctagtgggatgcttaagaaaagttcagagctggtgtttatcatcggtgctcgaggagtaccagaagaacgcgggtttaaaatggagacaaagggacttgaattttatagaggcatttgatatagtgagcttgagacagtgtctcttgagcatcatgtatcagtatcacggttatggcttcaagaggagaaggttggcatatgaagaagagaatgtcaagacaccaaaaccgcaggctgctagagtttaa

SEQ ID NO: 71633 - protein, 203 aa, Arabidopsis thaliana
  peptide (1)..(203): Ceres Seq. ID no. 4803277
MCLIMETDDHNGDVLAPPSNFSMVEDGIYRSGFPRPENFSFLKTLNLRSIIYLCPEPYPEENLKFLEANNIKLYQFGIEGKTDPPTPMPKDTVLDALKVLVDVRNHPILIHCKRGKHRTGCLVGCLRKVQSWCLSSVLEEYQKNAGLKWRQRDLNFIEAFDIVSLRQCLLSIMYQYHGYGFKRRRLAYEEENVKTPKPQAARV

SEQ ID NO: 71634 - protein, 199 aa, Arabidopsis thaliana
  peptide (1)..(199): Ceres Seq. ID no. 4803278
METDDHNGDVLAPPSNFSMVEDGIYRSGFPRPENFSFLKTLNLRSIIYLCPEPYPEENLKFLEANNIKLYQFGIEGKTDPPTPMPKDTVLDALKVLVDVRNHPILIHCKRGKHRTGCLVGCLRKVQSWCLSSVLEEYQKNAGLKWRQRDLNFIEAFDIVSLRQCLLSIMYQYHGYGFKRRRLAYEEENVKTPKPQAARV

SEQ ID NO: 71635 - protein, 181 aa, Arabidopsis thaliana
  peptide (1)..(181): Ceres Seq. ID no. 4803279
MVEDGIYRSGFPRPENFSFLKTLNLRSIIYLCPEPYPEENLKFLEANNIKLYQFGIEGKTDPPTPMPKDTVLDALKVLVDVRNHPILIHCKRGKHRTGCLVGCLRKVQSWCLSSVLEEYQKNAGLKWRQRDLNFIEAFDIVSLRQCLLSIMYQYHGYGFKRRRLAYEEENVKTPKPQAARV

SEQ ID NO: 71636 - DNA, 669 bp, Arabidopsis thaliana
  misc_feature (1)..(669): Ceres Seq. ID no. 4803378
  misc_feature (1)..(669): Ortholog of  Ceres SEQ ID NO 13599568 as cited in SEQ ID NO 509
  misc_feature (1)..(669): Ortholog of  Ceres SEQ ID NO 13638595 as cited in SEQ ID NO 52050
  misc_feature (1)..(669): Ortholog of  Ceres SEQ ID NO 13594748 as cited in SEQ ID NO 52114
  misc_feature (1)..(669): Ortholog of  Ceres SEQ ID NO 12583993 as cited in SEQ ID NO 68098
  misc_feature (1)..(669): Ortholog of  Ceres SEQ ID NO 13654535 as cited in SEQ ID NO 68227
atgaaaggtcttctgcattttcttttagccaaaatcattttgttggctttagcatcttcgtttgtatattgttacgaaccatctcctcttcaagactactgtgttgccaccaacgaaactaatggagtttatgtaaatggaaagttctgcaaagatccaaaatgtgtaacggcgaatgatttttacacttccggcctaaacgttcccggaaataccagcaccggtccgggcgtcaaaatcaccgtcgtggatgtcaaaagaatgcctggtctcaacactcttggggtcgacattgcccgcattgacttcgccccgggcggtctatacccacctcacacccacccacgtggcagcgagatcttcttagtcatgaagggcaagcttttcgttggatttgtgtcgtcgaacgaatacaactacacgctcttcaccaaagttctttatccgggagatgtatttgtgtttcccaaaggtttgatacaatttcatgcgaatattggaaagacaaatgcggttgtgattgctgcaactgggagccaaaaccccggtaggatcataataggtaatgcggttttcggatcgaaacctttgattgatcccaaggttttggctaaagcttttgcgttggacttcaacaaagtgaaatattttcaggcagtgttctcttga

SEQ ID NO: 71637 - protein, 222 aa, Arabidopsis thaliana
  peptide (1)..(222): Ceres Seq. ID no. 4803379
MKGLLHFLLAKIILLALASSFVYCYEPSPLQDYCVATNETNGVYVNGKFCKDPKCVTANDFYTSGLNVPGNTSTGPGVKITVVDVKRMPGLNTLGVDIARIDFAPGGLYPPHTHPRGSEIFLVMKGKLFVGFVSSNEYNYTLFTKVLYPGDVFVFPKGLIQFHANIGKTNAVVIAATGSQNPGRIIIGNAVFGSKPLIDPKVLAKAFALDFNKVKYFQAVFS

SEQ ID NO: 71638 - protein, 135 aa, Arabidopsis thaliana
  peptide (1)..(135): Ceres Seq. ID no. 4803380
MPGLNTLGVDIARIDFAPGGLYPPHTHPRGSEIFLVMKGKLFVGFVSSNEYNYTLFTKVLYPGDVFVFPKGLIQFHANIGKTNAVVIAATGSQNPGRIIIGNAVFGSKPLIDPKVLAKAFALDFNKVKYFQAVFS

SEQ ID NO: 71639 - DNA, 1437 bp, Arabidopsis thaliana
  misc_feature (1)..(1437): Ceres Seq. ID no. 4803596
  misc_feature (1)..(1437): Ortholog of  Ceres SEQ ID NO 13655724 as cited in SEQ ID NO 68973
  misc_feature (1)..(1437): Ortholog of  Ceres SEQ ID NO 12625899 as cited in SEQ ID NO 69079
atggaacttcctgcgacaaagttacgaataggactagtgatatttcctcttattctacttacgatagctccaatcctttatctcttttttggttatcctctctattattcaacatcaacatacaaacatttatcgaattcatcatcgtcgtcggcaatatcttctccatctaggtataaccattcatcatcatcatcagatagttataagacagaagattcagaaccatcgtcgtatgataatgattacgacgacacatatcatgatcccaagtcatcatctttgcataacaatgatcgtctatccatctcatcatcgaatggtcatcatcaagtaactcctaagaaagagcaccgccggaaaaagagaaaacgtaaatgcgatatattctccggcgagtggatcccaaaccctaaagccccgtactacacaaacacgacatgcagggcgatacacgaacaccaaaactgcatcaagtatggaagacctgatttaggtttcatgaaatggagatggaaacctaaagaatgtgatctccctctgtttgatccttacgagtttctggaaatagttagaggaacaagaatggcgttcgttggtgactccgttagcagaaaccacgttcagtctttgatctgcctactctctcgggtggaacatcctgagggtgactcacaacaggagtttaatttccaacgatggaaatacaaaacgtacaacttcacgatcgccacattttggacaacacatttggttcgcgctgaagaaacggaaaccggtccgacaggtcctaattcattctacaatctctacctcgacgaacctgaccctacttgggcttcccaaatcggtgagttcgattacataatcatctcatctggacaatggtttttccgaccactcttccttttcgacaaacaaaaaaggataggatgtttgtattgctacattcccggagtcagaaatgtcggggcacatttcgcgtatagaagagcattgagaacaacattcaagacaattcttggattagagaattttaaaggagaagtgtttctgaggacatttgctccttcacatttcgaaggtggagaatgggacaaaggtggaaattgcttgaaaacgcgaccatataggagcaatgagacagagttagatggtatgaatctagagacacacagcattcaactcgatgaatttcgcattgcaaacagagacaaaaacagaaatgacggattaaatttgagattactagatgtcacacagatgatgttgttaagaccagatggacatccgagcagattcggacataaacgagaagataaagttatcttgtataatgattgtgtacattggtgtttgccaggtccaattgattcatggaacgattttttactagacatgttgaaaaatagagatttaaagagattaaaatactag

SEQ ID NO: 71640 - protein, 478 aa, Arabidopsis thaliana
  peptide (1)..(478): Ceres Seq. ID no. 4803597
MELPATKLRIGLVIFPLILLTIAPILYLFFGYPLYYSTSTYKHLSNSSSSSAISSPSRYNHSSSSSDSYKTEDSEPSSYDNDYDDTYHDPKSSSLHNNDRLSISSSNGHHQVTPKKEHRRKKRKRKCDIFSGEWIPNPKAPYYTNTTCRAIHEHQNCIKYGRPDLGFMKWRWKPKECDLPLFDPYEFLEIVRGTRMAFVGDSVSRNHVQSLICLLSRVEHPEGDSQQEFNFQRWKYKTYNFTIATFWTTHLVRAEETETGPTGPNSFYNLYLDEPDPTWASQIGEFDYIIISSGQWFFRPLFLFDKQKRIGCLYCYIPGVRNVGAHFAYRRALRTTFKTILGLENFKGEVFLRTFAPSHFEGGEWDKGGNCLKTRPYRSNETELDGMNLETHSIQLDEFRIANRDKNRNDGLNLRLLDVTQMMLLRPDGHPSRFGHKREDKVILYNDCVHWCLPGPIDSWNDFLLDMLKNRDLKRLKY

SEQ ID NO: 71641 - protein, 311 aa, Arabidopsis thaliana
  peptide (1)..(311): Ceres Seq. ID no. 4803598
MKWRWKPKECDLPLFDPYEFLEIVRGTRMAFVGDSVSRNHVQSLICLLSRVEHPEGDSQQEFNFQRWKYKTYNFTIATFWTTHLVRAEETETGPTGPNSFYNLYLDEPDPTWASQIGEFDYIIISSGQWFFRPLFLFDKQKRIGCLYCYIPGVRNVGAHFAYRRALRTTFKTILGLENFKGEVFLRTFAPSHFEGGEWDKGGNCLKTRPYRSNETELDGMNLETHSIQLDEFRIANRDKNRNDGLNLRLLDVTQMMLLRPDGHPSRFGHKREDKVILYNDCVHWCLPGPIDSWNDFLLDMLKNRDLKRLKY

SEQ ID NO: 71642 - protein, 283 aa, Arabidopsis thaliana
  peptide (1)..(283): Ceres Seq. ID no. 4803599
MAFVGDSVSRNHVQSLICLLSRVEHPEGDSQQEFNFQRWKYKTYNFTIATFWTTHLVRAEETETGPTGPNSFYNLYLDEPDPTWASQIGEFDYIIISSGQWFFRPLFLFDKQKRIGCLYCYIPGVRNVGAHFAYRRALRTTFKTILGLENFKGEVFLRTFAPSHFEGGEWDKGGNCLKTRPYRSNETELDGMNLETHSIQLDEFRIANRDKNRNDGLNLRLLDVTQMMLLRPDGHPSRFGHKREDKVILYNDCVHWCLPGPIDSWNDFLLDMLKNRDLKRLKY

SEQ ID NO: 71643 - DNA, 2658 bp, Arabidopsis thaliana
  misc_feature (1)..(2658): Ceres Seq. ID no. 4803721
  misc_feature (1)..(2658): Ortholog of  Ceres SEQ ID NO 13584744 as cited in SEQ ID NO 69137
atggagagacattttgtgtttattgccacctatttgctgatatttcatcttgttcaagctcaaaatcaaacaggattcattagtgtggattgtggtttatcccttcttgagtctccttacgatgcaccacaaacgggtttaacatatacatcagatgccgatttagtagctagtggcaaaaccggtagactcgccaaagaatttgaaccactcgttgataagccgactttgacactgagatactttccagagggagtacgaaactgctacaatctaaatgtcaccagcgacaccaactatttaatcaaggccacatttgtatatgggaattacgatggtcttaatgttgggccaaacttcaacctttatctcggtccgaatttgtggacaacggtgagtagcaatgacactatagaggaaataatccttgtgaccagatccaactctttacaggtgtgtcttgttaagacgggaataagtataccttttataaatatgttggagctacgaccgatgaagaaaaatatgtacgttactcaaagcggttcactgaagtatttattcagagggtatattagcaattcaagtactcgtataaggttcccggatgatgtctatgaccgtaaatggtacccgctcttcgacgactcatggacacaagtaactacaaatctcaaagtgaacacaagtattacttatgaactaccacaaagtgtaatggcaaaagccgcaacgccaattaaggctaacgacaccttgaacattacatggacggtagagccccctactacacagttttactcttacgtacacattgcagagattcaggctctaagggcaaacgagacaagggagttcaatgtgacactgaatggagaatatacttttggaccttttagtcctataccgctaaaaaccgcatccatagtcgacttaagcccagggcaatgcgatggagggagatgcattttgcaggttgtgaagacgctgaaatctacgcttcctcctttacttaatgctatcgaagctttcaccgtgattgatttcccgcaaatggagacaaatgaaaatgatgttgctgggatcaagaatgttcaaggtacttatggattgagtagaattagttggcaaggagatccatgtgtccccaaacagttattgtgggatggtctaaactgcaaaaactcggatatttctacgccaccgataatcacttccttagacttatcttcaagtggattaactgggatcatcacgcaagccattaagaatcttactcacctgcaaatattggacttgtcagataataatttgactggagaagtacctgagtttttagctgacataaaatcactcttggtcataaacttaagtggtaataatctaagtggctcagttcctccctcacttcttcagaagaaaggaatgaagttaaatgtcgaaggcaatcctcatattctttgcacaacgggttcttgtgtcaagaaaaaagaggatggacataagaaaaagagtgtcatagtgccagttgttgcatcaattgcttcaatagctgttcttataggtgcattggttctgtttctaattcttagaaagaaaaggtcaccaaaagttgaagggccaccaccatcttatatgcaagcatcagatggtagattgcctagatcatctgaaccggcaatcgtaacgaaaaatagaaggttttcttattcacaagttgtgataatgacaaataacttccaaagaatccttgggaaaggagggtttggaatggtttatcatggtttcgtgaacggtacagagcaagtagctgttaagatactctcccattcatcgtctcaaggatataaacaattcaaagctgaggtagaacttcttcttagagttcatcacaagaacttggttggtcttgttgggtactgcgacgaaggagataacttggctcttatctatgaatacatggccaatggagatctaaaagaacatatgtcaggaacacgtaaccgctttattttgaattggggaactagactaaaaatagtcatcgagtctgcacaaggactcgagtacttgcataatggttgcaaaccaccaatggtacatagggacgtcaaaactacaaatatattgttgaacgaacactttgaggccaaacttgcggattttgggctttcgagatcattcctgatcgaaggtgaaactcatgtatcaacagttgttgctggaactcctggatatctcgatcctgaataccatagaacaaattggttgacagaaaagagtgatgtttatagttttgggattctattgttggagattatcacaaaccgacatgtgatcgaccaaagccgtgaaaagccacacataggagaatgggtaggagtaatgcttacaaaaggagacatccaaagcattatggatccaagtctcaatgaagattatgattccggttctgtttggaaagctgttgaactagcaatgagttgtctaaatcattcttcagcgagaagaccgaccatgtcccaagttgttattgaattgaacgagtgtctggcttctgaaaatgcaaggggaggagcaagtcgggacatggaatcaaagagttctatagaagtgagcttgacgtttggtactgaagtgagcccaaacgctcgatag

SEQ ID NO: 71644 - protein, 885 aa, Arabidopsis thaliana
  peptide (1)..(885): Ceres Seq. ID no. 4803722
MERHFVFIATYLLIFHLVQAQNQTGFISVDCGLSLLESPYDAPQTGLTYTSDADLVASGKTGRLAKEFEPLVDKPTLTLRYFPEGVRNCYNLNVTSDTNYLIKATFVYGNYDGLNVGPNFNLYLGPNLWTTVSSNDTIEEIILVTRSNSLQVCLVKTGISIPFINMLELRPMKKNMYVTQSGSLKYLFRGYISNSSTRIRFPDDVYDRKWYPLFDDSWTQVTTNLKVNTSITYELPQSVMAKAATPIKANDTLNITWTVEPPTTQFYSYVHIAEIQALRANETREFNVTLNGEYTFGPFSPIPLKTASIVDLSPGQCDGGRCILQVVKTLKSTLPPLLNAIEAFTVIDFPQMETNENDVAGIKNVQGTYGLSRISWQGDPCVPKQLLWDGLNCKNSDISTPPIITSLDLSSSGLTGIITQAIKNLTHLQILDLSDNNLTGEVPEFLADIKSLLVINLSGNNLSGSVPPSLLQKKGMKLNVEGNPHILCTTGSCVKKKEDGHKKKSVIVPVVASIASIAVLIGALVLFLILRKKRSPKVEGPPPSYMQASDGRLPRSSEPAIVTKNRRFSYSQVVIMTNNFQRILGKGGFGMVYHGFVNGTEQVAVKILSHSSSQGYKQFKAEVELLLRVHHKNLVGLVGYCDEGDNLALIYEYMANGDLKEHMSGTRNRFILNWGTRLKIVIESAQGLEYLHNGCKPPMVHRDVKTTNILLNEHFEAKLADFGLSRSFLIEGETHVSTVVAGTPGYLDPEYHRTNWLTEKSDVYSFGILLLEIITNRHVIDQSREKPHIGEWVGVMLTKGDIQSIMDPSLNEDYDSGSVWKAVELAMSCLNHSSARRPTMSQVVIELNECLASENARGGASRDMESKSSIEVSLTFGTEVSPNAR

SEQ ID NO: 71645 - protein, 720 aa, Arabidopsis thaliana
  peptide (1)..(720): Ceres Seq. ID no. 4803723
MLELRPMKKNMYVTQSGSLKYLFRGYISNSSTRIRFPDDVYDRKWYPLFDDSWTQVTTNLKVNTSITYELPQSVMAKAATPIKANDTLNITWTVEPPTTQFYSYVHIAEIQALRANETREFNVTLNGEYTFGPFSPIPLKTASIVDLSPGQCDGGRCILQVVKTLKSTLPPLLNAIEAFTVIDFPQMETNENDVAGIKNVQGTYGLSRISWQGDPCVPKQLLWDGLNCKNSDISTPPIITSLDLSSSGLTGIITQAIKNLTHLQILDLSDNNLTGEVPEFLADIKSLLVINLSGNNLSGSVPPSLLQKKGMKLNVEGNPHILCTTGSCVKKKEDGHKKKSVIVPVVASIASIAVLIGALVLFLILRKKRSPKVEGPPPSYMQASDGRLPRSSEPAIVTKNRRFSYSQVVIMTNNFQRILGKGGFGMVYHGFVNGTEQVAVKILSHSSSQGYKQFKAEVELLLRVHHKNLVGLVGYCDEGDNLALIYEYMANGDLKEHMSGTRNRFILNWGTRLKIVIESAQGLEYLHNGCKPPMVHRDVKTTNILLNEHFEAKLADFGLSRSFLIEGETHVSTVVAGTPGYLDPEYHRTNWLTEKSDVYSFGILLLEIITNRHVIDQSREKPHIGEWVGVMLTKGDIQSIMDPSLNEDYDSGSVWKAVELAMSCLNHSSARRPTMSQVVIELNECLASENARGGASRDMESKSSIEVSLTFGTEVSPNAR

SEQ ID NO: 71646 - protein, 714 aa, Arabidopsis thaliana
  peptide (1)..(714): Ceres Seq. ID no. 4803724
MKKNMYVTQSGSLKYLFRGYISNSSTRIRFPDDVYDRKWYPLFDDSWTQVTTNLKVNTSITYELPQSVMAKAATPIKANDTLNITWTVEPPTTQFYSYVHIAEIQALRANETREFNVTLNGEYTFGPFSPIPLKTASIVDLSPGQCDGGRCILQVVKTLKSTLPPLLNAIEAFTVIDFPQMETNENDVAGIKNVQGTYGLSRISWQGDPCVPKQLLWDGLNCKNSDISTPPIITSLDLSSSGLTGIITQAIKNLTHLQILDLSDNNLTGEVPEFLADIKSLLVINLSGNNLSGSVPPSLLQKKGMKLNVEGNPHILCTTGSCVKKKEDGHKKKSVIVPVVASIASIAVLIGALVLFLILRKKRSPKVEGPPPSYMQASDGRLPRSSEPAIVTKNRRFSYSQVVIMTNNFQRILGKGGFGMVYHGFVNGTEQVAVKILSHSSSQGYKQFKAEVELLLRVHHKNLVGLVGYCDEGDNLALIYEYMANGDLKEHMSGTRNRFILNWGTRLKIVIESAQGLEYLHNGCKPPMVHRDVKTTNILLNEHFEAKLADFGLSRSFLIEGETHVSTVVAGTPGYLDPEYHRTNWLTEKSDVYSFGILLLEIITNRHVIDQSREKPHIGEWVGVMLTKGDIQSIMDPSLNEDYDSGSVWKAVELAMSCLNHSSARRPTMSQVVIELNECLASENARGGASRDMESKSSIEVSLTFGTEVSPNAR

SEQ ID NO: 71647 - DNA, 1779 bp, Arabidopsis thaliana
  misc_feature (1)..(1779): Ceres Seq. ID no. 4803889
  misc_feature (1)..(1779): Ortholog of  Ceres SEQ ID NO 15224940 as cited in SEQ ID NO 0
atgcggatgagccttcacttaaacaagaagcttctaaaagaaaagaaaacattgcagaattatccatccgaatatgggttcgcttcagacaccgatagaaatgagaagctcatcgttgttggatacgtcctgcggatatttgctcagagagttacaggcaagtttgttttgatgatgatatgggatgaagttggagaagataagtttgagagagaaaaagtgttgcttgatatagagcaggaatgtgtagaggcttaccggagaaaagttgaccatgccaatgtttcgaggtctcgtctacatcaagagctggcagaatctgaagccgaactcacccattttcttttgtgcctcggtgaaagatcagtacctggaagaccggagaaaaagggaggaacactgagggagcagctggattctattgcgcctgcactgcgtgagatgaggcttaggaaagacgagagagtgaagcagttccgatctgtcaaaggggaaattcagaaaatatcagcagaaatagcaggtagatcgacatatgaagactcaactagaaagataaccatagatgacaacgatctttctaataaaaaacttgaggaatatcagaatgaactgcatagactccatgatgagaagaatgagagactacagaaggttgatatatacatatgcgccattcgagatctatcagcaacattgggaacagaagcatcaatgatcataacaaagattcacccaagcttgaacgacctctatggaatatccaaaaacatcagtgatgatatcttaaaaaagcttaatggcactgttgtgtctctggaagaggaaaagcacaagcgccttgaaaagcttcaccatcttggtagagctttatcgaacctgtggaatctgatggatgcatcttatgaagatcgtcaaaagttttttcatgtcattgatttactgtcgtccgcaccatcagacgtgtgtgctcctggaagcattacattggacataattcagcaggctgaggctgaagtcaagagactagatcaactgaaagcaagcagaatcaaagaacttttcatcaagaagcaaaaggaactagaagatacgtgcaacatgtcgcatatggagactccatcaacggaaatgggaaatatcacgaaccttgtagactctggggaagttgaccatgttgaccttctagccgccatggatgaaaagatagcaagagcaaaggaagaagcagcaagtagaaaaggaataattgaaaaagttgataggtggatgttggcaagtgatgaagagcgctggctagaagaatatgaccaggacgagaatcggtactcagtaagtagaaatgctcatcgaaacctaaggagagcagaacgggcacgcataacagtcagcaaaatctcaggattagtggaatctatattggttaaggctaagagctgggaggtagaaagacagaaagtcttcttatacaatgaggtacctcttgttgcaatgttgcaagaatacaataagctgaggcaggaaaaagaaatggagaagcaaaggctccgggaaatgaagaagatgagcattccacaacctgtggctgagggagataatttttacatggcaaggccagctagcagcaataggcgaatatcaaatcgaagcatgaatggtggatttggaagtggaagtcctataaacagaaagtattcaggaggattcaacaatactaacaataattacacagcacttggtacatctataagaagagaaagcagaaagagtgaggcataa

SEQ ID NO: 71648 - protein, 592 aa, Arabidopsis thaliana
  peptide (1)..(592): Ceres Seq. ID no. 4803890
MRMSLHLNKKLLKEKKTLQNYPSEYGFASDTDRNEKLIVVGYVLRIFAQRVTGKFVLMMIWDEVGEDKFEREKVLLDIEQECVEAYRRKVDHANVSRSRLHQELAESEAELTHFLLCLGERSVPGRPEKKGGTLREQLDSIAPALREMRLRKDERVKQFRSVKGEIQKISAEIAGRSTYEDSTRKITIDDNDLSNKKLEEYQNELHRLHDEKNERLQKVDIYICAIRDLSATLGTEASMIITKIHPSLNDLYGISKNISDDILKKLNGTVVSLEEEKHKRLEKLHHLGRALSNLWNLMDASYEDRQKFFHVIDLLSSAPSDVCAPGSITLDIIQQAEAEVKRLDQLKASRIKELFIKKQKELEDTCNMSHMETPSTEMGNITNLVDSGEVDHVDLLAAMDEKIARAKEEAASRKGIIEKVDRWMLASDEERWLEEYDQDENRYSVSRNAHRNLRRAERARITVSKISGLVESILVKAKSWEVERQKVFLYNEVPLVAMLQEYNKLRQEKEMEKQRLREMKKMSIPQPVAEGDNFYMARPASSNRRISNRSMNGGFGSGSPINRKYSGGFNNTNNNYTALGTSIRRESRKSEA

SEQ ID NO: 71649 - protein, 590 aa, Arabidopsis thaliana
  peptide (1)..(590): Ceres Seq. ID no. 4803891
MSLHLNKKLLKEKKTLQNYPSEYGFASDTDRNEKLIVVGYVLRIFAQRVTGKFVLMMIWDEVGEDKFEREKVLLDIEQECVEAYRRKVDHANVSRSRLHQELAESEAELTHFLLCLGERSVPGRPEKKGGTLREQLDSIAPALREMRLRKDERVKQFRSVKGEIQKISAEIAGRSTYEDSTRKITIDDNDLSNKKLEEYQNELHRLHDEKNERLQKVDIYICAIRDLSATLGTEASMIITKIHPSLNDLYGISKNISDDILKKLNGTVVSLEEEKHKRLEKLHHLGRALSNLWNLMDASYEDRQKFFHVIDLLSSAPSDVCAPGSITLDIIQQAEAEVKRLDQLKASRIKELFIKKQKELEDTCNMSHMETPSTEMGNITNLVDSGEVDHVDLLAAMDEKIARAKEEAASRKGIIEKVDRWMLASDEERWLEEYDQDENRYSVSRNAHRNLRRAERARITVSKISGLVESILVKAKSWEVERQKVFLYNEVPLVAMLQEYNKLRQEKEMEKQRLREMKKMSIPQPVAEGDNFYMARPASSNRRISNRSMNGGFGSGSPINRKYSGGFNNTNNNYTALGTSIRRESRKSEA

SEQ ID NO: 71650 - protein, 535 aa, Arabidopsis thaliana
  peptide (1)..(535): Ceres Seq. ID no. 4803892
MMIWDEVGEDKFEREKVLLDIEQECVEAYRRKVDHANVSRSRLHQELAESEAELTHFLLCLGERSVPGRPEKKGGTLREQLDSIAPALREMRLRKDERVKQFRSVKGEIQKISAEIAGRSTYEDSTRKITIDDNDLSNKKLEEYQNELHRLHDEKNERLQKVDIYICAIRDLSATLGTEASMIITKIHPSLNDLYGISKNISDDILKKLNGTVVSLEEEKHKRLEKLHHLGRALSNLWNLMDASYEDRQKFFHVIDLLSSAPSDVCAPGSITLDIIQQAEAEVKRLDQLKASRIKELFIKKQKELEDTCNMSHMETPSTEMGNITNLVDSGEVDHVDLLAAMDEKIARAKEEAASRKGIIEKVDRWMLASDEERWLEEYDQDENRYSVSRNAHRNLRRAERARITVSKISGLVESILVKAKSWEVERQKVFLYNEVPLVAMLQEYNKLRQEKEMEKQRLREMKKMSIPQPVAEGDNFYMARPASSNRRISNRSMNGGFGSGSPINRKYSGGFNNTNNNYTALGTSIRRESRKSEA

SEQ ID NO: 71651 - DNA, 816 bp, Arabidopsis thaliana
  misc_feature (1)..(816): Ceres Seq. ID no. 4803908
  misc_feature (1)..(816): Ortholog of  Ceres SEQ ID NO 13594503 as cited in SEQ ID NO 51336
  misc_feature (1)..(816): Ortholog of  Ceres SEQ ID NO 15171370 as cited in SEQ ID NO 51492
atgtcaggcgtgtctcttgcggttggtccaagaaccgacgtggacaaaacggcgtcatccagtgagaagggacggtggtcggggatgacggcgataggaggtggcagtggaggtttgatggggtcgttaagggttatagagctacagctagtcgcgttcatactagttttctcagcaagcggtctcgtaccaatacttgacatgctttttccagcgtttgcgtctatctatataatcgccctctcgcgtttagctttcccttctcacggcgtttccaccgcttcccccgaagtcttccgcggcagcaaactcttcaggttgtacgtgatttcggggacaacgattggtctgttcttgcctctagcttacgtattaggtggttttgcaagaggagatgatcatgcggtaagatcagcaacaccacacttgtttctactgtcgtgtcaaatcctgacagagaatgtaataagtggcctttctctgttctcgccaccggtaagagctctcgtcccattgctctacacagtctggagaatctttgtcatcattggttggtctaaagatgtttggttcaacaagtctttaccaatcaatgctacacccaatgtggttacatggttctggtttggaaggtatttagcactagcaaacttaggctacttcggagtgaatctactctgtttcttgatccctaggttcctgcctcgtgctttcgagcaatacttcagagagagagacgagatcttggcgaaaagccaagaagacaagccagttcaagttcctagatcaaaaccttctaaccacaaatctgattga

SEQ ID NO: 71652 - protein, 271 aa, Arabidopsis thaliana
  peptide (1)..(271): Ceres Seq. ID no. 4803909
MSGVSLAVGPRTDVDKTASSSEKGRWSGMTAIGGGSGGLMGSLRVIELQLVAFILVFSASGLVPILDMLFPAFASIYIIALSRLAFPSHGVSTASPEVFRGSKLFRLYVISGTTIGLFLPLAYVLGGFARGDDHAVRSATPHLFLLSCQILTENVISGLSLFSPPVRALVPLLYTVWRIFVIIGWSKDVWFNKSLPINATPNVVTWFWFGRYLALANLGYFGVNLLCFLIPRFLPRAFEQYFRERDEILAKSQEDKPVQVPRSKPSNHKSD

SEQ ID NO: 71653 - protein, 243 aa, Arabidopsis thaliana
  peptide (1)..(243): Ceres Seq. ID no. 4803910
MTAIGGGSGGLMGSLRVIELQLVAFILVFSASGLVPILDMLFPAFASIYIIALSRLAFPSHGVSTASPEVFRGSKLFRLYVISGTTIGLFLPLAYVLGGFARGDDHAVRSATPHLFLLSCQILTENVISGLSLFSPPVRALVPLLYTVWRIFVIIGWSKDVWFNKSLPINATPNVVTWFWFGRYLALANLGYFGVNLLCFLIPRFLPRAFEQYFRERDEILAKSQEDKPVQVPRSKPSNHKSD

SEQ ID NO: 71654 - protein, 232 aa, Arabidopsis thaliana
  peptide (1)..(232): Ceres Seq. ID no. 4803911
MGSLRVIELQLVAFILVFSASGLVPILDMLFPAFASIYIIALSRLAFPSHGVSTASPEVFRGSKLFRLYVISGTTIGLFLPLAYVLGGFARGDDHAVRSATPHLFLLSCQILTENVISGLSLFSPPVRALVPLLYTVWRIFVIIGWSKDVWFNKSLPINATPNVVTWFWFGRYLALANLGYFGVNLLCFLIPRFLPRAFEQYFRERDEILAKSQEDKPVQVPRSKPSNHKSD

SEQ ID NO: 71655 - DNA, 3744 bp, Arabidopsis thaliana
  misc_feature (1)..(3744): Ceres Seq. ID no. 4803912
  misc_feature (1)..(3744): Ortholog of  Ceres SEQ ID NO 15179695 as cited in SEQ ID NO 193
  misc_feature (1)..(3744): Ortholog of  Ceres SEQ ID NO 15176963 as cited in SEQ ID NO 52894
atggataacatagaaccaccctttagtggaaacatccatgctgagaccgaagtaaagaaggaggagaagaaaaagatgaagaaggaatcggtgtcattgatgggtttgtttagtgcagctgataatgttgattactttctgatgtttcttgggggtttaggcacgtgtattcatggcggtacgcttccgctcttcttcgtgttcttcgggggaatgctagattctcttgggaagctttctacagacccgaatgccatatcttctcgcgtttcacagaatgctctgtacttggtctacttaggattggtcaatttggtatcagcctggattggagttgcttgttggatgcaaacaggggaaagacaaacagcgcgattgcgtataaattatctcaaatcaatcttagcaaaagatattactttctttgatactgaagctagagattcaaacttcattttccacatctcaagcgacgcaatcttggttcaagatgccattggcgataagaccggccatgttttgcggtacctatgtcagttcatcgcgggatttgtcatcggttttttgtcagtatggcaactaacgttgcttacgttaggagtggttccactgatagcaattgcaggaggagggtatgctatagtcatgtctacaatatcagagaagagtgaggctgcttatgctgatgcaggaaaagttgcagaagaggtcatgtcacaggtgagaacagtgtatgcatttgtaggagaagagaaagctgtaaaatcttactcaaattctctcaagaaagctctgaaactcagtaaaagaagtggtcttgctaaaggtttaggagttggattaacatatagcctcttgttctgtgcttgggcattgcttttttggtatgcaagtcttcttgtacgccatggcaaaaccaacggcgcaaaagccttcacaacaatcctcaatgtcatttacagcggattcgccttaggtcaagccgtgcctagcttatccgcaatttctaaaggcagagttgctgctgcaaatattttcaaaatgataggaaacaacaatcttgaaagctctgagagattagaaaacggaacaacattgcaaaacgtagttggcaagattgagttttgtggagtttcgttcgcatatccttcgagaccaaacatggtttttgagaatcttagtttcacgatacattcaggcaagacttttgcatttgtcggtccaagtggttcggggaaaagcacaatcatatcaatggtgcaacgtttctatgaacctagatcaggggagattctcttggatggaaatgacatcaagaacctgaagctgaaatggttgagagaacagatgggattagtgagtcaagaaccagcattattcgccacaacaatagcttctaatattcttctcggtaaagagaaagccaatatggatcagatcatagaagctgctaaagcagccaacgcagattctttcattaaatcattacctaatggttacaatactcaggttggagaaggaggaactcaactttcaggagggcagaaacagaggattgctattgctcgggcggttctaagaaatccaaagatattacttttagatgaagcaacaagcgctcttgatgccgaatcagagaagattgttcagcaagcacttgacaatgtcatggaaaaaagaacaacaatcgtcattgcacatagattatccaccattcgaaatgttgacaagattgttgtcttgagagatggtcaagttagggaaaccggaagtcactcagaactgatatcaagaggaggagattatgccactcttgtaaattgtcaagacacagaacctcaagaaaacttgagatcagtcatgtatgaatcttgtaggtctcaagctggatcatatagttcaagaagagtttttagctcaagaaggacttcaagcttcagggaagaccaagagaagactgaaaaagattcaaaaggcgaagatttaataagctcgtcctcaatgatatgggaactaataaagttgaatgctccagaatggctttatgcattacttggctcaattggtgccgttcttgccggatcacaaccggcattgttctccatggggcttgcttacgtgttaaccacgttttattcaccttttcctagtctgatcaagcgtgaagtcgataaggtagctattatctttgttggagctggaatagtaacagcgcctatatacattctccaacattacttctatacactaatgggagagcgtcttacttctcgggttcgcttatccttgttctcagcgattctttcaaatgagattggatggtttgatctggatgagaacaacactggctcactcacttcaatcttagctgctgatgcaaccttggtgaggagtgctatagcggatcgtctatcgacaatagtccaaaacttgtctcttacaatcacagccttagcacttgcctttttctacagttggcgtgttgcagctgtcgtaacagcttgttttcctcttctcattgccgcttcacttaccgagcaattatttctaaaaggctttggaggagattacacaagggcttactctagggcaacttcattggcgcgtgaagcgatttcgaatataagaaccgtcgctgcatttagtgctgaaaagcaaatctcagaacagtttacttgtgaactaagcaaacccaccaagagtgccttactcagaggtcatatctcgggatttggatacggtttgtcacagtgtctcgcgttctgttcctacgcacttggtctctggtatatctcagttctgattaagcgcaacgagaccaactttgaggatagtatcaaatctttcatggtattgctcgtcactgcttactccgtagcggaaacgcttgcgttaaccccagatatcgtgaagggcacacaagcactcgggtccgtatttagggttttacatagagagactgaaatacctccagaccagcctaactcaagattggtcactcatatcaaaggagatatagagtttagaaacgtgagctttgcgtatcccactagacccgaaatcgccattttcaaaaatctaaatctccgagtttcagccgggaagagtcttgcggtcgtgggacctagtggttcgggaaagagcacagtgatcggactaatcatgagattctacgatccgagcaacggaaatctctgtatcgatgggcatgatataaaatctgtaaacctacgtagcttgcgcaagaagctagcgttagttcagcaagaaccggctctgttttcaacatccatacacgagaacatcaagtatgggaacgagaacgcgtcagaggcagagatcattgaagccgcaaaagccgcgaacgcgcacgagttcataagcaggatggaagaagggtacatgactcacgtgggtgataagggagtgcagttatcaggtgggcaaaaacagagagtggctatcgcacgggcagttctaaaagatccttcagtgcttctccttgatgaggcaacaagtgctttggatacgagcgcagagaaacaggtccaagaggcgctagacaagttgatgaagggacgaaccacgattctggtggctcacaggctctcgaccataagaaaagcagacacaatcgttgtattgcataaaggaaaagttgtggagaaaggaagtcacagagaacttgtatctaaatccgatgggttttataagaaattgacgagtcttcaagaagcggtgtga

SEQ ID NO: 71656 - protein, 1247 aa, Arabidopsis thaliana
  peptide (1)..(1247): Ceres Seq. ID no. 4803913
MDNIEPPFSGNIHAETEVKKEEKKKMKKESVSLMGLFSAADNVDYFLMFLGGLGTCIHGGTLPLFFVFFGGMLDSLGKLSTDPNAISSRVSQNALYLVYLGLVNLVSAWIGVACWMQTGERQTARLRINYLKSILAKDITFFDTEARDSNFIFHISSDAILVQDAIGDKTGHVLRYLCQFIAGFVIGFLSVWQLTLLTLGVVPLIAIAGGGYAIVMSTISEKSEAAYADAGKVAEEVMSQVRTVYAFVGEEKAVKSYSNSLKKALKLSKRSGLAKGLGVGLTYSLLFCAWALLFWYASLLVRHGKTNGAKAFTTILNVIYSGFALGQAVPSLSAISKGRVAAANIFKMIGNNNLESSERLENGTTLQNVVGKIEFCGVSFAYPSRPNMVFENLSFTIHSGKTFAFVGPSGSGKSTIISMVQRFYEPRSGEILLDGNDIKNLKLKWLREQMGLVSQEPALFATTIASNILLGKEKANMDQIIEAAKAANADSFIKSLPNGYNTQVGEGGTQLSGGQKQRIAIARAVLRNPKILLLDEATSALDAESEKIVQQALDNVMEKRTTIVIAHRLSTIRNVDKIVVLRDGQVRETGSHSELISRGGDYATLVNCQDTEPQENLRSVMYESCRSQAGSYSSRRVFSSRRTSSFREDQEKTEKDSKGEDLISSSSMIWELIKLNAPEWLYALLGSIGAVLAGSQPALFSMGLAYVLTTFYSPFPSLIKREVDKVAIIFVGAGIVTAPIYILQHYFYTLMGERLTSRVRLSLFSAILSNEIGWFDLDENNTGSLTSILAADATLVRSAIADRLSTIVQNLSLTITALALAFFYSWRVAAVVTACFPLLIAASLTEQLFLKGFGGDYTRAYSRATSLAREAISNIRTVAAFSAEKQISEQFTCELSKPTKSALLRGHISGFGYGLSQCLAFCSYALGLWYISVLIKRNETNFEDSIKSFMVLLVTAYSVAETLALTPDIVKGTQALGSVFRVLHRETEIPPDQPNSRLVTHIKGDIEFRNVSFAYPTRPEIAIFKNLNLRVSAGKSLAVVGPSGSGKSTVIGLIMRFYDPSNGNLCIDGHDIKSVNLRSLRKKLALVQQEPALFSTSIHENIKYGNENASEAEIIEAAKAANAHEFISRMEEGYMTHVGDKGVQLSGGQKQRVAIARAVLKDPSVLLLDEATSALDTSAEKQVQEALDKLMKGRTTILVAHRLSTIRKADTIVVLHKGKVVEKGSHRELVSKSDGFYKKLTSLQEAV

SEQ ID NO: 71657 - protein, 1222 aa, Arabidopsis thaliana
  peptide (1)..(1222): Ceres Seq. ID no. 4803914
MKKESVSLMGLFSAADNVDYFLMFLGGLGTCIHGGTLPLFFVFFGGMLDSLGKLSTDPNAISSRVSQNALYLVYLGLVNLVSAWIGVACWMQTGERQTARLRINYLKSILAKDITFFDTEARDSNFIFHISSDAILVQDAIGDKTGHVLRYLCQFIAGFVIGFLSVWQLTLLTLGVVPLIAIAGGGYAIVMSTISEKSEAAYADAGKVAEEVMSQVRTVYAFVGEEKAVKSYSNSLKKALKLSKRSGLAKGLGVGLTYSLLFCAWALLFWYASLLVRHGKTNGAKAFTTILNVIYSGFALGQAVPSLSAISKGRVAAANIFKMIGNNNLESSERLENGTTLQNVVGKIEFCGVSFAYPSRPNMVFENLSFTIHSGKTFAFVGPSGSGKSTIISMVQRFYEPRSGEILLDGNDIKNLKLKWLREQMGLVSQEPALFATTIASNILLGKEKANMDQIIEAAKAANADSFIKSLPNGYNTQVGEGGTQLSGGQKQRIAIARAVLRNPKILLLDEATSALDAESEKIVQQALDNVMEKRTTIVIAHRLSTIRNVDKIVVLRDGQVRETGSHSELISRGGDYATLVNCQDTEPQENLRSVMYESCRSQAGSYSSRRVFSSRRTSSFREDQEKTEKDSKGEDLISSSSMIWELIKLNAPEWLYALLGSIGAVLAGSQPALFSMGLAYVLTTFYSPFPSLIKREVDKVAIIFVGAGIVTAPIYILQHYFYTLMGERLTSRVRLSLFSAILSNEIGWFDLDENNTGSLTSILAADATLVRSAIADRLSTIVQNLSLTITALALAFFYSWRVAAVVTACFPLLIAASLTEQLFLKGFGGDYTRAYSRATSLAREAISNIRTVAAFSAEKQISEQFTCELSKPTKSALLRGHISGFGYGLSQCLAFCSYALGLWYISVLIKRNETNFEDSIKSFMVLLVTAYSVAETLALTPDIVKGTQALGSVFRVLHRETEIPPDQPNSRLVTHIKGDIEFRNVSFAYPTRPEIAIFKNLNLRVSAGKSLAVVGPSGSGKSTVIGLIMRFYDPSNGNLCIDGHDIKSVNLRSLRKKLALVQQEPALFSTSIHENIKYGNENASEAEIIEAAKAANAHEFISRMEEGYMTHVGDKGVQLSGGQKQRVAIARAVLKDPSVLLLDEATSALDTSAEKQVQEALDKLMKGRTTILVAHRLSTIRKADTIVVLHKGKVVEKGSHRELVSKSDGFYKKLTSLQEAV

SEQ ID NO: 71658 - protein, 1214 aa, Arabidopsis thaliana
  peptide (1)..(1214): Ceres Seq. ID no. 4803915
MGLFSAADNVDYFLMFLGGLGTCIHGGTLPLFFVFFGGMLDSLGKLSTDPNAISSRVSQNALYLVYLGLVNLVSAWIGVACWMQTGERQTARLRINYLKSILAKDITFFDTEARDSNFIFHISSDAILVQDAIGDKTGHVLRYLCQFIAGFVIGFLSVWQLTLLTLGVVPLIAIAGGGYAIVMSTISEKSEAAYADAGKVAEEVMSQVRTVYAFVGEEKAVKSYSNSLKKALKLSKRSGLAKGLGVGLTYSLLFCAWALLFWYASLLVRHGKTNGAKAFTTILNVIYSGFALGQAVPSLSAISKGRVAAANIFKMIGNNNLESSERLENGTTLQNVVGKIEFCGVSFAYPSRPNMVFENLSFTIHSGKTFAFVGPSGSGKSTIISMVQRFYEPRSGEILLDGNDIKNLKLKWLREQMGLVSQEPALFATTIASNILLGKEKANMDQIIEAAKAANADSFIKSLPNGYNTQVGEGGTQLSGGQKQRIAIARAVLRNPKILLLDEATSALDAESEKIVQQALDNVMEKRTTIVIAHRLSTIRNVDKIVVLRDGQVRETGSHSELISRGGDYATLVNCQDTEPQENLRSVMYESCRSQAGSYSSRRVFSSRRTSSFREDQEKTEKDSKGEDLISSSSMIWELIKLNAPEWLYALLGSIGAVLAGSQPALFSMGLAYVLTTFYSPFPSLIKREVDKVAIIFVGAGIVTAPIYILQHYFYTLMGERLTSRVRLSLFSAILSNEIGWFDLDENNTGSLTSILAADATLVRSAIADRLSTIVQNLSLTITALALAFFYSWRVAAVVTACFPLLIAASLTEQLFLKGFGGDYTRAYSRATSLAREAISNIRTVAAFSAEKQISEQFTCELSKPTKSALLRGHISGFGYGLSQCLAFCSYALGLWYISVLIKRNETNFEDSIKSFMVLLVTAYSVAETLALTPDIVKGTQALGSVFRVLHRETEIPPDQPNSRLVTHIKGDIEFRNVSFAYPTRPEIAIFKNLNLRVSAGKSLAVVGPSGSGKSTVIGLIMRFYDPSNGNLCIDGHDIKSVNLRSLRKKLALVQQEPALFSTSIHENIKYGNENASEAEIIEAAKAANAHEFISRMEEGYMTHVGDKGVQLSGGQKQRVAIARAVLKDPSVLLLDEATSALDTSAEKQVQEALDKLMKGRTTILVAHRLSTIRKADTIVVLHKGKVVEKGSHRELVSKSDGFYKKLTSLQEAV

SEQ ID NO: 71659 - DNA, 732 bp, Arabidopsis thaliana
  misc_feature (1)..(732): Ceres Seq. ID no. 4803967
  misc_feature (1)..(732): Ortholog of  Ceres SEQ ID NO 14310764 as cited in SEQ ID NO 55235
  misc_feature (1)..(732): Ortholog of  Ceres SEQ ID NO 15171141 as cited in SEQ ID NO 58212
atggaggaggtaaagggacaaagaggaagtggaaccacagaggcagattttgtgttgcaatggggtgagaggaaaagagttagatgtatgaaagtgaagaaagatcaaagccttgccaatggcaaatcaactgattgtttgactaaacgtaaactcatttctcgtgctgtctcttctgagagaggctcaccttctcgacatcttaaccgtcctaacaagatcactgattctctagtcaatgtgcggagatcgtttatggcgtcgcccgagaaggaagataggtattatacaacaaggggttcgatgggaatagatgagagtgggaaaattattaaggaacctgtgaaagaaacaaagaagcatgtgtggccaaagttgtatatagctttgtcaaataaagagaaggaagaagattttttggctatgaaaggttgcaagcttcctcaaagacctaagaagcgagccaaattggttcagaagacattgcttctggtgagtccaggagcttggttatcagatctgtgcaaagagagatatgaagtaagagagaagaagacttcaaagaagaccaagaggattgaaggcaatggggagcatggaaagcgattcggagtgaagaaccgtcgaagaaagaacttaaatgagatattcaagattttggcgaggggtaggaaggtgtatttcactttttcgttgcattttgagatgcctctcttcattactacaggttaa

SEQ ID NO: 71660 - protein, 243 aa, Arabidopsis thaliana
  peptide (1)..(243): Ceres Seq. ID no. 4803968
MEEVKGQRGSGTTEADFVLQWGERKRVRCMKVKKDQSLANGKSTDCLTKRKLISRAVSSERGSPSRHLNRPNKITDSLVNVRRSFMASPEKEDRYYTTRGSMGIDESGKIIKEPVKETKKHVWPKLYIALSNKEKEEDFLAMKGCKLPQRPKKRAKLVQKTLLLVSPGAWLSDLCKERYEVREKKTSKKTKRIEGNGEHGKRFGVKNRRRKNLNEIFKILARGRKVYFTFSLHFEMPLFITTG

SEQ ID NO: 71661 - protein, 214 aa, Arabidopsis thaliana
  peptide (1)..(214): Ceres Seq. ID no. 4803969
MKVKKDQSLANGKSTDCLTKRKLISRAVSSERGSPSRHLNRPNKITDSLVNVRRSFMASPEKEDRYYTTRGSMGIDESGKIIKEPVKETKKHVWPKLYIALSNKEKEEDFLAMKGCKLPQRPKKRAKLVQKTLLLVSPGAWLSDLCKERYEVREKKTSKKTKRIEGNGEHGKRFGVKNRRRKNLNEIFKILARGRKVYFTFSLHFEMPLFITTG

SEQ ID NO: 71662 - protein, 158 aa, Arabidopsis thaliana
  peptide (1)..(158): Ceres Seq. ID no. 4803970
MASPEKEDRYYTTRGSMGIDESGKIIKEPVKETKKHVWPKLYIALSNKEKEEDFLAMKGCKLPQRPKKRAKLVQKTLLLVSPGAWLSDLCKERYEVREKKTSKKTKRIEGNGEHGKRFGVKNRRRKNLNEIFKILARGRKVYFTFSLHFEMPLFITTG

SEQ ID NO: 71663 - DNA, 1266 bp, Arabidopsis thaliana
  misc_feature (1)..(1266): Ceres Seq. ID no. 4804174
  misc_feature (1)..(1266): Ortholog of  Ceres SEQ ID NO 14314220 as cited in SEQ ID NO 57321
atgagccaaaagaaactgacgaggactcaatcgtcgttactcagatcatctccgacgattcgatcgtcgatccaaagcctttcttcaatcactgaatgtgatgacttcaacgaaacctctcaccaccgccgtgaacaagatctcgaagccggtgagaaagaggaaaaacagaggaggagaaaaccggttaaatcattcgggtcaatgaaccgaattaaaccgggtctcgcattcacactcgcttgtctctctttcctgagtctctcatctttcttactgttcttcgttgatgagattttcacgtcggagaatctcttactaggtttgattttcgtcgctcttgctctgttcttcgcgtcgagaaacatggcggttattaaccaaaccgtaatcgcaatcaagcagattcgtgtaaggtctcgaatcaaacacaaaccgaaaccggttcaatggtacatcggagattcaaaaccggaaccgatcaaagaagaagaaacaagacttgtcgttaaagaaggagttcaattctttagcaatggagatttctacgaaggtgaattcaacagagggaagtgtaacggaagtggagtttattattattacgttaatggaagatatgaaggagattggatcaatggaaggtacgatggttatggaatcgagtgttggtctaaaggaagtaaatataaaggacagtataagcaaggacttagacatggttttggagtttactggttttacaccggagattcttactctggtgaatggtttaacggtcaaagccatggctttggagttcaaacttgtgctgatggaagctcttttgtcggagaattcaaatttggtgtcaaacatggacttggttcttaccatttcaggaatggagataagtatgcaggagagtattttggagacaagattcatggatttggtgtttaccatttcgctaatggtcactattacgaaggagcttggcatgaaggtcgtaaacaaggctatggcacgtatagatttagaaccggtgatatcaaatccggtgaatgggatgatggtaatctcgttaaccatcttcctttagactctgacccggttcgtagggcggttcagagtgcacgagaaagagcaaagaatggagtgaatcagagacggatcgatgagcaggtgatacgagctgtggctgcagctaataaagctgcgacggctgctagagttgcagctgtgaaagcagttcaaaatcaaatggatggtaaaatttgtgacaattaa

SEQ ID NO: 71664 - protein, 421 aa, Arabidopsis thaliana
  peptide (1)..(421): Ceres Seq. ID no. 4804175
MSQKKLTRTQSSLLRSSPTIRSSIQSLSSITECDDFNETSHHRREQDLEAGEKEEKQRRRKPVKSFGSMNRIKPGLAFTLACLSFLSLSSFLLFFVDEIFTSENLLLGLIFVALALFFASRNMAVINQTVIAIKQIRVRSRIKHKPKPVQWYIGDSKPEPIKEEETRLVVKEGVQFFSNGDFYEGEFNRGKCNGSGVYYYYVNGRYEGDWINGRYDGYGIECWSKGSKYKGQYKQGLRHGFGVYWFYTGDSYSGEWFNGQSHGFGVQTCADGSSFVGEFKFGVKHGLGSYHFRNGDKYAGEYFGDKIHGFGVYHFANGHYYEGAWHEGRKQGYGTYRFRTGDIKSGEWDDGNLVNHLPLDSDPVRRAVQSARERAKNGVNQRRIDEQVIRAVAAANKAATAARVAAVKAVQNQMDGKICDN

SEQ ID NO: 71665 - protein, 353 aa, Arabidopsis thaliana
  peptide (1)..(353): Ceres Seq. ID no. 4804176
MNRIKPGLAFTLACLSFLSLSSFLLFFVDEIFTSENLLLGLIFVALALFFASRNMAVINQTVIAIKQIRVRSRIKHKPKPVQWYIGDSKPEPIKEEETRLVVKEGVQFFSNGDFYEGEFNRGKCNGSGVYYYYVNGRYEGDWINGRYDGYGIECWSKGSKYKGQYKQGLRHGFGVYWFYTGDSYSGEWFNGQSHGFGVQTCADGSSFVGEFKFGVKHGLGSYHFRNGDKYAGEYFGDKIHGFGVYHFANGHYYEGAWHEGRKQGYGTYRFRTGDIKSGEWDDGNLVNHLPLDSDPVRRAVQSARERAKNGVNQRRIDEQVIRAVAAANKAATAARVAAVKAVQNQMDGKICDN

SEQ ID NO: 71666 - protein, 299 aa, Arabidopsis thaliana
  peptide (1)..(299): Ceres Seq. ID no. 4804177
MAVINQTVIAIKQIRVRSRIKHKPKPVQWYIGDSKPEPIKEEETRLVVKEGVQFFSNGDFYEGEFNRGKCNGSGVYYYYVNGRYEGDWINGRYDGYGIECWSKGSKYKGQYKQGLRHGFGVYWFYTGDSYSGEWFNGQSHGFGVQTCADGSSFVGEFKFGVKHGLGSYHFRNGDKYAGEYFGDKIHGFGVYHFANGHYYEGAWHEGRKQGYGTYRFRTGDIKSGEWDDGNLVNHLPLDSDPVRRAVQSARERAKNGVNQRRIDEQVIRAVAAANKAATAARVAAVKAVQNQMDGKICDN

SEQ ID NO: 71667 - DNA, 1089 bp, Arabidopsis thaliana
  misc_feature (1)..(1089): Ceres Seq. ID no. 4804200
  misc_feature (1)..(1089): Ortholog of  Ceres SEQ ID NO 12364737 as cited in SEQ ID NO 51089
  misc_feature (1)..(1089): Ortholog of  Ceres SEQ ID NO 13582301 as cited in SEQ ID NO 56509
  misc_feature (1)..(1089): Ortholog of  Ceres SEQ ID NO 13655302 as cited in SEQ ID NO 63307
  misc_feature (1)..(1089): Ortholog of  Ceres SEQ ID NO 13597380 as cited in SEQ ID NO 64054
  misc_feature (1)..(1089): Ortholog of  Ceres SEQ ID NO 12625474 as cited in SEQ ID NO 64169
  misc_feature (1)..(1089): Ortholog of  Ceres SEQ ID NO 13597502 as cited in SEQ ID NO 64681
atgtcttcttcttcttcaatggacttactcatgtgtctgcttcttctaatctctccggttgttctggccaagtcttcttccaccgtccctgctatctttaccttcggtgactctatttttgacgccggaaacaaccattacaacaaaaactgtaccgctcaggctgattttcctccttatggttcttcctttttccaccgtcctactgggaggttcaccaacggaagaaccgtcgctgacttcatctcggaatttgtaggccttccattacagaaaccattcttggaattgcagattcaaatcttgaatggaacttcaaacttttcaaatggcattaactttgctagtgctggtagtggtctcttgcttgataccaacaaatttatgggcgtgacaccgatccaaacccagctacagcaattccagacacttgtagagcaaaaccttatcgaaaaatctataatccaagagtctctcttcttattagaaactggttctaacgacatcttcaactacttcctcccattccgagctcctacactttctccagacgcttatgtgaacgcaatgttagaccaagtgaacaaaacgattgatcagatctacaaactaggcgcacgccgcatcgctttcttctccttaggtcctgtaggttgtgtccctgcaagagccatgcttcctaatgccccaaccaataaatgctttggtaagatgaatgttatggccaagatgtataataaaagacttgaagatatagtgaacataatccccactaagtaccctggagccattgcggtgtttggagctgtatatggtatcactcacagatttcaaacctaccctgcccgttacgggttttcggatgtttcaaacgcgtgttgtgggaacggtacactgggaggattgatgcagtgtggaagagaaggatacaagatttgcaataacccaaatgagtttctgttttgggatttttatcatcccacagaacacacttaccgtctcatgtcaaaagctttatggaatggaaacaaaaaccatatcagaccatttaatctcatggctcttgccaccaacaagatcacattttaa

SEQ ID NO: 71668 - protein, 362 aa, Arabidopsis thaliana
  peptide (1)..(362): Ceres Seq. ID no. 4804201
MSSSSSMDLLMCLLLLISPVVLAKSSSTVPAIFTFGDSIFDAGNNHYNKNCTAQADFPPYGSSFFHRPTGRFTNGRTVADFISEFVGLPLQKPFLELQIQILNGTSNFSNGINFASAGSGLLLDTNKFMGVTPIQTQLQQFQTLVEQNLIEKSIIQESLFLLETGSNDIFNYFLPFRAPTLSPDAYVNAMLDQVNKTIDQIYKLGARRIAFFSLGPVGCVPARAMLPNAPTNKCFGKMNVMAKMYNKRLEDIVNIIPTKYPGAIAVFGAVYGITHRFQTYPARYGFSDVSNACCGNGTLGGLMQCGREGYKICNNPNEFLFWDFYHPTEHTYRLMSKALWNGNKNHIRPFNLMALATNKITF

SEQ ID NO: 71669 - protein, 356 aa, Arabidopsis thaliana
  peptide (1)..(356): Ceres Seq. ID no. 4804202
MDLLMCLLLLISPVVLAKSSSTVPAIFTFGDSIFDAGNNHYNKNCTAQADFPPYGSSFFHRPTGRFTNGRTVADFISEFVGLPLQKPFLELQIQILNGTSNFSNGINFASAGSGLLLDTNKFMGVTPIQTQLQQFQTLVEQNLIEKSIIQESLFLLETGSNDIFNYFLPFRAPTLSPDAYVNAMLDQVNKTIDQIYKLGARRIAFFSLGPVGCVPARAMLPNAPTNKCFGKMNVMAKMYNKRLEDIVNIIPTKYPGAIAVFGAVYGITHRFQTYPARYGFSDVSNACCGNGTLGGLMQCGREGYKICNNPNEFLFWDFYHPTEHTYRLMSKALWNGNKNHIRPFNLMALATNKITF

SEQ ID NO: 71670 - protein, 352 aa, Arabidopsis thaliana
  peptide (1)..(352): Ceres Seq. ID no. 4804203
MCLLLLISPVVLAKSSSTVPAIFTFGDSIFDAGNNHYNKNCTAQADFPPYGSSFFHRPTGRFTNGRTVADFISEFVGLPLQKPFLELQIQILNGTSNFSNGINFASAGSGLLLDTNKFMGVTPIQTQLQQFQTLVEQNLIEKSIIQESLFLLETGSNDIFNYFLPFRAPTLSPDAYVNAMLDQVNKTIDQIYKLGARRIAFFSLGPVGCVPARAMLPNAPTNKCFGKMNVMAKMYNKRLEDIVNIIPTKYPGAIAVFGAVYGITHRFQTYPARYGFSDVSNACCGNGTLGGLMQCGREGYKICNNPNEFLFWDFYHPTEHTYRLMSKALWNGNKNHIRPFNLMALATNKITF

SEQ ID NO: 71671 - DNA, 1566 bp, Arabidopsis thaliana
  misc_feature (1)..(1566): Ceres Seq. ID no. 4804279
  misc_feature (1)..(1566): Ortholog of  Ceres SEQ ID NO 14309919 as cited in SEQ ID NO 20769
atggcagacgctggagataatcagagaagaagcgatgaaaaagagtcgatatcaactgaagaaacgaaggagaatgaagacttgggatctggaagaaacgacacaggtcatcatgtatacaacgagggacacgaagaggtactagagtatctgaaacaagagagactgaaagatgctgatatgcagaggaaaaggcatgaaacagagtcgaaatccattgagggcacaactcctgatattaggctgagtgattcagggaaagggtctgatgaaatacagaaagcagactcagtttacaaacgctctaacgctgacacgcgagtgagtctgccacaacagagacgactgaaagatgtggtggaggcgcatagggatagatctctggtttggggaggaagtgaacccaggatgagatttgatgaaagtactcagggttggagagatagtgactatgaatccaaatggaggataggagaggaagtgaatcccaaggggtatttgatgagagaacagagaggagacaagaaccagtgcgatggcccggtgaagagtgttggtgtctgcggtgtcgaaacggaggaagttgccgttacaatcatcctactcaacttccacagatttgcagggggatattgtaagttcggctcagtttgtggatttcaacacataagggacagggatgttgcagaacctatgtatgagaattggagttttgatgtgagaactcagaggagatatgaaatagagtactcaggattcaggccagagaagagggcaaaaactagtctggattccgtagagcctgattcaagaaaaagactggaaggtctagagaataaacgagagcaagagaatccgcaagaacctgaaaggcagaggactgaggctcaagacaatctgcaggaatttcgagagcaagagaatccgcaaaaccagatacagataaatactgaaagacagaggacaatggctcatgacaatctgcagatcgtttcggattctcgaatgcatgatccaagacgccatgatacagagttgagactcgaacgagagaagatggtaaacagagaacttgaaaagcagaggatagaacatctaatcgatccactagtgaggcgatacatgcaagcaaagagagataaagaagttgaacagagagagagagctagcattgagagccagaggatagtggctcaagagattctgcggcaacagagattacaggggatgcgagagaatcagaacgtggattctcgaatgcatgatccaagacgccatgatacagagttgagactcgaacgagagaagatggtaaacagagaacttgaaaagcagaggatagaacctctaatcggtccactagtgaggcgatacatgcaagcaaagagagataaagaagttgaacagagagagagagctagcattgagagccagaggatagtggctcaagagaatctgcgacaacagagattgcaggggatgcgagagaatcagaacgtggatgctcatgatcaagagaaaactcaggaactcggtttcaaaggaaaagagggagatggagtttaa

SEQ ID NO: 71672 - protein, 521 aa, Arabidopsis thaliana
  peptide (1)..(521): Ceres Seq. ID no. 4804280
MADAGDNQRRSDEKESISTEETKENEDLGSGRNDTGHHVYNEGHEEVLEYLKQERLKDADMQRKRHETESKSIEGTTPDIRLSDSGKGSDEIQKADSVYKRSNADTRVSLPQQRRLKDVVEAHRDRSLVWGGSEPRMRFDESTQGWRDSDYESKWRIGEEVNPKGYLMREQRGDKNQCDGPVKSVGVCGVETEEVAVTIILLNFHRFAGGYCKFGSVCGFQHIRDRDVAEPMYENWSFDVRTQRRYEIEYSGFRPEKRAKTSLDSVEPDSRKRLEGLENKREQENPQEPERQRTEAQDNLQEFREQENPQNQIQINTERQRTMAHDNLQIVSDSRMHDPRRHDTELRLEREKMVNRELEKQRIEHLIDPLVRRYMQAKRDKEVEQRERASIESQRIVAQEILRQQRLQGMRENQNVDSRMHDPRRHDTELRLEREKMVNRELEKQRIEPLIGPLVRRYMQAKRDKEVEQRERASIESQRIVAQENLRQQRLQGMRENQNVDAHDQEKTQELGFKGKEGDGV

SEQ ID NO: 71673 - protein, 461 aa, Arabidopsis thaliana
  peptide (1)..(461): Ceres Seq. ID no. 4804281
MQRKRHETESKSIEGTTPDIRLSDSGKGSDEIQKADSVYKRSNADTRVSLPQQRRLKDVVEAHRDRSLVWGGSEPRMRFDESTQGWRDSDYESKWRIGEEVNPKGYLMREQRGDKNQCDGPVKSVGVCGVETEEVAVTIILLNFHRFAGGYCKFGSVCGFQHIRDRDVAEPMYENWSFDVRTQRRYEIEYSGFRPEKRAKTSLDSVEPDSRKRLEGLENKREQENPQEPERQRTEAQDNLQEFREQENPQNQIQINTERQRTMAHDNLQIVSDSRMHDPRRHDTELRLEREKMVNRELEKQRIEHLIDPLVRRYMQAKRDKEVEQRERASIESQRIVAQEILRQQRLQGMRENQNVDSRMHDPRRHDTELRLEREKMVNRELEKQRIEPLIGPLVRRYMQAKRDKEVEQRERASIESQRIVAQENLRQQRLQGMRENQNVDAHDQEKTQELGFKGKEGDGV

SEQ ID NO: 71674 - protein, 385 aa, Arabidopsis thaliana
  peptide (1)..(385): Ceres Seq. ID no. 4804282
MRFDESTQGWRDSDYESKWRIGEEVNPKGYLMREQRGDKNQCDGPVKSVGVCGVETEEVAVTIILLNFHRFAGGYCKFGSVCGFQHIRDRDVAEPMYENWSFDVRTQRRYEIEYSGFRPEKRAKTSLDSVEPDSRKRLEGLENKREQENPQEPERQRTEAQDNLQEFREQENPQNQIQINTERQRTMAHDNLQIVSDSRMHDPRRHDTELRLEREKMVNRELEKQRIEHLIDPLVRRYMQAKRDKEVEQRERASIESQRIVAQEILRQQRLQGMRENQNVDSRMHDPRRHDTELRLEREKMVNRELEKQRIEPLIGPLVRRYMQAKRDKEVEQRERASIESQRIVAQENLRQQRLQGMRENQNVDAHDQEKTQELGFKGKEGDGV

SEQ ID NO: 71675 - DNA, 1668 bp, Arabidopsis thaliana
  misc_feature (1)..(1668): Ceres Seq. ID no. 4804359
  misc_feature (1)..(1668): Ortholog of  Ceres SEQ ID NO 12613725 as cited in SEQ ID NO 68196
atgtcgacatccatcggcgataatgagactggagctatagtttcaaacgagaatgtcgagttttccgtcgatttccgaggcaatccatctatcagatcctcttccggtgcatggaaatcttctggcttcaccatgtgtgcggaagttgccgagaaattcgcctacttcggtatcgcctcgaatctgataacctacttcaccgaggcgttaggagagtcgacggctgttgcagcgtcaaacgttaacctctggcttgggacggcagctttcttgcctctcatatggggttctatcgccgactcttttcttggccgtttccgtacaatcctcttaacctcttctttctatatcatgggacttgggctgcttacgttttcagcaacgattccttctctttgtaatgatcaagaaacacgtgagtcgtgcgtctctcaggtcaaagtaataatcttcttttgtgctctctacctaattgctttgggagaaggaggcttcaaggtatgtcttcgagcctttggagcagatcagtttgatgaacaagacccaaatgagtccaaagccaagagttcttactttaactggttgtattttgctatatcaatcggcatattgaccactcgtctggtcacaaattatgtccaagagaatctgagctgggctttaggatatgcgattccatgtctttctatgatgcttgctctattcttgttcttacttggaatcaaaacttaccgcttcagcaccggaggagaaggaagacagggcaaaaaacatgataacccttttgttagaattggccgtgtttttgtggctgcagctagaaaccggcgacaaactccttctgatacttgtcttcttctgcctaacgaaagcaccaagaaattcagattcttggacagagcggtgatttcatgcgattcatatgaagttgaggaagcaaaagctgtgttgagtctcattccaatttggttgtgtagtttggtgtttggcattgtgtttgcgcaatctcctactttctttacaaagcaaggatctacaatggatagatcaatctcatcaacactccaagtccctgcagctacactccaatgcttcataagcctagcaatcctcgtcttcatcccaatctacgaccgtttattcgtcccaatcgcacgatcaatcactcgtaaaccagcaggaattacaacccttcagagaatttccaccggcattttcctctcaattatttcaatggtaatagctgctttggtcgagatgaaaagactcaagactgctcgagatcatggattagttgattcgcctaaagccacggtcccgatgagcgtttgctggctgattccacaatacattctctttggagtctctgacgttttcactatggttggtttgcaagagtttttctacggagaagtcccgccacagcttaggagcatgggactggctctatatctaagcataatcggcataggaaacttcttgagtagcttcatggtatcagtcatcgaggaagccacaagccagtccggtcaagtgagctggttctctaataacctgaaccaggcacatcttgattacttctactggctacttgcttgtctcagctccctcgcctttatttttactgtctattttgccaagtcctatctctacaacagcccaaagtag

SEQ ID NO: 71676 - protein, 555 aa, Arabidopsis thaliana
  peptide (1)..(555): Ceres Seq. ID no. 4804360
MSTSIGDNETGAIVSNENVEFSVDFRGNPSIRSSSGAWKSSGFTMCAEVAEKFAYFGIASNLITYFTEALGESTAVAASNVNLWLGTAAFLPLIWGSIADSFLGRFRTILLTSSFYIMGLGLLTFSATIPSLCNDQETRESCVSQVKVIIFFCALYLIALGEGGFKVCLRAFGADQFDEQDPNESKAKSSYFNWLYFAISIGILTTRLVTNYVQENLSWALGYAIPCLSMMLALFLFLLGIKTYRFSTGGEGRQGKKHDNPFVRIGRVFVAAARNRRQTPSDTCLLLPNESTKKFRFLDRAVISCDSYEVEEAKAVLSLIPIWLCSLVFGIVFAQSPTFFTKQGSTMDRSISSTLQVPAATLQCFISLAILVFIPIYDRLFVPIARSITRKPAGITTLQRISTGIFLSIISMVIAALVEMKRLKTARDHGLVDSPKATVPMSVCWLIPQYILFGVSDVFTMVGLQEFFYGEVPPQLRSMGLALYLSIIGIGNFLSSFMVSVIEEATSQSGQVSWFSNNLNQAHLDYFYWLLACLSSLAFIFTVYFAKSYLYNSPK

SEQ ID NO: 71677 - protein, 511 aa, Arabidopsis thaliana
  peptide (1)..(511): Ceres Seq. ID no. 4804361
MCAEVAEKFAYFGIASNLITYFTEALGESTAVAASNVNLWLGTAAFLPLIWGSIADSFLGRFRTILLTSSFYIMGLGLLTFSATIPSLCNDQETRESCVSQVKVIIFFCALYLIALGEGGFKVCLRAFGADQFDEQDPNESKAKSSYFNWLYFAISIGILTTRLVTNYVQENLSWALGYAIPCLSMMLALFLFLLGIKTYRFSTGGEGRQGKKHDNPFVRIGRVFVAAARNRRQTPSDTCLLLPNESTKKFRFLDRAVISCDSYEVEEAKAVLSLIPIWLCSLVFGIVFAQSPTFFTKQGSTMDRSISSTLQVPAATLQCFISLAILVFIPIYDRLFVPIARSITRKPAGITTLQRISTGIFLSIISMVIAALVEMKRLKTARDHGLVDSPKATVPMSVCWLIPQYILFGVSDVFTMVGLQEFFYGEVPPQLRSMGLALYLSIIGIGNFLSSFMVSVIEEATSQSGQVSWFSNNLNQAHLDYFYWLLACLSSLAFIFTVYFAKSYLYNSPK

SEQ ID NO: 71678 - protein, 438 aa, Arabidopsis thaliana
  peptide (1)..(438): Ceres Seq. ID no. 4804362
MGLGLLTFSATIPSLCNDQETRESCVSQVKVIIFFCALYLIALGEGGFKVCLRAFGADQFDEQDPNESKAKSSYFNWLYFAISIGILTTRLVTNYVQENLSWALGYAIPCLSMMLALFLFLLGIKTYRFSTGGEGRQGKKHDNPFVRIGRVFVAAARNRRQTPSDTCLLLPNESTKKFRFLDRAVISCDSYEVEEAKAVLSLIPIWLCSLVFGIVFAQSPTFFTKQGSTMDRSISSTLQVPAATLQCFISLAILVFIPIYDRLFVPIARSITRKPAGITTLQRISTGIFLSIISMVIAALVEMKRLKTARDHGLVDSPKATVPMSVCWLIPQYILFGVSDVFTMVGLQEFFYGEVPPQLRSMGLALYLSIIGIGNFLSSFMVSVIEEATSQSGQVSWFSNNLNQAHLDYFYWLLACLSSLAFIFTVYFAKSYLYNSPK

SEQ ID NO: 71679 - DNA, 1758 bp, Arabidopsis thaliana
  misc_feature (1)..(1758): Ceres Seq. ID no. 4804363
  misc_feature (1)..(1758): Ortholog of  Ceres SEQ ID NO 13596198 as cited in SEQ ID NO 68488
atgcaagatctcttcggttcagttcgccgctcacttgtcttccgttctaccaccgacgatgagaatcaagagaatcatcctcctccgtttccttctctcctcgccgataaaatcacttcctgtatccgcaaatcaatggttttcgccaaatcccagtcacctccgaataactccaccgtacaaatcaaacctccgattcggtggcggaaaggtcagttaattggccgtggcgcttttggtactgtgtatatgggaatgaatctcgattccggtgagcttctcgccgttaaacaggttctgattacatctaattgtgcatccaaggaaaaaactcaggctcatattcaggagcttgaagaggaagtgaagctactcaagaatctctctcatccaaatatagttagatatttgggtacggtgagggaagatgaaactttgaatatcttgcttgaatttgttcctggtggatctatatcttcactcttggagaaatttggagcctttcctgaatctgttgttcggacatacacgaaccaactgcttttgggattggagtaccttcataatcatgccattatgcaccgtgacattaagggtgctaatatccttgtggataatcaaggatgcattaaacttgctgattttggtgcgtccaaacaggtagcggagttggctactatttcgggtgccaaatctatgaaaggaactccctattggatggctccagaagttattcttcaaaccgggcatagcttttctgctgatatttggagtgtaggatgcacagtgattgaaatggtgactggaaaagctccttggagccagcaatataaagagattgctgctattttccacattggaacgacgaaatcgcatcctccaatccctgacaatatctcctctgacgcaaatgattttttgctcaagtgtctgcagcaggaaccaaatctgcggccaaccgcttctgagctgctaaaggtgaaatggtcaacagacatccatttgttacgggcaaacagaaggaatctgcgtctaaagatcttacttcatttatgtcaaacatctacgagtgacgatgtaggagacatctgtaacttgggtagtctgacttgtacacttgctttccctgagaaatcaatccaaaataacagtttgtgtctgaaaagtaataacgggtatgatgacgatgatgataatgatatgtgtttgattgacgatgagaatttcttgacatataatggagagactggccctagtcttgacaataatactgatgccaagaagagctgtgataccatgagtgagatctctgatattttgaagtgcaaatttgacgaaaattctggaaacggagaaacagagacgaaagttagtatggaagttgaccatccatcatactcggaggatgaaaatgagctgactgagtcgaaaatcaaagctttcttagatgacaagggccatattggtcgatcaccttctagagcaacagatgcagcctgttgttccaagagtccagaaagtggtaatagctctggtgccccgaagaatagcaatgcaagtgctggtgctgaacaagaatcaaacagtcaaagtgtcgcgctgtcggagatagagaggaagtggaaggaagagcttgatcaagaacttgaaagaaagcgaagagagattacacggcaagcagggatgggatcatccccgagagatagaagcttgagccgacatagagagaagtcaagatttgcatctccaggcaaatga

SEQ ID NO: 71680 - protein, 585 aa, Arabidopsis thaliana
  peptide (1)..(585): Ceres Seq. ID no. 4804364
MQDLFGSVRRSLVFRSTTDDENQENHPPPFPSLLADKITSCIRKSMVFAKSQSPPNNSTVQIKPPIRWRKGQLIGRGAFGTVYMGMNLDSGELLAVKQVLITSNCASKEKTQAHIQELEEEVKLLKNLSHPNIVRYLGTVREDETLNILLEFVPGGSISSLLEKFGAFPESVVRTYTNQLLLGLEYLHNHAIMHRDIKGANILVDNQGCIKLADFGASKQVAELATISGAKSMKGTPYWMAPEVILQTGHSFSADIWSVGCTVIEMVTGKAPWSQQYKEIAAIFHIGTTKSHPPIPDNISSDANDFLLKCLQQEPNLRPTASELLKVKWSTDIHLLRANRRNLRLKILLHLCQTSTSDDVGDICNLGSLTCTLAFPEKSIQNNSLCLKSNNGYDDDDDNDMCLIDDENFLTYNGETGPSLDNNTDAKKSCDTMSEISDILKCKFDENSGNGETETKVSMEVDHPSYSEDENELTESKIKAFLDDKGHIGRSPSRATDAACCSKSPESGNSSGAPKNSNASAGAEQESNSQSVALSEIERKWKEELDQELERKRREITRQAGMGSSPRDRSLSRHREKSRFASPGK

SEQ ID NO: 71681 - protein, 540 aa, Arabidopsis thaliana
  peptide (1)..(540): Ceres Seq. ID no. 4804365
MVFAKSQSPPNNSTVQIKPPIRWRKGQLIGRGAFGTVYMGMNLDSGELLAVKQVLITSNCASKEKTQAHIQELEEEVKLLKNLSHPNIVRYLGTVREDETLNILLEFVPGGSISSLLEKFGAFPESVVRTYTNQLLLGLEYLHNHAIMHRDIKGANILVDNQGCIKLADFGASKQVAELATISGAKSMKGTPYWMAPEVILQTGHSFSADIWSVGCTVIEMVTGKAPWSQQYKEIAAIFHIGTTKSHPPIPDNISSDANDFLLKCLQQEPNLRPTASELLKVKWSTDIHLLRANRRNLRLKILLHLCQTSTSDDVGDICNLGSLTCTLAFPEKSIQNNSLCLKSNNGYDDDDDNDMCLIDDENFLTYNGETGPSLDNNTDAKKSCDTMSEISDILKCKFDENSGNGETETKVSMEVDHPSYSEDENELTESKIKAFLDDKGHIGRSPSRATDAACCSKSPESGNSSGAPKNSNASAGAEQESNSQSVALSEIERKWKEELDQELERKRREITRQAGMGSSPRDRSLSRHREKSRFASPGK

SEQ ID NO: 71682 - protein, 502 aa, Arabidopsis thaliana
  peptide (1)..(502): Ceres Seq. ID no. 4804366
MGMNLDSGELLAVKQVLITSNCASKEKTQAHIQELEEEVKLLKNLSHPNIVRYLGTVREDETLNILLEFVPGGSISSLLEKFGAFPESVVRTYTNQLLLGLEYLHNHAIMHRDIKGANILVDNQGCIKLADFGASKQVAELATISGAKSMKGTPYWMAPEVILQTGHSFSADIWSVGCTVIEMVTGKAPWSQQYKEIAAIFHIGTTKSHPPIPDNISSDANDFLLKCLQQEPNLRPTASELLKVKWSTDIHLLRANRRNLRLKILLHLCQTSTSDDVGDICNLGSLTCTLAFPEKSIQNNSLCLKSNNGYDDDDDNDMCLIDDENFLTYNGETGPSLDNNTDAKKSCDTMSEISDILKCKFDENSGNGETETKVSMEVDHPSYSEDENELTESKIKAFLDDKGHIGRSPSRATDAACCSKSPESGNSSGAPKNSNASAGAEQESNSQSVALSEIERKWKEELDQELERKRREITRQAGMGSSPRDRSLSRHREKSRFASPGK

SEQ ID NO: 71683 - DNA, 1791 bp, Arabidopsis thaliana
  misc_feature (1)..(1791): Ceres Seq. ID no. 4804398
  misc_feature (1)..(1791): Ortholog of  Ceres SEQ ID NO 15171212 as cited in SEQ ID NO 56899
  misc_feature (1)..(1791): Ortholog of  Ceres SEQ ID NO 12613725 as cited in SEQ ID NO 68196
atggatgttcatgatctatctgaagaagccaaaagaggagtaatacacacgtcggaggaatcattggacgatctttgtgttgattttcgaggtcggccatgcaggccaagcaagcatggtggtacaagagctgccctctttgttctaggcttccaagctttcgagatgatggcgatcgcagctgttggaaacaacttgatcacatacgtattcaatgagatgcatttccctttgtcaaaatccgcaaacctcgttactaacttcataggaacggtgtttctcctctcgcttcttggtggcttcctctctgattcataccttggaagctttcgtaccatgctcgtttttggcgtcatcgaaatctctgtattccaagctcatctcccagagctaagaccaccagaatgcaacatgaagagcaccacaatacattgcgtagaggcaaatggttacaaggcagccactctctacaccgcactctgtttagtggccttagggagcggctgcctcaaaccgaacatcatctctcacggtgcaaaccagtttcaaaggaaagatttgaggaagctctcgagtttcttcaatgcggcttacttcgccttctcaatgggtcagcttattgcactcacactcttagtttgggtgcaaacacattctggtatggacgttggttttggtgtctccgcggctgttatggccgcggggatgatcagccttgtcgctggaactagcttttataggaataaaccgcctagtggtagcatcttcacaccaattgctcaggtcttcgtagccgcgatcactaaacgaaaacagatttgcccatcaaacccaaacatggttcaccaaccttcaacggatcttgttcgtgtcaaacctctcctccattctaataaattcaggtttcttgacaaggcttgcatcaagacgcaaggcaaggcaatggagagtccatggagactctgcacaatcgaacaagtccatcaagtcaagatattgttatcagtcataccgatattcgcgtgtactatcatcttcaacaccatcttagctcagcttcaaactttctctgttcagcaaggaagttccatgaacacacacattacaaaaactttccaaattccaccagcttctcttcaagccattccttacatcattctcatcttctttgtgcctctctacgagacgttcttcgtcccactcgctagaaaactcacgggaaacgattctggaatctctcctcttcagagaattggcactggactgttcttagcaactttctcgatggttgcagccgctttagtggagaagaagagacgagaatcgttcttggaacagaacgtaatgctctcgatcttttggatcgcgccgcagtttctgatatttggtttatcagagatgtttacagccgttggattagtggagtttttttacaaacagtcttcacagagtatgcaatcttttctcacagcaatgacatactgttcttactctttcgggttttatcttagctctgttcttgtctcgaccgtgaatagagttacttctagtaatggttccgggaccaaagaaggttggttaggcgataatgaccttaacaaagatagattagatcacttttactggcttttagcttcattgagtttcatcaacttctttaattatcttttctggtcaagatggtattcgtgtgatccgtccgcgacacatcatagcgccgaagtcaatagcttggaggctttagaaaatggcgaaatcaaggattccacgacggagaagcctagaatttga

SEQ ID NO: 71684 - protein, 596 aa, Arabidopsis thaliana
  peptide (1)..(596): Ceres Seq. ID no. 4804399
MDVHDLSEEAKRGVIHTSEESLDDLCVDFRGRPCRPSKHGGTRAALFVLGFQAFEMMAIAAVGNNLITYVFNEMHFPLSKSANLVTNFIGTVFLLSLLGGFLSDSYLGSFRTMLVFGVIEISVFQAHLPELRPPECNMKSTTIHCVEANGYKAATLYTALCLVALGSGCLKPNIISHGANQFQRKDLRKLSSFFNAAYFAFSMGQLIALTLLVWVQTHSGMDVGFGVSAAVMAAGMISLVAGTSFYRNKPPSGSIFTPIAQVFVAAITKRKQICPSNPNMVHQPSTDLVRVKPLLHSNKFRFLDKACIKTQGKAMESPWRLCTIEQVHQVKILLSVIPIFACTIIFNTILAQLQTFSVQQGSSMNTHITKTFQIPPASLQAIPYIILIFFVPLYETFFVPLARKLTGNDSGISPLQRIGTGLFLATFSMVAAALVEKKRRESFLEQNVMLSIFWIAPQFLIFGLSEMFTAVGLVEFFYKQSSQSMQSFLTAMTYCSYSFGFYLSSVLVSTVNRVTSSNGSGTKEGWLGDNDLNKDRLDHFYWLLASLSFINFFNYLFWSRWYSCDPSATHHSAEVNSLEALENGEIKDSTTEKPRI

SEQ ID NO: 71685 - protein, 541 aa, Arabidopsis thaliana
  peptide (1)..(541): Ceres Seq. ID no. 4804400
MMAIAAVGNNLITYVFNEMHFPLSKSANLVTNFIGTVFLLSLLGGFLSDSYLGSFRTMLVFGVIEISVFQAHLPELRPPECNMKSTTIHCVEANGYKAATLYTALCLVALGSGCLKPNIISHGANQFQRKDLRKLSSFFNAAYFAFSMGQLIALTLLVWVQTHSGMDVGFGVSAAVMAAGMISLVAGTSFYRNKPPSGSIFTPIAQVFVAAITKRKQICPSNPNMVHQPSTDLVRVKPLLHSNKFRFLDKACIKTQGKAMESPWRLCTIEQVHQVKILLSVIPIFACTIIFNTILAQLQTFSVQQGSSMNTHITKTFQIPPASLQAIPYIILIFFVPLYETFFVPLARKLTGNDSGISPLQRIGTGLFLATFSMVAAALVEKKRRESFLEQNVMLSIFWIAPQFLIFGLSEMFTAVGLVEFFYKQSSQSMQSFLTAMTYCSYSFGFYLSSVLVSTVNRVTSSNGSGTKEGWLGDNDLNKDRLDHFYWLLASLSFINFFNYLFWSRWYSCDPSATHHSAEVNSLEALENGEIKDSTTEKPRI

SEQ ID NO: 71686 - protein, 540 aa, Arabidopsis thaliana
  peptide (1)..(540): Ceres Seq. ID no. 4804401
MAIAAVGNNLITYVFNEMHFPLSKSANLVTNFIGTVFLLSLLGGFLSDSYLGSFRTMLVFGVIEISVFQAHLPELRPPECNMKSTTIHCVEANGYKAATLYTALCLVALGSGCLKPNIISHGANQFQRKDLRKLSSFFNAAYFAFSMGQLIALTLLVWVQTHSGMDVGFGVSAAVMAAGMISLVAGTSFYRNKPPSGSIFTPIAQVFVAAITKRKQICPSNPNMVHQPSTDLVRVKPLLHSNKFRFLDKACIKTQGKAMESPWRLCTIEQVHQVKILLSVIPIFACTIIFNTILAQLQTFSVQQGSSMNTHITKTFQIPPASLQAIPYIILIFFVPLYETFFVPLARKLTGNDSGISPLQRIGTGLFLATFSMVAAALVEKKRRESFLEQNVMLSIFWIAPQFLIFGLSEMFTAVGLVEFFYKQSSQSMQSFLTAMTYCSYSFGFYLSSVLVSTVNRVTSSNGSGTKEGWLGDNDLNKDRLDHFYWLLASLSFINFFNYLFWSRWYSCDPSATHHSAEVNSLEALENGEIKDSTTEKPRI

SEQ ID NO: 71687 - DNA, 1806 bp, Arabidopsis thaliana
  misc_feature (1)..(1806): Ceres Seq. ID no. 4804683
  misc_feature (1)..(1806): Ortholog of  Ceres SEQ ID NO 13646680 as cited in SEQ ID NO 20737
atgcttgaatttagggattctccagtttttcaatatattaatgatctctctccaatagagccagtgaagccaggacgcccagagaatatcttgcactcactggtttttacatctccatcatcatcatcatctctattttgttccccgcagttaaactcttaccgagattccagatttttcatcaaaaggcatcgttctctagatctatcgagtccagtagtcctcatcggtgagactctaaaaaactcaccagatgctttatgggaggagaagctaaagtgtaggcctgagaagttggaaaatgtttctgaacccaagccatttaaggagcagataagcttagcaattgagttggcgaattcattgaaacacggaagagatggatgtgatattcagatggtttcttgtgatgaagtacctatggatgctgatgatgaaataggaagcggtggtggatccagagagctgtctgatgagttatgtagacagtcttttgatccacttgactttgatgctgattcagatggagtacttcacactgatgaaatggaagctgagagtgggtttggtaaagaagtaataatgtttgatgttgctgatatccagaactatgagcaacagattccaaggaccacagatcctagattttattctcttgcttctgagcctcaacagttttctatctactgtaataactcaaattatgtcgaagagcgggaaggttcgtgcagtgtacaagttgcagctggagctccagacattaatctcagttgttcctccaaggtagcagctattgattcaactgccgaagctgaagacaaggaagataaagaccttcagcccagtggcaagcaacgaagtgtacgcaggcgctgcttaacttttgacatgggagggtctcacaaaaggatacctttgcgtgattctacaaatgatcttcctcttgattctacctctatcaataaagctcccagtccacaaaattgtttagacaccagtaaacaagacactgatgagattctacccattccacgaacgattggcctgcacttgaatggtttcgtgaacccctcagtctcaagtggccgaaaaaaaaaaaaaatcaaagatggtcaggcttttccttctacaacatttcattataatattgaagatgaattctcaactcctgtctccacaaaaagagatttggtggtattcagtgatgtcaaaatcatggagcctcctgagagatcagtggaaggagaatgttttgaccaactcatggcaatggaaaataggtattgtgaatgtttttccgctggtctattctgtggtgaaccttgttcatgtcaaaattgtttcaataagcccattcatgaagacctagttatgaaaagtcgtgaagtgattaaagcccgcaacccattagcttttgctccaaaagtggtctcaacttctgatactgttatagatttatgggtcgagaacagcaagactcctgcttcagcaagacacaaaagaggatgcaactgcaggaaatcaggctgctcaaagaaatattgtgaatgctttatgatgggcgttggatgctcctctaactgcagatgcatgggatgcaagaatacttttggtcacacaaatgagcaatgtgcgggagattctgatgtggtaacaatcaatgatgaagctaaacactatggtgatcatggcgatgcttcaaggcaaaacgaagaaatcttaaccagtgagagaaaccgcttgttgctccctggttctgtagcattccgttccttaacatcactgtcaaacctgtctgaactttga

SEQ ID NO: 71688 - protein, 601 aa, Arabidopsis thaliana
  peptide (1)..(601): Ceres Seq. ID no. 4804684
MLEFRDSPVFQYINDLSPIEPVKPGRPENILHSLVFTSPSSSSSLFCSPQLNSYRDSRFFIKRHRSLDLSSPVVLIGETLKNSPDALWEEKLKCRPEKLENVSEPKPFKEQISLAIELANSLKHGRDGCDIQMVSCDEVPMDADDEIGSGGGSRELSDELCRQSFDPLDFDADSDGVLHTDEMEAESGFGKEVIMFDVADIQNYEQQIPRTTDPRFYSLASEPQQFSIYCNNSNYVEEREGSCSVQVAAGAPDINLSCSSKVAAIDSTAEAEDKEDKDLQPSGKQRSVRRRCLTFDMGGSHKRIPLRDSTNDLPLDSTSINKAPSPQNCLDTSKQDTDEILPIPRTIGLHLNGFVNPSVSSGRKKKKIKDGQAFPSTTFHYNIEDEFSTPVSTKRDLVVFSDVKIMEPPERSVEGECFDQLMAMENRYCECFSAGLFCGEPCSCQNCFNKPIHEDLVMKSREVIKARNPLAFAPKVVSTSDTVIDLWVENSKTPASARHKRGCNCRKSGCSKKYCECFMMGVGCSSNCRCMGCKNTFGHTNEQCAGDSDVVTINDEAKHYGDHGDASRQNEEILTSERNRLLLPGSVAFRSLTSLSNLSEL

SEQ ID NO: 71689 - protein, 469 aa, Arabidopsis thaliana
  peptide (1)..(469): Ceres Seq. ID no. 4804685
MVSCDEVPMDADDEIGSGGGSRELSDELCRQSFDPLDFDADSDGVLHTDEMEAESGFGKEVIMFDVADIQNYEQQIPRTTDPRFYSLASEPQQFSIYCNNSNYVEEREGSCSVQVAAGAPDINLSCSSKVAAIDSTAEAEDKEDKDLQPSGKQRSVRRRCLTFDMGGSHKRIPLRDSTNDLPLDSTSINKAPSPQNCLDTSKQDTDEILPIPRTIGLHLNGFVNPSVSSGRKKKKIKDGQAFPSTTFHYNIEDEFSTPVSTKRDLVVFSDVKIMEPPERSVEGECFDQLMAMENRYCECFSAGLFCGEPCSCQNCFNKPIHEDLVMKSREVIKARNPLAFAPKVVSTSDTVIDLWVENSKTPASARHKRGCNCRKSGCSKKYCECFMMGVGCSSNCRCMGCKNTFGHTNEQCAGDSDVVTINDEAKHYGDHGDASRQNEEILTSERNRLLLPGSVAFRSLTSLSNLSEL

SEQ ID NO: 71690 - protein, 461 aa, Arabidopsis thaliana
  peptide (1)..(461): Ceres Seq. ID no. 4804686
MDADDEIGSGGGSRELSDELCRQSFDPLDFDADSDGVLHTDEMEAESGFGKEVIMFDVADIQNYEQQIPRTTDPRFYSLASEPQQFSIYCNNSNYVEEREGSCSVQVAAGAPDINLSCSSKVAAIDSTAEAEDKEDKDLQPSGKQRSVRRRCLTFDMGGSHKRIPLRDSTNDLPLDSTSINKAPSPQNCLDTSKQDTDEILPIPRTIGLHLNGFVNPSVSSGRKKKKIKDGQAFPSTTFHYNIEDEFSTPVSTKRDLVVFSDVKIMEPPERSVEGECFDQLMAMENRYCECFSAGLFCGEPCSCQNCFNKPIHEDLVMKSREVIKARNPLAFAPKVVSTSDTVIDLWVENSKTPASARHKRGCNCRKSGCSKKYCECFMMGVGCSSNCRCMGCKNTFGHTNEQCAGDSDVVTINDEAKHYGDHGDASRQNEEILTSERNRLLLPGSVAFRSLTSLSNLSEL

SEQ ID NO: 71691 - DNA, 3588 bp, Arabidopsis thaliana
  misc_feature (1)..(3588): Ceres Seq. ID no. 4805151
  misc_feature (1)..(3588): Ortholog of  Ceres SEQ ID NO 13600310 as cited in SEQ ID NO 5086
atggaggattgttgtgatccacttctcgcaactgatgcttctccgcgacctgaaagcttctctcgctctgaaaaggatatagcatcgcgctcaaggactgtggcaatggcagatctggattcaaattgcgaattgagtaacgatgttgatatggaacaatcaagcccagatttgatgaaattggaacaatctagtgatcccgtagcgttagatggaaaagttgtattagggttttcattagcatctccagatctagtaaattgtggcgcttcacctgatttacctagaggtagctatgaagattcaccagaattttctaagaaaagaagattttctactgagctttctctagagaatggaattgatggttctactactactacaagacttggccgtaaaagccaagttgtgaaattctcagcaatctgtcagacatttggctatgagttgtctcctgagtcttcttttgagttaccttctccacctggagactttcgggagagtatgactcctgttataagtatcaactctggttctataagcacggatgtgactgtggaggatgtaactttcttgaaggatgagttttttagtggaggtgaaagtattacaactgatgctgttgttggcaatgaagatgagattttgttgtatcaaacagctcgtcttggtaatttcgcttacaagtttcagtcactggatcctggggactacttcatcgatttgcattttgctgaaatcgagttcactaagggtccaccgggagtcatatccggccttgatttgttttcgcaagtaggagcaaatacacctcttgtgatagaggatctaaggatgctcgtaggtagggaaggagagttatctatacgattagaaggagtgacaggagctgcaattctatgtggcatttctattaggaaagagacaacggctacctatgttgaagaaactggaatgctagcggtgaaaggttcaactgacactgttctgtcccagcaaactcaagaaaatcttgtctgcagggcagaagaagaggctgaagggatgagaagtgactgtgagcagcagaggaaagagatggaggatatgaagagaatggttgaggaacttaaactggagaaccaacaaaagactagagaatgcgaagaagcattgaattctctcagtgagattcaaaatgaactaatgcgcaagtcgatgcatgttggttctttggggacaagtcaaagagaagagcagatggttctcttcattaagagatttgacaagaaaattgaagtggagcaaattaagctgttggaggaggcaacaacatacaaacacctagtccaagatatcaacgagttcagttctcacatccagtctagagtgaagcaggacgcagaattgcatgaaaatctcaaagtcaaatttgtagcaggagaaaaagagaggaaagaactatataacaagatactagaactaaaaggtaacatcagggtcttttgcaggtgtcgaccactaaactttgaagaaactgaagcaggagtatcaatgggaattgatgttgagtcaaccaaaaatggagaggtcatagtgatgtcaaatggttttcccaaaaaaagcttcaagttcgattctgtttttggtcctaacgcttcccaagctgatgtttttgaagatactgctccctttgctacgtcagtcattgatggatacaacgtttgcatcttcgcctatggccagactggtactgggaaaacttttaccatggagggaactcaacatgaccgtggtgtaaactatagaacactggaaaatctgtttcgaataatcaaagcacgagaacaccgctacaattatgagatctcggtcagtgtattggaagtttacaatgagcagataagagatttgttggttccagcttcacagagtgcatctgcacccaaaagatttgagataaggcaactgagtgaaggaaaccaccacgtaccaggattggttgaagcacctgtgaaaagcatagaagaggtttgggatgtgttgaaaacaggaagtaatgcaagggctgttgggaaaacgacggctaatgagcacagtagccgatctcactgcattcactgcgtgatggtaaaaggtgagaatttgttgaatggtgaatgcacaaagagcaaactatggttagttgatttagcaggaagcgaacgggttgctaagacagaagtacaaggagaacggctgaaggagactcaaaacatcaacaaatcattatctgctcttggtgatgtcatattcgctcttgccaacaaaagctctcacattcctttcagaaactcaaaactcacgcacttgcttcaggattctctaggaggagattcaaaaaccctcatgtttgtacaaatcagtcctaacgagaatgatcaaagtgagacactatgctcactgaattttgctagcagagtgagagggatagagttgggacctgcaaagaagcagctagacaatactgaactcttgaaatacaagcaaatggttgagaaatggaagcaagatatgaaaggaaaagacgaacagattaggaaaatggaggaaacgatgtatggtttagaagcaaagattaaggaacgagacactaagaacaaaaccctccaagacaaggttaaagaacttgaatcacaactactggtggagaggaagcttgctcgtcaacatgtagacaccaagattgctgaacagcagacaaaacagcagactgaagatgaaaacaacacatcaaagaggccgccactgacaaatatactgttgggatcagcttcgaaagaaatggtgaatctaacacgtccatcactcttggagagcacgaccagctatgatctagctcctttacctagtggtgtccccaagtataatgatctctctgagaaggagaacaatccagaaatggctgatcaagtgcatctacctaataaaacaggaagattctctatctgtgcaaaacgtattccatcagctccagctccaagaaggagttctcttgccccaaccacatcaacttcgagagaaatggtatatctaacccgaccaccactctcagagagcacgaccagctatgatctacctcctttacccaatggtggcctcaagtacagtgacctcattgagaaggtgaacaatcaagaaatggctgagcaagtgcaaattcccaagagaataggagcaggaagatcctccatctgcgcaaaacgtattccaccagctccaagaaggaagagttttgcgccaatgccattcattccaatcacatcaacattaacttctcctgatgaaaagagtggcgctaaccaagtgctctgcaccagtcctaagctacatagaagtaatgggaagacgttgaccagcatactgagacgaagcatacaaaagagaatgcaaatgaaaccttccccgaggcagcaaccaatgagaagaggtggcggcattaatgtagggatggagagagttaggctgtctataggaaacagaggaaggttagctcatagagttctgctaaccaatgctcgtaaggcaggtctgaaggagacaccgcagaaacaagagcgatggatctga

SEQ ID NO: 71692 - protein, 1195 aa, Arabidopsis thaliana
  peptide (1)..(1195): Ceres Seq. ID no. 4805152
MEDCCDPLLATDASPRPESFSRSEKDIASRSRTVAMADLDSNCELSNDVDMEQSSPDLMKLEQSSDPVALDGKVVLGFSLASPDLVNCGASPDLPRGSYEDSPEFSKKRRFSTELSLENGIDGSTTTTRLGRKSQVVKFSAICQTFGYELSPESSFELPSPPGDFRESMTPVISINSGSISTDVTVEDVTFLKDEFFSGGESITTDAVVGNEDEILLYQTARLGNFAYKFQSLDPGDYFIDLHFAEIEFTKGPPGVISGLDLFSQVGANTPLVIEDLRMLVGREGELSIRLEGVTGAAILCGISIRKETTATYVEETGMLAVKGSTDTVLSQQTQENLVCRAEEEAEGMRSDCEQQRKEMEDMKRMVEELKLENQQKTRECEEALNSLSEIQNELMRKSMHVGSLGTSQREEQMVLFIKRFDKKIEVEQIKLLEEATTYKHLVQDINEFSSHIQSRVKQDAELHENLKVKFVAGEKERKELYNKILELKGNIRVFCRCRPLNFEETEAGVSMGIDVESTKNGEVIVMSNGFPKKSFKFDSVFGPNASQADVFEDTAPFATSVIDGYNVCIFAYGQTGTGKTFTMEGTQHDRGVNYRTLENLFRIIKAREHRYNYEISVSVLEVYNEQIRDLLVPASQSASAPKRFEIRQLSEGNHHVPGLVEAPVKSIEEVWDVLKTGSNARAVGKTTANEHSSRSHCIHCVMVKGENLLNGECTKSKLWLVDLAGSERVAKTEVQGERLKETQNINKSLSALGDVIFALANKSSHIPFRNSKLTHLLQDSLGGDSKTLMFVQISPNENDQSETLCSLNFASRVRGIELGPAKKQLDNTELLKYKQMVEKWKQDMKGKDEQIRKMEETMYGLEAKIKERDTKNKTLQDKVKELESQLLVERKLARQHVDTKIAEQQTKQQTEDENNTSKRPPLTNILLGSASKEMVNLTRPSLLESTTSYDLAPLPSGVPKYNDLSEKENNPEMADQVHLPNKTGRFSICAKRIPSAPAPRRSSLAPTTSTSREMVYLTRPPLSESTTSYDLPPLPNGGLKYSDLIEKVNNQEMAEQVQIPKRIGAGRSSICAKRIPPAPRRKSFAPMPFIPITSTLTSPDEKSGANQVLCTSPKLHRSNGKTLTSILRRSIQKRMQMKPSPRQQPMRRGGGINVGMERVRLSIGNRGRLAHRVLLTNARKAGLKETPQKQERWI

SEQ ID NO: 71693 - protein, 1160 aa, Arabidopsis thaliana
  peptide (1)..(1160): Ceres Seq. ID no. 4805153
MADLDSNCELSNDVDMEQSSPDLMKLEQSSDPVALDGKVVLGFSLASPDLVNCGASPDLPRGSYEDSPEFSKKRRFSTELSLENGIDGSTTTTRLGRKSQVVKFSAICQTFGYELSPESSFELPSPPGDFRESMTPVISINSGSISTDVTVEDVTFLKDEFFSGGESITTDAVVGNEDEILLYQTARLGNFAYKFQSLDPGDYFIDLHFAEIEFTKGPPGVISGLDLFSQVGANTPLVIEDLRMLVGREGELSIRLEGVTGAAILCGISIRKETTATYVEETGMLAVKGSTDTVLSQQTQENLVCRAEEEAEGMRSDCEQQRKEMEDMKRMVEELKLENQQKTRECEEALNSLSEIQNELMRKSMHVGSLGTSQREEQMVLFIKRFDKKIEVEQIKLLEEATTYKHLVQDINEFSSHIQSRVKQDAELHENLKVKFVAGEKERKELYNKILELKGNIRVFCRCRPLNFEETEAGVSMGIDVESTKNGEVIVMSNGFPKKSFKFDSVFGPNASQADVFEDTAPFATSVIDGYNVCIFAYGQTGTGKTFTMEGTQHDRGVNYRTLENLFRIIKAREHRYNYEISVSVLEVYNEQIRDLLVPASQSASAPKRFEIRQLSEGNHHVPGLVEAPVKSIEEVWDVLKTGSNARAVGKTTANEHSSRSHCIHCVMVKGENLLNGECTKSKLWLVDLAGSERVAKTEVQGERLKETQNINKSLSALGDVIFALANKSSHIPFRNSKLTHLLQDSLGGDSKTLMFVQISPNENDQSETLCSLNFASRVRGIELGPAKKQLDNTELLKYKQMVEKWKQDMKGKDEQIRKMEETMYGLEAKIKERDTKNKTLQDKVKELESQLLVERKLARQHVDTKIAEQQTKQQTEDENNTSKRPPLTNILLGSASKEMVNLTRPSLLESTTSYDLAPLPSGVPKYNDLSEKENNPEMADQVHLPNKTGRFSICAKRIPSAPAPRRSSLAPTTSTSREMVYLTRPPLSESTTSYDLPPLPNGGLKYSDLIEKVNNQEMAEQVQIPKRIGAGRSSICAKRIPPAPRRKSFAPMPFIPITSTLTSPDEKSGANQVLCTSPKLHRSNGKTLTSILRRSIQKRMQMKPSPRQQPMRRGGGINVGMERVRLSIGNRGRLAHRVLLTNARKAGLKETPQKQERWI

SEQ ID NO: 71694 - protein, 1145 aa, Arabidopsis thaliana
  peptide (1)..(1145): Ceres Seq. ID no. 4805154
MEQSSPDLMKLEQSSDPVALDGKVVLGFSLASPDLVNCGASPDLPRGSYEDSPEFSKKRRFSTELSLENGIDGSTTTTRLGRKSQVVKFSAICQTFGYELSPESSFELPSPPGDFRESMTPVISINSGSISTDVTVEDVTFLKDEFFSGGESITTDAVVGNEDEILLYQTARLGNFAYKFQSLDPGDYFIDLHFAEIEFTKGPPGVISGLDLFSQVGANTPLVIEDLRMLVGREGELSIRLEGVTGAAILCGISIRKETTATYVEETGMLAVKGSTDTVLSQQTQENLVCRAEEEAEGMRSDCEQQRKEMEDMKRMVEELKLENQQKTRECEEALNSLSEIQNELMRKSMHVGSLGTSQREEQMVLFIKRFDKKIEVEQIKLLEEATTYKHLVQDINEFSSHIQSRVKQDAELHENLKVKFVAGEKERKELYNKILELKGNIRVFCRCRPLNFEETEAGVSMGIDVESTKNGEVIVMSNGFPKKSFKFDSVFGPNASQADVFEDTAPFATSVIDGYNVCIFAYGQTGTGKTFTMEGTQHDRGVNYRTLENLFRIIKAREHRYNYEISVSVLEVYNEQIRDLLVPASQSASAPKRFEIRQLSEGNHHVPGLVEAPVKSIEEVWDVLKTGSNARAVGKTTANEHSSRSHCIHCVMVKGENLLNGECTKSKLWLVDLAGSERVAKTEVQGERLKETQNINKSLSALGDVIFALANKSSHIPFRNSKLTHLLQDSLGGDSKTLMFVQISPNENDQSETLCSLNFASRVRGIELGPAKKQLDNTELLKYKQMVEKWKQDMKGKDEQIRKMEETMYGLEAKIKERDTKNKTLQDKVKELESQLLVERKLARQHVDTKIAEQQTKQQTEDENNTSKRPPLTNILLGSASKEMVNLTRPSLLESTTSYDLAPLPSGVPKYNDLSEKENNPEMADQVHLPNKTGRFSICAKRIPSAPAPRRSSLAPTTSTSREMVYLTRPPLSESTTSYDLPPLPNGGLKYSDLIEKVNNQEMAEQVQIPKRIGAGRSSICAKRIPPAPRRKSFAPMPFIPITSTLTSPDEKSGANQVLCTSPKLHRSNGKTLTSILRRSIQKRMQMKPSPRQQPMRRGGGINVGMERVRLSIGNRGRLAHRVLLTNARKAGLKETPQKQERWI

SEQ ID NO: 71695 - DNA, 1029 bp, Arabidopsis thaliana
  misc_feature (1)..(1029): Ceres Seq. ID no. 4805407
  misc_feature (1)..(1029): Ortholog of  Ceres SEQ ID NO 13597380 as cited in SEQ ID NO 64054
  misc_feature (1)..(1029): Ortholog of  Ceres SEQ ID NO 12625474 as cited in SEQ ID NO 64169
  misc_feature (1)..(1029): Ortholog of  Ceres SEQ ID NO 13597502 as cited in SEQ ID NO 64681
atgaagcttcaaattctattgcttgctttggttttaatcgctgttgaagcgaatgcagtcaagcaagggataaacgcaacgatcccagcgctaatagtttttggagattcaataatggatacaggaaataacaataatcttccgactcttcttaaatgtaactttcctccatatggtaaagattatcctggaggcgacgccactggaagattttctgatggaagagttccttctgatcttattgcggaaaagttgggattggctaagacattaccagcatatatgaattcatatttgaagcctgaggatcttcttaaaggtgtaacatttgcatctcgaggaactggttatgatccattgacagcaaaaattatgtcagtgatatcggtatgggatcaactcatatatttcaaagaatatatatcaaagatcaagaggcatttcggagaagaaaaagccaaagatatcttggaacatagtttctttcttgtggtgtctagtagcaatgaccttgctcacacttatttagctcaagctcatagatatgaccgtacctcttatgccaatttcttggctgactctgctgtccatttcgtgagagaattacataagcttggagctcgaaaaattggagtgtttagtgcagtccccgttggttgtgttccattacaaagaacagtttttggaggtttttttacaagaggatgtaatgaacctctaaacaacatggcaaaacaattcaacgcaagactttctccagcattagattctttagataaagagttggatggtgttatcctttacattaatgtttatgatactctttttgacatgatccaacaccctaaaaaatacggatgttgcggtaaaggactgctcacaatatcctatttatgtaactcattgaacccatttacgtgttctaattcttcatcatacatattttgggatagctatcatccatctgaaagagcttatcaagttatcgtcgacaatttactcgataaatatttgagcaaagtctattga

SEQ ID NO: 71696 - protein, 342 aa, Arabidopsis thaliana
  peptide (1)..(342): Ceres Seq. ID no. 4805408
MKLQILLLALVLIAVEANAVKQGINATIPALIVFGDSIMDTGNNNNLPTLLKCNFPPYGKDYPGGDATGRFSDGRVPSDLIAEKLGLAKTLPAYMNSYLKPEDLLKGVTFASRGTGYDPLTAKIMSVISVWDQLIYFKEYISKIKRHFGEEKAKDILEHSFFLVVSSSNDLAHTYLAQAHRYDRTSYANFLADSAVHFVRELHKLGARKIGVFSAVPVGCVPLQRTVFGGFFTRGCNEPLNNMAKQFNARLSPALDSLDKELDGVILYINVYDTLFDMIQHPKKYGCCGKGLLTISYLCNSLNPFTCSNSSSYIFWDSYHPSERAYQVIVDNLLDKYLSKVY

SEQ ID NO: 71697 - protein, 304 aa, Arabidopsis thaliana
  peptide (1)..(304): Ceres Seq. ID no. 4805409
MDTGNNNNLPTLLKCNFPPYGKDYPGGDATGRFSDGRVPSDLIAEKLGLAKTLPAYMNSYLKPEDLLKGVTFASRGTGYDPLTAKIMSVISVWDQLIYFKEYISKIKRHFGEEKAKDILEHSFFLVVSSSNDLAHTYLAQAHRYDRTSYANFLADSAVHFVRELHKLGARKIGVFSAVPVGCVPLQRTVFGGFFTRGCNEPLNNMAKQFNARLSPALDSLDKELDGVILYINVYDTLFDMIQHPKKYGCCGKGLLTISYLCNSLNPFTCSNSSSYIFWDSYHPSERAYQVIVDNLLDKYLSKVY

SEQ ID NO: 71698 - protein, 248 aa, Arabidopsis thaliana
  peptide (1)..(248): Ceres Seq. ID no. 4805410
MNSYLKPEDLLKGVTFASRGTGYDPLTAKIMSVISVWDQLIYFKEYISKIKRHFGEEKAKDILEHSFFLVVSSSNDLAHTYLAQAHRYDRTSYANFLADSAVHFVRELHKLGARKIGVFSAVPVGCVPLQRTVFGGFFTRGCNEPLNNMAKQFNARLSPALDSLDKELDGVILYINVYDTLFDMIQHPKKYGCCGKGLLTISYLCNSLNPFTCSNSSSYIFWDSYHPSERAYQVIVDNLLDKYLSKVY

SEQ ID NO: 71699 - DNA, 1080 bp, Arabidopsis thaliana
  misc_feature (1)..(1080): Ceres Seq. ID no. 4806152
  misc_feature (1)..(1080): Ortholog of  Ceres SEQ ID NO 12476493 as cited in SEQ ID NO 58163
  misc_feature (1)..(1080): Ortholog of  Ceres SEQ ID NO 12617090 as cited in SEQ ID NO 64005
  misc_feature (1)..(1080): Ortholog of  Ceres SEQ ID NO 13597233 as cited in SEQ ID NO 64370
atgaattcctccgacgtcaacttctccctactccagagccaaccaaatgttccggctgaattcttctggccggagaaagacgttgccccttcagaaggcgacctcgatctcccaatcatcgacttgagtgggttcttgaatggcaatgaggccgagacgcaacttgcagctaaggcagtgaaaaaagcgtgcatggctcacggtacttttctagtggtcaatcatggcttcaagtcgggcttggctgaaaaggcgcttgagatatcgagtttgttctttgggctatccaaggatgagaagctaagggcttataggatcccggggaatatctctggctataccgcaggtcatagccaaagattttcctccaatcttccgtggaatgagactttgactttggccttcaaaaaggggccaccccatgttgttgaagactttctaacctcaaggctaggcaaccatcgtcaagagatcggtcaagtgtttcaagaattttgtgatgcaatgaatggactggttatggatttgatggagctattgggtataagtatgggtttaaaagacaggacatactaccggagattcttcgaagatggaagtggcatcttcagatgcaactattatccgccgtgcaagcagccagagaaagcccttggtgttggcccccataatgacccaacggctataaccgttttgcttcaagacgatgttgtgggcttagaggtctttgccgcaggtagttggcagaccgttcgccctcgtcctggtgctcttgtcgtcaacgttggagacaccttcatggcattgtcaaatggaaactacaggagttgttaccacagggcagtggtaaacaaggagaaagtgagaaggtcattagtattcttctcttgtcctagagaagataaaatcatcgtacctcctcctgaacttgtggaaggtgaagaagcttctagaaagtaccctgactttacttgggctcagcttcagaaatttacccagtccggctatcgagtcgataacaccactctccataacttctcttcgtggctcgtctctaactccgacaagaaatcaacttga

SEQ ID NO: 71700 - protein, 359 aa, Arabidopsis thaliana
  peptide (1)..(359): Ceres Seq. ID no. 4806153
MNSSDVNFSLLQSQPNVPAEFFWPEKDVAPSEGDLDLPIIDLSGFLNGNEAETQLAAKAVKKACMAHGTFLVVNHGFKSGLAEKALEISSLFFGLSKDEKLRAYRIPGNISGYTAGHSQRFSSNLPWNETLTLAFKKGPPHVVEDFLTSRLGNHRQEIGQVFQEFCDAMNGLVMDLMELLGISMGLKDRTYYRRFFEDGSGIFRCNYYPPCKQPEKALGVGPHNDPTAITVLLQDDVVGLEVFAAGSWQTVRPRPGALVVNVGDTFMALSNGNYRSCYHRAVVNKEKVRRSLVFFSCPREDKIIVPPPELVEGEEASRKYPDFTWAQLQKFTQSGYRVDNTTLHNFSSWLVSNSDKKST

SEQ ID NO: 71701 - protein, 295 aa, Arabidopsis thaliana
  peptide (1)..(295): Ceres Seq. ID no. 4806154
MAHGTFLVVNHGFKSGLAEKALEISSLFFGLSKDEKLRAYRIPGNISGYTAGHSQRFSSNLPWNETLTLAFKKGPPHVVEDFLTSRLGNHRQEIGQVFQEFCDAMNGLVMDLMELLGISMGLKDRTYYRRFFEDGSGIFRCNYYPPCKQPEKALGVGPHNDPTAITVLLQDDVVGLEVFAAGSWQTVRPRPGALVVNVGDTFMALSNGNYRSCYHRAVVNKEKVRRSLVFFSCPREDKIIVPPPELVEGEEASRKYPDFTWAQLQKFTQSGYRVDNTTLHNFSSWLVSNSDKKST

SEQ ID NO: 71702 - protein, 191 aa, Arabidopsis thaliana
  peptide (1)..(191): Ceres Seq. ID no. 4806155
MNGLVMDLMELLGISMGLKDRTYYRRFFEDGSGIFRCNYYPPCKQPEKALGVGPHNDPTAITVLLQDDVVGLEVFAAGSWQTVRPRPGALVVNVGDTFMALSNGNYRSCYHRAVVNKEKVRRSLVFFSCPREDKIIVPPPELVEGEEASRKYPDFTWAQLQKFTQSGYRVDNTTLHNFSSWLVSNSDKKST

SEQ ID NO: 71703 - DNA, 690 bp, Arabidopsis thaliana
  misc_feature (1)..(690): Ceres Seq. ID no. 4806277
  misc_feature (1)..(690): Ortholog of  Ceres SEQ ID NO 12780822 as cited in SEQ ID NO 67471
atggaggaagaatacataagaataataagcataacaacaataagaataatctcatggggtctcattttcatccttgtaagacgaatcttctcaagctactcgttcgacttcagcacccgtatagtctcaacgcttcacgcaacaatcgctgtcactttagcaactctctcgattcaagattggtcttgtcctgtttgtcccattgcttctacatcgtctctccggcagatggaaacgttggcgttttcattgtcgtacatgatctacgatctcatttgtagccactttgatcaagtccttagcattgataatgcggttcatcattctgtttgcattcttggttttgtagctggacttttctaccaaaagtgtggatccgagatggtggcagcaatatggataacagagatctcaagtccgtttcttcacctcagggagattcttaaagagattggttgtagagacaccgacctaaatcttgcagccgatgtgttttttgcaacaattttctcggtggcccgaatggtgggtggaccttacctagtttacgtaacaataccagctgataatcccatcctcatcaaggtaatggggttgggattacaacttgtgagcgcgttctataaattactcaaaatgatgagatacaaatttattaaacgatcaatgtccaccaaaaaatcgacgtag

SEQ ID NO: 71704 - protein, 229 aa, Arabidopsis thaliana
  peptide (1)..(229): Ceres Seq. ID no. 4806278
MEEEYIRIISITTIRIISWGLIFILVRRIFSSYSFDFSTRIVSTLHATIAVTLATLSIQDWSCPVCPIASTSSLRQMETLAFSLSYMIYDLICSHFDQVLSIDNAVHHSVCILGFVAGLFYQKCGSEMVAAIWITEISSPFLHLREILKEIGCRDTDLNLAADVFFATIFSVARMVGGPYLVYVTIPADNPILIKVMGLGLQLVSAFYKLLKMMRYKFIKRSMSTKKST

SEQ ID NO: 71705 - protein, 153 aa, Arabidopsis thaliana
  peptide (1)..(153): Ceres Seq. ID no. 4806279
METLAFSLSYMIYDLICSHFDQVLSIDNAVHHSVCILGFVAGLFYQKCGSEMVAAIWITEISSPFLHLREILKEIGCRDTDLNLAADVFFATIFSVARMVGGPYLVYVTIPADNPILIKVMGLGLQLVSAFYKLLKMMRYKFIKRSMSTKKST

SEQ ID NO: 71706 - protein, 143 aa, Arabidopsis thaliana
  peptide (1)..(143): Ceres Seq. ID no. 4806280
MIYDLICSHFDQVLSIDNAVHHSVCILGFVAGLFYQKCGSEMVAAIWITEISSPFLHLREILKEIGCRDTDLNLAADVFFATIFSVARMVGGPYLVYVTIPADNPILIKVMGLGLQLVSAFYKLLKMMRYKFIKRSMSTKKST

SEQ ID NO: 71707 - DNA, 1098 bp, Arabidopsis thaliana
  misc_feature (1)..(1098): Ceres Seq. ID no. 4807438
  misc_feature (1)..(1098): Ortholog of  Ceres SEQ ID NO 13597931 as cited in SEQ ID NO 64485
atgagtatcatcgcaggctcctacgagagattcatttggggtttcaagcttaaacccacgaagcacgacgccgaatctcaaaccctaactctctcccctctcttctcctacccttcccacatctccccaatcaccaccgtcgcttgttccggtcccgccgcagcttccggcggctccgacgatacaatccacctctacgaccttccctccgcttcttccctcggctctctccttgaccacaatcacgcagcttcaatcaccgctctctccttctacacaccttcttcactctccttccctcgtaatctaatctccgccgccgcagatggctccgttgctatattcgatactgatccttttgttttgcttaagtcgtttcgtcctcataagaaagcggttaatgatttagcgattcatccttcagggaagcttgctttagctgtttatcgtgatgagttctttgcgatgttgaatttagttagaggaaagaggagtttttgttgtaggttaggtcatgaagctagtcttgtgaaatttgatcctagtggtgaaaggttttacatggttgtgagtaataaagttggagttcatcagtctgaagatgctaagcttcttcttgagctcgagaatccgagccgcaagcgtattctctgtgctactcctggagaggttgtgtttcttactctttggaacccacaattaagattccaccttggaaccttaaaagagagtggaactctgttcacaggtggtgaggatcgggctataacagcttgggatacaaatagtgggaagcttgcatattccatagaagatgctcacccagctcgaatcaaaggtattgttgtgcttaccaggaatgatagtgacggctccttggaagatccatacttgattggttctgcatcgtctgatgggatcatacgtgtttgggacgtgcgaatggcggctaaagaaaatacaaaaccattagccgagacaaatactaaatcaaggcttacttgtcttgccgggtcagctcttaaatctatgagacggccacagattggaaagcaggaacctcagaaggtagacgaagagcatgaggactcagaataa

SEQ ID NO: 71708 - protein, 365 aa, Arabidopsis thaliana
  peptide (1)..(365): Ceres Seq. ID no. 4807439
MSIIAGSYERFIWGFKLKPTKHDAESQTLTLSPLFSYPSHISPITTVACSGPAAASGGSDDTIHLYDLPSASSLGSLLDHNHAASITALSFYTPSSLSFPRNLISAAADGSVAIFDTDPFVLLKSFRPHKKAVNDLAIHPSGKLALAVYRDEFFAMLNLVRGKRSFCCRLGHEASLVKFDPSGERFYMVVSNKVGVHQSEDAKLLLELENPSRKRILCATPGEVVFLTLWNPQLRFHLGTLKESGTLFTGGEDRAITAWDTNSGKLAYSIEDAHPARIKGIVVLTRNDSDGSLEDPYLIGSASSDGIIRVWDVRMAAKENTKPLAETNTKSRLTCLAGSALKSMRRPQIGKQEPQKVDEEHEDSE

SEQ ID NO: 71709 - protein, 210 aa, Arabidopsis thaliana
  peptide (1)..(210): Ceres Seq. ID no. 4807440
MLNLVRGKRSFCCRLGHEASLVKFDPSGERFYMVVSNKVGVHQSEDAKLLLELENPSRKRILCATPGEVVFLTLWNPQLRFHLGTLKESGTLFTGGEDRAITAWDTNSGKLAYSIEDAHPARIKGIVVLTRNDSDGSLEDPYLIGSASSDGIIRVWDVRMAAKENTKPLAETNTKSRLTCLAGSALKSMRRPQIGKQEPQKVDEEHEDSE

SEQ ID NO: 71710 - DNA, 2343 bp, Arabidopsis thaliana
  misc_feature (1)..(2343): Ceres Seq. ID no. 4807824
  misc_feature (1)..(2343): Ortholog of  Ceres SEQ ID NO 13657677 as cited in SEQ ID NO 66119
atgaaaccacagatgttctttcgatcagtcattcagttctattcaaagccgtcatggatgcaacgttcctactcttccggtaacgccgaattcaatatctccggcgaggtcatcagcattctagctaagaagaaacctatagagcctgctttggagccgcttgttccgtttctctcgaagaatatcatcacatcggtaatcaaagatgaggtcaatagacaattaggattccgtttttttatatgggcgtcgagaagagagcgtctcaggagccgagagtcttttggtttggtcatcgatatgctctctgaagataatggttgcgatctatattggcagacattggaggagcttaaatctggtggcgtctctgtcgattcttattgcttctgtgttttgatctctgcttatgctaagatgggtatggcggaaaaagcagtggaatcgtttggaaggatgaaggagtttgattgcagacccgatgtgttcacgtacaacgtgatattgcgagtcatgatgcgagaggaggtcttctttatgctggcttttgctgtgtacaatgaaatgctcaagtgcaattgttccccaaatctatacacgtttggtatcttgatggatggattgtataagaaagggagaacgagtgatgcacagaagatgttcgacgatatgaccggtagaggaatttcgcctaacagagttacctataccattctcatttcaggtttgtgtcagaggggaagtgctgacgatgcacgaaagctattctacgagatgcaaacgagcggtaactatcctgattccgtcgcacacaatgctttgcttgatgggttttgtaaattgggtcggatggttgaagcatttgagctgttgcggctttttgagaaagatggttttgtgcttggtcttcgaggttatagcagtttaatcgatggattgttcagagctaggagatacactcaggcatttgagctgtatgcaaatatgctgaagaagaatattaaacctgacatcattttgtacacgatattgattcaagggttatctaaagccggtaagattgaggatgcattgaagctgttaagcagcatgccaagtaagggcattagcccagatacctactgttacaatgctgttataaaggctctatgtgggaggggacttttggaagagggtcggtccctccaactcgaaatgtcagaaacggaatccttccctgatgcgtgcacacacacaattcttatctgtagtatgtgcaggaatgggctggttagggaagctgaagaaatttttacggagattgagaagagtggttgttctccttcggttgctacgttcaatgctttaattgatggactgtgcaagtccggtgagctcaaggaagccaggttattgttgcataaaatggaggtcgggagacctgcttccttgtttcttaggctttcgcacagtggaaaccggagttttgacaccatggttgaatccggttcgattctcaaggcatacagggatcttgcacattttgctgataccgggagttcgccagacattgtttcttacaatgttcttataaatgggttctgcagagcaggagacattgacggtgctctcaagcttctcaatgtgcttcaactaaagggattatcccctgatagcgtcacttacaacactctcatcaatggacttcatagagtcggcagagaagaagaagcttttaaactcttttacgctaaagatgattttagacacagtcccgcggtttacagatcgctcatgacatggtcatgtcggaaaagaaaagtcttggtggcttttaatctatggatgaaataccttaagaagatatcttgtctggatgatgaaacagctaatgagattgaacaatgtttcaaggaaggggaaaccgagagagctttaagacgacttattgaattagataccagaaaagacgagttaactttagggccttacacgatatggcttatcgggttatgccaatcagggagatttcacgaggccttgatggtgttttcggttttaagggagaagaagatccttgtaacacctccgagctgtgtcaaactgattcatggactctgcaaaagagaacaacttgatgctgcaatagaggtgttcttatacactctagataacaacttcaagctgatgcctagagtttgcaactacctcctaagctccctcctggaatcaacagaaaagatggagattgtttcgcaacttacaaacagaatggaacgtgcagggtacaatgttgactcgatgcttcgattcgagattttgaaatatcatagacatagaaagcaggtgctgatagatctttag

SEQ ID NO: 71711 - protein, 780 aa, Arabidopsis thaliana
  peptide (1)..(780): Ceres Seq. ID no. 4807825
MKPQMFFRSVIQFYSKPSWMQRSYSSGNAEFNISGEVISILAKKKPIEPALEPLVPFLSKNIITSVIKDEVNRQLGFRFFIWASRRERLRSRESFGLVIDMLSEDNGCDLYWQTLEELKSGGVSVDSYCFCVLISAYAKMGMAEKAVESFGRMKEFDCRPDVFTYNVILRVMMREEVFFMLAFAVYNEMLKCNCSPNLYTFGILMDGLYKKGRTSDAQKMFDDMTGRGISPNRVTYTILISGLCQRGSADDARKLFYEMQTSGNYPDSVAHNALLDGFCKLGRMVEAFELLRLFEKDGFVLGLRGYSSLIDGLFRARRYTQAFELYANMLKKNIKPDIILYTILIQGLSKAGKIEDALKLLSSMPSKGISPDTYCYNAVIKALCGRGLLEEGRSLQLEMSETESFPDACTHTILICSMCRNGLVREAEEIFTEIEKSGCSPSVATFNALIDGLCKSGELKEARLLLHKMEVGRPASLFLRLSHSGNRSFDTMVESGSILKAYRDLAHFADTGSSPDIVSYNVLINGFCRAGDIDGALKLLNVLQLKGLSPDSVTYNTLINGLHRVGREEEAFKLFYAKDDFRHSPAVYRSLMTWSCRKRKVLVAFNLWMKYLKKISCLDDETANEIEQCFKEGETERALRRLIELDTRKDELTLGPYTIWLIGLCQSGRFHEALMVFSVLREKKILVTPPSCVKLIHGLCKREQLDAAIEVFLYTLDNNFKLMPRVCNYLLSSLLESTEKMEIVSQLTNRMERAGYNVDSMLRFEILKYHRHRKQVLIDL

SEQ ID NO: 71712 - protein, 776 aa, Arabidopsis thaliana
  peptide (1)..(776): Ceres Seq. ID no. 4807826
MFFRSVIQFYSKPSWMQRSYSSGNAEFNISGEVISILAKKKPIEPALEPLVPFLSKNIITSVIKDEVNRQLGFRFFIWASRRERLRSRESFGLVIDMLSEDNGCDLYWQTLEELKSGGVSVDSYCFCVLISAYAKMGMAEKAVESFGRMKEFDCRPDVFTYNVILRVMMREEVFFMLAFAVYNEMLKCNCSPNLYTFGILMDGLYKKGRTSDAQKMFDDMTGRGISPNRVTYTILISGLCQRGSADDARKLFYEMQTSGNYPDSVAHNALLDGFCKLGRMVEAFELLRLFEKDGFVLGLRGYSSLIDGLFRARRYTQAFELYANMLKKNIKPDIILYTILIQGLSKAGKIEDALKLLSSMPSKGISPDTYCYNAVIKALCGRGLLEEGRSLQLEMSETESFPDACTHTILICSMCRNGLVREAEEIFTEIEKSGCSPSVATFNALIDGLCKSGELKEARLLLHKMEVGRPASLFLRLSHSGNRSFDTMVESGSILKAYRDLAHFADTGSSPDIVSYNVLINGFCRAGDIDGALKLLNVLQLKGLSPDSVTYNTLINGLHRVGREEEAFKLFYAKDDFRHSPAVYRSLMTWSCRKRKVLVAFNLWMKYLKKISCLDDETANEIEQCFKEGETERALRRLIELDTRKDELTLGPYTIWLIGLCQSGRFHEALMVFSVLREKKILVTPPSCVKLIHGLCKREQLDAAIEVFLYTLDNNFKLMPRVCNYLLSSLLESTEKMEIVSQLTNRMERAGYNVDSMLRFEILKYHRHRKQVLIDL

SEQ ID NO: 71713 - protein, 761 aa, Arabidopsis thaliana
  peptide (1)..(761): Ceres Seq. ID no. 4807827
MQRSYSSGNAEFNISGEVISILAKKKPIEPALEPLVPFLSKNIITSVIKDEVNRQLGFRFFIWASRRERLRSRESFGLVIDMLSEDNGCDLYWQTLEELKSGGVSVDSYCFCVLISAYAKMGMAEKAVESFGRMKEFDCRPDVFTYNVILRVMMREEVFFMLAFAVYNEMLKCNCSPNLYTFGILMDGLYKKGRTSDAQKMFDDMTGRGISPNRVTYTILISGLCQRGSADDARKLFYEMQTSGNYPDSVAHNALLDGFCKLGRMVEAFELLRLFEKDGFVLGLRGYSSLIDGLFRARRYTQAFELYANMLKKNIKPDIILYTILIQGLSKAGKIEDALKLLSSMPSKGISPDTYCYNAVIKALCGRGLLEEGRSLQLEMSETESFPDACTHTILICSMCRNGLVREAEEIFTEIEKSGCSPSVATFNALIDGLCKSGELKEARLLLHKMEVGRPASLFLRLSHSGNRSFDTMVESGSILKAYRDLAHFADTGSSPDIVSYNVLINGFCRAGDIDGALKLLNVLQLKGLSPDSVTYNTLINGLHRVGREEEAFKLFYAKDDFRHSPAVYRSLMTWSCRKRKVLVAFNLWMKYLKKISCLDDETANEIEQCFKEGETERALRRLIELDTRKDELTLGPYTIWLIGLCQSGRFHEALMVFSVLREKKILVTPPSCVKLIHGLCKREQLDAAIEVFLYTLDNNFKLMPRVCNYLLSSLLESTEKMEIVSQLTNRMERAGYNVDSMLRFEILKYHRHRKQVLIDL

SEQ ID NO: 71714 - DNA, 858 bp, Arabidopsis thaliana
  misc_feature (1)..(858): Ceres Seq. ID no. 4808307
  misc_feature (1)..(858): Ortholog of  Ceres SEQ ID NO 13638917 as cited in SEQ ID NO 56018
  misc_feature (1)..(858): Ortholog of  Ceres SEQ ID NO 13663116 as cited in SEQ ID NO 60731
  misc_feature (1)..(858): Ortholog of  Ceres SEQ ID NO 14316029 as cited in SEQ ID NO 67234
atggaacaatactgggctttatataaagaactaactctctctcatctccgtctgttatactgggaacggactcgacggagcatagtgaacgggaaaataactgtcaagcgagcgagagagaaagagaaatcagaaatggtggttatggattctccagtttcggggagaatggctgatcagaacatcgatcctaacaccacgacgagccctagtcctatagagaagcatgtttcggcgattaaggctatctccggcgacgagaaagctccgtcgaaggagaaaaagaactacgcgtcgaagaaatcaactaccgtaatccagaaatcgcactgtttccagaattcttggacattttggttcgataatccttcctccaaatcgaatcaagtcatatggggaagctctttgagatctttgtatacattcgctaccatcgaagagttctggagtctttacaataacattcatcctccaaccaagtgggtgtcagggtcggatctctactgcttcaaagataagattgaaccaaaatgggaagatcctatctgtgccaatggaggaaaatggactatgtttttccctagagctacactagaatctaattggcttaacacgttacttgcgttggttggtgagcaatttgaccaaggagatgagatctgtggagcagttttgaacttcagaacgagaggggacaggatctctctatggacaaagaaagctgcaaatgaggaggctcagctaagcattgggaagcagtggaaggaacttcttggctacaatgacacaatcggatttatagttcatgaggatgcaaagactcttgatcgtgatgctaaacgtcgatatactgtatga

SEQ ID NO: 71715 - protein, 285 aa, Arabidopsis thaliana
  peptide (1)..(285): Ceres Seq. ID no. 4808308
MEQYWALYKELTLSHLRLLYWERTRRSIVNGKITVKRAREKEKSEMVVMDSPVSGRMADQNIDPNTTTSPSPIEKHVSAIKAISGDEKAPSKEKKNYASKKSTTVIQKSHCFQNSWTFWFDNPSSKSNQVIWGSSLRSLYTFATIEEFWSLYNNIHPPTKWVSGSDLYCFKDKIEPKWEDPICANGGKWTMFFPRATLESNWLNTLLALVGEQFDQGDEICGAVLNFRTRGDRISLWTKKAANEEAQLSIGKQWKELLGYNDTIGFIVHEDAKTLDRDAKRRYTV

SEQ ID NO: 71716 - protein, 240 aa, Arabidopsis thaliana
  peptide (1)..(240): Ceres Seq. ID no. 4808309
MVVMDSPVSGRMADQNIDPNTTTSPSPIEKHVSAIKAISGDEKAPSKEKKNYASKKSTTVIQKSHCFQNSWTFWFDNPSSKSNQVIWGSSLRSLYTFATIEEFWSLYNNIHPPTKWVSGSDLYCFKDKIEPKWEDPICANGGKWTMFFPRATLESNWLNTLLALVGEQFDQGDEICGAVLNFRTRGDRISLWTKKAANEEAQLSIGKQWKELLGYNDTIGFIVHEDAKTLDRDAKRRYTV

SEQ ID NO: 71717 - protein, 237 aa, Arabidopsis thaliana
  peptide (1)..(237): Ceres Seq. ID no. 4808310
MDSPVSGRMADQNIDPNTTTSPSPIEKHVSAIKAISGDEKAPSKEKKNYASKKSTTVIQKSHCFQNSWTFWFDNPSSKSNQVIWGSSLRSLYTFATIEEFWSLYNNIHPPTKWVSGSDLYCFKDKIEPKWEDPICANGGKWTMFFPRATLESNWLNTLLALVGEQFDQGDEICGAVLNFRTRGDRISLWTKKAANEEAQLSIGKQWKELLGYNDTIGFIVHEDAKTLDRDAKRRYTV

SEQ ID NO: 71718 - DNA, 936 bp, Arabidopsis thaliana
  misc_feature (1)..(936): Ceres Seq. ID no. 4808982
  misc_feature (1)..(936): Ortholog of  Ceres SEQ ID NO 14314343 as cited in SEQ ID NO 57301
atgggatcatttttaggacatgttttgccaggttttgccttcgtagcacttggcttatggcacttattcaacaacataaaactcttttgtctccatccaaacacattcagttcatcaacatggttcccaatttcaaagctcagacacttagagctctacttaatcatgctatcttcaacagcctccatatccatggagctcttcattggacctagaagacaccatccctttgacgtcgatggtaccatcccatcgaaccacctccacaacttcgaacattcttccatctccatgtccttcttagtctatgccgttttggcattagtcctggatcgagcacggcctagagccgccgcttctgaggggctaaccatgctagctgcagccgctgccttcagtcaacagctacttctctttcattttcactctaccgaccacatgggcgttgagggacaatatcatgtgattctacaagtcgttatcttcgtctctctccttaccacaatcatgggtattttcttgcccaagagttttctggtgagccttgtgagatcttcaagcatagcctttcaaggcgtgtggctcattgtgattggttgcatgctttacacaccgagtttgatccccaagggatgttatattcacgatgaaggaagacacataatagttaagtgttccaccgaagaagctcttcacagagctaagtcgttggtcaacctcgaattcagttggctatttgttacaaacacactatttgttgtcacactatatttgattctcgatcgtgtttacggtgaaaacgtagagtactctagtctaaccaccaataatcaaacataccaagatgatgaagaacaacacttcgaatcgaagtcgactcagaaaacaagttttgtccaaatgggtaaactcgttggacatgggcagaaaatgtga

SEQ ID NO: 71719 - protein, 311 aa, Arabidopsis thaliana
  peptide (1)..(311): Ceres Seq. ID no. 4808983
MGSFLGHVLPGFAFVALGLWHLFNNIKLFCLHPNTFSSSTWFPISKLRHLELYLIMLSSTASISMELFIGPRRHHPFDVDGTIPSNHLHNFEHSSISMSFLVYAVLALVLDRARPRAAASEGLTMLAAAAAFSQQLLLFHFHSTDHMGVEGQYHVILQVVIFVSLLTTIMGIFLPKSFLVSLVRSSSIAFQGVWLIVIGCMLYTPSLIPKGCYIHDEGRHIIVKCSTEEALHRAKSLVNLEFSWLFVTNTLFVVTLYLILDRVYGENVEYSSLTTNNQTYQDDEEQHFESKSTQKTSFVQMGKLVGHGQKM

SEQ ID NO: 71720 - protein, 256 aa, Arabidopsis thaliana
  peptide (1)..(256): Ceres Seq. ID no. 4808984
MLSSTASISMELFIGPRRHHPFDVDGTIPSNHLHNFEHSSISMSFLVYAVLALVLDRARPRAAASEGLTMLAAAAAFSQQLLLFHFHSTDHMGVEGQYHVILQVVIFVSLLTTIMGIFLPKSFLVSLVRSSSIAFQGVWLIVIGCMLYTPSLIPKGCYIHDEGRHIIVKCSTEEALHRAKSLVNLEFSWLFVTNTLFVVTLYLILDRVYGENVEYSSLTTNNQTYQDDEEQHFESKSTQKTSFVQMGKLVGHGQKM

SEQ ID NO: 71721 - protein, 247 aa, Arabidopsis thaliana
  peptide (1)..(247): Ceres Seq. ID no. 4808985
MELFIGPRRHHPFDVDGTIPSNHLHNFEHSSISMSFLVYAVLALVLDRARPRAAASEGLTMLAAAAAFSQQLLLFHFHSTDHMGVEGQYHVILQVVIFVSLLTTIMGIFLPKSFLVSLVRSSSIAFQGVWLIVIGCMLYTPSLIPKGCYIHDEGRHIIVKCSTEEALHRAKSLVNLEFSWLFVTNTLFVVTLYLILDRVYGENVEYSSLTTNNQTYQDDEEQHFESKSTQKTSFVQMGKLVGHGQKM

SEQ ID NO: 71722 - DNA, 2079 bp, Arabidopsis thaliana
  misc_feature (1)..(2079): Ceres Seq. ID no. 4809107
  misc_feature (1)..(2079): Ortholog of  Ceres SEQ ID NO 13659394 as cited in SEQ ID NO 67049
atggcaaaccggaatggtgaaccgggtttacagcaactctcaagtctgtttatccagcaacttcgaggtcgttcttcagtagtctctgttcgtgatgataggatgttggcaggttgttcgagttcatcattgttgtcgcctactcgaagattgaggagtgaagcagtagcagcaacatcagcaacagtatcagcgcattttcccatgaacacacagagattggacttaccatgcagtagtagcttctctcgcaaggaaactccttctagcagaccacttggaagaagcatctctcttgacaacagcaacaacaacaacaacaaaccgatcgagcgcaagacgaagaccagtggttgttcgcttaaacagaacataaagcttccacctttggcaacaacaagaggaaatggagaagggttttcttggaacaacgacaacaacaacagagggaagagtttgaagagattagctgaggaggacgagtcttgtttgagcagagcgaagaggacaaaatgcgaaaacgaaggtggtttctggtttgagcatttcactggccaggattcttcttcaccagcattacctttttctttgacttgttcaggtgatgatgaggaaaaggtttgctttgtgccaagtgaagtcatttctcagcctttaccaaactgggttgattcggtgattacggagctagctggtataggcgataaggacgttgagagtagccttcctgcagcagttaaggaagcatctggaggatcatctacaagcgcatcatccgagagtcgtagcttaagccatagagtaccagaacctacaaatggctcaaggaatccgtactcacaccgcggtgcaacagaggaaaggaccaccggaaacatcaacaacaacaacaacaggaacgatttgcagagggatttcgagcttgtcaatttgcttacgggatgcttagacgcgatcagatcaagaaacatagcagcgattaaccatttcattgcaagaaccggtgatcttgcttctcctagaggaagaacaccaatgactcgcctcatagcttactacattgaagctttggctctaagagtggcgcgtatgtggcctcacatcttccacatcgcaccccctcgtgaattcgatagaactgtcgaagatgaatcaggaaatgcattgaggttcttgaatcaagtaaccccaattccaaagttcattcatttcacagccaacgagatgttactcagagcatttgaagggaaagagagagttcacattattgacttcgacatcaagcaaggtttacagtggcctagcttcttccaaagcttagcttcgagaataaatccaccacaccatgtacgaatcactgggatcggagaatcgaaacttgagctaaacgaaaccggagatcgcctccacggatttgcagaggcgatgaatcttcaattcgagtttcatcctgtagttgatagactcgaagacgttagactatggatgcttcacgtcaaagaaggtgaatcagtagctgtaaactgtgtcatgcagatgcacaagacactctacgatggaaccggagcagcaattagggattttttgggtttaatcagaagcacaaacccaatagctctcgttcttgcggagcaagaagcagaacacaactcagagcaacttgagacacgagtttgtaactcgctaaagtactattcagctatgtttgatgcaattcacacgaatcttgctacagatagcttaatgagagtcaaagttgaggagatgttgtttgggagagagatcaggaacattgttgcgtgtgaaggaagtcatagacaagagaggcatgtgggttttcgtcattggaggaggatgttggagcagttagggtttcggagtcttggagtctcggagagagaggttttgcagagtaagatgttgcttaggatgtacggatctgataatgaagggtttttcaatgtggagaggagcgatgaagacaacggcggtgaaggcggacgcggcggtggagttactttacggtggtcggagcagccactttatacgatctcggcttggactaccggagggaattaa

SEQ ID NO: 71723 - protein, 692 aa, Arabidopsis thaliana
  peptide (1)..(692): Ceres Seq. ID no. 4809108
MANRNGEPGLQQLSSLFIQQLRGRSSVVSVRDDRMLAGCSSSSLLSPTRRLRSEAVAATSATVSAHFPMNTQRLDLPCSSSFSRKETPSSRPLGRSISLDNSNNNNNKPIERKTKTSGCSLKQNIKLPPLATTRGNGEGFSWNNDNNNRGKSLKRLAEEDESCLSRAKRTKCENEGGFWFEHFTGQDSSSPALPFSLTCSGDDEEKVCFVPSEVISQPLPNWVDSVITELAGIGDKDVESSLPAAVKEASGGSSTSASSESRSLSHRVPEPTNGSRNPYSHRGATEERTTGNINNNNNRNDLQRDFELVNLLTGCLDAIRSRNIAAINHFIARTGDLASPRGRTPMTRLIAYYIEALALRVARMWPHIFHIAPPREFDRTVEDESGNALRFLNQVTPIPKFIHFTANEMLLRAFEGKERVHIIDFDIKQGLQWPSFFQSLASRINPPHHVRITGIGESKLELNETGDRLHGFAEAMNLQFEFHPVVDRLEDVRLWMLHVKEGESVAVNCVMQMHKTLYDGTGAAIRDFLGLIRSTNPIALVLAEQEAEHNSEQLETRVCNSLKYYSAMFDAIHTNLATDSLMRVKVEEMLFGREIRNIVACEGSHRQERHVGFRHWRRMLEQLGFRSLGVSEREVLQSKMLLRMYGSDNEGFFNVERSDEDNGGEGGRGGGVTLRWSEQPLYTISAWTTGGN

SEQ ID NO: 71724 - protein, 658 aa, Arabidopsis thaliana
  peptide (1)..(658): Ceres Seq. ID no. 4809109
MLAGCSSSSLLSPTRRLRSEAVAATSATVSAHFPMNTQRLDLPCSSSFSRKETPSSRPLGRSISLDNSNNNNNKPIERKTKTSGCSLKQNIKLPPLATTRGNGEGFSWNNDNNNRGKSLKRLAEEDESCLSRAKRTKCENEGGFWFEHFTGQDSSSPALPFSLTCSGDDEEKVCFVPSEVISQPLPNWVDSVITELAGIGDKDVESSLPAAVKEASGGSSTSASSESRSLSHRVPEPTNGSRNPYSHRGATEERTTGNINNNNNRNDLQRDFELVNLLTGCLDAIRSRNIAAINHFIARTGDLASPRGRTPMTRLIAYYIEALALRVARMWPHIFHIAPPREFDRTVEDESGNALRFLNQVTPIPKFIHFTANEMLLRAFEGKERVHIIDFDIKQGLQWPSFFQSLASRINPPHHVRITGIGESKLELNETGDRLHGFAEAMNLQFEFHPVVDRLEDVRLWMLHVKEGESVAVNCVMQMHKTLYDGTGAAIRDFLGLIRSTNPIALVLAEQEAEHNSEQLETRVCNSLKYYSAMFDAIHTNLATDSLMRVKVEEMLFGREIRNIVACEGSHRQERHVGFRHWRRMLEQLGFRSLGVSEREVLQSKMLLRMYGSDNEGFFNVERSDEDNGGEGGRGGGVTLRWSEQPLYTISAWTTGGN

SEQ ID NO: 71725 - protein, 624 aa, Arabidopsis thaliana
  peptide (1)..(624): Ceres Seq. ID no. 4809110
MNTQRLDLPCSSSFSRKETPSSRPLGRSISLDNSNNNNNKPIERKTKTSGCSLKQNIKLPPLATTRGNGEGFSWNNDNNNRGKSLKRLAEEDESCLSRAKRTKCENEGGFWFEHFTGQDSSSPALPFSLTCSGDDEEKVCFVPSEVISQPLPNWVDSVITELAGIGDKDVESSLPAAVKEASGGSSTSASSESRSLSHRVPEPTNGSRNPYSHRGATEERTTGNINNNNNRNDLQRDFELVNLLTGCLDAIRSRNIAAINHFIARTGDLASPRGRTPMTRLIAYYIEALALRVARMWPHIFHIAPPREFDRTVEDESGNALRFLNQVTPIPKFIHFTANEMLLRAFEGKERVHIIDFDIKQGLQWPSFFQSLASRINPPHHVRITGIGESKLELNETGDRLHGFAEAMNLQFEFHPVVDRLEDVRLWMLHVKEGESVAVNCVMQMHKTLYDGTGAAIRDFLGLIRSTNPIALVLAEQEAEHNSEQLETRVCNSLKYYSAMFDAIHTNLATDSLMRVKVEEMLFGREIRNIVACEGSHRQERHVGFRHWRRMLEQLGFRSLGVSEREVLQSKMLLRMYGSDNEGFFNVERSDEDNGGEGGRGGGVTLRWSEQPLYTISAWTTGGN

SEQ ID NO: 71726 - DNA, 1272 bp, Arabidopsis thaliana
  misc_feature (1)..(1272): Ceres Seq. ID no. 4809357
  misc_feature (1)..(1272): Ortholog of  Ceres SEQ ID NO 14307022 as cited in SEQ ID NO 54437
  misc_feature (1)..(1272): Ortholog of  Ceres SEQ ID NO 14301932 as cited in SEQ ID NO 67747
atgaagaatccagaaaaacccttacttctgtttctaattttagcttcaagcttagcatcaatggcgactgcaaaatccacaatagagccttgctccagtaaagacacttgtaactcattgctaggctacactctctacaccgacctcaaagtcacagaagtcgcttctctcttccaagtagacccagtttcaatgcttttgtctaactccattgatatctcttacccagacgtcgagaaccatgtccttcccgctaagctcttcctcaagatcccaatcacttgctcctgtgtcgacggaatcagaaaatccctctcgactcattacaagactcgtacttctgacacactaggatcgattgctgactctgtttacggtggtctggtctctccggagcagattcaggtcgcgaattcagagactgacctttcggttctcgatgtaggtacaaagcttgtgattccattgccttgcgcttgcttcaatggtaccgatgaatctcttccggcgctttatctatcttacgttgtgagaggaatcgacactatggctggaatcgcaaagagattctcgacctctgttactgatttaacaaacgtgaatgctatgggagctcctgatatcaatcctggtgatatcctcgctgtcccattgctagcttgtagttcaaatttccccaaatacgctacggattacggattaatcattccaaatggaagctatgctctcactgcaggccactgtgtacaatgcagctgtgttctcggaagccgaagtatgtattgtgagcctgcttctatatcagtctcttgttccagtatgagatgtagaaacagcaacttcatgcttggtaacattacttcgcagcagagtagctccggttgtaaacttactacttgtagttacaacggtttcgctagcggcactatcttgaccacgttgtccatgtctcttcaacctcgatgccctggaccgcaacaattagcaccgcttatagccccgcctgataatgttccaaaggaactgatgtatctaccttcaccttcaccttcgccatcaccagagtttgatgatattgctggtggaggatcatctatagccgcagtccccgcggcttcacctggaggagctacggtttcttcaagcaattcaatcccgggtaatccagctaatggtccaggcggaagtatttctatagcttcttgtccattgagctattactcattcattgcgttactcatccccattggttcttgcttttttgttttctaa

SEQ ID NO: 71727 - protein, 423 aa, Arabidopsis thaliana
  peptide (1)..(423): Ceres Seq. ID no. 4809358
MKNPEKPLLLFLILASSLASMATAKSTIEPCSSKDTCNSLLGYTLYTDLKVTEVASLFQVDPVSMLLSNSIDISYPDVENHVLPAKLFLKIPITCSCVDGIRKSLSTHYKTRTSDTLGSIADSVYGGLVSPEQIQVANSETDLSVLDVGTKLVIPLPCACFNGTDESLPALYLSYVVRGIDTMAGIAKRFSTSVTDLTNVNAMGAPDINPGDILAVPLLACSSNFPKYATDYGLIIPNGSYALTAGHCVQCSCVLGSRSMYCEPASISVSCSSMRCRNSNFMLGNITSQQSSSGCKLTTCSYNGFASGTILTTLSMSLQPRCPGPQQLAPLIAPPDNVPKELMYLPSPSPSPSPEFDDIAGGGSSIAAVPAASPGGATVSSSNSIPGNPANGPGGSISIASCPLSYYSFIALLIPIGSCFFVF

SEQ ID NO: 71728 - protein, 403 aa, Arabidopsis thaliana
  peptide (1)..(403): Ceres Seq. ID no. 4809359
MATAKSTIEPCSSKDTCNSLLGYTLYTDLKVTEVASLFQVDPVSMLLSNSIDISYPDVENHVLPAKLFLKIPITCSCVDGIRKSLSTHYKTRTSDTLGSIADSVYGGLVSPEQIQVANSETDLSVLDVGTKLVIPLPCACFNGTDESLPALYLSYVVRGIDTMAGIAKRFSTSVTDLTNVNAMGAPDINPGDILAVPLLACSSNFPKYATDYGLIIPNGSYALTAGHCVQCSCVLGSRSMYCEPASISVSCSSMRCRNSNFMLGNITSQQSSSGCKLTTCSYNGFASGTILTTLSMSLQPRCPGPQQLAPLIAPPDNVPKELMYLPSPSPSPSPEFDDIAGGGSSIAAVPAASPGGATVSSSNSIPGNPANGPGGSISIASCPLSYYSFIALLIPIGSCFFVF

SEQ ID NO: 71729 - protein, 359 aa, Arabidopsis thaliana
  peptide (1)..(359): Ceres Seq. ID no. 4809360
MLLSNSIDISYPDVENHVLPAKLFLKIPITCSCVDGIRKSLSTHYKTRTSDTLGSIADSVYGGLVSPEQIQVANSETDLSVLDVGTKLVIPLPCACFNGTDESLPALYLSYVVRGIDTMAGIAKRFSTSVTDLTNVNAMGAPDINPGDILAVPLLACSSNFPKYATDYGLIIPNGSYALTAGHCVQCSCVLGSRSMYCEPASISVSCSSMRCRNSNFMLGNITSQQSSSGCKLTTCSYNGFASGTILTTLSMSLQPRCPGPQQLAPLIAPPDNVPKELMYLPSPSPSPSPEFDDIAGGGSSIAAVPAASPGGATVSSSNSIPGNPANGPGGSISIASCPLSYYSFIALLIPIGSCFFVF

SEQ ID NO: 71730 - DNA, 585 bp, Arabidopsis thaliana
  misc_feature (1)..(585): Ceres Seq. ID no. 4810231
  misc_feature (1)..(585): Ortholog of  Ceres SEQ ID NO 13661928 as cited in SEQ ID NO 61155
atggcgatcgttagccctaatttctgtgcaccgtaccctatcgagttgggaatcgtacggaaggtgatgactttaaccgatggtaacttcgccgtcacggacgttaacggcaatctccttttcaaagtcaaggaacctttgtttagcatcagcgacaaaaggattttattggacgcatacgatactccaatcttgactttgagagaaaataaggtgagcttgcatgataggtggctagtatatagagggaagagtacagaccaaagtgatctattatacacattgaaacgatcttcaatgattcaaataatgaagccaaaactagacatctttttggctcataataaagaaatgaagatttgcgacttccatgttaaaggaagttggatcgaccggtcttgtgtcgtctacgccggcaaatctgatgccattgttgctcagatgcacaagaaacatacggcacaaagcatattaattgggaagagtaatttttcggttactgtctatccgaatgttgactttgcttttatagtttctctcattgtaatcctcgatgacattaaccgagaagattcagaagactag

SEQ ID NO: 71731 - protein, 194 aa, Arabidopsis thaliana
  peptide (1)..(194): Ceres Seq. ID no. 4810232
MAIVSPNFCAPYPIELGIVRKVMTLTDGNFAVTDVNGNLLFKVKEPLFSISDKRILLDAYDTPILTLRENKVSLHDRWLVYRGKSTDQSDLLYTLKRSSMIQIMKPKLDIFLAHNKEMKICDFHVKGSWIDRSCVVYAGKSDAIVAQMHKKHTAQSILIGKSNFSVTVYPNVDFAFIVSLIVILDDINREDSED

SEQ ID NO: 71732 - protein, 172 aa, Arabidopsis thaliana
  peptide (1)..(172): Ceres Seq. ID no. 4810233
MTLTDGNFAVTDVNGNLLFKVKEPLFSISDKRILLDAYDTPILTLRENKVSLHDRWLVYRGKSTDQSDLLYTLKRSSMIQIMKPKLDIFLAHNKEMKICDFHVKGSWIDRSCVVYAGKSDAIVAQMHKKHTAQSILIGKSNFSVTVYPNVDFAFIVSLIVILDDINREDSED

SEQ ID NO: 71733 - DNA, 1485 bp, Arabidopsis thaliana
  misc_feature (1)..(1485): Ceres Seq. ID no. 4810479
  misc_feature (1)..(1485): Ortholog of  Ceres SEQ ID NO 13660287 as cited in SEQ ID NO 67316
atggaggagaggctattacgtgaaggatcagatgctgagggtcagagcaataatagggagagtatctatttgagaacgaaggtctggagtgaagtaaataaaatgtggagaatagcattaccttcttctttgttccgaatgacttcgtttgggagcatcattgtggctcaagccttcattggtcactcctctgagttgggtctagccgcttacgcactcctccaaagcacattcatccgcttcctctacggtttaatgggcggtatgtcaagtgcaacggagacattatgcgggcaagcatacggtgcggaacaatatcacacaatggggatatatctacaacgttcatggatcgtggacatggccgtgaccactttgtttctaccgtttattgtacttgcgggtcccattctccgtctattaggccaaaacgtggagatcacaaagaccgttgatgagatatatccttggatgattccgtatgtatatagcttaattttcactatgactatacaaatgtacctccaagcacagatgaggaacgctattgtaggcgttctttcgacattgtccttggctcttgacctcgtggtcacatggtggtgcgtgagtgttatgggtatgggcattggtggtgctctcctcggacttaatgtgggctcttgggcaatggtattagccgagtttgtgtacatttttggtggatggtgtccttttacttggaccggatttagtattgctgcttttgttgacctaattcctatgctcaagctttccatttcttcaggcttcatgatctgcttagagtattggtacatgagcatccttgtcttaatggcggggtatacaaaagatgcgaaaatcgcaatctctgctttctcaatatgccaatacatatatacatgggaactcaacatatgccttggcttcttgggtgcggcatgcgtccgggtggctaacgagttggggaaaggagatgcacatgcagtgagattttcaataaaagtgatactcacaatatcaacattgatgggagtgatattctcagctctatgcttagctttttgtggtcgaatttcctatttgttttcgaatagcgacgaggtttcggatgcagtgaatgatttatcggtgatccttgctgtttcaatcttactcaacagcatacaacctatactctcaggtgtagcagttggggcagggatgcagagtatagtggcagttgtgaacttagcctcttattatgcaattggtattcctttgggtctcatccttacttatgttttccatcttggtgttaagggactatggtctggaatgttggctggaattgcgatccaaacaataatattatgttatataatttacaaaactgactgggaattagaggttaaaaggacatgtgaacgtatgaaagtgtggagcctgaagccatctaatgaagagtcgaatcccataataagagaagaaagtaggagcaagtga

SEQ ID NO: 71734 - protein, 494 aa, Arabidopsis thaliana
  peptide (1)..(494): Ceres Seq. ID no. 4810480
MEERLLREGSDAEGQSNNRESIYLRTKVWSEVNKMWRIALPSSLFRMTSFGSIIVAQAFIGHSSELGLAAYALLQSTFIRFLYGLMGGMSSATETLCGQAYGAEQYHTMGIYLQRSWIVDMAVTTLFLPFIVLAGPILRLLGQNVEITKTVDEIYPWMIPYVYSLIFTMTIQMYLQAQMRNAIVGVLSTLSLALDLVVTWWCVSVMGMGIGGALLGLNVGSWAMVLAEFVYIFGGWCPFTWTGFSIAAFVDLIPMLKLSISSGFMICLEYWYMSILVLMAGYTKDAKIAISAFSICQYIYTWELNICLGFLGAACVRVANELGKGDAHAVRFSIKVILTISTLMGVIFSALCLAFCGRISYLFSNSDEVSDAVNDLSVILAVSILLNSIQPILSGVAVGAGMQSIVAVVNLASYYAIGIPLGLILTYVFHLGVKGLWSGMLAGIAIQTIILCYIIYKTDWELEVKRTCERMKVWSLKPSNEESNPIIREESRSK

SEQ ID NO: 71735 - protein, 460 aa, Arabidopsis thaliana
  peptide (1)..(460): Ceres Seq. ID no. 4810481
MWRIALPSSLFRMTSFGSIIVAQAFIGHSSELGLAAYALLQSTFIRFLYGLMGGMSSATETLCGQAYGAEQYHTMGIYLQRSWIVDMAVTTLFLPFIVLAGPILRLLGQNVEITKTVDEIYPWMIPYVYSLIFTMTIQMYLQAQMRNAIVGVLSTLSLALDLVVTWWCVSVMGMGIGGALLGLNVGSWAMVLAEFVYIFGGWCPFTWTGFSIAAFVDLIPMLKLSISSGFMICLEYWYMSILVLMAGYTKDAKIAISAFSICQYIYTWELNICLGFLGAACVRVANELGKGDAHAVRFSIKVILTISTLMGVIFSALCLAFCGRISYLFSNSDEVSDAVNDLSVILAVSILLNSIQPILSGVAVGAGMQSIVAVVNLASYYAIGIPLGLILTYVFHLGVKGLWSGMLAGIAIQTIILCYIIYKTDWELEVKRTCERMKVWSLKPSNEESNPIIREESRSK

SEQ ID NO: 71736 - protein, 448 aa, Arabidopsis thaliana
  peptide (1)..(448): Ceres Seq. ID no. 4810482
MTSFGSIIVAQAFIGHSSELGLAAYALLQSTFIRFLYGLMGGMSSATETLCGQAYGAEQYHTMGIYLQRSWIVDMAVTTLFLPFIVLAGPILRLLGQNVEITKTVDEIYPWMIPYVYSLIFTMTIQMYLQAQMRNAIVGVLSTLSLALDLVVTWWCVSVMGMGIGGALLGLNVGSWAMVLAEFVYIFGGWCPFTWTGFSIAAFVDLIPMLKLSISSGFMICLEYWYMSILVLMAGYTKDAKIAISAFSICQYIYTWELNICLGFLGAACVRVANELGKGDAHAVRFSIKVILTISTLMGVIFSALCLAFCGRISYLFSNSDEVSDAVNDLSVILAVSILLNSIQPILSGVAVGAGMQSIVAVVNLASYYAIGIPLGLILTYVFHLGVKGLWSGMLAGIAIQTIILCYIIYKTDWELEVKRTCERMKVWSLKPSNEESNPIIREESRSK

SEQ ID NO: 71737 - DNA, 1692 bp, Arabidopsis thaliana
  misc_feature (1)..(1692): Ceres Seq. ID no. 4811190
  misc_feature (1)..(1692): Ortholog of  Ceres SEQ ID NO 12613725 as cited in SEQ ID NO 68196
atggatttagaacagaagacaagaggacttagcaagtcatgtgcccttctcatagtgattgcgggaatggagagatatgcattcaaaggagttgcatcaaacttagtgacatatctaacagatgtagtgaagatgagtaattcaagagcagccaaaactgttaacacttgggctggtttcacttctatgttgcctctcttctctgctcctttggctgatacttattgggacagattcttcaccatccttgcttcttcttccgtctactttgtgggactagtgggattgacatggacggcatttgctgggtcacgttcagctactaagactatctcttcttactttctctactcttcactatgtcttgtctcaatcggtttaggcgtcttaaacccttctcttcaagcctttggtgcagaccaactcgaccacgacctcgataagaatttcgatctttcctcgggtgatcaaaaggacgcgaaagctacccgaaagactcagtttttccaattgtggtactttggcgtctgcaccggcagccttatgggtgtcacagtcatggcttatattcaagacacttttggttgggttctcggtttcgccattcctggtatcgtgatattcctgtcgattttggtgttcatgtcgggttgtggaatttatgtttatgctccgggcgcccgtctgaagaagaaaacaactactacaccttttgagaagattcttaaattcattaaagggagagtagtgaagcagagaagcatatatacacttgcagatgagaaagatttggatgctatggagcttgagctagaggagaggcctctctgtaaatgtgagaccgaagacattgagactccttcaacaacctccaaaggattggaagatgacgagagctcgaaaacggttttctctggaattgataatgttaagttagtgattcgccttttccccatatggatgatgcttctcatgttcgcggttatcttccagctaccagcaacctttttcaccaaacaaggtgtgactatgaagagaaacattgggtccaacttcaaaatcccacctgcaaccctgcaaagcacgatcacattatcaatcatcctgcttatgccattatatgataagattttgatacctattaccaagagaatcaagaaaaacggtacaggtatctctgtgatggagagaatgggagtcggaatgtttctatccatcattgccattgttattgcggcaatagtcgaaaggaaaagactagccataagccaaaagatgaagactttacctgattatgatccagaaaccgtcccactgagcatcttctggctgctgcctcagtacatcctcttgggaatctcagatatattcacagtcgttgggatgcaagagtttttctacagtgaggttcctgtaagaatgagaacaatgggatttgctctctacacaagtgtttttggtgttggaagctttgtgagcgccgcactgatctcaattgtcgaggcttactcgagctcaacaggtgaccgacaaaactggtttgcagatgatatgtcggaagctcggcttgacaaatactactggcttcttgctcttacaagtacaataagctttgtagtctacatatttctatgcaagtttttcaagagtagcagtgatcaaggcgatgaaaaagaagaagcccctaaatga

SEQ ID NO: 71738 - protein, 563 aa, Arabidopsis thaliana
  peptide (1)..(563): Ceres Seq. ID no. 4811191
MDLEQKTRGLSKSCALLIVIAGMERYAFKGVASNLVTYLTDVVKMSNSRAAKTVNTWAGFTSMLPLFSAPLADTYWDRFFTILASSSVYFVGLVGLTWTAFAGSRSATKTISSYFLYSSLCLVSIGLGVLNPSLQAFGADQLDHDLDKNFDLSSGDQKDAKATRKTQFFQLWYFGVCTGSLMGVTVMAYIQDTFGWVLGFAIPGIVIFLSILVFMSGCGIYVYAPGARLKKKTTTTPFEKILKFIKGRVVKQRSIYTLADEKDLDAMELELEERPLCKCETEDIETPSTTSKGLEDDESSKTVFSGIDNVKLVIRLFPIWMMLLMFAVIFQLPATFFTKQGVTMKRNIGSNFKIPPATLQSTITLSIILLMPLYDKILIPITKRIKKNGTGISVMERMGVGMFLSIIAIVIAAIVERKRLAISQKMKTLPDYDPETVPLSIFWLLPQYILLGISDIFTVVGMQEFFYSEVPVRMRTMGFALYTSVFGVGSFVSAALISIVEAYSSSTGDRQNWFADDMSEARLDKYYWLLALTSTISFVVYIFLCKFFKSSSDQGDEKEEAPK

SEQ ID NO: 71739 - protein, 541 aa, Arabidopsis thaliana
  peptide (1)..(541): Ceres Seq. ID no. 4811192
MERYAFKGVASNLVTYLTDVVKMSNSRAAKTVNTWAGFTSMLPLFSAPLADTYWDRFFTILASSSVYFVGLVGLTWTAFAGSRSATKTISSYFLYSSLCLVSIGLGVLNPSLQAFGADQLDHDLDKNFDLSSGDQKDAKATRKTQFFQLWYFGVCTGSLMGVTVMAYIQDTFGWVLGFAIPGIVIFLSILVFMSGCGIYVYAPGARLKKKTTTTPFEKILKFIKGRVVKQRSIYTLADEKDLDAMELELEERPLCKCETEDIETPSTTSKGLEDDESSKTVFSGIDNVKLVIRLFPIWMMLLMFAVIFQLPATFFTKQGVTMKRNIGSNFKIPPATLQSTITLSIILLMPLYDKILIPITKRIKKNGTGISVMERMGVGMFLSIIAIVIAAIVERKRLAISQKMKTLPDYDPETVPLSIFWLLPQYILLGISDIFTVVGMQEFFYSEVPVRMRTMGFALYTSVFGVGSFVSAALISIVEAYSSSTGDRQNWFADDMSEARLDKYYWLLALTSTISFVVYIFLCKFFKSSSDQGDEKEEAPK

SEQ ID NO: 71740 - protein, 519 aa, Arabidopsis thaliana
  peptide (1)..(519): Ceres Seq. ID no. 4811193
MSNSRAAKTVNTWAGFTSMLPLFSAPLADTYWDRFFTILASSSVYFVGLVGLTWTAFAGSRSATKTISSYFLYSSLCLVSIGLGVLNPSLQAFGADQLDHDLDKNFDLSSGDQKDAKATRKTQFFQLWYFGVCTGSLMGVTVMAYIQDTFGWVLGFAIPGIVIFLSILVFMSGCGIYVYAPGARLKKKTTTTPFEKILKFIKGRVVKQRSIYTLADEKDLDAMELELEERPLCKCETEDIETPSTTSKGLEDDESSKTVFSGIDNVKLVIRLFPIWMMLLMFAVIFQLPATFFTKQGVTMKRNIGSNFKIPPATLQSTITLSIILLMPLYDKILIPITKRIKKNGTGISVMERMGVGMFLSIIAIVIAAIVERKRLAISQKMKTLPDYDPETVPLSIFWLLPQYILLGISDIFTVVGMQEFFYSEVPVRMRTMGFALYTSVFGVGSFVSAALISIVEAYSSSTGDRQNWFADDMSEARLDKYYWLLALTSTISFVVYIFLCKFFKSSSDQGDEKEEAPK

SEQ ID NO: 71741 - DNA, 915 bp, Arabidopsis thaliana
  misc_feature (1)..(915): Ceres Seq. ID no. 4811427
  misc_feature (1)..(915): Ortholog of  Ceres SEQ ID NO 12616212 as cited in SEQ ID NO 63390
atgatgaaaggaagcaaggcgaatctctctgccttagcggagaaatgcaaaactgtaatcgtttcgaactggcaagggtacctaaataccgtcaaacctgaagataaagctagtataatacatacttcaaagattaagtatgtgatgagaagaggaaagccatatctctgggtaccagaaagtgaaccacacaatgtcaacataatgtttgatgaacgtggatccttttctattgcccatccgtatcctggtccccttgcagctttattcaagtctataggaaagcttccagaaagggttgcttttactggagagattgttcctgttaaagagaaaagggttgatgcggtgaagaaatatgtcgaggaagctatacagtcagagatgaaagcgattagcgataccccaaattctgtccgtagtattttgaattcttccgatcagatgtatgcctcccggtgtgacagtcttagagccctgatcaatgatgcaaaggaaaaatacgttatctataagttcgttccaagctcatgtatgtttattgacccaaatggtacgaaagaaatagacttgaaggttttggaactgtcaaaaccagatccattagggacttggtcgacaaaacttgtggatggaatcaataagaacgaatcaagaagacgagctttgattcttttctgtttatattttcttgatataaacgcaagggatgcttatatggtatcagtggataggaaaggtttccacttgttggggaaggtaccgagtgaacaagaagctggagatgagtatcagtggagagagtttaggtttgagtttgaagaagaggtgaaagacgttgaagctttttgccaccaacttgtggaaatggaacaagaggttgtaagcaagtttactgaccataccggtttgtga

SEQ ID NO: 71742 - protein, 304 aa, Arabidopsis thaliana
  peptide (1)..(304): Ceres Seq. ID no. 4811428
MMKGSKANLSALAEKCKTVIVSNWQGYLNTVKPEDKASIIHTSKIKYVMRRGKPYLWVPESEPHNVNIMFDERGSFSIAHPYPGPLAALFKSIGKLPERVAFTGEIVPVKEKRVDAVKKYVEEAIQSEMKAISDTPNSVRSILNSSDQMYASRCDSLRALINDAKEKYVIYKFVPSSCMFIDPNGTKEIDLKVLELSKPDPLGTWSTKLVDGINKNESRRRALILFCLYFLDINARDAYMVSVDRKGFHLLGKVPSEQEAGDEYQWREFRFEFEEEVKDVEAFCHQLVEMEQEVVSKFTDHTGL

SEQ ID NO: 71743 - protein, 303 aa, Arabidopsis thaliana
  peptide (1)..(303): Ceres Seq. ID no. 4811429
MKGSKANLSALAEKCKTVIVSNWQGYLNTVKPEDKASIIHTSKIKYVMRRGKPYLWVPESEPHNVNIMFDERGSFSIAHPYPGPLAALFKSIGKLPERVAFTGEIVPVKEKRVDAVKKYVEEAIQSEMKAISDTPNSVRSILNSSDQMYASRCDSLRALINDAKEKYVIYKFVPSSCMFIDPNGTKEIDLKVLELSKPDPLGTWSTKLVDGINKNESRRRALILFCLYFLDINARDAYMVSVDRKGFHLLGKVPSEQEAGDEYQWREFRFEFEEEVKDVEAFCHQLVEMEQEVVSKFTDHTGL

SEQ ID NO: 71744 - protein, 256 aa, Arabidopsis thaliana
  peptide (1)..(256): Ceres Seq. ID no. 4811430
MRRGKPYLWVPESEPHNVNIMFDERGSFSIAHPYPGPLAALFKSIGKLPERVAFTGEIVPVKEKRVDAVKKYVEEAIQSEMKAISDTPNSVRSILNSSDQMYASRCDSLRALINDAKEKYVIYKFVPSSCMFIDPNGTKEIDLKVLELSKPDPLGTWSTKLVDGINKNESRRRALILFCLYFLDINARDAYMVSVDRKGFHLLGKVPSEQEAGDEYQWREFRFEFEEEVKDVEAFCHQLVEMEQEVVSKFTDHTGL

SEQ ID NO: 71745 - DNA, 387 bp, Arabidopsis thaliana
  misc_feature (1)..(387): Ceres Seq. ID no. 4811532
  misc_feature (1)..(387): Ortholog of  Ceres SEQ ID NO 15173990 as cited in SEQ ID NO 1070
  misc_feature (1)..(387): Ortholog of  Ceres SEQ ID NO 13594900 as cited in SEQ ID NO 52042
atgggaagactattcgtgatagacctcgaaggactggtttatagctgcaagtattgtcagacacatttcgcagttactaatgatattatctcaaagtcatttcactgcaaacacggaagggcttatcttttcgacaatgttgtcaatgtgacggttggagagaaggagcatcgcgtcatgataactggttggcacactgtagctgacatcttctgtgttagctgtggctctcttgtcggctggaaatacgaaatcgcttacgataagtctcagaaatacaaggaaggaaaattcatcttagaaaggtttaaggtgcttgggccctatggaggaggatacgacatgaaccagaacgagcctatgactggaagcgatgatgaagaataa

SEQ ID NO: 71746 - protein, 128 aa, Arabidopsis thaliana
  peptide (1)..(128): Ceres Seq. ID no. 4811533
MGRLFVIDLEGLVYSCKYCQTHFAVTNDIISKSFHCKHGRAYLFDNVVNVTVGEKEHRVMITGWHTVADIFCVSCGSLVGWKYEIAYDKSQKYKEGKFILERFKVLGPYGGGYDMNQNEPMTGSDDEE

SEQ ID NO: 71747 - protein, 69 aa, Arabidopsis thaliana
  peptide (1)..(69): Ceres Seq. ID no. 4811534
MITGWHTVADIFCVSCGSLVGWKYEIAYDKSQKYKEGKFILERFKVLGPYGGGYDMNQNEPMTGSDDEE

SEQ ID NO: 71748 - DNA, 1062 bp, Arabidopsis thaliana
  misc_feature (1)..(1062): Ceres Seq. ID no. 4811686
  misc_feature (1)..(1062): Ortholog of  Ceres SEQ ID NO 13586635 as cited in SEQ ID NO 14217
  misc_feature (1)..(1062): Ortholog of  Ceres SEQ ID NO 12616285 as cited in SEQ ID NO 63483
atggaaggaatcgatcatagaatggtgagtgtcaatggcataacaatgcacattgccgagaaaggtcccaaagaaggacctgtggtgcttctcctccatggattccctgatctctggtacacgtggcgtcaccagattagtgggttatcatctctaggttaccgcgctgtagctccagacctccgaggctacggagactctgattcgccggagtctttctccgagtacacgtgtcttaacgtcgttggggacctcgtagctcttctggacagtgttgctggaaatcaagagaaggtgtttctggtcggtcatgattggggagccattatcggatggtttctctgtttgtttcgacctgaaaagattaacggctttgtgtgtttgagtgtgccgtatagatcaagaaaccctaaagtcaagcccgttcaagggttcaaggctgtatttggagatgattactacatttgtagatttcaggaaccggggaagattgaaggagagattgcaagtgcagatccaagaatatttctgaggaacctcttcacagggaggacactcggtccgccgattttacctaaggataatccctttggggaaaaacctaaccctaatagcgaaaacattgaattgcctgaatggttttctaagaaagatctcgatttctatgtctccaaattcgagaaggcaggatttaccggtggattgaactactacagagccatggatctgaattgggagctcactgcaccatggaccggagctaagattcaagttccagtgaagttcatgacaggtgacttcgacatggtgtacaccacaccagggatgaaagagtacattcacggtggtggatttgctgcagatgttccaactcttcaagagatagtgatgctggtcacttcgttaaccaagagaaacctcaagaggtcactgctcacatcaatgacttcttcaccaagcttcgggacaacaacaaaagcttttagagttctcgtttggttctattatgttggctctcaaaacaagttggttcttgcatgtgttgtttcgacaagattttga

SEQ ID NO: 71749 - protein, 353 aa, Arabidopsis thaliana
  peptide (1)..(353): Ceres Seq. ID no. 4811687
MEGIDHRMVSVNGITMHIAEKGPKEGPVVLLLHGFPDLWYTWRHQISGLSSLGYRAVAPDLRGYGDSDSPESFSEYTCLNVVGDLVALLDSVAGNQEKVFLVGHDWGAIIGWFLCLFRPEKINGFVCLSVPYRSRNPKVKPVQGFKAVFGDDYYICRFQEPGKIEGEIASADPRIFLRNLFTGRTLGPPILPKDNPFGEKPNPNSENIELPEWFSKKDLDFYVSKFEKAGFTGGLNYYRAMDLNWELTAPWTGAKIQVPVKFMTGDFDMVYTTPGMKEYIHGGGFAADVPTLQEIVMLVTSLTKRNLKRSLLTSMTSSPSFGTTTKAFRVLVWFYYVGSQNKLVLACVVSTRF

SEQ ID NO: 71750 - protein, 346 aa, Arabidopsis thaliana
  peptide (1)..(346): Ceres Seq. ID no. 4811688
MVSVNGITMHIAEKGPKEGPVVLLLHGFPDLWYTWRHQISGLSSLGYRAVAPDLRGYGDSDSPESFSEYTCLNVVGDLVALLDSVAGNQEKVFLVGHDWGAIIGWFLCLFRPEKINGFVCLSVPYRSRNPKVKPVQGFKAVFGDDYYICRFQEPGKIEGEIASADPRIFLRNLFTGRTLGPPILPKDNPFGEKPNPNSENIELPEWFSKKDLDFYVSKFEKAGFTGGLNYYRAMDLNWELTAPWTGAKIQVPVKFMTGDFDMVYTTPGMKEYIHGGGFAADVPTLQEIVMLVTSLTKRNLKRSLLTSMTSSPSFGTTTKAFRVLVWFYYVGSQNKLVLACVVSTRF

SEQ ID NO: 71751 - protein, 338 aa, Arabidopsis thaliana
  peptide (1)..(338): Ceres Seq. ID no. 4811689
MHIAEKGPKEGPVVLLLHGFPDLWYTWRHQISGLSSLGYRAVAPDLRGYGDSDSPESFSEYTCLNVVGDLVALLDSVAGNQEKVFLVGHDWGAIIGWFLCLFRPEKINGFVCLSVPYRSRNPKVKPVQGFKAVFGDDYYICRFQEPGKIEGEIASADPRIFLRNLFTGRTLGPPILPKDNPFGEKPNPNSENIELPEWFSKKDLDFYVSKFEKAGFTGGLNYYRAMDLNWELTAPWTGAKIQVPVKFMTGDFDMVYTTPGMKEYIHGGGFAADVPTLQEIVMLVTSLTKRNLKRSLLTSMTSSPSFGTTTKAFRVLVWFYYVGSQNKLVLACVVSTRF

SEQ ID NO: 71752 - DNA, 1002 bp, Arabidopsis thaliana
  misc_feature (1)..(1002): Ceres Seq. ID no. 4811895
  misc_feature (1)..(1002): Ortholog of  Ceres SEQ ID NO 13585342 as cited in SEQ ID NO 63601
atggtgcttctacttgtgattgtgggattaataagctattatgtctacaagtccataacaccgccgccaccgattccactgccggaaaatgtttccgagatatctccaagaatcaagctcaatgatggaaggcatttagcgtacaaggaattagggtttccaaaggacaaagccaaaaacaaaataataatcgtccacggaaatggaaattccaaagacgtcgatttatacatcacacaggaaatgattgatgaattcaagatatactttttgttcttcgatagagctggttatggagaaagcgatcctaatccaacacgaacgctgaaaacagatacatacgatatcgaagaacttgctgacaaattgcaagtcggtccaaagttccacgttataggcatgtcacttggagcttaccctgtttacggttgcctcaaatacattcctaataggctcagtggagcttcgttggttgttccgttagtgaatttttggtggagccgtgtgcctcaaaacttattgaatgcagcgatgaagaaattgccaattggatttcaattgacacttcgagtcgcacactactctccatggttgttatattggtggatgactcagaaatggttcccgaatagtcgaaatcccaaagatactatgaccgagcgcgacctagaactcgcggaaaagcataccaaacactcttatatcaaggagtctgctttacgacaaggtggatatgtgaccacacaacaagacatcatagcgggttacgggaattgggaatttgatccaaccgaattgaagaatccgttttcggatagtaacaaagggtcggttcatatgtggtgtgcactcgaagacaaacaaatttcacgcgatgttttactctatatatgcgataaactgccatggataaagctccatgaggtccctgatggtggacattatattatccatgagaagcggcattttgaagccattatcaaagccgcttgtagtgactag

SEQ ID NO: 71753 - protein, 333 aa, Arabidopsis thaliana
  peptide (1)..(333): Ceres Seq. ID no. 4811896
MVLLLVIVGLISYYVYKSITPPPPIPLPENVSEISPRIKLNDGRHLAYKELGFPKDKAKNKIIIVHGNGNSKDVDLYITQEMIDEFKIYFLFFDRAGYGESDPNPTRTLKTDTYDIEELADKLQVGPKFHVIGMSLGAYPVYGCLKYIPNRLSGASLVVPLVNFWWSRVPQNLLNAAMKKLPIGFQLTLRVAHYSPWLLYWWMTQKWFPNSRNPKDTMTERDLELAEKHTKHSYIKESALRQGGYVTTQQDIIAGYGNWEFDPTELKNPFSDSNKGSVHMWCALEDKQISRDVLLYICDKLPWIKLHEVPDGGHYIIHEKRHFEAIIKAACSD

SEQ ID NO: 71754 - protein, 252 aa, Arabidopsis thaliana
  peptide (1)..(252): Ceres Seq. ID no. 4811897
MIDEFKIYFLFFDRAGYGESDPNPTRTLKTDTYDIEELADKLQVGPKFHVIGMSLGAYPVYGCLKYIPNRLSGASLVVPLVNFWWSRVPQNLLNAAMKKLPIGFQLTLRVAHYSPWLLYWWMTQKWFPNSRNPKDTMTERDLELAEKHTKHSYIKESALRQGGYVTTQQDIIAGYGNWEFDPTELKNPFSDSNKGSVHMWCALEDKQISRDVLLYICDKLPWIKLHEVPDGGHYIIHEKRHFEAIIKAACSD

SEQ ID NO: 71755 - protein, 200 aa, Arabidopsis thaliana
  peptide (1)..(200): Ceres Seq. ID no. 4811898
MSLGAYPVYGCLKYIPNRLSGASLVVPLVNFWWSRVPQNLLNAAMKKLPIGFQLTLRVAHYSPWLLYWWMTQKWFPNSRNPKDTMTERDLELAEKHTKHSYIKESALRQGGYVTTQQDIIAGYGNWEFDPTELKNPFSDSNKGSVHMWCALEDKQISRDVLLYICDKLPWIKLHEVPDGGHYIIHEKRHFEAIIKAACSD

SEQ ID NO: 71756 - DNA, 2292 bp, Arabidopsis thaliana
  misc_feature (1)..(2292): Ceres Seq. ID no. 4812114
  misc_feature (1)..(2292): Ortholog of  Ceres SEQ ID NO 13593889 as cited in SEQ ID NO 53305
  misc_feature (1)..(2292): Ortholog of  Ceres SEQ ID NO 13581959 as cited in SEQ ID NO 56156
atggttaagcttcttcaagacccgattacacctaacaaggagctgctgaagaagatgatagagctagagaaaagtcaggagcatctaatgcaggagatgtctcggctcaaggtctccacggagcttcggaaggagagccgtatccagtgttccatgaatctgagaccatcgccctggaagttcactcataaacagtatctcaatattttgcagtccatggcacaatctgttcatgccttcgatctcaatatgcgaattatcttttggaatgctatggcggaaaaggtttatgggtactctgctgcagaagcagttggacagaaccctattgacgttatggtagatgatcgggatgctccctttgccatgactattgctcaactttgttccaatggagagagctggactggcaagtttcctgtcaagcgcagaacaggagagaaattctcagctgtcactacgtgttcccccttctatgctgatgacggttctcttattgggatcgtttctatcacaagtgacgtagcaccatatctgaacccaacaatctctttggctaaattaaaggcttcagaagtcgaaaccagctctacccctgcaaggaatagttttgcctttaaacttgggttggacaccaaaggagctgttgtatcgaaacttggccttgattctgatcagcctatacaagttgctatagcatcaaagatatctgatttggcatccaaggtgagaaacaaggtcaggtcgaaaatgccagcaggtgatagtagtgtcacagtatttgagggtgaaactggggatagtcatcattcagatcatggagtcttcggtgctactctctctgaccacatggatgatgcagcatcaagtggtgctagcacaccaagaggggactttatccaatctccttttggtgtattcacatgtaacgatgacaagttttcttccgaacccttcatagattccagtgatggatatcctataacccttttcacctcaaaagctgaagaatggatggtaaagaaaggtttgtcttggccatggaaagggaatgagcaggaaggttcaagagtaaagcctacttattctgtatggccttgtgtacagaatgaacaaaagaaagataagtctcaccagatcaaccgctattctggtgttaagtctaaaagccatgcctctgaaagtaataagcctaccaataacaaggcttctggtttgcggtcttcttgtataaatgcgaacagcgctattagccgtggaattatcagtcacagtactatgaacaaggtggatacaaatagtaattgcttggagtatgaaattttgtgggatgatttgacaatcggagaacaaatcggacaaggctcatgtggaactgtctatcacggtctttggtttggatctgatgtagctgtaaaattgatctccaaacaagaatattcagaagaggtcatacaatcttttagacaagaggtatcgttgatgcaaagacttagacatcctaacgttctgctgtttatgggagctgtgactttacctcagggtctctgtatagtgtcagagttccttccacgtggaagtctatttcgtctactgcagagaaatatgtcaaaacttgattggaggcggcgtatcaatatggccttggacattgctcgcggcatgaattatcttcaccgctgtagtccccccatcatccatcgtgatttgaagtcatcaaatctgctggtagacaagaacttgaccgttaaggtagctgactttggtctatcgcgtattaagcatcatacatacctaaccagcaagtcgggaaagggaatgcctcaatggatggcaccagaagttcttcgaaatgagtctgctgatgagaagtctgacatttacagctttggagtagtactatgggagcttgccacagagaagatcccatgggaaaatctcaactcgatgcaggtgatcggagctgtggggttcatgaaccagaggctggaaattccaaaggacattgatcctgattggatctcactaatagagagctgttggcacagggatgcaaagctgagacccacattccaagaactgatggagagactaagagacctgcaaagaaagtatacaatacagttccaagcgactcgtgctgcgttatctgacaaaaacaaagaaagagagaaagagagagttggtctttttgaacaacaacaattggtggaaacatgctgtgctggtgtgccaatgtcttccaccattgaacaaggttatggcattgaaaatatcatgaaggttggttga

SEQ ID NO: 71757 - protein, 763 aa, Arabidopsis thaliana
  peptide (1)..(763): Ceres Seq. ID no. 4812115
MVKLLQDPITPNKELLKKMIELEKSQEHLMQEMSRLKVSTELRKESRIQCSMNLRPSPWKFTHKQYLNILQSMAQSVHAFDLNMRIIFWNAMAEKVYGYSAAEAVGQNPIDVMVDDRDAPFAMTIAQLCSNGESWTGKFPVKRRTGEKFSAVTTCSPFYADDGSLIGIVSITSDVAPYLNPTISLAKLKASEVETSSTPARNSFAFKLGLDTKGAVVSKLGLDSDQPIQVAIASKISDLASKVRNKVRSKMPAGDSSVTVFEGETGDSHHSDHGVFGATLSDHMDDAASSGASTPRGDFIQSPFGVFTCNDDKFSSEPFIDSSDGYPITLFTSKAEEWMVKKGLSWPWKGNEQEGSRVKPTYSVWPCVQNEQKKDKSHQINRYSGVKSKSHASESNKPTNNKASGLRSSCINANSAISRGIISHSTMNKVDTNSNCLEYEILWDDLTIGEQIGQGSCGTVYHGLWFGSDVAVKLISKQEYSEEVIQSFRQEVSLMQRLRHPNVLLFMGAVTLPQGLCIVSEFLPRGSLFRLLQRNMSKLDWRRRINMALDIARGMNYLHRCSPPIIHRDLKSSNLLVDKNLTVKVADFGLSRIKHHTYLTSKSGKGMPQWMAPEVLRNESADEKSDIYSFGVVLWELATEKIPWENLNSMQVIGAVGFMNQRLEIPKDIDPDWISLIESCWHRDAKLRPTFQELMERLRDLQRKYTIQFQATRAALSDKNKEREKERVGLFEQQQLVETCCAGVPMSSTIEQGYGIENIMKVG

SEQ ID NO: 71758 - protein, 745 aa, Arabidopsis thaliana
  peptide (1)..(745): Ceres Seq. ID no. 4812116
MIELEKSQEHLMQEMSRLKVSTELRKESRIQCSMNLRPSPWKFTHKQYLNILQSMAQSVHAFDLNMRIIFWNAMAEKVYGYSAAEAVGQNPIDVMVDDRDAPFAMTIAQLCSNGESWTGKFPVKRRTGEKFSAVTTCSPFYADDGSLIGIVSITSDVAPYLNPTISLAKLKASEVETSSTPARNSFAFKLGLDTKGAVVSKLGLDSDQPIQVAIASKISDLASKVRNKVRSKMPAGDSSVTVFEGETGDSHHSDHGVFGATLSDHMDDAASSGASTPRGDFIQSPFGVFTCNDDKFSSEPFIDSSDGYPITLFTSKAEEWMVKKGLSWPWKGNEQEGSRVKPTYSVWPCVQNEQKKDKSHQINRYSGVKSKSHASESNKPTNNKASGLRSSCINANSAISRGIISHSTMNKVDTNSNCLEYEILWDDLTIGEQIGQGSCGTVYHGLWFGSDVAVKLISKQEYSEEVIQSFRQEVSLMQRLRHPNVLLFMGAVTLPQGLCIVSEFLPRGSLFRLLQRNMSKLDWRRRINMALDIARGMNYLHRCSPPIIHRDLKSSNLLVDKNLTVKVADFGLSRIKHHTYLTSKSGKGMPQWMAPEVLRNESADEKSDIYSFGVVLWELATEKIPWENLNSMQVIGAVGFMNQRLEIPKDIDPDWISLIESCWHRDAKLRPTFQELMERLRDLQRKYTIQFQATRAALSDKNKEREKERVGLFEQQQLVETCCAGVPMSSTIEQGYGIENIMKVG

SEQ ID NO: 71759 - protein, 734 aa, Arabidopsis thaliana
  peptide (1)..(734): Ceres Seq. ID no. 4812117
MQEMSRLKVSTELRKESRIQCSMNLRPSPWKFTHKQYLNILQSMAQSVHAFDLNMRIIFWNAMAEKVYGYSAAEAVGQNPIDVMVDDRDAPFAMTIAQLCSNGESWTGKFPVKRRTGEKFSAVTTCSPFYADDGSLIGIVSITSDVAPYLNPTISLAKLKASEVETSSTPARNSFAFKLGLDTKGAVVSKLGLDSDQPIQVAIASKISDLASKVRNKVRSKMPAGDSSVTVFEGETGDSHHSDHGVFGATLSDHMDDAASSGASTPRGDFIQSPFGVFTCNDDKFSSEPFIDSSDGYPITLFTSKAEEWMVKKGLSWPWKGNEQEGSRVKPTYSVWPCVQNEQKKDKSHQINRYSGVKSKSHASESNKPTNNKASGLRSSCINANSAISRGIISHSTMNKVDTNSNCLEYEILWDDLTIGEQIGQGSCGTVYHGLWFGSDVAVKLISKQEYSEEVIQSFRQEVSLMQRLRHPNVLLFMGAVTLPQGLCIVSEFLPRGSLFRLLQRNMSKLDWRRRINMALDIARGMNYLHRCSPPIIHRDLKSSNLLVDKNLTVKVADFGLSRIKHHTYLTSKSGKGMPQWMAPEVLRNESADEKSDIYSFGVVLWELATEKIPWENLNSMQVIGAVGFMNQRLEIPKDIDPDWISLIESCWHRDAKLRPTFQELMERLRDLQRKYTIQFQATRAALSDKNKEREKERVGLFEQQQLVETCCAGVPMSSTIEQGYGIENIMKVG

SEQ ID NO: 71760 - DNA, 3765 bp, Arabidopsis thaliana
  misc_feature (1)..(3765): Ceres Seq. ID no. 4812743
  misc_feature (1)..(3765): Ortholog of  Ceres SEQ ID NO 15179695 as cited in SEQ ID NO 193
  misc_feature (1)..(3765): Ortholog of  Ceres SEQ ID NO 15176963 as cited in SEQ ID NO 52894
atggataacatagaaccaccctttagtggaaacatccatgctgagaccgaagtaaagaaggaggagaagaaaaagatgaagaaggaatcggtgtcattgatgggtttgtttagtgcagctgataatgttgattactttctgatgtttcttgggggtttaggcacgtgtattcatggcggtacgcttccgctcttcttcgtgttcttcgggggaatgctagattctcttgggaagctttctacagacccgaatgccatatcttctcgcgtttcacagaatgctctgtacttggtctacttaggattggtcaatttggtatcagcctggattggttcaaatggtatattggcaggagttgcttgttggatgcaaacaggggaaagacaaacagcgcgattgcgtataaattatctcaaatcaatcttagcaaaagatattactttctttgatactgaagctagagattcaaacttcattttccacatctcaagcgacgcaatcttggttcaagatgccattggcgataagaccggccatgttttgcggtacctatgtcagttcatcgcgggatttgtcatcggttttttgtcagtatggcaactaacgttgcttacgttaggagtggttccactgatagcaattgcaggaggagggtatgctatagtcatgtctacaatatcagagaagagtgaggctgcttatgctgatgcaggaaaagttgcagaagaggtcatgtcacaggtgagaacagtgtatgcatttgtaggagaagagaaagctgtaaaatcttactcaaattctctcaagaaagctctgaaactcagtaaaagaagtggtcttgctaaaggtttaggagttggattaacatatagcctcttgttctgtgcttgggcattgcttttttggtatgcaagtcttcttgtacgccatggcaaaaccaacggcgcaaaagccttcacaacaatcctcaatgtcatttacagcggattcgccttaggtcaagccgtgcctagcttatccgcaatttctaaaggcagagttgctgctgcaaatattttcaaaatgataggaaacaacaatcttgaaagctctgagagattagaaaacggaacaacattgcaaaacgtagttggcaagattgagttttgtggagtttcgttcgcatatccttcgagaccaaacatggtttttgagaatcttagtttcacgatacattcaggcaagacttttgcatttgtcggtccaagtggttcggggaaaagcacaatcatatcaatggtgcaacgtttctatgaacctagatcaggggagattctcttggatggaaatgacatcaagaacctgaagctgaaatggttgagagaacagatgggattagtgagtcaagaaccagcattattcgccacaacaatagcttctaatattcttctcggtaaagagaaagccaatatggatcagatcatagaagctgctaaagcagccaacgcagattctttcattaaatcattacctaatggttacaatactcaggttggagaaggaggaactcaactttcaggagggcagaaacagaggattgctattgctcgggcggttctaagaaatccaaagatattacttttagatgaagcaacaagcgctcttgatgccgaatcagagaagattgttcagcaagcacttgacaatgtcatggaaaaaagaacaacaatcgtcattgcacatagattatccaccattcgaaatgttgacaagattgttgtcttgagagatggtcaagttagggaaaccggaagtcactcagaactgatatcaagaggaggagattatgccactcttgtaaattgtcaagacacagaacctcaagaaaacttgagatcagtcatgtatgaatcttgtaggtctcaagctggatcatatagttcaagaagagtttttagctcaagaaggacttcaagcttcagggaagaccaagagaagactgaaaaagattcaaaaggcgaagatttaataagctcgtcctcaatgatatgggaactaataaagttgaatgctccagaatggctttatgcattacttggctcaattggtgccgttcttgccggatcacaaccggcattgttctccatggggcttgcttacgtgttaaccacgttttattcaccttttcctagtctgatcaagcgtgaagtcgataaggtagctattatctttgttggagctggaatagtaacagcgcctatatacattctccaacattacttctatacactaatgggagagcgtcttacttctcgggttcgcttatccttgttctcagcgattctttcaaatgagattggatggtttgatctggatgagaacaacactggctcactcacttcaatcttagctgctgatgcaaccttggtgaggagtgctatagcggatcgtctatcgacaatagtccaaaacttgtctcttacaatcacagccttagcacttgcctttttctacagttggcgtgttgcagctgtcgtaacagcttgttttcctcttctcattgccgcttcacttaccgagcaattatttctaaaaggctttggaggagattacacaagggcttactctagggcaacttcattggcgcgtgaagcgatttcgaatataagaaccgtcgctgcatttagtgctgaaaagcaaatctcagaacagtttacttgtgaactaagcaaacccaccaagagtgccttactcagaggtcatatctcgggatttggatacggtttgtcacagtgtctcgcgttctgttcctacgcacttggtctctggtatatctcagttctgattaagcgcaacgagaccaactttgaggatagtatcaaatctttcatggtattgctcgtcactgcttactccgtagcggaaacgcttgcgttaaccccagatatcgtgaagggcacacaagcactcgggtccgtatttagggttttacatagagagactgaaatacctccagaccagcctaactcaagattggtcactcatatcaaaggagatatagagtttagaaacgtgagctttgcgtatcccactagacccgaaatcgccattttcaaaaatctaaatctccgagtttcagccgggaagagtcttgcggtcgtgggacctagtggttcgggaaagagcacagtgatcggactaatcatgagattctacgatccgagcaacggaaatctctgtatcgatgggcatgatataaaatctgtaaacctacgtagcttgcgcaagaagctagcgttagttcagcaagaaccggctctgttttcaacatccatacacgagaacatcaagtatgggaacgagaacgcgtcagaggcagagatcattgaagccgcaaaagccgcgaacgcgcacgagttcataagcaggatggaagaagggtacatgactcacgtgggtgataagggagtgcagttatcaggtgggcaaaaacagagagtggctatcgcacgggcagttctaaaagatccttcagtgcttctccttgatgaggcaacaagtgctttggatacgagcgcagagaaacaggtccaagaggcgctagacaagttgatgaagggacgaaccacgattctggtggctcacaggctctcgaccataagaaaagcagacacaatcgttgtattgcataaaggaaaagttgtggagaaaggaagtcacagagaacttgtatctaaatccgatgggttttataagaaattgacgagtcttcaagaagcggtgtga

SEQ ID NO: 71761 - protein, 1254 aa, Arabidopsis thaliana
  peptide (1)..(1254): Ceres Seq. ID no. 4812744
MDNIEPPFSGNIHAETEVKKEEKKKMKKESVSLMGLFSAADNVDYFLMFLGGLGTCIHGGTLPLFFVFFGGMLDSLGKLSTDPNAISSRVSQNALYLVYLGLVNLVSAWIGSNGILAGVACWMQTGERQTARLRINYLKSILAKDITFFDTEARDSNFIFHISSDAILVQDAIGDKTGHVLRYLCQFIAGFVIGFLSVWQLTLLTLGVVPLIAIAGGGYAIVMSTISEKSEAAYADAGKVAEEVMSQVRTVYAFVGEEKAVKSYSNSLKKALKLSKRSGLAKGLGVGLTYSLLFCAWALLFWYASLLVRHGKTNGAKAFTTILNVIYSGFALGQAVPSLSAISKGRVAAANIFKMIGNNNLESSERLENGTTLQNVVGKIEFCGVSFAYPSRPNMVFENLSFTIHSGKTFAFVGPSGSGKSTIISMVQRFYEPRSGEILLDGNDIKNLKLKWLREQMGLVSQEPALFATTIASNILLGKEKANMDQIIEAAKAANADSFIKSLPNGYNTQVGEGGTQLSGGQKQRIAIARAVLRNPKILLLDEATSALDAESEKIVQQALDNVMEKRTTIVIAHRLSTIRNVDKIVVLRDGQVRETGSHSELISRGGDYATLVNCQDTEPQENLRSVMYESCRSQAGSYSSRRVFSSRRTSSFREDQEKTEKDSKGEDLISSSSMIWELIKLNAPEWLYALLGSIGAVLAGSQPALFSMGLAYVLTTFYSPFPSLIKREVDKVAIIFVGAGIVTAPIYILQHYFYTLMGERLTSRVRLSLFSAILSNEIGWFDLDENNTGSLTSILAADATLVRSAIADRLSTIVQNLSLTITALALAFFYSWRVAAVVTACFPLLIAASLTEQLFLKGFGGDYTRAYSRATSLAREAISNIRTVAAFSAEKQISEQFTCELSKPTKSALLRGHISGFGYGLSQCLAFCSYALGLWYISVLIKRNETNFEDSIKSFMVLLVTAYSVAETLALTPDIVKGTQALGSVFRVLHRETEIPPDQPNSRLVTHIKGDIEFRNVSFAYPTRPEIAIFKNLNLRVSAGKSLAVVGPSGSGKSTVIGLIMRFYDPSNGNLCIDGHDIKSVNLRSLRKKLALVQQEPALFSTSIHENIKYGNENASEAEIIEAAKAANAHEFISRMEEGYMTHVGDKGVQLSGGQKQRVAIARAVLKDPSVLLLDEATSALDTSAEKQVQEALDKLMKGRTTILVAHRLSTIRKADTIVVLHKGKVVEKGSHRELVSKSDGFYKKLTSLQEAV

SEQ ID NO: 71762 - protein, 1229 aa, Arabidopsis thaliana
  peptide (1)..(1229): Ceres Seq. ID no. 4812745
MKKESVSLMGLFSAADNVDYFLMFLGGLGTCIHGGTLPLFFVFFGGMLDSLGKLSTDPNAISSRVSQNALYLVYLGLVNLVSAWIGSNGILAGVACWMQTGERQTARLRINYLKSILAKDITFFDTEARDSNFIFHISSDAILVQDAIGDKTGHVLRYLCQFIAGFVIGFLSVWQLTLLTLGVVPLIAIAGGGYAIVMSTISEKSEAAYADAGKVAEEVMSQVRTVYAFVGEEKAVKSYSNSLKKALKLSKRSGLAKGLGVGLTYSLLFCAWALLFWYASLLVRHGKTNGAKAFTTILNVIYSGFALGQAVPSLSAISKGRVAAANIFKMIGNNNLESSERLENGTTLQNVVGKIEFCGVSFAYPSRPNMVFENLSFTIHSGKTFAFVGPSGSGKSTIISMVQRFYEPRSGEILLDGNDIKNLKLKWLREQMGLVSQEPALFATTIASNILLGKEKANMDQIIEAAKAANADSFIKSLPNGYNTQVGEGGTQLSGGQKQRIAIARAVLRNPKILLLDEATSALDAESEKIVQQALDNVMEKRTTIVIAHRLSTIRNVDKIVVLRDGQVRETGSHSELISRGGDYATLVNCQDTEPQENLRSVMYESCRSQAGSYSSRRVFSSRRTSSFREDQEKTEKDSKGEDLISSSSMIWELIKLNAPEWLYALLGSIGAVLAGSQPALFSMGLAYVLTTFYSPFPSLIKREVDKVAIIFVGAGIVTAPIYILQHYFYTLMGERLTSRVRLSLFSAILSNEIGWFDLDENNTGSLTSILAADATLVRSAIADRLSTIVQNLSLTITALALAFFYSWRVAAVVTACFPLLIAASLTEQLFLKGFGGDYTRAYSRATSLAREAISNIRTVAAFSAEKQISEQFTCELSKPTKSALLRGHISGFGYGLSQCLAFCSYALGLWYISVLIKRNETNFEDSIKSFMVLLVTAYSVAETLALTPDIVKGTQALGSVFRVLHRETEIPPDQPNSRLVTHIKGDIEFRNVSFAYPTRPEIAIFKNLNLRVSAGKSLAVVGPSGSGKSTVIGLIMRFYDPSNGNLCIDGHDIKSVNLRSLRKKLALVQQEPALFSTSIHENIKYGNENASEAEIIEAAKAANAHEFISRMEEGYMTHVGDKGVQLSGGQKQRVAIARAVLKDPSVLLLDEATSALDTSAEKQVQEALDKLMKGRTTILVAHRLSTIRKADTIVVLHKGKVVEKGSHRELVSKSDGFYKKLTSLQEAV

SEQ ID NO: 71763 - protein, 1221 aa, Arabidopsis thaliana
  peptide (1)..(1221): Ceres Seq. ID no. 4812746
MGLFSAADNVDYFLMFLGGLGTCIHGGTLPLFFVFFGGMLDSLGKLSTDPNAISSRVSQNALYLVYLGLVNLVSAWIGSNGILAGVACWMQTGERQTARLRINYLKSILAKDITFFDTEARDSNFIFHISSDAILVQDAIGDKTGHVLRYLCQFIAGFVIGFLSVWQLTLLTLGVVPLIAIAGGGYAIVMSTISEKSEAAYADAGKVAEEVMSQVRTVYAFVGEEKAVKSYSNSLKKALKLSKRSGLAKGLGVGLTYSLLFCAWALLFWYASLLVRHGKTNGAKAFTTILNVIYSGFALGQAVPSLSAISKGRVAAANIFKMIGNNNLESSERLENGTTLQNVVGKIEFCGVSFAYPSRPNMVFENLSFTIHSGKTFAFVGPSGSGKSTIISMVQRFYEPRSGEILLDGNDIKNLKLKWLREQMGLVSQEPALFATTIASNILLGKEKANMDQIIEAAKAANADSFIKSLPNGYNTQVGEGGTQLSGGQKQRIAIARAVLRNPKILLLDEATSALDAESEKIVQQALDNVMEKRTTIVIAHRLSTIRNVDKIVVLRDGQVRETGSHSELISRGGDYATLVNCQDTEPQENLRSVMYESCRSQAGSYSSRRVFSSRRTSSFREDQEKTEKDSKGEDLISSSSMIWELIKLNAPEWLYALLGSIGAVLAGSQPALFSMGLAYVLTTFYSPFPSLIKREVDKVAIIFVGAGIVTAPIYILQHYFYTLMGERLTSRVRLSLFSAILSNEIGWFDLDENNTGSLTSILAADATLVRSAIADRLSTIVQNLSLTITALALAFFYSWRVAAVVTACFPLLIAASLTEQLFLKGFGGDYTRAYSRATSLAREAISNIRTVAAFSAEKQISEQFTCELSKPTKSALLRGHISGFGYGLSQCLAFCSYALGLWYISVLIKRNETNFEDSIKSFMVLLVTAYSVAETLALTPDIVKGTQALGSVFRVLHRETEIPPDQPNSRLVTHIKGDIEFRNVSFAYPTRPEIAIFKNLNLRVSAGKSLAVVGPSGSGKSTVIGLIMRFYDPSNGNLCIDGHDIKSVNLRSLRKKLALVQQEPALFSTSIHENIKYGNENASEAEIIEAAKAANAHEFISRMEEGYMTHVGDKGVQLSGGQKQRVAIARAVLKDPSVLLLDEATSALDTSAEKQVQEALDKLMKGRTTILVAHRLSTIRKADTIVVLHKGKVVEKGSHRELVSKSDGFYKKLTSLQEAV

SEQ ID NO: 71764 - DNA, 927 bp, Arabidopsis thaliana
  misc_feature (1)..(927): Ceres Seq. ID no. 4812828
  misc_feature (1)..(927): Ortholog of  Ceres SEQ ID NO 13638402 as cited in SEQ ID NO 60300
  misc_feature (1)..(927): Ortholog of  Ceres SEQ ID NO 12618349 as cited in SEQ ID NO 64838
  misc_feature (1)..(927): Ortholog of  Ceres SEQ ID NO 15176161 as cited in SEQ ID NO 0
atgaagatagcggccaatggccggtttttcacaatcggactcgtagcgtcatggtattcatcgaacatcggagttttattgctgaacaagtacttgttaagcaactatggattcaagtatccgatcttcctcaccatgtgtcacatgacggcttgttctcttctcagctacgttgctattgcttggatgaagatggttccgatgcaaacgatccgatctcgagttcagtttcttaagatcgctgcgttaagtctcgttttctgtgtgtcggtggtttttgggaatatctctcttcggtttcttcctgtatcgtttaatcaagcgattggtgctacgacgccgtttttcaccgccgtgtttgcttatctgattacttttaagagagaagcttggttgacttacttcactctcgtccctgttgttaccggtgttgtcattgccagtgggagtgagccaagtttccacctgtttggattcattatgtgcattgcagctacagctgcaagagcacttaaatcagttcttcaaggaattttgctttcttcagaaggggagaagctaaattccatgaacctcctcctttacatggctcccatagctgttgtgttcctccttcctgctacacttatcatggaaaaaaatgttgttggcattacaattgcacttgccagagacgattttagaatcgtttggtatctgctattcaattcggcgctagcttattttgtgaacttgaccaatttcttagtcacgaaacacaccagcgctctgactctccaggtgctaggaaacgccaaaggtgcagtagcagtggtggtatcaatcctgatattcaggaatcctgtctcagtgactggaatgttaggttactcgctcactgtctgtggagttatcctctacagcgaagccaagaaacgaagcaaataa

SEQ ID NO: 71765 - protein, 308 aa, Arabidopsis thaliana
  peptide (1)..(308): Ceres Seq. ID no. 4812829
MKIAANGRFFTIGLVASWYSSNIGVLLLNKYLLSNYGFKYPIFLTMCHMTACSLLSYVAIAWMKMVPMQTIRSRVQFLKIAALSLVFCVSVVFGNISLRFLPVSFNQAIGATTPFFTAVFAYLITFKREAWLTYFTLVPVVTGVVIASGSEPSFHLFGFIMCIAATAARALKSVLQGILLSSEGEKLNSMNLLLYMAPIAVVFLLPATLIMEKNVVGITIALARDDFRIVWYLLFNSALAYFVNLTNFLVTKHTSALTLQVLGNAKGAVAVVVSILIFRNPVSVTGMLGYSLTVCGVILYSEAKKRSK

SEQ ID NO: 71766 - protein, 263 aa, Arabidopsis thaliana
  peptide (1)..(263): Ceres Seq. ID no. 4812830
MCHMTACSLLSYVAIAWMKMVPMQTIRSRVQFLKIAALSLVFCVSVVFGNISLRFLPVSFNQAIGATTPFFTAVFAYLITFKREAWLTYFTLVPVVTGVVIASGSEPSFHLFGFIMCIAATAARALKSVLQGILLSSEGEKLNSMNLLLYMAPIAVVFLLPATLIMEKNVVGITIALARDDFRIVWYLLFNSALAYFVNLTNFLVTKHTSALTLQVLGNAKGAVAVVVSILIFRNPVSVTGMLGYSLTVCGVILYSEAKKRSK

SEQ ID NO: 71767 - protein, 260 aa, Arabidopsis thaliana
  peptide (1)..(260): Ceres Seq. ID no. 4812831
MTACSLLSYVAIAWMKMVPMQTIRSRVQFLKIAALSLVFCVSVVFGNISLRFLPVSFNQAIGATTPFFTAVFAYLITFKREAWLTYFTLVPVVTGVVIASGSEPSFHLFGFIMCIAATAARALKSVLQGILLSSEGEKLNSMNLLLYMAPIAVVFLLPATLIMEKNVVGITIALARDDFRIVWYLLFNSALAYFVNLTNFLVTKHTSALTLQVLGNAKGAVAVVVSILIFRNPVSVTGMLGYSLTVCGVILYSEAKKRSK

SEQ ID NO: 71768 - DNA, 633 bp, Arabidopsis thaliana
  misc_feature (1)..(633): Ceres Seq. ID no. 4812890
  misc_feature (1)..(633): Ortholog of  Ceres SEQ ID NO 14311890 as cited in SEQ ID NO 51504
atggctggccagactgatcctcatatttcactgttttctccacaagaggttgagtttatggcagaggacgagctggtcgagattgttcctaatatgaacatggagcaactcaatttcatcagtggcgatttcggtcggttcattcctcagattccgacaaaggtgcctctgtggcttgcagtggcactgaagaggagaggaaaatgcactttccggcctccggggtggatgtctgttgataatttgactcagatcttggaagcagaacgtgaatctcagtcgacattccaggcattaccatttagttacgtggagattgccagactactttttgaccatgcacgtgacgatattccagacatgtatatggtgagatccctagtcgaggacatcagagatgtacggcttcacaaacttgagactaacttaggatcatttcaaggtacatctgcagtaaagatctctaatgtatcggcaatggaagtaaacatagtacgcccatttgtgataagagccttagaagcattttataagcatgacaagccagaggctgatgtagacagagacaccagaagtagtagacaacagcgtgaaaccaacaatgaaccaaggagacctctaaggcaacgctag

SEQ ID NO: 71769 - protein, 210 aa, Arabidopsis thaliana
  peptide (1)..(210): Ceres Seq. ID no. 4812891
MAGQTDPHISLFSPQEVEFMAEDELVEIVPNMNMEQLNFISGDFGRFIPQIPTKVPLWLAVALKRRGKCTFRPPGWMSVDNLTQILEAERESQSTFQALPFSYVEIARLLFDHARDDIPDMYMVRSLVEDIRDVRLHKLETNLGSFQGTSAVKISNVSAMEVNIVRPFVIRALEAFYKHDKPEADVDRDTRSSRQQRETNNEPRRPLRQR

SEQ ID NO: 71770 - protein, 191 aa, Arabidopsis thaliana
  peptide (1)..(191): Ceres Seq. ID no. 4812892
MAEDELVEIVPNMNMEQLNFISGDFGRFIPQIPTKVPLWLAVALKRRGKCTFRPPGWMSVDNLTQILEAERESQSTFQALPFSYVEIARLLFDHARDDIPDMYMVRSLVEDIRDVRLHKLETNLGSFQGTSAVKISNVSAMEVNIVRPFVIRALEAFYKHDKPEADVDRDTRSSRQQRETNNEPRRPLRQR

SEQ ID NO: 71771 - protein, 179 aa, Arabidopsis thaliana
  peptide (1)..(179): Ceres Seq. ID no. 4812893
MNMEQLNFISGDFGRFIPQIPTKVPLWLAVALKRRGKCTFRPPGWMSVDNLTQILEAERESQSTFQALPFSYVEIARLLFDHARDDIPDMYMVRSLVEDIRDVRLHKLETNLGSFQGTSAVKISNVSAMEVNIVRPFVIRALEAFYKHDKPEADVDRDTRSSRQQRETNNEPRRPLRQR

SEQ ID NO: 71772 - DNA, 1137 bp, Arabidopsis thaliana
  misc_feature (1)..(1137): Ceres Seq. ID no. 4813440
  misc_feature (1)..(1137): Ortholog of  Ceres SEQ ID NO 15176317 as cited in SEQ ID NO 52865
  misc_feature (1)..(1137): Ortholog of  Ceres SEQ ID NO 13518893 as cited in SEQ ID NO 58108
  misc_feature (1)..(1137): Ortholog of  Ceres SEQ ID NO 12617152 as cited in SEQ ID NO 63555
atggttagtgtctcactcgctgacaacaacgaagagaaatcgactgatctgaagaaattcaaaggaggagtaactgatcactcgattagtaaggcaaatgataatgatcacgacgatgatgatcatgatcaagacgatgataatgatggagatcacgatgacgatgaccatgacgatgataatgatcatgacgatgataataatgatcatgatgatgatgataataatgatgataataatgatggagacgatgaccatgatgatgataataacgatgatggtgatgacgaaaagaagacgttgagggtacacgagctaaagaaggggaatctaacggtcaaatttacaaaccggggtgcttctatcatgtctctccttttccccaatataaatgccagtaaaaaggaaaaggccgctgcaaacgatggcaaaaacacgatccatggtgggacgaaagagtctagcgatgtgatttggagagttaagaaacacaaacataatggcaaaaaaccttatattgttttcacatacacaacaagtcctgatggcgatcaagggaaacttgaagtcactgtgacatataagctggtaggagaaaacagattgaaaatggtgatgcaagcaaaggctaaagagaaaactactccgttgaatttggttcatcgttcttattggaatcttggtggtcataacaatgaagatatcttctctgaagaaattcaaattctcggttccggttatactcatctcgacgataatctcactccaaccgggaaaatcctcgccgttaaaggaacacccttcgattttcgccaactccgacctattaaagacaacatcaatgagcttaagacagggtatggtataaattattgtctagatggtgttgcaaataagatgagaaaagtcgtggagcttgtggacaataaatcgaagataaaaatggagttatctacagaccaatccggtctaaggttgaaaaccactaaaccaaaaaatggatcggttcataaagcttactctggtttatgtctagaatcacatgcaatcaattaccaatatcgttcttcgcagataattgaaccgggggaaacttataagcatactatgctctttaagttttcttttgttccgtaa

SEQ ID NO: 71773 - protein, 378 aa, Arabidopsis thaliana
  peptide (1)..(378): Ceres Seq. ID no. 4813441
MVSVSLADNNEEKSTDLKKFKGGVTDHSISKANDNDHDDDDHDQDDDNDGDHDDDDHDDDNDHDDDNNDHDDDDNNDDNNDGDDDHDDDNNDDGDDEKKTLRVHELKKGNLTVKFTNRGASIMSLLFPNINASKKEKAAANDGKNTIHGGTKESSDVIWRVKKHKHNGKKPYIVFTYTTSPDGDQGKLEVTVTYKLVGENRLKMVMQAKAKEKTTPLNLVHRSYWNLGGHNNEDIFSEEIQILGSGYTHLDDNLTPTGKILAVKGTPFDFRQLRPIKDNINELKTGYGINYCLDGVANKMRKVVELVDNKSKIKMELSTDQSGLRLKTTKPKNGSVHKAYSGLCLESHAINYQYRSSQIIEPGETYKHTMLFKFSFVP

SEQ ID NO: 71774 - protein, 256 aa, Arabidopsis thaliana
  peptide (1)..(256): Ceres Seq. ID no. 4813442
MSLLFPNINASKKEKAAANDGKNTIHGGTKESSDVIWRVKKHKHNGKKPYIVFTYTTSPDGDQGKLEVTVTYKLVGENRLKMVMQAKAKEKTTPLNLVHRSYWNLGGHNNEDIFSEEIQILGSGYTHLDDNLTPTGKILAVKGTPFDFRQLRPIKDNINELKTGYGINYCLDGVANKMRKVVELVDNKSKIKMELSTDQSGLRLKTTKPKNGSVHKAYSGLCLESHAINYQYRSSQIIEPGETYKHTMLFKFSFVP

SEQ ID NO: 71775 - DNA, 492 bp, Arabidopsis thaliana
  misc_feature (1)..(492): Ceres Seq. ID no. 4813500
  misc_feature (1)..(492): Ortholog of  Ceres SEQ ID NO 13580026 as cited in SEQ ID NO 62641
atgatgatgctaaggcaaacgtcgagaaaggcttacctagggttacaggcgtctcctctagggttaggtcgtcgattataccacgagaatgtaatcgaccactttgaaaaccctagaaacgttggctccttcaacaggaatgaccctaacgttggcacgggattggtaggagctcctgcctgcggagacctcatgagcctccagattaaggtcgatgattcaggtcagatcattgatactcgattcaagacctttggctgtggctccgctatcgcctcatcttccgttgcttctgaatggatcaagggcaaaaccttagacgaagttatgaccatcaagaacgcggaaatcgctaagcatcttaggttgccaccggtaaagctacattgcagtatgcttgcagaggacgctatcaagtccgcggtcagagactacaaggagaagcaagcaaagactaatgctgctgctgcagaagaaaccgtcaaggcctga

SEQ ID NO: 71776 - protein, 163 aa, Arabidopsis thaliana
  peptide (1)..(163): Ceres Seq. ID no. 4813501
MMMLRQTSRKAYLGLQASPLGLGRRLYHENVIDHFENPRNVGSFNRNDPNVGTGLVGAPACGDLMSLQIKVDDSGQIIDTRFKTFGCGSAIASSSVASEWIKGKTLDEVMTIKNAEIAKHLRLPPVKLHCSMLAEDAIKSAVRDYKEKQAKTNAAAAEETVKA

SEQ ID NO: 71777 - protein, 162 aa, Arabidopsis thaliana
  peptide (1)..(162): Ceres Seq. ID no. 4813502
MMLRQTSRKAYLGLQASPLGLGRRLYHENVIDHFENPRNVGSFNRNDPNVGTGLVGAPACGDLMSLQIKVDDSGQIIDTRFKTFGCGSAIASSSVASEWIKGKTLDEVMTIKNAEIAKHLRLPPVKLHCSMLAEDAIKSAVRDYKEKQAKTNAAAAEETVKA

SEQ ID NO: 71778 - protein, 161 aa, Arabidopsis thaliana
  peptide (1)..(161): Ceres Seq. ID no. 4813503
MLRQTSRKAYLGLQASPLGLGRRLYHENVIDHFENPRNVGSFNRNDPNVGTGLVGAPACGDLMSLQIKVDDSGQIIDTRFKTFGCGSAIASSSVASEWIKGKTLDEVMTIKNAEIAKHLRLPPVKLHCSMLAEDAIKSAVRDYKEKQAKTNAAAAEETVKA

SEQ ID NO: 71779 - DNA, 2847 bp, Arabidopsis thaliana
  misc_feature (1)..(2847): Ceres Seq. ID no. 4813606
  misc_feature (1)..(2847): Ortholog of  Ceres SEQ ID NO 13493393 as cited in SEQ ID NO 53713
atgattggttctgaaaatatcagttgggaaattaaaacccggttcaatttgaaaccggaaacaagactagctacgcctcacacagagtcacaggagaagctcccgcgtctgcaaggaacggataaagtctctctctttctcactctctctctctctctctctctcaaagaagaagaagatgttgacgagtcccacagcggcggaggaggaaaattgtgctcgctctctcttctctccggaagtggcgccggtaaattcagtgtcagagctctagttaggcctgatgataccgacgacgctgactccgtcggcgatgggtctctggcttttcctaaccacgtttctgtcaaaattccattcggaaatagagagattttagttgagactggtctcatggggagacaagcaagttctgcagtcacggtcacagatggagaaactattgtctacacatccgtttgtctagctgatgttccgagtgagccatcagattttcttcccctttatgttcactatcaggagcgattctcagctgtaggtcgaactagtggtggattttttaagcgagaagggagaaccaaagatcacgaggttctgatttgtaggttgatcgatagacctctacgccccactatgcccaaaggtttctacaatgaaactcagattttatcctgggttttgagctacgatggattacacgcacctgatgctttagctgttacatctgctggaattgctgtagctctttcagaagtaccaaatgcgaaagcgattgcaggagttcgggttggtcttattgggggtgaattcattgtcaatccaaccgtgaaggagatggaagaatcacagctagatttgtttctagctggaacagatactgcaattctaacgatagagggatacagtaattttcttcctgaggaaatgcttctccaagctgttaaagttggacaggatgctgtacaggctacatgcattgctattgaagttttagcaaagaaatatggaaagcctaaaatgcttgacgctatcagattaccacctccagagctatacaagcatgtgaaagaacttgctggtgaggaattgacaaaagcgttacaaattaagagtaaaatatcgagaaggaaagccatatcgtccctggaagaaaaggtcttgacaatactgacagagaagggatatgttattgatgaggtagcttttggaaccatagaagcacaaccggatctgttggaggatgaagacgaggatgaggaagttgttcctgaaggtgaggtggaccaaggcgatgttcacattagacccatccctcggaaacctattcctttactattttctgaagtagatgtcaagctagtcttcaaagaagtatcgtcgaagcttctacgtaggcgaattgttgagggaggtaaaagaagtgatggtcggactctggatgagattcgtccaattaattcaagatgtggactgcttcccagggcacatggaagtactctgttcacacgtggggaaacacaggcactggcagttgttacgcttggtgataaacaaatggcgcagagaattgacaaccttgagggttctgatgaatacaagaggttctatcttcagtacacttttcctccatcgtctgttggtgaagttggacgaattggtgcacccagtagaagagaaataggtcatgggacactagcagagcgagcattggagaccattctacctagtgatgatgactttccttacacaatacgtgttgaaagtacagtaattgaaagcaatggttcttcaagtatggcatctgtttgtggcggttgcttggctttgcaagatgctggagttccagtcaaatgttctgttgctgggatagcaatgggaatggtttgggatactgaagaatttggaggtgatggatctccccttatcctttctgacatcactggagctgaagatgcatctggtgatatggactttaaggttgctgggaatgaagatggcgttaccgcctttcagatggacatcaaggtaggaggaattactttagagataatggaaaaggctctaatacaggcaaaagctgggcgtcgccatattcttgctgaaatggcaaagtgctcaccgcctcccacgctaagcctctcaaaatatgctccattgatacttattatgaaggttcatccaagcaaagtatactctcttattggttctggaggtaagaaagtaaagagcatcattgaagaatctggagttgaggccattgacatgcaagatgatggaactgtcaaaattatggcaattgatgtagcgagtctagaaagggcgaaagcgattattagtggattgacaatggttccctctgttggtgatatctacaggaattgtgaaatcaagtcaatggctccttatggtgcatttgtagagatagcgcctgggcgggaaggtctttgccatatcagtgagctgagtgctgaatggcttgcaaaaccagaggatgcctataaagtaggagaccgcattgacgtcaaattaatagaggtaaatgaaaagggtcagcttcgacttagtgtacgggctttacttcccgaatcagagacagacaaagacagtcagaaacaacagccggcaggtgattctaccaaagacaagagttcgcaaaggaaatatgtaaatacttcgtcaaaggaccgtgcagctgcaggagcatcaaaggtttcatctggggatgaacttgtcctgaagaagaaagatgtaaggagagcaactggtggtagtagtgacaagacaatgaatagcaatagcagtaccaacgaagaaagtttagtcaacggtgaagctacaatcagctag

SEQ ID NO: 71780 - protein, 948 aa, Arabidopsis thaliana
  peptide (1)..(948): Ceres Seq. ID no. 4813607
MIGSENISWEIKTRFNLKPETRLATPHTESQEKLPRLQGTDKVSLFLTLSLSLSLKEEEDVDESHSGGGGKLCSLSLLSGSGAGKFSVRALVRPDDTDDADSVGDGSLAFPNHVSVKIPFGNREILVETGLMGRQASSAVTVTDGETIVYTSVCLADVPSEPSDFLPLYVHYQERFSAVGRTSGGFFKREGRTKDHEVLICRLIDRPLRPTMPKGFYNETQILSWVLSYDGLHAPDALAVTSAGIAVALSEVPNAKAIAGVRVGLIGGEFIVNPTVKEMEESQLDLFLAGTDTAILTIEGYSNFLPEEMLLQAVKVGQDAVQATCIAIEVLAKKYGKPKMLDAIRLPPPELYKHVKELAGEELTKALQIKSKISRRKAISSLEEKVLTILTEKGYVIDEVAFGTIEAQPDLLEDEDEDEEVVPEGEVDQGDVHIRPIPRKPIPLLFSEVDVKLVFKEVSSKLLRRRIVEGGKRSDGRTLDEIRPINSRCGLLPRAHGSTLFTRGETQALAVVTLGDKQMAQRIDNLEGSDEYKRFYLQYTFPPSSVGEVGRIGAPSRREIGHGTLAERALETILPSDDDFPYTIRVESTVIESNGSSSMASVCGGCLALQDAGVPVKCSVAGIAMGMVWDTEEFGGDGSPLILSDITGAEDASGDMDFKVAGNEDGVTAFQMDIKVGGITLEIMEKALIQAKAGRRHILAEMAKCSPPPTLSLSKYAPLILIMKVHPSKVYSLIGSGGKKVKSIIEESGVEAIDMQDDGTVKIMAIDVASLERAKAIISGLTMVPSVGDIYRNCEIKSMAPYGAFVEIAPGREGLCHISELSAEWLAKPEDAYKVGDRIDVKLIEVNEKGQLRLSVRALLPESETDKDSQKQQPAGDSTKDKSSQRKYVNTSSKDRAAAGASKVSSGDELVLKKKDVRRATGGSSDKTMNSNSSTNEESLVNGEATIS

SEQ ID NO: 71781 - protein, 817 aa, Arabidopsis thaliana
  peptide (1)..(817): Ceres Seq. ID no. 4813608
MGRQASSAVTVTDGETIVYTSVCLADVPSEPSDFLPLYVHYQERFSAVGRTSGGFFKREGRTKDHEVLICRLIDRPLRPTMPKGFYNETQILSWVLSYDGLHAPDALAVTSAGIAVALSEVPNAKAIAGVRVGLIGGEFIVNPTVKEMEESQLDLFLAGTDTAILTIEGYSNFLPEEMLLQAVKVGQDAVQATCIAIEVLAKKYGKPKMLDAIRLPPPELYKHVKELAGEELTKALQIKSKISRRKAISSLEEKVLTILTEKGYVIDEVAFGTIEAQPDLLEDEDEDEEVVPEGEVDQGDVHIRPIPRKPIPLLFSEVDVKLVFKEVSSKLLRRRIVEGGKRSDGRTLDEIRPINSRCGLLPRAHGSTLFTRGETQALAVVTLGDKQMAQRIDNLEGSDEYKRFYLQYTFPPSSVGEVGRIGAPSRREIGHGTLAERALETILPSDDDFPYTIRVESTVIESNGSSSMASVCGGCLALQDAGVPVKCSVAGIAMGMVWDTEEFGGDGSPLILSDITGAEDASGDMDFKVAGNEDGVTAFQMDIKVGGITLEIMEKALIQAKAGRRHILAEMAKCSPPPTLSLSKYAPLILIMKVHPSKVYSLIGSGGKKVKSIIEESGVEAIDMQDDGTVKIMAIDVASLERAKAIISGLTMVPSVGDIYRNCEIKSMAPYGAFVEIAPGREGLCHISELSAEWLAKPEDAYKVGDRIDVKLIEVNEKGQLRLSVRALLPESETDKDSQKQQPAGDSTKDKSSQRKYVNTSSKDRAAAGASKVSSGDELVLKKKDVRRATGGSSDKTMNSNSSTNEESLVNGEATIS

SEQ ID NO: 71782 - protein, 737 aa, Arabidopsis thaliana
  peptide (1)..(737): Ceres Seq. ID no. 4813609
MPKGFYNETQILSWVLSYDGLHAPDALAVTSAGIAVALSEVPNAKAIAGVRVGLIGGEFIVNPTVKEMEESQLDLFLAGTDTAILTIEGYSNFLPEEMLLQAVKVGQDAVQATCIAIEVLAKKYGKPKMLDAIRLPPPELYKHVKELAGEELTKALQIKSKISRRKAISSLEEKVLTILTEKGYVIDEVAFGTIEAQPDLLEDEDEDEEVVPEGEVDQGDVHIRPIPRKPIPLLFSEVDVKLVFKEVSSKLLRRRIVEGGKRSDGRTLDEIRPINSRCGLLPRAHGSTLFTRGETQALAVVTLGDKQMAQRIDNLEGSDEYKRFYLQYTFPPSSVGEVGRIGAPSRREIGHGTLAERALETILPSDDDFPYTIRVESTVIESNGSSSMASVCGGCLALQDAGVPVKCSVAGIAMGMVWDTEEFGGDGSPLILSDITGAEDASGDMDFKVAGNEDGVTAFQMDIKVGGITLEIMEKALIQAKAGRRHILAEMAKCSPPPTLSLSKYAPLILIMKVHPSKVYSLIGSGGKKVKSIIEESGVEAIDMQDDGTVKIMAIDVASLERAKAIISGLTMVPSVGDIYRNCEIKSMAPYGAFVEIAPGREGLCHISELSAEWLAKPEDAYKVGDRIDVKLIEVNEKGQLRLSVRALLPESETDKDSQKQQPAGDSTKDKSSQRKYVNTSSKDRAAAGASKVSSGDELVLKKKDVRRATGGSSDKTMNSNSSTNEESLVNGEATIS

SEQ ID NO: 71783 - DNA, 1392 bp, Arabidopsis thaliana
  misc_feature (1)..(1392): Ceres Seq. ID no. 4813637
  misc_feature (1)..(1392): Ortholog of  Ceres SEQ ID NO 13597407 as cited in SEQ ID NO 64106
atggagaaaaggaacgacaaatccgagccgttgctgctgccggagaatggatccgacgtctcagaagaagcatcatggatggtttatctaagcacgatcattgccgtttgcggttcctacgagtttggaacatgcgtgggatactccgctccaacacagtttgggattatggaagagcttaatttatcatattcccagttttcggttttcggatcgatattgaatatgggagcagtgctcggcgccattacatcggggaagatttctgatttcatcggtcggaaaggggccatgcggttgtcttcagtgatctctgccatcggctggctgataatttacttggccaagggtgacgtacctttggatttcggaagatttctaacgggttatggttgcggtaccctttcctttgtggtaccggtcttcatcgccgaaattagtccgagaaaattgagaggagccttagcgacgcttaaccagctctttatcgtaatcggattagcttctatgttcctcataggcgccgtcgtaaattggagaactcttgcactaaccggagttgcaccgtgcgtggttctattctttgggacttggttcatccctgaatcacccagatggctggaaatggttggccgccacagtgattttgaaattgcgttgcaaaaactgaggggtcctcaggccaatatcacaagagaagccggggaaattcaggagtacttagcgagtcttgctcacctcccgaaagccacattgatggaccttattgacaaaaagaatattcgatttgtgatagttggagttggtttgatgtttttccaacaattcgttggaattaatggcgttatcttctacgcacaacaaatattcgtatcagcaggagcatccccaactcttggaagcattctatactcgatcgaacaagtcgttctcacagcactaggcgcaacattgctaattgatcggcttggaagaaggccacttcttatggcttcagctgttgggatgctgattggatgtttgctcatcggaaattcatttcttttgaaggctcatggtttagcacttgacatcattccggctctggcagttagtggtgtcttggtctacatcggttcgttctctattggaatgggtgcaatcccatgggttataatgtctgagatatttccaataaatttgaaaggaactgccggaggacttgtcactgtagtaaattggctaagttcatggcttgtctcattcactttcaactttctcatgatttggagccctcatggtacattttatgtgtatggtggggtatgtgtattggctattatcttcatagcaaaacttgttcctgaaactaaaggcagaaccttggaagagattcaagcaatgatgatgtaa

SEQ ID NO: 71784 - protein, 463 aa, Arabidopsis thaliana
  peptide (1)..(463): Ceres Seq. ID no. 4813638
MEKRNDKSEPLLLPENGSDVSEEASWMVYLSTIIAVCGSYEFGTCVGYSAPTQFGIMEELNLSYSQFSVFGSILNMGAVLGAITSGKISDFIGRKGAMRLSSVISAIGWLIIYLAKGDVPLDFGRFLTGYGCGTLSFVVPVFIAEISPRKLRGALATLNQLFIVIGLASMFLIGAVVNWRTLALTGVAPCVVLFFGTWFIPESPRWLEMVGRHSDFEIALQKLRGPQANITREAGEIQEYLASLAHLPKATLMDLIDKKNIRFVIVGVGLMFFQQFVGINGVIFYAQQIFVSAGASPTLGSILYSIEQVVLTALGATLLIDRLGRRPLLMASAVGMLIGCLLIGNSFLLKAHGLALDIIPALAVSGVLVYIGSFSIGMGAIPWVIMSEIFPINLKGTAGGLVTVVNWLSSWLVSFTFNFLMIWSPHGTFYVYGGVCVLAIIFIAKLVPETKGRTLEEIQAMMM

SEQ ID NO: 71785 - protein, 437 aa, Arabidopsis thaliana
  peptide (1)..(437): Ceres Seq. ID no. 4813639
MVYLSTIIAVCGSYEFGTCVGYSAPTQFGIMEELNLSYSQFSVFGSILNMGAVLGAITSGKISDFIGRKGAMRLSSVISAIGWLIIYLAKGDVPLDFGRFLTGYGCGTLSFVVPVFIAEISPRKLRGALATLNQLFIVIGLASMFLIGAVVNWRTLALTGVAPCVVLFFGTWFIPESPRWLEMVGRHSDFEIALQKLRGPQANITREAGEIQEYLASLAHLPKATLMDLIDKKNIRFVIVGVGLMFFQQFVGINGVIFYAQQIFVSAGASPTLGSILYSIEQVVLTALGATLLIDRLGRRPLLMASAVGMLIGCLLIGNSFLLKAHGLALDIIPALAVSGVLVYIGSFSIGMGAIPWVIMSEIFPINLKGTAGGLVTVVNWLSSWLVSFTFNFLMIWSPHGTFYVYGGVCVLAIIFIAKLVPETKGRTLEEIQAMMM

SEQ ID NO: 71786 - protein, 407 aa, Arabidopsis thaliana
  peptide (1)..(407): Ceres Seq. ID no. 4813640
MEELNLSYSQFSVFGSILNMGAVLGAITSGKISDFIGRKGAMRLSSVISAIGWLIIYLAKGDVPLDFGRFLTGYGCGTLSFVVPVFIAEISPRKLRGALATLNQLFIVIGLASMFLIGAVVNWRTLALTGVAPCVVLFFGTWFIPESPRWLEMVGRHSDFEIALQKLRGPQANITREAGEIQEYLASLAHLPKATLMDLIDKKNIRFVIVGVGLMFFQQFVGINGVIFYAQQIFVSAGASPTLGSILYSIEQVVLTALGATLLIDRLGRRPLLMASAVGMLIGCLLIGNSFLLKAHGLALDIIPALAVSGVLVYIGSFSIGMGAIPWVIMSEIFPINLKGTAGGLVTVVNWLSSWLVSFTFNFLMIWSPHGTFYVYGGVCVLAIIFIAKLVPETKGRTLEEIQAMMM

SEQ ID NO: 71787 - DNA, 1626 bp, Arabidopsis thaliana
  misc_feature (1)..(1626): Ceres Seq. ID no. 4813656
  misc_feature (1)..(1626): Ortholog of  Ceres SEQ ID NO 15177316 as cited in SEQ ID NO 52739
atgaataaacaagatgttatgaaacttcaggggagagttactgttacagggaacattgacccagctcttctggttaagaaacttagcaaatcaggcaaacatgccgagatcttaggcggtggtggaggaggaggcggcggaggtggaaaggggtttcctaatctgaatgggcaatttgcaaatctcaacatgggtggaaacaataagcctaaaggtggaaaagagagtaaccaagtcaagggtaaagctggtggtggcggtggaggaggtcagaatcatggacatggtcagccaatgcaattgaatcctcaacagattcaacagatgatgatgatgaaggctgctcacggtggtggtggtggtggtcagatgaagatgccgcctatggcagctaaggatcagaagaagtcagttaagtttgctgatgatgaagacgatgagtttagtgaagatgattatgatgatgaggatttcagtgaagatgattatgatgatgatgagttcgatgatgatgaagatgatgatgatgagatgggtcatggtcatggacatggaggaggtgggggtaatcacatgcctcctaataagatgatgatgcctaacaagatgatgcctcagatgggtggtcatcatggtaatggtggtggacctaagggtcccaatgagataatgatgatgatgaatgggttcaaaggcggaggcggtggaggaaagaaaggcggtggtggcgggtttgagattccggtgcagatgaagggaatgggtgagggtaaaaatggaaaggatggtaaaaagggtaaaggaggagagaagggtaagaaagaagggaaagagaataaaggtgggggcaaaaccggaaaaacagatgccaaaagtggtggtggtggccttctagggtttttcaaaaagggtaaaagtgggaacggagatgagaagaagagcgctgggaagaaagatggccatgggggtaataaggtcaaatctcatggtgggggaggaggagttcagcattatgatagtgggcctaaaaaaggtggtggtgggaccaaaggaggaggccatgggggccttgacattgatgagctcatgaaacacagcaaaggaggaggaggaggaggtaacaagggcaatcataatcatagcgccaaagggattggtggtggcccaatgggtccaggcggtccgatgggtccaggcggtccgatgggtcaaggtggtccgatgggtatgatgggtccaggtggtccgatgagtatgatgggtccaggcggtcctatgggtccaatgggtggccaaggcggctcttacccagcggttcaaggcttgccaatgagtggaggtggaggatattatccagggccgcctcaggcaagtcagcaaatgaaccaacaacaatatatgcaaatgatgatgaaccaacagcagcaacaacaacaacaacaacaagctgtagctcatggtggctatggcggtggtcacggtggcgacatgtaccatccgatgatgtacgctcggccttatcctgcagttaattatgctcaccctccaccaatgccgcctcctcactcggattcttatactcatatgttcagcgatgagaatccaggtagttgtagtattatgtga

SEQ ID NO: 71788 - protein, 541 aa, Arabidopsis thaliana
  peptide (1)..(541): Ceres Seq. ID no. 4813657
MNKQDVMKLQGRVTVTGNIDPALLVKKLSKSGKHAEILGGGGGGGGGGGKGFPNLNGQFANLNMGGNNKPKGGKESNQVKGKAGGGGGGGQNHGHGQPMQLNPQQIQQMMMMKAAHGGGGGGQMKMPPMAAKDQKKSVKFADDEDDEFSEDDYDDEDFSEDDYDDDEFDDDEDDDDEMGHGHGHGGGGGNHMPPNKMMMPNKMMPQMGGHHGNGGGPKGPNEIMMMMNGFKGGGGGGKKGGGGGFEIPVQMKGMGEGKNGKDGKKGKGGEKGKKEGKENKGGGKTGKTDAKSGGGGLLGFFKKGKSGNGDEKKSAGKKDGHGGNKVKSHGGGGGVQHYDSGPKKGGGGTKGGGHGGLDIDELMKHSKGGGGGGNKGNHNHSAKGIGGGPMGPGGPMGPGGPMGQGGPMGMMGPGGPMSMMGPGGPMGPMGGQGGSYPAVQGLPMSGGGGYYPGPPQASQQMNQQQYMQMMMNQQQQQQQQQQAVAHGGYGGGHGGDMYHPMMYARPYPAVNYAHPPPMPPPHSDSYTHMFSDENPGSCSIM

SEQ ID NO: 71789 - protein, 535 aa, Arabidopsis thaliana
  peptide (1)..(535): Ceres Seq. ID no. 4813658
MKLQGRVTVTGNIDPALLVKKLSKSGKHAEILGGGGGGGGGGGKGFPNLNGQFANLNMGGNNKPKGGKESNQVKGKAGGGGGGGQNHGHGQPMQLNPQQIQQMMMMKAAHGGGGGGQMKMPPMAAKDQKKSVKFADDEDDEFSEDDYDDEDFSEDDYDDDEFDDDEDDDDEMGHGHGHGGGGGNHMPPNKMMMPNKMMPQMGGHHGNGGGPKGPNEIMMMMNGFKGGGGGGKKGGGGGFEIPVQMKGMGEGKNGKDGKKGKGGEKGKKEGKENKGGGKTGKTDAKSGGGGLLGFFKKGKSGNGDEKKSAGKKDGHGGNKVKSHGGGGGVQHYDSGPKKGGGGTKGGGHGGLDIDELMKHSKGGGGGGNKGNHNHSAKGIGGGPMGPGGPMGPGGPMGQGGPMGMMGPGGPMSMMGPGGPMGPMGGQGGSYPAVQGLPMSGGGGYYPGPPQASQQMNQQQYMQMMMNQQQQQQQQQQAVAHGGYGGGHGGDMYHPMMYARPYPAVNYAHPPPMPPPHSDSYTHMFSDENPGSCSIM

SEQ ID NO: 71790 - protein, 478 aa, Arabidopsis thaliana; identical to SEQ ID NO: 36662
  peptide (1)..(478): Ceres Seq. ID no. 4813659

SEQ ID NO: 71791 - DNA, 1440 bp, Arabidopsis thaliana
  misc_feature (1)..(1440): Ceres Seq. ID no. 4813961
  misc_feature (1)..(1440): Ortholog of  Ceres SEQ ID NO 13594068 as cited in SEQ ID NO 58624
atggcgggaatcccagatcatatccaagaccaacatcttgtggaggaggtatatgctttttatgattttgttacattgaaaaactttattcttaaagagtttttgttactctacttacaggatcaaccctttgatctggaagattggcttccaatcacagcatcaaggaatgccaattggtattattcagctttccacaacgtcactgccattgttggtgctggcgttctcggtcttccttacgccatgtcagagcttggatggggacctggggttgtggtgttgatcctgtcatgggtgatcacgttatacaccctctggcaaatgattgagatgcatgagatgtttgaagggcaacggttcgataggtaccatgagctgggtcaggcagcctttggtaaaaagcttggtttgtacatcatcgtgcccctacaactacttgtcgagatcagtgtgtgcatagtctatatggtcactggaggtaaatccctgaagaatgtacatgaccttgctttgggagatggtgacaagtgcacaaagcttagaattcaacacttcattttgatctttgcctcttcacagttcgtgctctcccttcttaagaacttcaactccatttctggtgtctccttggtagctgctgtcatgtctgtcagctattctacaattgcttgggtagcctcgctgaggaagggtgccaccaccgggagtgtagagtacggctatagaaaaagaacaacctcagtgccattagccttcttaagtgcactgggtgaaatggcttttgcgtacgcaggtcataacgttgttttggaaattcaagcaacgatcccatcaacaccagagaacccatcaaaacgacccatgtggaagggagcggttgtagcctatatcattgtagctttctgctacttccctgtggcacttgtaggtttcaagacctttggaaacagtgttgaagagagcatcctcgaatcactaacaaaaccaacggcacttgtcattgtggccaacatgtttgtggtcatacatctcttgggaagctaccaggtgtatgcgatgcccgtgtttgacatgatcgaatctgtaatgataaggatatggcacttcagtccaacaagagttctacggtttaccatccgatggacttttgtggccgccacgatgggaatagcggtcggtttaccgtattacagcgcattgctgtcattttttgggggatttgtgttcgccccgaccacatactttatcccatgcatcatgtggctgatcctaaagaaaccaaagagatttagtctctcatggtgtatgaactggttttgcatcatttttgggcttgtgctgatgatcatagcacctattgggggactggccaaactaatctataatattcaaaagggcactctacctaattcaagatgcaacttacctaaacactga

SEQ ID NO: 71792 - protein, 479 aa, Arabidopsis thaliana
  peptide (1)..(479): Ceres Seq. ID no. 4813962
MAGIPDHIQDQHLVEEVYAFYDFVTLKNFILKEFLLLYLQDQPFDLEDWLPITASRNANWYYSAFHNVTAIVGAGVLGLPYAMSELGWGPGVVVLILSWVITLYTLWQMIEMHEMFEGQRFDRYHELGQAAFGKKLGLYIIVPLQLLVEISVCIVYMVTGGKSLKNVHDLALGDGDKCTKLRIQHFILIFASSQFVLSLLKNFNSISGVSLVAAVMSVSYSTIAWVASLRKGATTGSVEYGYRKRTTSVPLAFLSALGEMAFAYAGHNVVLEIQATIPSTPENPSKRPMWKGAVVAYIIVAFCYFPVALVGFKTFGNSVEESILESLTKPTALVIVANMFVVIHLLGSYQVYAMPVFDMIESVMIRIWHFSPTRVLRFTIRWTFVAATMGIAVGLPYYSALLSFFGGFVFAPTTYFIPCIMWLILKKPKRFSLSWCMNWFCIIFGLVLMIIAPIGGLAKLIYNIQKGTLPNSRCNLPKH

SEQ ID NO: 71793 - protein, 397 aa, Arabidopsis thaliana
  peptide (1)..(397): Ceres Seq. ID no. 4813963
MSELGWGPGVVVLILSWVITLYTLWQMIEMHEMFEGQRFDRYHELGQAAFGKKLGLYIIVPLQLLVEISVCIVYMVTGGKSLKNVHDLALGDGDKCTKLRIQHFILIFASSQFVLSLLKNFNSISGVSLVAAVMSVSYSTIAWVASLRKGATTGSVEYGYRKRTTSVPLAFLSALGEMAFAYAGHNVVLEIQATIPSTPENPSKRPMWKGAVVAYIIVAFCYFPVALVGFKTFGNSVEESILESLTKPTALVIVANMFVVIHLLGSYQVYAMPVFDMIESVMIRIWHFSPTRVLRFTIRWTFVAATMGIAVGLPYYSALLSFFGGFVFAPTTYFIPCIMWLILKKPKRFSLSWCMNWFCIIFGLVLMIIAPIGGLAKLIYNIQKGTLPNSRCNLPKH

SEQ ID NO: 71794 - protein, 371 aa, Arabidopsis thaliana
  peptide (1)..(371): Ceres Seq. ID no. 4813964
MIEMHEMFEGQRFDRYHELGQAAFGKKLGLYIIVPLQLLVEISVCIVYMVTGGKSLKNVHDLALGDGDKCTKLRIQHFILIFASSQFVLSLLKNFNSISGVSLVAAVMSVSYSTIAWVASLRKGATTGSVEYGYRKRTTSVPLAFLSALGEMAFAYAGHNVVLEIQATIPSTPENPSKRPMWKGAVVAYIIVAFCYFPVALVGFKTFGNSVEESILESLTKPTALVIVANMFVVIHLLGSYQVYAMPVFDMIESVMIRIWHFSPTRVLRFTIRWTFVAATMGIAVGLPYYSALLSFFGGFVFAPTTYFIPCIMWLILKKPKRFSLSWCMNWFCIIFGLVLMIIAPIGGLAKLIYNIQKGTLPNSRCNLPKH

SEQ ID NO: 71795 - DNA, 1038 bp, Arabidopsis thaliana
  misc_feature (1)..(1038): Ceres Seq. ID no. 4814027
  misc_feature (1)..(1038): Ortholog of  Ceres SEQ ID NO 12616314 as cited in SEQ ID NO 64355
atgctgactctactcttcttctctctcggagcgcttcttcttatcgttctgctcttcaaatttgcattcgccgatggagattttaccttgatttcgaagaagcatgtgaagcgtgaggccatacaaggcaaggtcgtctggatcacaggggctagccgtggaattggtgaaattcttgctaaacagtttgcaagtttagatgccaagcttattctctctgctaggaataaagctgaactggatcgggttaagagtgagcttaaaggtaaatttgcaccagaagatgtcaaggttttgcctttagatttagctagcggcgaagagtcactcaaacatgttgtagagcaagcagtgtcgcttttccctggagctggtgttgattatttggttcacaatgctgcctttgagcgtccgaaatccaaggcatcggatgcaagtgaggaaactctcaagactacattcgatgttaatgtctttgggacgatatctctgacaaagttggtagctcctcatatgctaaaacaaggagggggtcattttgttgtgataagcagtgctgcaggaaaggtaccatcacctggacaggctatatattctgcttcaaaacatgctcttcatggctacttccacagcttgcgttctgagttctgtcagaagggaatcaaggttaccgtcgtttgtcctggtccaatagaaacctggaatggtacaggaacatcaacttcggaagacagcaagtctcctgagctccttgctcaacttgatttctctcaagcatctattctctttgctacgcagaaacgtgtgtcatctgaacgatgtgcagagctgactataatcgctgcatctcataacttgaaggaagcttggatttcatatcagccagtactactcgtgatgtatctagtgcagtacatgccttcccttggcttctggctcatggacaaggttggaggaaagcgtgtggaggtcgcggaaaagaaaggcaacacatactcgtgggatttactgttcgggaagaagactaaaacaaactga

SEQ ID NO: 71796 - protein, 345 aa, Arabidopsis thaliana
  peptide (1)..(345): Ceres Seq. ID no. 4814028
MLTLLFFSLGALLLIVLLFKFAFADGDFTLISKKHVKREAIQGKVVWITGASRGIGEILAKQFASLDAKLILSARNKAELDRVKSELKGKFAPEDVKVLPLDLASGEESLKHVVEQAVSLFPGAGVDYLVHNAAFERPKSKASDASEETLKTTFDVNVFGTISLTKLVAPHMLKQGGGHFVVISSAAGKVPSPGQAIYSASKHALHGYFHSLRSEFCQKGIKVTVVCPGPIETWNGTGTSTSEDSKSPELLAQLDFSQASILFATQKRVSSERCAELTIIAASHNLKEAWISYQPVLLVMYLVQYMPSLGFWLMDKVGGKRVEVAEKKGNTYSWDLLFGKKTKTN

SEQ ID NO: 71797 - protein, 174 aa, Arabidopsis thaliana
  peptide (1)..(174): Ceres Seq. ID no. 4814029
MLKQGGGHFVVISSAAGKVPSPGQAIYSASKHALHGYFHSLRSEFCQKGIKVTVVCPGPIETWNGTGTSTSEDSKSPELLAQLDFSQASILFATQKRVSSERCAELTIIAASHNLKEAWISYQPVLLVMYLVQYMPSLGFWLMDKVGGKRVEVAEKKGNTYSWDLLFGKKTKTN

SEQ ID NO: 71798 - DNA, 1257 bp, Arabidopsis thaliana
  misc_feature (1)..(1257): Ceres Seq. ID no. 4814169
  misc_feature (1)..(1257): Ortholog of  Ceres SEQ ID NO 14311882 as cited in SEQ ID NO 51638
  misc_feature (1)..(1257): Ortholog of  Ceres SEQ ID NO 13595437 as cited in SEQ ID NO 56562
atggatcctaacgaaagccaccatcaccaccaacaacaacagctccatcacctccaccaacagcaacagcaacagcagcagcagcaacgactcacttctccttacttccaccaccaactacagcaccatcaccaccttccaaccaccgtagcaaccaccgcttctaccggaaacgccgttccatcttccaacaatgggcttttccctccgcagcctcagccacagcaccagcctaatgatgggtcatcttctctcgcggtgtaccctcattcagttccgtcctcggctgtgacggcgccgatggagccggtaaagaggaagaggggtcgaccaagaaagtatgtgacgccggaacaagccctagcggctaagaaattggcgtcttctgcgagtagttcgtctgctaaacagaggcgagagcttgctgctgttaccggtggtacggtatcgactaattccgggtcatccaagaaatctcagcttggttctgtcgggaaaactggacaatgttttactccgcatattgttaatatagctcctggcgaggatgtggtccagaaaattatgatgttcgcaaaccaaagcaagcatgaactatgcgttctttctgcatcaggcactatctctaatgcatccttgcgccaaccggctccatcaggaggcaacttaccatatgagggtcaatacgagattctctcactatctggatcctatatccgaactgaacaaggtggtaaatccggcggccttagcgtttctttatctgcttcagatggtcagatcatcggtggagcgattggtagccatctcacagctgctggcccggttcaggtacaattctgttgtatcatagtgattcttggtacgtttcagcttgatagaaagaaggatgccgccgggagtggtgggaaaggggatgcttcaaacagtggaagtcggttaacttctcctgtaagctctggacagttgcttggcatgggtttccctcctggtatggaatctacgggaagaaatccaatgaggggaaacgacgagcaacatgatcatcatcatcatcaagccggtttgggtggacctcatcatttcatgatgcaagcgccgcaggggatacacatgacacattccaggccatctgaatggcgcggaggaggcaacagcggtcatgatggcagaggcggtggcgggtatgatttgtcaggaaggataggacatgagtcgtcggagaatggagattacgagcagcaaataccggattag

SEQ ID NO: 71799 - protein, 418 aa, Arabidopsis thaliana
  peptide (1)..(418): Ceres Seq. ID no. 4814170
MDPNESHHHHQQQQLHHLHQQQQQQQQQQRLTSPYFHHQLQHHHHLPTTVATTASTGNAVPSSNNGLFPPQPQPQHQPNDGSSSLAVYPHSVPSSAVTAPMEPVKRKRGRPRKYVTPEQALAAKKLASSASSSSAKQRRELAAVTGGTVSTNSGSSKKSQLGSVGKTGQCFTPHIVNIAPGEDVVQKIMMFANQSKHELCVLSASGTISNASLRQPAPSGGNLPYEGQYEILSLSGSYIRTEQGGKSGGLSVSLSASDGQIIGGAIGSHLTAAGPVQVQFCCIIVILGTFQLDRKKDAAGSGGKGDASNSGSRLTSPVSSGQLLGMGFPPGMESTGRNPMRGNDEQHDHHHHQAGLGGPHHFMMQAPQGIHMTHSRPSEWRGGGNSGHDGRGGGGYDLSGRIGHESSENGDYEQQIPD

SEQ ID NO: 71800 - protein, 318 aa, Arabidopsis thaliana
  peptide (1)..(318): Ceres Seq. ID no. 4814171
MEPVKRKRGRPRKYVTPEQALAAKKLASSASSSSAKQRRELAAVTGGTVSTNSGSSKKSQLGSVGKTGQCFTPHIVNIAPGEDVVQKIMMFANQSKHELCVLSASGTISNASLRQPAPSGGNLPYEGQYEILSLSGSYIRTEQGGKSGGLSVSLSASDGQIIGGAIGSHLTAAGPVQVQFCCIIVILGTFQLDRKKDAAGSGGKGDASNSGSRLTSPVSSGQLLGMGFPPGMESTGRNPMRGNDEQHDHHHHQAGLGGPHHFMMQAPQGIHMTHSRPSEWRGGGNSGHDGRGGGGYDLSGRIGHESSENGDYEQQIPD

SEQ ID NO: 71801 - protein, 230 aa, Arabidopsis thaliana
  peptide (1)..(230): Ceres Seq. ID no. 4814172
MMFANQSKHELCVLSASGTISNASLRQPAPSGGNLPYEGQYEILSLSGSYIRTEQGGKSGGLSVSLSASDGQIIGGAIGSHLTAAGPVQVQFCCIIVILGTFQLDRKKDAAGSGGKGDASNSGSRLTSPVSSGQLLGMGFPPGMESTGRNPMRGNDEQHDHHHHQAGLGGPHHFMMQAPQGIHMTHSRPSEWRGGGNSGHDGRGGGGYDLSGRIGHESSENGDYEQQIPD

SEQ ID NO: 71802 - DNA, 1329 bp, Arabidopsis thaliana
  misc_feature (1)..(1329): Ceres Seq. ID no. 4814217
  misc_feature (1)..(1329): Ortholog of  Ceres SEQ ID NO 13639469 as cited in SEQ ID NO 54825
  misc_feature (1)..(1329): Ortholog of  Ceres SEQ ID NO 15179301 as cited in SEQ ID NO 0
atgtttacatctcctcacttgattgatgtgagggaaagattccgaatagatggcttggatatatctgaggaaaagtttctacagtacttctgggaatgttggaagttattgaaggagaaagctgtagatggtcttaccatgcctcctctttttcagtttctcacagtattggcatttaagatttttgtttgtgaaaaggttgatgttgctgtcattgaagttggacttgggggaaaacttgactcgacaaatgtgattcaaaaacctgttgtctgtggcattgcttctcttgggatggatcatatggacatattgggaaatacgctagctgatattgcctttcataaggctgggattttcaagcctcaaatccccgccttcacagtaccacaactctctgaagcaatggatgttcttcagaaaacagctaataatctcgaggtaactatagtagcgcctcttgaacctaaaaagttggacggagttacgcttggcttgtctggggatcatcagctagtaaatgcaggtcttgctgtttctctttcaagatgctggcttcaaagaaccgggaattggaagaagatatttccaaatgaaagcaaggaaactgagattcccgtggcattttgtcgtggtcttgcaacggcacgtcttcatgggagagctcaagttgttcatgatgtagtttcagatccgcaggactcatcagactcgatggaaactccatgcggtgatctgatcttttacttggatggtgctcacagtccagagagcatggaggcttgtggtcgatggttctcttctgcagtcagaggagacaaaagcttatccactgctattcttctgttcaactgcatggaagtgagagaccctcaagtcttacttccaaagctggtcaccacttgcgcttcctcaggcactcatttctcaagagcgctttttgtcccgagcatgtctacttacaacaaagtcatttcgggtgcatcagcgattccttcagatacacgtagaaaggatttgacttggcaattcagactacaaagactatgggagaaatcaatccaagggactgatgcggggcttgaccatacactgaaacccgatggaataaccgccttaccacctcatgatttcctgtgcggagatgcacctcaatgtggtggacctgcagggacaccggtcacttccagtgccgtaatgccttcacttccattgactataaactggctaagagactgcgtacgccgaaacccttcactgaaactagaggttctggtcacaggatcgctacatcttgttggagatgtgctcaggttgctaaagagatga

SEQ ID NO: 71803 - protein, 442 aa, Arabidopsis thaliana
  peptide (1)..(442): Ceres Seq. ID no. 4814218
MFTSPHLIDVRERFRIDGLDISEEKFLQYFWECWKLLKEKAVDGLTMPPLFQFLTVLAFKIFVCEKVDVAVIEVGLGGKLDSTNVIQKPVVCGIASLGMDHMDILGNTLADIAFHKAGIFKPQIPAFTVPQLSEAMDVLQKTANNLEVTIVAPLEPKKLDGVTLGLSGDHQLVNAGLAVSLSRCWLQRTGNWKKIFPNESKETEIPVAFCRGLATARLHGRAQVVHDVVSDPQDSSDSMETPCGDLIFYLDGAHSPESMEACGRWFSSAVRGDKSLSTAILLFNCMEVRDPQVLLPKLVTTCASSGTHFSRALFVPSMSTYNKVISGASAIPSDTRRKDLTWQFRLQRLWEKSIQGTDAGLDHTLKPDGITALPPHDFLCGDAPQCGGPAGTPVTSSAVMPSLPLTINWLRDCVRRNPSLKLEVLVTGSLHLVGDVLRLLKR

SEQ ID NO: 71804 - protein, 396 aa, Arabidopsis thaliana
  peptide (1)..(396): Ceres Seq. ID no. 4814219
MPPLFQFLTVLAFKIFVCEKVDVAVIEVGLGGKLDSTNVIQKPVVCGIASLGMDHMDILGNTLADIAFHKAGIFKPQIPAFTVPQLSEAMDVLQKTANNLEVTIVAPLEPKKLDGVTLGLSGDHQLVNAGLAVSLSRCWLQRTGNWKKIFPNESKETEIPVAFCRGLATARLHGRAQVVHDVVSDPQDSSDSMETPCGDLIFYLDGAHSPESMEACGRWFSSAVRGDKSLSTAILLFNCMEVRDPQVLLPKLVTTCASSGTHFSRALFVPSMSTYNKVISGASAIPSDTRRKDLTWQFRLQRLWEKSIQGTDAGLDHTLKPDGITALPPHDFLCGDAPQCGGPAGTPVTSSAVMPSLPLTINWLRDCVRRNPSLKLEVLVTGSLHLVGDVLRLLKR

SEQ ID NO: 71805 - protein, 344 aa, Arabidopsis thaliana
  peptide (1)..(344): Ceres Seq. ID no. 4814220
MDHMDILGNTLADIAFHKAGIFKPQIPAFTVPQLSEAMDVLQKTANNLEVTIVAPLEPKKLDGVTLGLSGDHQLVNAGLAVSLSRCWLQRTGNWKKIFPNESKETEIPVAFCRGLATARLHGRAQVVHDVVSDPQDSSDSMETPCGDLIFYLDGAHSPESMEACGRWFSSAVRGDKSLSTAILLFNCMEVRDPQVLLPKLVTTCASSGTHFSRALFVPSMSTYNKVISGASAIPSDTRRKDLTWQFRLQRLWEKSIQGTDAGLDHTLKPDGITALPPHDFLCGDAPQCGGPAGTPVTSSAVMPSLPLTINWLRDCVRRNPSLKLEVLVTGSLHLVGDVLRLLKR

SEQ ID NO: 71806 - DNA, 471 bp, Arabidopsis thaliana
  misc_feature (1)..(471): Ceres Seq. ID no. 4814435
  misc_feature (1)..(471): Ortholog of  Ceres SEQ ID NO 15178852 as cited in SEQ ID NO 0
atgcgttcaggagagaaaaacatggattctgtattaaccaataagaacccaattatttatccgaagagaacacggcgttatcgtactgatcagagcagtaccgatgagttttcatctacaaatcgtataagagatatcaaagatccagagcatcctgaactttctttggaagatctcaatgttcttactgaagaatcagttgaagttgatgatcacaagagttacgttagaattacattcactccaactcttcctcattgtcacttgccaacccatattggtctttgcatcttagtcaaacttgtgcaaagcttacctgctagattcaaggttgatgtgagagtagcaccagggagtcatgataaagagacgacagtcaataaacaacttggggataaagaacgtgtgactgcagcattagagaatcccgagttggtggctctgcttaataaaatgatgcaagtgtgttag

SEQ ID NO: 71807 - protein, 156 aa, Arabidopsis thaliana
  peptide (1)..(156): Ceres Seq. ID no. 4814436
MRSGEKNMDSVLTNKNPIIYPKRTRRYRTDQSSTDEFSSTNRIRDIKDPEHPELSLEDLNVLTEESVEVDDHKSYVRITFTPTLPHCHLPTHIGLCILVKLVQSLPARFKVDVRVAPGSHDKETTVNKQLGDKERVTAALENPELVALLNKMMQVC

SEQ ID NO: 71808 - protein, 149 aa, Arabidopsis thaliana
  peptide (1)..(149): Ceres Seq. ID no. 4814437
MDSVLTNKNPIIYPKRTRRYRTDQSSTDEFSSTNRIRDIKDPEHPELSLEDLNVLTEESVEVDDHKSYVRITFTPTLPHCHLPTHIGLCILVKLVQSLPARFKVDVRVAPGSHDKETTVNKQLGDKERVTAALENPELVALLNKMMQVC

SEQ ID NO: 71809 - DNA, 981 bp, Arabidopsis thaliana
  misc_feature (1)..(981): Ceres Seq. ID no. 4814465
  misc_feature (1)..(981): Ortholog of  Ceres SEQ ID NO 13585342 as cited in SEQ ID NO 63601
atgttgtttctaaccgcggctgtctgtttaatatgcttttacgtctacaagtccgtgaaaccgccgccgccaattccattgccggagaatgtttctgagatatctccaagaatcaagctcaacgatggcagatatttagcttacaaagaattagggtttcctaaagacaaagccaaaaataagattatcattctccatggattcgggagttccaagttagaaatgatcgacgaattcgagatatacttcttgttgttcgatagagctggttatggagaaagcgatcctcatccatcacgaacactaaaaacggatacatatgacatcgaagaacttgctgacaaattgcaaatcggtccaaagttccatgtcctaggaatgtcactcggggcttatccagtttacggctgtctcaagtacattcctcatagactaagtggagcaacgttggtggttccgatactgaatttttggtggagttgtctgcctctaaacttgtcgatttcagcgttcaagaaattgccaattcaaaatcagtggacacttggagtcgcacactactttccatggttattatattggtggatgactcagaaatggttttccccatttagtcagaatcctagagaaactatgaccgagcgcgatatagagctcgcggataagcatacaaaacacgcatatattaaggaatccgcactacgacaaggtgaatatgtgagcatgcaacgagacatcattgcgggttacgagaattgggagtttgatccaaccgaactgagcaatccattttcagatgataacaaagggtcagttcacatttggtgtgcactcgaagacaaacaaatttcgcatgaggttttactctacttatgtgataagcttccatggataaagcttcatgaagtccctgatgctggacatcttattatccatgagaagcagcattttgaagacattattaaagccgcttgtagttga

SEQ ID NO: 71810 - protein, 326 aa, Arabidopsis thaliana
  peptide (1)..(326): Ceres Seq. ID no. 4814466
MLFLTAAVCLICFYVYKSVKPPPPIPLPENVSEISPRIKLNDGRYLAYKELGFPKDKAKNKIIILHGFGSSKLEMIDEFEIYFLLFDRAGYGESDPHPSRTLKTDTYDIEELADKLQIGPKFHVLGMSLGAYPVYGCLKYIPHRLSGATLVVPILNFWWSCLPLNLSISAFKKLPIQNQWTLGVAHYFPWLLYWWMTQKWFSPFSQNPRETMTERDIELADKHTKHAYIKESALRQGEYVSMQRDIIAGYENWEFDPTELSNPFSDDNKGSVHIWCALEDKQISHEVLLYLCDKLPWIKLHEVPDAGHLIIHEKQHFEDIIKAACS

SEQ ID NO: 71811 - protein, 252 aa, Arabidopsis thaliana
  peptide (1)..(252): Ceres Seq. ID no. 4814467
MIDEFEIYFLLFDRAGYGESDPHPSRTLKTDTYDIEELADKLQIGPKFHVLGMSLGAYPVYGCLKYIPHRLSGATLVVPILNFWWSCLPLNLSISAFKKLPIQNQWTLGVAHYFPWLLYWWMTQKWFSPFSQNPRETMTERDIELADKHTKHAYIKESALRQGEYVSMQRDIIAGYENWEFDPTELSNPFSDDNKGSVHIWCALEDKQISHEVLLYLCDKLPWIKLHEVPDAGHLIIHEKQHFEDIIKAACS

SEQ ID NO: 71812 - protein, 200 aa, Arabidopsis thaliana
  peptide (1)..(200): Ceres Seq. ID no. 4814468
MSLGAYPVYGCLKYIPHRLSGATLVVPILNFWWSCLPLNLSISAFKKLPIQNQWTLGVAHYFPWLLYWWMTQKWFSPFSQNPRETMTERDIELADKHTKHAYIKESALRQGEYVSMQRDIIAGYENWEFDPTELSNPFSDDNKGSVHIWCALEDKQISHEVLLYLCDKLPWIKLHEVPDAGHLIIHEKQHFEDIIKAACS

SEQ ID NO: 71813 - DNA, 2055 bp, Arabidopsis thaliana
  misc_feature (1)..(2055): Ceres Seq. ID no. 4814586
  misc_feature (1)..(2055): Ortholog of  Ceres SEQ ID NO 14309641 as cited in SEQ ID NO 0
atgactacgactaggcggaaaaatacacattggtgtcatacttgtagacgaggaatccatcttcaaggagaaggcagaagagaaggagcttgcatttactgtggtaacacctttcttgaaaggctatatgagaatgttgaactaagcccttttgatttattcggattagcctacgaagaagctcgtaaccgtcgcaacaacagaagatcggttataggagaacaactaagttttgaagagttgtttaaccggctcccagcactacaagaccgtcgtggtcctcctccagcatcactagccgcgattaactcattgcaaaagatcaaaatcaggcagaagcatctcggtttagatccctattgtccggtttgccaagaccagtttgaaatcggatcagatgcaagaaaaatgccgtgtaaacatatctaccattctgaatgtatactcccgtggttagtccagcgtaatacttgccccgtctgccgcaaagaacttccacaagaccgaaataatagccggaaaaatccattgtggcatctgtggccgttcagtttgcttttgtcaatgggtaaaaccgaggatgatgtgagtctccgtgtcgccggcggcgaagctaccggcgattcgacggtgaggaatgctcggtgtgggtgttgcaaatggatctcaagcttcgttgggttcaaatgtttattcgtgctgcttttatcagtcgctttgtttctttcggctttgtttttgttgcttccgtttcctatggatcgtgaggattcgaatcttgatcccagatttagaggtcatgctatagtggccagttttagcatcaatagatcggcttcttttcttaatgaaaatacattgcagcttcagaatgacatctttcaagagatgagctacatttccatcaaagtaactatcctggctgttgagccgtcagatgaattgaacataacaaaggttgtgtttggaattgaccctgatactggataccgagaaatcttacctctgtccctgagttctatcaaagagatgtttgaatcggtgctcataaatcaatctactctccagcttacaaaatccttgtttggggaaaccttcctttttgaagtgctaaaatttccaggaggaatcactgtgattccaccacaaagtgctttccctctgcagaaattcaagattgttttcaactttaccctaaactactctattcaccagatacagataaacttcaatacccttgctagtcaactcaaaaatgggctgaatctcgcaccatacgagaatttgtatgtaagcttatcgaactcagaagggtcgaccgtgtctcccccgacaactgttcactcatcagttttgctaagagtcgggacttcaaattcaagcccaaggttgaaacaactgactgataccatcacaggttcacgctcgaaaaaccttggcctgaataataccatatttggtaaggtcaagcaagttcgtctgtcatctttcttgccaaacagcagtgatagtagcaccaaatctccatcaccctcacctagtccccattcgaagcatcaccatcaccatcaccatcaccatcaccaccaccaccatcaccatcacaaccatcatcaccaccaccaccacaatcttagcccgaaaatggctcccgaggtttcacctgtggcctctcctgctcctcacagaagccgtaagagagctccatctgcacctccaccctgcaacccagggaatagagtacatttcaaggagaaacgcgtgcagttttcatccacacctgcgcctgctccttctgctggggcaccacatcatcagctgcactcaccggccccaatttctgcagccaagtctcatatagttccaatctctgcccctctaccacatgtggtgtttgcccatgcagctcaaccacccataacggaaccacgggaaccacatgcaaacgaagttgctcatcctcaaccgcagtcctcttcatcagcgattgaggttttaccagctatgccatggattgtccttctcatgctgatagtggcctggcttcatgaataa

SEQ ID NO: 71814 - protein, 684 aa, Arabidopsis thaliana
  peptide (1)..(684): Ceres Seq. ID no. 4814587
MTTTRRKNTHWCHTCRRGIHLQGEGRREGACIYCGNTFLERLYENVELSPFDLFGLAYEEARNRRNNRRSVIGEQLSFEELFNRLPALQDRRGPPPASLAAINSLQKIKIRQKHLGLDPYCPVCQDQFEIGSDARKMPCKHIYHSECILPWLVQRNTCPVCRKELPQDRNNSRKNPLWHLWPFSLLLSMGKTEDDVSLRVAGGEATGDSTVRNARCGCCKWISSFVGFKCLFVLLLSVALFLSALFLLLPFPMDREDSNLDPRFRGHAIVASFSINRSASFLNENTLQLQNDIFQEMSYISIKVTILAVEPSDELNITKVVFGIDPDTGYREILPLSLSSIKEMFESVLINQSTLQLTKSLFGETFLFEVLKFPGGITVIPPQSAFPLQKFKIVFNFTLNYSIHQIQINFNTLASQLKNGLNLAPYENLYVSLSNSEGSTVSPPTTVHSSVLLRVGTSNSSPRLKQLTDTITGSRSKNLGLNNTIFGKVKQVRLSSFLPNSSDSSTKSPSPSPSPHSKHHHHHHHHHHHHHHHHHNHHHHHHHNLSPKMAPEVSPVASPAPHRSRKRAPSAPPPCNPGNRVHFKEKRVQFSSTPAPAPSAGAPHHQLHSPAPISAAKSHIVPISAPLPHVVFAHAAQPPITEPREPHANEVAHPQPQSSSSAIEVLPAMPWIVLLMLIVAWLHE

SEQ ID NO: 71815 - protein, 548 aa, Arabidopsis thaliana
  peptide (1)..(548): Ceres Seq. ID no. 4814588
MPCKHIYHSECILPWLVQRNTCPVCRKELPQDRNNSRKNPLWHLWPFSLLLSMGKTEDDVSLRVAGGEATGDSTVRNARCGCCKWISSFVGFKCLFVLLLSVALFLSALFLLLPFPMDREDSNLDPRFRGHAIVASFSINRSASFLNENTLQLQNDIFQEMSYISIKVTILAVEPSDELNITKVVFGIDPDTGYREILPLSLSSIKEMFESVLINQSTLQLTKSLFGETFLFEVLKFPGGITVIPPQSAFPLQKFKIVFNFTLNYSIHQIQINFNTLASQLKNGLNLAPYENLYVSLSNSEGSTVSPPTTVHSSVLLRVGTSNSSPRLKQLTDTITGSRSKNLGLNNTIFGKVKQVRLSSFLPNSSDSSTKSPSPSPSPHSKHHHHHHHHHHHHHHHHHNHHHHHHHNLSPKMAPEVSPVASPAPHRSRKRAPSAPPPCNPGNRVHFKEKRVQFSSTPAPAPSAGAPHHQLHSPAPISAAKSHIVPISAPLPHVVFAHAAQPPITEPREPHANEVAHPQPQSSSSAIEVLPAMPWIVLLMLIVAWLHE

SEQ ID NO: 71816 - protein, 496 aa, Arabidopsis thaliana
  peptide (1)..(496): Ceres Seq. ID no. 4814589
MGKTEDDVSLRVAGGEATGDSTVRNARCGCCKWISSFVGFKCLFVLLLSVALFLSALFLLLPFPMDREDSNLDPRFRGHAIVASFSINRSASFLNENTLQLQNDIFQEMSYISIKVTILAVEPSDELNITKVVFGIDPDTGYREILPLSLSSIKEMFESVLINQSTLQLTKSLFGETFLFEVLKFPGGITVIPPQSAFPLQKFKIVFNFTLNYSIHQIQINFNTLASQLKNGLNLAPYENLYVSLSNSEGSTVSPPTTVHSSVLLRVGTSNSSPRLKQLTDTITGSRSKNLGLNNTIFGKVKQVRLSSFLPNSSDSSTKSPSPSPSPHSKHHHHHHHHHHHHHHHHHNHHHHHHHNLSPKMAPEVSPVASPAPHRSRKRAPSAPPPCNPGNRVHFKEKRVQFSSTPAPAPSAGAPHHQLHSPAPISAAKSHIVPISAPLPHVVFAHAAQPPITEPREPHANEVAHPQPQSSSSAIEVLPAMPWIVLLMLIVAWLHE

SEQ ID NO: 71817 - DNA, 1269 bp, Arabidopsis thaliana
  misc_feature (1)..(1269): Ceres Seq. ID no. 4814752
  misc_feature (1)..(1269): Ortholog of  Ceres SEQ ID NO 14302990 as cited in SEQ ID NO 67543
atggcggatttgttacccatttacctcattattttggcatttctatgcactgtcggagccattgctttggctttattccatatctacaagcacctattgaactatacggaacccatttatcagagatatattgtgcgcattgtcttcatggtcccggtttatgccttgatgtcattcttggctctcgttttgcccaagagctctatatattttaactctatccgtgaagtttacgaagcatgggtgatatataattttctatcgctgtgtttggcctgggttggaggcccaggttcggtagttataagtttaactggtcgctctctgaagccatcttggcatctcatgacgtgttgcatcccaccactaccattagacgggcgttttattagacgatgcaagcaaggttgtctgcaatttgttattctaaagccaatcctagttgctgtcacacttgtgctttatgcaaaagggaaatacaaggatggaaattttagccctgatcaatcctatctctatcttaccatcatctatacaatatcatacactgtagctctgtacgcgctggtcctcttttatgtggcatgcaaagatctgcttcagccattcaatccagtcccaaaatttgtgattataaagtctgttgtctttctaacctattggcagggtgttctagttttcctttttgctaaatctggatttataagggatgaagaagaagcagccctcttccaaaattttataatatgtgtggaaatgcttattgctgcagctgctcatttctatgcatttccgtacaaggaatatgcagaggccaatgttggaggagctcgcagtttctcaggaagtctggcacatgctcttatgctaaacgatttctaccatgatactgttcaccagtttgcaccaacatatcacgattatgtgctctataatcataatgatgggggtgaggaagggacaaggaagtaccgagcacgaacatttgtgccaactggtcaggaaatggatgctgttagaaagaacaaacacatgtttggaaacaagatagatggtgtttcggtctccagtcaatcttcagaaacaagcacacccaaaacctctggtgtaacttatgatcctgcacgccctgagagcatgaaatcttccttgctggtagatgcctcggactctgtttccacaatgtatgacatgtcgctcattgacattgatatatcgagctaccctagcaaggtaccttctgcaaatataagtggaggacctaaatag

SEQ ID NO: 71818 - protein, 422 aa, Arabidopsis thaliana
  peptide (1)..(422): Ceres Seq. ID no. 4814753
MADLLPIYLIILAFLCTVGAIALALFHIYKHLLNYTEPIYQRYIVRIVFMVPVYALMSFLALVLPKSSIYFNSIREVYEAWVIYNFLSLCLAWVGGPGSVVISLTGRSLKPSWHLMTCCIPPLPLDGRFIRRCKQGCLQFVILKPILVAVTLVLYAKGKYKDGNFSPDQSYLYLTIIYTISYTVALYALVLFYVACKDLLQPFNPVPKFVIIKSVVFLTYWQGVLVFLFAKSGFIRDEEEAALFQNFIICVEMLIAAAAHFYAFPYKEYAEANVGGARSFSGSLAHALMLNDFYHDTVHQFAPTYHDYVLYNHNDGGEEGTRKYRARTFVPTGQEMDAVRKNKHMFGNKIDGVSVSSQSSETSTPKTSGVTYDPARPESMKSSLLVDASDSVSTMYDMSLIDIDISSYPSKVPSANISGGPK

SEQ ID NO: 71819 - protein, 373 aa, Arabidopsis thaliana
  peptide (1)..(373): Ceres Seq. ID no. 4814754
MVPVYALMSFLALVLPKSSIYFNSIREVYEAWVIYNFLSLCLAWVGGPGSVVISLTGRSLKPSWHLMTCCIPPLPLDGRFIRRCKQGCLQFVILKPILVAVTLVLYAKGKYKDGNFSPDQSYLYLTIIYTISYTVALYALVLFYVACKDLLQPFNPVPKFVIIKSVVFLTYWQGVLVFLFAKSGFIRDEEEAALFQNFIICVEMLIAAAAHFYAFPYKEYAEANVGGARSFSGSLAHALMLNDFYHDTVHQFAPTYHDYVLYNHNDGGEEGTRKYRARTFVPTGQEMDAVRKNKHMFGNKIDGVSVSSQSSETSTPKTSGVTYDPARPESMKSSLLVDASDSVSTMYDMSLIDIDISSYPSKVPSANISGGPK

SEQ ID NO: 71820 - protein, 366 aa, Arabidopsis thaliana
  peptide (1)..(366): Ceres Seq. ID no. 4814755
MSFLALVLPKSSIYFNSIREVYEAWVIYNFLSLCLAWVGGPGSVVISLTGRSLKPSWHLMTCCIPPLPLDGRFIRRCKQGCLQFVILKPILVAVTLVLYAKGKYKDGNFSPDQSYLYLTIIYTISYTVALYALVLFYVACKDLLQPFNPVPKFVIIKSVVFLTYWQGVLVFLFAKSGFIRDEEEAALFQNFIICVEMLIAAAAHFYAFPYKEYAEANVGGARSFSGSLAHALMLNDFYHDTVHQFAPTYHDYVLYNHNDGGEEGTRKYRARTFVPTGQEMDAVRKNKHMFGNKIDGVSVSSQSSETSTPKTSGVTYDPARPESMKSSLLVDASDSVSTMYDMSLIDIDISSYPSKVPSANISGGPK

SEQ ID NO: 71821 - DNA, 1437 bp, Arabidopsis thaliana
  misc_feature (1)..(1437): Ceres Seq. ID no. 4814854
  misc_feature (1)..(1437): Ortholog of  Ceres SEQ ID NO 12582251 as cited in SEQ ID NO 55724
atgtccgggtccgaatctgtgtatcggaaacgccaaccaatggatatggatggttaccacaaacggagcgccggtttaaacccttgtaaacactccggtttctcacattcatcaagacccatggctccaggaatttaccgttacccagaagtgaaatcttcgttgcggagacaagttcatgcgcctgtgcggatactcaatagcggtcgagatcgtagcacacgacaaggttctggtaatgtgttgggaacctttctcacaaggaacaatgacatgtggaaaagaaatgcacttgattcgtctttacgctatagaacggatagagaagtaattgatgttgatgatgagcttggagatgttgaaatgatatctgatgatacaagtagggagggtgtcgaaaacgtggctatggaggtggacgaggtggaagagaaggcggagatgggaaatggattgttttctgaggttgccagtctgaaaaatgggagcttgagggtgggtgaatgttctaaagctaatagtagttcactcgttgtgaatcgccctgtgactgatgtcacaagttttgaagcatacagaaaggttcttgagagtgctgtgaaccggacttctaaactgaaagacagaggctttgttgatttttttaaagagagaggtcgtgctttactacgaagcttgtcttccttttggagacaagatgaagaaccagtagaggttgtacaacgtgaggcatttgtacctctttctagagaggaggagacagcagtcaggcgtgcattctcagctaatgattcaaacatcttggttactcataagaactcaaatattgatattaccgggaaaatcttgaggtgccttaaaccaggcaaatggttgaacgatgaggtcattaatctttatatggtattgctgaaagaaagggaagctagagaaccaaagaagtttcttaaatgtcattttttcaatacatttttcttcactaagttagttaattcggcgactggatacaactatggtgcagtgagaagatggacttcaatgaagaggttgggctaccatctcaaagactgtgacaagatatttatccctatccatatgaacatccactggactttggctgtaattaatataaaggaccagaaattccagtatcttgactctttcaaaggaagggagcctaaaatcctcgatgcactggctagatactttgtcgatgaagtgagggataagagtgaagtagaccttgatgtaagtcgatggagacaagaatttgtccaggaccttccaatgcagagaaatggattcgattgtggaatgtttatggtgaaatacatcgacttctatagcagaggtctggatctttgtttcactcaggaacaaatgccatatttccgggctaggacagcaaaggagattctgcaactgaaagccgagtga

SEQ ID NO: 71822 - protein, 478 aa, Arabidopsis thaliana
  peptide (1)..(478): Ceres Seq. ID no. 4814855
MSGSESVYRKRQPMDMDGYHKRSAGLNPCKHSGFSHSSRPMAPGIYRYPEVKSSLRRQVHAPVRILNSGRDRSTRQGSGNVLGTFLTRNNDMWKRNALDSSLRYRTDREVIDVDDELGDVEMISDDTSREGVENVAMEVDEVEEKAEMGNGLFSEVASLKNGSLRVGECSKANSSSLVVNRPVTDVTSFEAYRKVLESAVNRTSKLKDRGFVDFFKERGRALLRSLSSFWRQDEEPVEVVQREAFVPLSREEETAVRRAFSANDSNILVTHKNSNIDITGKILRCLKPGKWLNDEVINLYMVLLKEREAREPKKFLKCHFFNTFFFTKLVNSATGYNYGAVRRWTSMKRLGYHLKDCDKIFIPIHMNIHWTLAVINIKDQKFQYLDSFKGREPKILDALARYFVDEVRDKSEVDLDVSRWRQEFVQDLPMQRNGFDCGMFMVKYIDFYSRGLDLCFTQEQMPYFRARTAKEILQLKAE

SEQ ID NO: 71823 - protein, 465 aa, Arabidopsis thaliana; identical to SEQ ID NO: 24073
  peptide (1)..(465): Ceres Seq. ID no. 4814856

SEQ ID NO: 71824 - protein, 463 aa, Arabidopsis thaliana
  peptide (1)..(463): Ceres Seq. ID no. 4814857
MDGYHKRSAGLNPCKHSGFSHSSRPMAPGIYRYPEVKSSLRRQVHAPVRILNSGRDRSTRQGSGNVLGTFLTRNNDMWKRNALDSSLRYRTDREVIDVDDELGDVEMISDDTSREGVENVAMEVDEVEEKAEMGNGLFSEVASLKNGSLRVGECSKANSSSLVVNRPVTDVTSFEAYRKVLESAVNRTSKLKDRGFVDFFKERGRALLRSLSSFWRQDEEPVEVVQREAFVPLSREEETAVRRAFSANDSNILVTHKNSNIDITGKILRCLKPGKWLNDEVINLYMVLLKEREAREPKKFLKCHFFNTFFFTKLVNSATGYNYGAVRRWTSMKRLGYHLKDCDKIFIPIHMNIHWTLAVINIKDQKFQYLDSFKGREPKILDALARYFVDEVRDKSEVDLDVSRWRQEFVQDLPMQRNGFDCGMFMVKYIDFYSRGLDLCFTQEQMPYFRARTAKEILQLKAE

SEQ ID NO: 71825 - DNA, 2616 bp, Arabidopsis thaliana
  misc_feature (1)..(2616): Ceres Seq. ID no. 4814858
  misc_feature (1)..(2616): Ortholog of  Ceres SEQ ID NO 13657677 as cited in SEQ ID NO 66119
atggtgggattcgctagaacaaaattttgtaagaacttatcatctttatctgataatggcgaaaatcatgagaaaccatatacatttgagggtaataggcaaactgttaatgatatttgcaatgttttggagactggtccatggggaccttcagctgagaatactctatctgctctaagttttaaaccacaaccagaatttgtcattggggttttacggaggctgaaagatgttaatcgggctattgagtatttccgttggtatgagagaagaaccgagctgcctcattgtcctgaatcatacaactccttgcttttggtgatggctcgttgtagaaattttgatgctttggaccagattcttggagaaatgagtgttgcaggatttggcccttctgttaacacttgtattgagatggttttgggctgcgttaaggctaataagcttagggaaggttatgatgttgtgcagatgatgaggaagttcaagttccgacctgctttttcagcttacacaactcttatcggtgctttctcggcagttaatcattctgatatgatgttgacactctttcagcaaatgcaggagttaggatatgaaccgaccgttcatctgtttacaacattgattcggggatttgccaaagagggtcgagttgattctgctctatctttacttgatgagatgaagagcagctctcttgatgccgacattgttctttataatgtatgtattgatagctttggtaaagtgggcaaggttgatatggcatggaaattttttcatgagattgaagcgaatggtttaaagcctgatgaagtcacttataccagcatgataggagttctgtgcaaggcaaacagattggatgaagctgtagagatgtttgagcatctagagaagaatagacgggttccttgcacttatgcttacaacacgatgattatgggttatggttcggctggaaaatttgatgaagcatacagtctcctagagagacagagggctaaagggtctataccgagtgtgattgcatataattgcattcttacatgcttaaggaaaatgggaaaagtggacgaagctttgaaagttttcgaggagatgaaaaaagacgctgctccaaatctttcaacctataatattctcattgacatgctgtgtagagctggtaaacttgacactgcttttgagctacgcgattctatgcagaaggctggtctgtttcctaatgtgaggactgtgaacataatggttgatcggctctgtaaatcccaaaaacttgatgaagcatgtgctatgttcgaggagatggattataaggtttgtaccccagatgagattacattttgctccctcatagatggcttaggaaaggtcggaagagttgatgacgcttacaaagtctatgaaaagatgttggattctgattgtcgtactaactctatcgtttacacatccctcataaaaaacttcttcaaccacggtagaaaagaagatggacacaagatatacaaggacatgattaatcaaaactgttctcctgatttacagcttcttaatacgtacatggattgcatgttcaaggctggagaaccagaaaagggaagggccatgtttgaagaaataaaagcccgtcggtttgtcccagatgctcgaagctactcgattttaattcatggactaataaaagcaggatttgcaaatgaaacttatgagttgttttattccatgaaagagcaagggtgtgtcttggacacacgtgcttacaatattgtcattgacggtttctgcaagtgtggaaaagttaacaaagcttatcagctgctggaggaaatgaagacaaaaggttttgagccaactgttgttacgtatggttcagtcatcgacgggcttgcaaaaatagatcggcttgatgaagcttatatgctctttgaggaagcaaaatcgaagagaatagagctaaacgtggtgatttacagtagtcttattgatgggtttggaaaagttggtaggatagatgaagcttaccttatcttggaagagcttatgcagaaaggattaacacctaatctttacacatggaactcattgcttgatgcattggtcaaagctgaggaaatcaacgaagcgcttgtctgttttcagtcgatgaaagaactgaaatgcacgccaaaccaagttacttatggtatcctaataaatggtctttgtaaggtcaggaagttcaataaagcctttgtcttttggcaggagatgcagaaacaggggatgaaacccagtactatttcttacaccaccatgatatcaggacttgcaaaggctgggaatattgcagaggctggggcgctcttcgatcggttcaaggcaaacggtggtgttccagactctgcttgttataatgccatgatcgaaggtctaagtaacggaaacagggcaatggatgctttttctctttttgaggaaacacgtcgaagaggattacctatccataacaaaacctgtgttgttcttttggatactttgcataagaatgattgtcttgagcaagcagctattgtgggagctgttttgagggaaacgggaaaggcacggcatgctgcccgatcttggtag

SEQ ID NO: 71826 - protein, 871 aa, Arabidopsis thaliana
  peptide (1)..(871): Ceres Seq. ID no. 4814859
MVGFARTKFCKNLSSLSDNGENHEKPYTFEGNRQTVNDICNVLETGPWGPSAENTLSALSFKPQPEFVIGVLRRLKDVNRAIEYFRWYERRTELPHCPESYNSLLLVMARCRNFDALDQILGEMSVAGFGPSVNTCIEMVLGCVKANKLREGYDVVQMMRKFKFRPAFSAYTTLIGAFSAVNHSDMMLTLFQQMQELGYEPTVHLFTTLIRGFAKEGRVDSALSLLDEMKSSSLDADIVLYNVCIDSFGKVGKVDMAWKFFHEIEANGLKPDEVTYTSMIGVLCKANRLDEAVEMFEHLEKNRRVPCTYAYNTMIMGYGSAGKFDEAYSLLERQRAKGSIPSVIAYNCILTCLRKMGKVDEALKVFEEMKKDAAPNLSTYNILIDMLCRAGKLDTAFELRDSMQKAGLFPNVRTVNIMVDRLCKSQKLDEACAMFEEMDYKVCTPDEITFCSLIDGLGKVGRVDDAYKVYEKMLDSDCRTNSIVYTSLIKNFFNHGRKEDGHKIYKDMINQNCSPDLQLLNTYMDCMFKAGEPEKGRAMFEEIKARRFVPDARSYSILIHGLIKAGFANETYELFYSMKEQGCVLDTRAYNIVIDGFCKCGKVNKAYQLLEEMKTKGFEPTVVTYGSVIDGLAKIDRLDEAYMLFEEAKSKRIELNVVIYSSLIDGFGKVGRIDEAYLILEELMQKGLTPNLYTWNSLLDALVKAEEINEALVCFQSMKELKCTPNQVTYGILINGLCKVRKFNKAFVFWQEMQKQGMKPSTISYTTMISGLAKAGNIAEAGALFDRFKANGGVPDSACYNAMIEGLSNGNRAMDAFSLFEETRRRGLPIHNKTCVVLLDTLHKNDCLEQAAIVGAVLRETGKARHAARSW

SEQ ID NO: 71827 - protein, 764 aa, Arabidopsis thaliana; identical to SEQ ID NO: 71631
  peptide (1)..(764): Ceres Seq. ID no. 4814860

SEQ ID NO: 71828 - protein, 748 aa, Arabidopsis thaliana
  peptide (1)..(748): Ceres Seq. ID no. 4814861
MSVAGFGPSVNTCIEMVLGCVKANKLREGYDVVQMMRKFKFRPAFSAYTTLIGAFSAVNHSDMMLTLFQQMQELGYEPTVHLFTTLIRGFAKEGRVDSALSLLDEMKSSSLDADIVLYNVCIDSFGKVGKVDMAWKFFHEIEANGLKPDEVTYTSMIGVLCKANRLDEAVEMFEHLEKNRRVPCTYAYNTMIMGYGSAGKFDEAYSLLERQRAKGSIPSVIAYNCILTCLRKMGKVDEALKVFEEMKKDAAPNLSTYNILIDMLCRAGKLDTAFELRDSMQKAGLFPNVRTVNIMVDRLCKSQKLDEACAMFEEMDYKVCTPDEITFCSLIDGLGKVGRVDDAYKVYEKMLDSDCRTNSIVYTSLIKNFFNHGRKEDGHKIYKDMINQNCSPDLQLLNTYMDCMFKAGEPEKGRAMFEEIKARRFVPDARSYSILIHGLIKAGFANETYELFYSMKEQGCVLDTRAYNIVIDGFCKCGKVNKAYQLLEEMKTKGFEPTVVTYGSVIDGLAKIDRLDEAYMLFEEAKSKRIELNVVIYSSLIDGFGKVGRIDEAYLILEELMQKGLTPNLYTWNSLLDALVKAEEINEALVCFQSMKELKCTPNQVTYGILINGLCKVRKFNKAFVFWQEMQKQGMKPSTISYTTMISGLAKAGNIAEAGALFDRFKANGGVPDSACYNAMIEGLSNGNRAMDAFSLFEETRRRGLPIHNKTCVVLLDTLHKNDCLEQAAIVGAVLRETGKARHAARSW

SEQ ID NO: 71829 - DNA, 1458 bp, Arabidopsis thaliana
  misc_feature (1)..(1458): Ceres Seq. ID no. 4814877
  misc_feature (1)..(1458): Ortholog of  Ceres SEQ ID NO 13597715 as cited in SEQ ID NO 65577
  misc_feature (1)..(1458): Ortholog of  Ceres SEQ ID NO 15178668 as cited in SEQ ID NO 68301
atggatagataccagagagtcgctaaaccgaaaccagagtctccgattaacgagaatgagatccgtatcaccagtaaaggccttatccgaaactacatcagttatgccaccagtcttcttcaggagaaaagtgttaaagacattgtgttgaaggcaatggggcaggcaatcagcaagactgtggctatctctgagatactaaaaaataaaatcccaggtttgcatcaagatattgcaatcagttctattagcattactgatgtctgggagcctactgaggagggtttgtttccggtggagttgacgcgccatgtttccatgatttcaatcacattgtcattgagcgagctaaacaaagattctcctgggtatcaagctccagcacagtcagatcagtctaagcctcaatatcagccacaacaagggagacaagcccgcctaccatacaatgcttatggtgaaggtaatgccttaaactttcttgacgatttaaatctgtcaatgttgattcgtatgggagagggagaggtcgtggcagagggagaagcaggggaagaggtggatatggaaactaccaagggagttatgaaggaaaagaccaagggaactatcaagaagattatcaaggtattgttttgccatagaaggcgatcatttcgtctaatgacaatgaaggtgggtattcaaactcgggcagaggccgtggacgtggtggacgaagctatggctatcgtgattctggatatcagggtggcagaggcgggtatggtggtgggagagatggtggatatggtggtgggagagatgacgggtatggggaaaggagaaatgacgggtatggggaaaggagaaatgacaggtatggtggaggaagagacgacgggtatggtggagggagagatgacggatatggtggaggcagaaacgatggatatgggggaagaagaggcggatttcgtggcggtcgtggtggaggcagagatgaaggatacggtggcggccgaggtggatatggaggtagaagtggcggccaaggtgatgggtatggcggaggcagaggtgacgggtatggtggaggcagaggtgacgggtatggtggaggcagaggtgatggctatggtggtggccgagttgataggtatgatggaggaagacgtgatggctatggtggaggccgatatgatggctatggtgggggtaaaagtgatggttatggaggtggccgaggcggataccgtggaggtagaggcggatatggtcgtggacgtggaaggatgggtaatggtggtcgttcaagggatggtgctagtaaccaaaacgaagcctaagctgtttcatatcccattttctaagctgtatgggttagctgctgcatatttttccgttgccttaaagacccttcaaattcttagcacaatcccaaggggtttgatatgttttaaaaaaggttatggttaa

SEQ ID NO: 71830 - protein, 485 aa, Arabidopsis thaliana
  peptide (1)..(485): Ceres Seq. ID no. 4814878
MDRYQRVAKPKPESPINENEIRITSKGLIRNYISYATSLLQEKSVKDIVLKAMGQAISKTVAISEILKNKIPGLHQDIAISSISITDVWEPTEEGLFPVELTRHVSMISITLSLSELNKDSPGYQAPAQSDQSKPQYQPQQGRQARLPYNAYGEGNALNFLDDLNLSMLIRMGEGEVVAEGEAGEEVDMETTKGVMKEKTKGTIKKIIKVLFCHRRRSFRLMTMKVGIQTRAEAVDVVDEAMAIVILDIRVAEAGMVVGEMVDMVVGEMTGMGKGEMTGMGKGEMTGMVEEETTGMVEGEMTDMVEAETMDMGEEEADFVAVVVEAEMKDTVAAEVDMEVEVAAKVMGMAEAEVTGMVEAEVTGMVEAEVMAMVVAELIGMMEEDVMAMVEADMMAMVGVKVMVMEVAEADTVEVEADMVVDVEGWVMVVVQGMVLVTKTKPKLFHIPFSKLYGLAAAYFSVALKTLQILSTIPRGLICFKKGYG

SEQ ID NO: 71831 - protein, 433 aa, Arabidopsis thaliana
  peptide (1)..(433): Ceres Seq. ID no. 4814879
MGQAISKTVAISEILKNKIPGLHQDIAISSISITDVWEPTEEGLFPVELTRHVSMISITLSLSELNKDSPGYQAPAQSDQSKPQYQPQQGRQARLPYNAYGEGNALNFLDDLNLSMLIRMGEGEVVAEGEAGEEVDMETTKGVMKEKTKGTIKKIIKVLFCHRRRSFRLMTMKVGIQTRAEAVDVVDEAMAIVILDIRVAEAGMVVGEMVDMVVGEMTGMGKGEMTGMGKGEMTGMVEEETTGMVEGEMTDMVEAETMDMGEEEADFVAVVVEAEMKDTVAAEVDMEVEVAAKVMGMAEAEVTGMVEAEVTGMVEAEVMAMVVAELIGMMEEDVMAMVEADMMAMVGVKVMVMEVAEADTVEVEADMVVDVEGWVMVVVQGMVLVTKTKPKLFHIPFSKLYGLAAAYFSVALKTLQILSTIPRGLICFKKGYG

SEQ ID NO: 71832 - protein, 379 aa, Arabidopsis thaliana
  peptide (1)..(379): Ceres Seq. ID no. 4814880
MISITLSLSELNKDSPGYQAPAQSDQSKPQYQPQQGRQARLPYNAYGEGNALNFLDDLNLSMLIRMGEGEVVAEGEAGEEVDMETTKGVMKEKTKGTIKKIIKVLFCHRRRSFRLMTMKVGIQTRAEAVDVVDEAMAIVILDIRVAEAGMVVGEMVDMVVGEMTGMGKGEMTGMGKGEMTGMVEEETTGMVEGEMTDMVEAETMDMGEEEADFVAVVVEAEMKDTVAAEVDMEVEVAAKVMGMAEAEVTGMVEAEVTGMVEAEVMAMVVAELIGMMEEDVMAMVEADMMAMVGVKVMVMEVAEADTVEVEADMVVDVEGWVMVVVQGMVLVTKTKPKLFHIPFSKLYGLAAAYFSVALKTLQILSTIPRGLICFKKGYG

SEQ ID NO: 71833 - DNA, 1947 bp, Arabidopsis thaliana
  misc_feature (1)..(1947): Ceres Seq. ID no. 4814881
  misc_feature (1)..(1947): Ortholog of  Ceres SEQ ID NO 13646955 as cited in SEQ ID NO 20654
atgaacattggatccaagacattggtcgaacaacgtttctctcgcggatttgcatcagtacgacgagtatctcgagcttcttcttcttcttcttcttctccttcctctccacatgttgatttgctctcttttattaaagcttcacttgataaacttgaaggtccttcccatcattggttgaatcgagactttgggaataaacagcttttcaaggacaaaggaacttatgtagttctagctggacatttgctagacggaacaagtgatctgagtggtttctttgagaaactaaagttgcttcagcagaggtctccgggtgtctgtttcatgggcatccacttcagtgatcaagctcgaatcgctgatgatcgaactgctctagctgagttgattttgaaggaatacctcacttttcctgtgctactttccgaaaaagaatttcccaagacaagtggggaagtacgttacatcgtgtttaaagattttaagaatcctctaatctacgaagagaaggatcttgatattgcttctgtagttaaagctcttgacagcctcctcactcaagatactgagaaatccaagtctgtcagacttttcacgaacacttggtcaaaacaagcagaggctatcaaggaatcacatttcccttctttctttcaggatttgttactttactttccaggttgtatctctgcagacgaagttggagaccgtctgtttctttctgataccaaccatcatcgtattattattttcgaaaacagtgggaagattgtagacagtattggttgtttcccaggttttgaggatggagattttgaatctgcaaagatgttacgtcctacagggaccctttacgacgaagcggaggattgtctttacattgtagattctgaggttattaagaaaactggtggcttatggtcttggataatggagaaaatgggtcttggaaaagatgacgatacaacagttgatgctgataccaaatcagaagaatttgatgcacgctctcttttgtttccatggcatatactgaagcgtgacgatgagagtcttttagtcattaacaaaagcttttcgaagttatggataataaattttgcttcaggagagatcgaagaagttgtggaagggttttcgaagataattgagatctgcggtcaatcaatcacagagaagctatcagtgttggaacatatgccttctaactggttgcaacagcaaactgcggctatcgcctcatttaaggagcagccaagtgcttcccttttgtcttcttttactaaacttggagacgacattgtcatgacagatataggtaaaattagcatacggttgaacatagagattcctccatgcacggagcttgttgaaccgatacaagaaagctgcatatggcgacagacaagaggcgcaatcagtgaattctcgagtgctggaagtgcagttgaaccttcagaaaagattggagtttcacaacaatggtatgatgaattagacagcctcgccaaagaaatagccaaccctgaagcagctgaggaagaggaagaagaagatgttaacccctctgaggttgacagagaagaagatggacgtatccacattgattgtcctgtcaaaacaagtcctggctcaagtgagcttattgtttatgcagctttgtatttaagactagcgagaaacgaagagacagaaagtgcgacccaggaagaactggcgagaaaaatagcaaagattttaaagccagtacggaacattacaactatgaaggaagatttgtttgtgaatttgttgtccaagtcaaagagagaattgagagacattgtcttcataaagccgatgcatgtgcggataaggttagactcgaaggatcatccaaaagccgataactcaagagacgtaatcttgactgactcctctgttgaggttgatgtctctctctga

SEQ ID NO: 71834 - protein, 648 aa, Arabidopsis thaliana
  peptide (1)..(648): Ceres Seq. ID no. 4814882
MNIGSKTLVEQRFSRGFASVRRVSRASSSSSSSPSSPHVDLLSFIKASLDKLEGPSHHWLNRDFGNKQLFKDKGTYVVLAGHLLDGTSDLSGFFEKLKLLQQRSPGVCFMGIHFSDQARIADDRTALAELILKEYLTFPVLLSEKEFPKTSGEVRYIVFKDFKNPLIYEEKDLDIASVVKALDSLLTQDTEKSKSVRLFTNTWSKQAEAIKESHFPSFFQDLLLYFPGCISADEVGDRLFLSDTNHHRIIIFENSGKIVDSIGCFPGFEDGDFESAKMLRPTGTLYDEAEDCLYIVDSEVIKKTGGLWSWIMEKMGLGKDDDTTVDADTKSEEFDARSLLFPWHILKRDDESLLVINKSFSKLWIINFASGEIEEVVEGFSKIIEICGQSITEKLSVLEHMPSNWLQQQTAAIASFKEQPSASLLSSFTKLGDDIVMTDIGKISIRLNIEIPPCTELVEPIQESCIWRQTRGAISEFSSAGSAVEPSEKIGVSQQWYDELDSLAKEIANPEAAEEEEEEDVNPSEVDREEDGRIHIDCPVKTSPGSSELIVYAALYLRLARNEETESATQEELARKIAKILKPVRNITTMKEDLFVNLLSKSKRELRDIVFIKPMHVRIRLDSKDHPKADNSRDVILTDSSVEVDVSL

SEQ ID NO: 71835 - protein, 539 aa, Arabidopsis thaliana
  peptide (1)..(539): Ceres Seq. ID no. 4814883
MGIHFSDQARIADDRTALAELILKEYLTFPVLLSEKEFPKTSGEVRYIVFKDFKNPLIYEEKDLDIASVVKALDSLLTQDTEKSKSVRLFTNTWSKQAEAIKESHFPSFFQDLLLYFPGCISADEVGDRLFLSDTNHHRIIIFENSGKIVDSIGCFPGFEDGDFESAKMLRPTGTLYDEAEDCLYIVDSEVIKKTGGLWSWIMEKMGLGKDDDTTVDADTKSEEFDARSLLFPWHILKRDDESLLVINKSFSKLWIINFASGEIEEVVEGFSKIIEICGQSITEKLSVLEHMPSNWLQQQTAAIASFKEQPSASLLSSFTKLGDDIVMTDIGKISIRLNIEIPPCTELVEPIQESCIWRQTRGAISEFSSAGSAVEPSEKIGVSQQWYDELDSLAKEIANPEAAEEEEEEDVNPSEVDREEDGRIHIDCPVKTSPGSSELIVYAALYLRLARNEETESATQEELARKIAKILKPVRNITTMKEDLFVNLLSKSKRELRDIVFIKPMHVRIRLDSKDHPKADNSRDVILTDSSVEVDVSL

SEQ ID NO: 71836 - protein, 371 aa, Arabidopsis thaliana
  peptide (1)..(371): Ceres Seq. ID no. 4814884
MLRPTGTLYDEAEDCLYIVDSEVIKKTGGLWSWIMEKMGLGKDDDTTVDADTKSEEFDARSLLFPWHILKRDDESLLVINKSFSKLWIINFASGEIEEVVEGFSKIIEICGQSITEKLSVLEHMPSNWLQQQTAAIASFKEQPSASLLSSFTKLGDDIVMTDIGKISIRLNIEIPPCTELVEPIQESCIWRQTRGAISEFSSAGSAVEPSEKIGVSQQWYDELDSLAKEIANPEAAEEEEEEDVNPSEVDREEDGRIHIDCPVKTSPGSSELIVYAALYLRLARNEETESATQEELARKIAKILKPVRNITTMKEDLFVNLLSKSKRELRDIVFIKPMHVRIRLDSKDHPKADNSRDVILTDSSVEVDVSL

SEQ ID NO: 71837 - DNA, 993 bp, Arabidopsis thaliana
  misc_feature (1)..(993): Ceres Seq. ID no. 4814964
  misc_feature (1)..(993): Ortholog of  Ceres SEQ ID NO 14309794 as cited in SEQ ID NO 20350
atgtgggcaacgaagtcgcgtcggtgtgccgttcatacgtcttccatggcttccggtgatgttcttcctagattcttcactgtcttcctctcccattgcagctccgaatccatggtgataccaaggtcttactacaatcttttaccacgtccgttgcccaagactgcgattctcatcggaactggtggaagattttggaaagtagcaatgacgagcaagcaagagcaagtgtattttgaacaaggctggggaaatttcgttgctgataaccagttaaaagagggagaattcttaacttttgtgtttgatgggcacaaaagttatgaagtaagtatctatggtcgtggagattgcaaagagactcgagcagtcattcaagttgaagagatctctgatgatacagaagatgacaacgtttctcttcatagccctagcaatgtttcacttgatagccttagcaacgattctcatcatagcactagcaacgtttctcttcgaagccttagcaacgattctcttcatggtgatgctgagatagagagcgacagtgagtattctcccgagaacctaccctcagcctctatatctgttgaatccgttgaggtggtgaatccaacaacaagcaggcagagaagttacaagaggaagaccattgagaatccacatctgtatttggatgatccaaacaatgtctgttttgagacgtgtcttaagcttagaaagtttgagctgttagttcatgcacagttggtgaaagactacggcttgatattcagcgacaatgttgactatattgacggatatggaaaactaaccgcgaaaacgaccaagtgggcagatcaacgggtttgcataaacaaatggcagaaaatatgcgagagaaaccagttcacagagaatgactccatcctatgtgaaattctccgcaacgaggacaaagtggtttatgcaatcaagattcacatcttccgcgatgcagcagcaagcacttga

SEQ ID NO: 71838 - protein, 330 aa, Arabidopsis thaliana
  peptide (1)..(330): Ceres Seq. ID no. 4814965
MWATKSRRCAVHTSSMASGDVLPRFFTVFLSHCSSESMVIPRSYYNLLPRPLPKTAILIGTGGRFWKVAMTSKQEQVYFEQGWGNFVADNQLKEGEFLTFVFDGHKSYEVSIYGRGDCKETRAVIQVEEISDDTEDDNVSLHSPSNVSLDSLSNDSHHSTSNVSLRSLSNDSLHGDAEIESDSEYSPENLPSASISVESVEVVNPTTSRQRSYKRKTIENPHLYLDDPNNVCFETCLKLRKFELLVHAQLVKDYGLIFSDNVDYIDGYGKLTAKTTKWADQRVCINKWQKICERNQFTENDSILCEILRNEDKVVYAIKIHIFRDAAAST

SEQ ID NO: 71839 - protein, 315 aa, Arabidopsis thaliana
  peptide (1)..(315): Ceres Seq. ID no. 4814966
MASGDVLPRFFTVFLSHCSSESMVIPRSYYNLLPRPLPKTAILIGTGGRFWKVAMTSKQEQVYFEQGWGNFVADNQLKEGEFLTFVFDGHKSYEVSIYGRGDCKETRAVIQVEEISDDTEDDNVSLHSPSNVSLDSLSNDSHHSTSNVSLRSLSNDSLHGDAEIESDSEYSPENLPSASISVESVEVVNPTTSRQRSYKRKTIENPHLYLDDPNNVCFETCLKLRKFELLVHAQLVKDYGLIFSDNVDYIDGYGKLTAKTTKWADQRVCINKWQKICERNQFTENDSILCEILRNEDKVVYAIKIHIFRDAAAST

SEQ ID NO: 71840 - protein, 293 aa, Arabidopsis thaliana
  peptide (1)..(293): Ceres Seq. ID no. 4814967
MVIPRSYYNLLPRPLPKTAILIGTGGRFWKVAMTSKQEQVYFEQGWGNFVADNQLKEGEFLTFVFDGHKSYEVSIYGRGDCKETRAVIQVEEISDDTEDDNVSLHSPSNVSLDSLSNDSHHSTSNVSLRSLSNDSLHGDAEIESDSEYSPENLPSASISVESVEVVNPTTSRQRSYKRKTIENPHLYLDDPNNVCFETCLKLRKFELLVHAQLVKDYGLIFSDNVDYIDGYGKLTAKTTKWADQRVCINKWQKICERNQFTENDSILCEILRNEDKVVYAIKIHIFRDAAAST

SEQ ID NO: 71841 - DNA, 840 bp, Arabidopsis thaliana
  misc_feature (1)..(840): Ceres Seq. ID no. 4815026
  misc_feature (1)..(840): Ortholog of  Ceres SEQ ID NO 13595668 as cited in SEQ ID NO 56792
atggcggcgactatggcagattataatgatcagatcgtcaatgagacctctttttacaaccgaatggttctgagtcaccttttgccggtgaatctatgggaacctttaccacatttcctccagacatggctccggaactacctcgccggaaacatactctacttcatctccggcttcctctggtgcttctacatctattaccttaaactcaacgtttacgtccccaaagaatccattcctacgagaaaggcaatgcttttgcaaatatacgtggcaatgaaggctatgccttggtacactcttcttccagctgtctctgagtatatgatcgagcatggttggaccaaatgttactctacacttgaccatttcaactggttcctctgtttcctctacatagctctctatcttgttttagttgagtttatgatttattgggttcacaaagagcttcatgacattaaatttctctataagcatctccatgctacccatcatatgtacaacaagcaaaacacactctctccatttgccgggctcgcattccatccgctggacgggatacttcaggctataccgcacgtgatagcgctgtttatagtgccgattcatctcataacacatctgagtcttttgtttttggaagggatatggacagcaagcatccatgattgcatacatggtaacatctggcctataatgggtgcaggataccataccatacaccatacaacatacaagcataactatggtcattataccatatggatggactggatgtttggctctcttatggttcctttagcagaaaaagacagtttcaaggagaaagaaaagtga

SEQ ID NO: 71842 - protein, 279 aa, Arabidopsis thaliana
  peptide (1)..(279): Ceres Seq. ID no. 4815027
MAATMADYNDQIVNETSFYNRMVLSHLLPVNLWEPLPHFLQTWLRNYLAGNILYFISGFLWCFYIYYLKLNVYVPKESIPTRKAMLLQIYVAMKAMPWYTLLPAVSEYMIEHGWTKCYSTLDHFNWFLCFLYIALYLVLVEFMIYWVHKELHDIKFLYKHLHATHHMYNKQNTLSPFAGLAFHPLDGILQAIPHVIALFIVPIHLITHLSLLFLEGIWTASIHDCIHGNIWPIMGAGYHTIHHTTYKHNYGHYTIWMDWMFGSLMVPLAEKDSFKEKEK

SEQ ID NO: 71843 - protein, 275 aa, Arabidopsis thaliana
  peptide (1)..(275): Ceres Seq. ID no. 4815028
MADYNDQIVNETSFYNRMVLSHLLPVNLWEPLPHFLQTWLRNYLAGNILYFISGFLWCFYIYYLKLNVYVPKESIPTRKAMLLQIYVAMKAMPWYTLLPAVSEYMIEHGWTKCYSTLDHFNWFLCFLYIALYLVLVEFMIYWVHKELHDIKFLYKHLHATHHMYNKQNTLSPFAGLAFHPLDGILQAIPHVIALFIVPIHLITHLSLLFLEGIWTASIHDCIHGNIWPIMGAGYHTIHHTTYKHNYGHYTIWMDWMFGSLMVPLAEKDSFKEKEK

SEQ ID NO: 71844 - protein, 258 aa, Arabidopsis thaliana
  peptide (1)..(258): Ceres Seq. ID no. 4815029
MVLSHLLPVNLWEPLPHFLQTWLRNYLAGNILYFISGFLWCFYIYYLKLNVYVPKESIPTRKAMLLQIYVAMKAMPWYTLLPAVSEYMIEHGWTKCYSTLDHFNWFLCFLYIALYLVLVEFMIYWVHKELHDIKFLYKHLHATHHMYNKQNTLSPFAGLAFHPLDGILQAIPHVIALFIVPIHLITHLSLLFLEGIWTASIHDCIHGNIWPIMGAGYHTIHHTTYKHNYGHYTIWMDWMFGSLMVPLAEKDSFKEKEK

SEQ ID NO: 71845 - DNA, 1236 bp, Arabidopsis thaliana
  misc_feature (1)..(1236): Ceres Seq. ID no. 4815034
  misc_feature (1)..(1236): Ortholog of  Ceres SEQ ID NO 14302255 as cited in SEQ ID NO 65021
atggctcttctcttgaactcgacgataacggtggctatgaagcagaatccgctggtcgcggtatcttttccgcggactacttgcttgggatctagtttttctcctcctcgtcttcttcgagtttcgtgtgttgccacaaaccctagcaagacgagtgaagaaacagacaagaaaaagtttcgacccatcaaagaagtaccaaaccaagtgacccacacaataacacaagagaaactggagatcttcaaatcaatggagaattgggcccaagaaaacttattatcttacctcaaacccgtcgaagcttcctggcaaccacaagactttttgccggaaaccaacgacgaagaccgattctacgaacaagtaaaagagctaagagatcgaacaaaagagatccctgacgattactttgtagttcttgtcggagatatgatcaccgaagaagctttaccaacttatcaaactactttgaacactctcgacggcgtaaaagacgagaccggtggtagtctaacgccgtgggcggtttgggttcgagcatggacggcggaggaaaatcgacacggtgatttgttgaataagtatctttacttatcaggtcgtgttgacatgcgacatgttgaaaagactattcaatatcttatcggatccggcatggactccaaatttgagaacaatccctataatggcttcatctatacttcttttcaagagagagccactttcatctcccatggcaacacggcgaagctagccacaacctacggcgacacaactctcgccaaaatctgcggaacaatcgcggcggatgagaagcggcatgagacggcgtatacacggatcgtcgagaagcttttcgagatcgatcccgatggtaccgtacaagctctagcgagtatgatgaggaagcgaatcacgatgccggctcatctgatgcacgacggtcgcgacgacgatctgttcgatcattacgctgcggtggcgcagagaatcggagtttataccgcgacggattacgcagggattttggagtttttgttgcggcggtgggaggtggagaagttagggatgggtttgtccggcgaaggaaggagagcacaggattatctgtgtaccttgccgcagaggatcaggaggttagaggaaagagctaacgatagagtcaaacttgcgtcaaagtcaaaaccttctgtttccttcagctggatttatgggagagaagttgaactataa

SEQ ID NO: 71846 - protein, 411 aa, Arabidopsis thaliana
  peptide (1)..(411): Ceres Seq. ID no. 4815035
MALLLNSTITVAMKQNPLVAVSFPRTTCLGSSFSPPRLLRVSCVATNPSKTSEETDKKKFRPIKEVPNQVTHTITQEKLEIFKSMENWAQENLLSYLKPVEASWQPQDFLPETNDEDRFYEQVKELRDRTKEIPDDYFVVLVGDMITEEALPTYQTTLNTLDGVKDETGGSLTPWAVWVRAWTAEENRHGDLLNKYLYLSGRVDMRHVEKTIQYLIGSGMDSKFENNPYNGFIYTSFQERATFISHGNTAKLATTYGDTTLAKICGTIAADEKRHETAYTRIVEKLFEIDPDGTVQALASMMRKRITMPAHLMHDGRDDDLFDHYAAVAQRIGVYTATDYAGILEFLLRRWEVEKLGMGLSGEGRRAQDYLCTLPQRIRRLEERANDRVKLASKSKPSVSFSWIYGREVEL

SEQ ID NO: 71847 - protein, 399 aa, Arabidopsis thaliana
  peptide (1)..(399): Ceres Seq. ID no. 4815036
MKQNPLVAVSFPRTTCLGSSFSPPRLLRVSCVATNPSKTSEETDKKKFRPIKEVPNQVTHTITQEKLEIFKSMENWAQENLLSYLKPVEASWQPQDFLPETNDEDRFYEQVKELRDRTKEIPDDYFVVLVGDMITEEALPTYQTTLNTLDGVKDETGGSLTPWAVWVRAWTAEENRHGDLLNKYLYLSGRVDMRHVEKTIQYLIGSGMDSKFENNPYNGFIYTSFQERATFISHGNTAKLATTYGDTTLAKICGTIAADEKRHETAYTRIVEKLFEIDPDGTVQALASMMRKRITMPAHLMHDGRDDDLFDHYAAVAQRIGVYTATDYAGILEFLLRRWEVEKLGMGLSGEGRRAQDYLCTLPQRIRRLEERANDRVKLASKSKPSVSFSWIYGREVEL

SEQ ID NO: 71848 - protein, 327 aa, Arabidopsis thaliana
  peptide (1)..(327): Ceres Seq. ID no. 4815037
MENWAQENLLSYLKPVEASWQPQDFLPETNDEDRFYEQVKELRDRTKEIPDDYFVVLVGDMITEEALPTYQTTLNTLDGVKDETGGSLTPWAVWVRAWTAEENRHGDLLNKYLYLSGRVDMRHVEKTIQYLIGSGMDSKFENNPYNGFIYTSFQERATFISHGNTAKLATTYGDTTLAKICGTIAADEKRHETAYTRIVEKLFEIDPDGTVQALASMMRKRITMPAHLMHDGRDDDLFDHYAAVAQRIGVYTATDYAGILEFLLRRWEVEKLGMGLSGEGRRAQDYLCTLPQRIRRLEERANDRVKLASKSKPSVSFSWIYGREVEL

SEQ ID NO: 71849 - DNA, 1281 bp, Arabidopsis thaliana
  misc_feature (1)..(1281): Ceres Seq. ID no. 4815194
  misc_feature (1)..(1281): Ortholog of  Ceres SEQ ID NO 15176317 as cited in SEQ ID NO 52865
  misc_feature (1)..(1281): Ortholog of  Ceres SEQ ID NO 13518893 as cited in SEQ ID NO 58108
  misc_feature (1)..(1281): Ortholog of  Ceres SEQ ID NO 12617152 as cited in SEQ ID NO 63555
atggttaggatttcagttttagtgtgtttggttcttttggttacaataggagtcatggttagtgtctcactcgctgacaacaacgaagagaaatcgactgatctgaagaaattcaaaggaggagtaactgatcactcgattagtaaggcaaatgataatgatcacgacgatgatgatcatgatcaagacgatgataatgatggagatcacgatgacgatgaccatgacgatgataatgatcatgacgatgataataatgatcatgatgatgatgataataatgatgataataatgatggagacgatgaccatgatgatgataataacgatgatggtgatgacgaaaagaagacgttgagggtacacgagctaaagaaggggaatctaacggtcaaatttacaaaccggggtgcttctatcatgtctctccttttccccaatataaatggaaaattagaggacattgttctgggatatgacagcgtcaatgaccacatgattgacacggtattttgtggagtgacgttggcacgtgtagccagtaaaaaggaaaaggccgctgcaaacgatggcaaaaacacgatccatggtgggacgaaagagtctagcgatgtgatttggagagttaagaaacacaaacataatggcaaaaaaccttatattgttttcacatacacaacaagtcctgatggcgatcaagggaaacttgaagtcactgtgacatataagctggtaggagaaaacagattgaaaatggtgatgcaagcaaaggctaaagagaaaactactccgttgaatttggttcatcgttcttattggaatcttggtggtcataacaatgaagatatcttctctgaagaaattcaaattctcggttccggttatactcatctcgacgataatctcactccaaccgggaaaatcctcgccgttaaaggaacacccttcgattttcgccaactccgacctattaaagacaacatcaatgagcttaagacagggtatggtataaattattgtctagatggtgttgcaaataagatgagaaaagtcgtggagcttgtggacaataaatcgaagataaaaatggagttatctacagaccaatccggtctaaggttgaaaaccactaaaccaaaaaatggatcggttcataaagcttactctggtttatgtctagaatcacatgcaatcaattaccaatatcgttcttcgcagataattgaaccgggggaaacttataagcatactatgctctttaagttttcttttgttccgtaa

SEQ ID NO: 71850 - protein, 426 aa, Arabidopsis thaliana
  peptide (1)..(426): Ceres Seq. ID no. 4815195
MVRISVLVCLVLLVTIGVMVSVSLADNNEEKSTDLKKFKGGVTDHSISKANDNDHDDDDHDQDDDNDGDHDDDDHDDDNDHDDDNNDHDDDDNNDDNNDGDDDHDDDNNDDGDDEKKTLRVHELKKGNLTVKFTNRGASIMSLLFPNINGKLEDIVLGYDSVNDHMIDTVFCGVTLARVASKKEKAAANDGKNTIHGGTKESSDVIWRVKKHKHNGKKPYIVFTYTTSPDGDQGKLEVTVTYKLVGENRLKMVMQAKAKEKTTPLNLVHRSYWNLGGHNNEDIFSEEIQILGSGYTHLDDNLTPTGKILAVKGTPFDFRQLRPIKDNINELKTGYGINYCLDGVANKMRKVVELVDNKSKIKMELSTDQSGLRLKTTKPKNGSVHKAYSGLCLESHAINYQYRSSQIIEPGETYKHTMLFKFSFVP

SEQ ID NO: 71851 - protein, 408 aa, Arabidopsis thaliana
  peptide (1)..(408): Ceres Seq. ID no. 4815196
MVSVSLADNNEEKSTDLKKFKGGVTDHSISKANDNDHDDDDHDQDDDNDGDHDDDDHDDDNDHDDDNNDHDDDDNNDDNNDGDDDHDDDNNDDGDDEKKTLRVHELKKGNLTVKFTNRGASIMSLLFPNINGKLEDIVLGYDSVNDHMIDTVFCGVTLARVASKKEKAAANDGKNTIHGGTKESSDVIWRVKKHKHNGKKPYIVFTYTTSPDGDQGKLEVTVTYKLVGENRLKMVMQAKAKEKTTPLNLVHRSYWNLGGHNNEDIFSEEIQILGSGYTHLDDNLTPTGKILAVKGTPFDFRQLRPIKDNINELKTGYGINYCLDGVANKMRKVVELVDNKSKIKMELSTDQSGLRLKTTKPKNGSVHKAYSGLCLESHAINYQYRSSQIIEPGETYKHTMLFKFSFVP

SEQ ID NO: 71852 - protein, 286 aa, Arabidopsis thaliana
  peptide (1)..(286): Ceres Seq. ID no. 4815197
MSLLFPNINGKLEDIVLGYDSVNDHMIDTVFCGVTLARVASKKEKAAANDGKNTIHGGTKESSDVIWRVKKHKHNGKKPYIVFTYTTSPDGDQGKLEVTVTYKLVGENRLKMVMQAKAKEKTTPLNLVHRSYWNLGGHNNEDIFSEEIQILGSGYTHLDDNLTPTGKILAVKGTPFDFRQLRPIKDNINELKTGYGINYCLDGVANKMRKVVELVDNKSKIKMELSTDQSGLRLKTTKPKNGSVHKAYSGLCLESHAINYQYRSSQIIEPGETYKHTMLFKFSFVP

SEQ ID NO: 71853 - DNA, 1380 bp, Arabidopsis thaliana
  misc_feature (1)..(1380): Ceres Seq. ID no. 4815714
  misc_feature (1)..(1380): Ortholog of  Ceres SEQ ID NO 13503610 as cited in SEQ ID NO 62416
  misc_feature (1)..(1380): Ortholog of  Ceres SEQ ID NO 13657610 as cited in SEQ ID NO 66165
  misc_feature (1)..(1380): Ortholog of  Ceres SEQ ID NO 13598312 as cited in SEQ ID NO 68448
  misc_feature (1)..(1380): Ortholog of  Ceres SEQ ID NO 13596100 as cited in SEQ ID NO 68573
atgttcattgcaatggcagatttcaagcttcttttgcttatactcatccttctatctctctttgaacttgatctacttcactttcaccatgacttcttctctccttttccggtcaagatcggtttactcctgatatccatcttcttctatgcctactcaaccacccggtctaaaccggtttacctagtggatttctcatgtcaccaacccacggattcttgcaaaatctcatccgaaacgttcttcaacatggccaaaggcgctcaactctacaccgaagaaacaatccaattcatgacgaggatactaaaccggtccggtttaggagacgatacgtactccccacgttgcatgttaacctctccaccaactccatcaatgtacgaggcgagacatgaatccgaattagtcatcttcggagctcttaactcactatttaagaaaaccggaatcgaaccgagagaagtcggaatcttcatcgtaaactgcagcttgtttaaccctaacccatctctctcgtccatgatcgtaaaccggtacaagcttaaaaccgacgtcaaaacttacaatctctccggaatctccgtggacctcgccacaaatctactaaaggcaaaccctaatacctacgcagttattgttagtacggagaacatgactctaagcatgtatcgaggcaacgaccggtcaatgttagtccctaactgtctattccgagtaggtggcgctgcggttatgctctcaaaccggagtcaagaccgagtccggtctaagtacgaattgactcatattgtaaggactcacaaaggctctagcgataaacactacacttgtgctgaacaaaaagaagatagtaaaggtatcgttggagtcgcactctctaaagaactaacggttgttgctggtgacacgttaaagacgaatctaacagcacttggtccgcttgttttgcctttatctgaaaaactccggtttatcctctttttggtaaagagtaagcttttccggttaaaggttagtccatatgttccggattttaaactatgtttcaagcatttctgtattcacgctggtggtagagcgttacttgacgcggttgaaaaaggtcttggacttagtgagtttgatcttgagccgtctcggatgactttgcaccgctttggaaacacttcaagctcgtcgctgtggtacgagctggcttacgtggaggctaaatgtcgggtcaaacgaggagatagggtttggcagttggcgtttgggtcgggttttaaatgtaatagtattgtgtggagagcattgagaacgattccggctaacgagtcattggtgggtaacccgtggggtgactcggttcataagtatccagttcacgtgacctaa

SEQ ID NO: 71854 - protein, 459 aa, Arabidopsis thaliana
  peptide (1)..(459): Ceres Seq. ID no. 4815715
MFIAMADFKLLLLILILLSLFELDLLHFHHDFFSPFPVKIGLLLISIFFYAYSTTRSKPVYLVDFSCHQPTDSCKISSETFFNMAKGAQLYTEETIQFMTRILNRSGLGDDTYSPRCMLTSPPTPSMYEARHESELVIFGALNSLFKKTGIEPREVGIFIVNCSLFNPNPSLSSMIVNRYKLKTDVKTYNLSGISVDLATNLLKANPNTYAVIVSTENMTLSMYRGNDRSMLVPNCLFRVGGAAVMLSNRSQDRVRSKYELTHIVRTHKGSSDKHYTCAEQKEDSKGIVGVALSKELTVVAGDTLKTNLTALGPLVLPLSEKLRFILFLVKSKLFRLKVSPYVPDFKLCFKHFCIHAGGRALLDAVEKGLGLSEFDLEPSRMTLHRFGNTSSSSLWYELAYVEAKCRVKRGDRVWQLAFGSGFKCNSIVWRALRTIPANESLVGNPWGDSVHKYPVHVT

SEQ ID NO: 71855 - protein, 455 aa, Arabidopsis thaliana
  peptide (1)..(455): Ceres Seq. ID no. 4815716
MADFKLLLLILILLSLFELDLLHFHHDFFSPFPVKIGLLLISIFFYAYSTTRSKPVYLVDFSCHQPTDSCKISSETFFNMAKGAQLYTEETIQFMTRILNRSGLGDDTYSPRCMLTSPPTPSMYEARHESELVIFGALNSLFKKTGIEPREVGIFIVNCSLFNPNPSLSSMIVNRYKLKTDVKTYNLSGISVDLATNLLKANPNTYAVIVSTENMTLSMYRGNDRSMLVPNCLFRVGGAAVMLSNRSQDRVRSKYELTHIVRTHKGSSDKHYTCAEQKEDSKGIVGVALSKELTVVAGDTLKTNLTALGPLVLPLSEKLRFILFLVKSKLFRLKVSPYVPDFKLCFKHFCIHAGGRALLDAVEKGLGLSEFDLEPSRMTLHRFGNTSSSSLWYELAYVEAKCRVKRGDRVWQLAFGSGFKCNSIVWRALRTIPANESLVGNPWGDSVHKYPVHVT

SEQ ID NO: 71856 - protein, 376 aa, Arabidopsis thaliana
  peptide (1)..(376): Ceres Seq. ID no. 4815717
MAKGAQLYTEETIQFMTRILNRSGLGDDTYSPRCMLTSPPTPSMYEARHESELVIFGALNSLFKKTGIEPREVGIFIVNCSLFNPNPSLSSMIVNRYKLKTDVKTYNLSGISVDLATNLLKANPNTYAVIVSTENMTLSMYRGNDRSMLVPNCLFRVGGAAVMLSNRSQDRVRSKYELTHIVRTHKGSSDKHYTCAEQKEDSKGIVGVALSKELTVVAGDTLKTNLTALGPLVLPLSEKLRFILFLVKSKLFRLKVSPYVPDFKLCFKHFCIHAGGRALLDAVEKGLGLSEFDLEPSRMTLHRFGNTSSSSLWYELAYVEAKCRVKRGDRVWQLAFGSGFKCNSIVWRALRTIPANESLVGNPWGDSVHKYPVHVT

SEQ ID NO: 71857 - DNA, 1887 bp, Arabidopsis thaliana
  misc_feature (1)..(1887): Ceres Seq. ID no. 4815811
  misc_feature (1)..(1887): Ortholog of  Ceres SEQ ID NO 13598865 as cited in SEQ ID NO 0
atgatgacgagaaaagcaatgataaacatttgttgcgtggccacaacgccgtccaagtatccacctcctcctcctcttacgttaacccctcgccagagtttggaatcggcggctatctatggagtcattgaatccgcggcggatataatcgagagatggaacactgagaccaacactttcgctaaagttacttgtatgttctacgagaacaaacctgaagccatgatgttcatcgaacgtgtgaaggatcttcagaagacgatggacgtactcgtgagtgaggatccaaactctgagagactcttgagatcgcataagcttatgcaaatcgctatgaagaggttgcaaaaagagttttaccagattctttcgatgaatcgtgcttatcttgatccagaatcagtgtccactcgatcttcacttacttccgcaagatctagctactcagatttccccgactatgtcgaagatctagatacgatcatcgaactggaggaggtttctaccaacgtcatgacggatttgaaatccatcgctgagtgcatgatcggttctggttacgctaaggagtgtctaagcatctataaaagcattaggaaatcgatcatcgacgaagggatttatcgtttagaagtggagaagacgagtactgggaaggtgaagaaaatgtcatgggaagttatggagttgaagatcagaagctggttaaaagcagtcaaagtttctatggagactcttttcaaaggtgagaagattttgtgtgatcatgtctttgaatcctctgacgcaattagagagtcttgctttagtgatatctctcgagacggtgcgcttcttctctttggattcccggagatcattaatactaaaactagcaagaaacactctccgccggagaaagttttccggctgcttgacatgtacaccgccatcgccggaaactggcaagcgattgagtctatcttctcgtttgattcgatctccgtcgtcagatctcttgctcttaaatctctaatctctctcagcgaatcaattcgatcactacttgtggaattcgaatccggaatccagaaggactcgtcgaaggtggtggttcccggcggaggagtacatccactgacgatctccgtcatggatcacctctctctcctcgctgactacagcaacgtactagtcgatatcctcgccggatctccaccaccggacaggtcgctgttaccggagtcttacttcaacgtctcagaatccgacgactctccttcgtcggagctgacgatccgtttcgcttggatcatcctcgtcctcctttgtaaaatcgatcgtaaatcaattcactacaaagacttctctatacagtatctcttcctcaccaacaatctccagcacgtggtctcacgtgctcgttcctcaaacctgaagaaccttctcggcgaggattggatcacgagacatttcgctaagatgagacaattcgccggcagctataagcggctagcttggggaccggtggttgctactttacctgagaatcgtacggtggagatgacgccggaggaagtgaaggagcggtttgaaaaattcagcgagagcttcgaaaacgcgtatagtaagcacagtgtctgcgtcgtagctgatccaaatatacgagacgagatcaaagtatcgatatcgagaaagctggtgccgatctatcgcgagttttacaacacgagaggttctgttatcttgggagaaggcgatggcgcgagaaacctgaactcagttgtccgatttacccctgaagatattgaaaactatttgtctgatttgttcagagagaagggtagttcggggaattcgtcagcctcttctccttcctcttgtcggtcaaggcaatccatgtcctaa

SEQ ID NO: 71858 - protein, 628 aa, Arabidopsis thaliana
  peptide (1)..(628): Ceres Seq. ID no. 4815812
MMTRKAMINICCVATTPSKYPPPPPLTLTPRQSLESAAIYGVIESAADIIERWNTETNTFAKVTCMFYENKPEAMMFIERVKDLQKTMDVLVSEDPNSERLLRSHKLMQIAMKRLQKEFYQILSMNRAYLDPESVSTRSSLTSARSSYSDFPDYVEDLDTIIELEEVSTNVMTDLKSIAECMIGSGYAKECLSIYKSIRKSIIDEGIYRLEVEKTSTGKVKKMSWEVMELKIRSWLKAVKVSMETLFKGEKILCDHVFESSDAIRESCFSDISRDGALLLFGFPEIINTKTSKKHSPPEKVFRLLDMYTAIAGNWQAIESIFSFDSISVVRSLALKSLISLSESIRSLLVEFESGIQKDSSKVVVPGGGVHPLTISVMDHLSLLADYSNVLVDILAGSPPPDRSLLPESYFNVSESDDSPSSELTIRFAWIILVLLCKIDRKSIHYKDFSIQYLFLTNNLQHVVSRARSSNLKNLLGEDWITRHFAKMRQFAGSYKRLAWGPVVATLPENRTVEMTPEEVKERFEKFSESFENAYSKHSVCVVADPNIRDEIKVSISRKLVPIYREFYNTRGSVILGEGDGARNLNSVVRFTPEDIENYLSDLFREKGSSGNSSASSPSSCRSRQSMS

SEQ ID NO: 71859 - protein, 627 aa, Arabidopsis thaliana
  peptide (1)..(627): Ceres Seq. ID no. 4815813
MTRKAMINICCVATTPSKYPPPPPLTLTPRQSLESAAIYGVIESAADIIERWNTETNTFAKVTCMFYENKPEAMMFIERVKDLQKTMDVLVSEDPNSERLLRSHKLMQIAMKRLQKEFYQILSMNRAYLDPESVSTRSSLTSARSSYSDFPDYVEDLDTIIELEEVSTNVMTDLKSIAECMIGSGYAKECLSIYKSIRKSIIDEGIYRLEVEKTSTGKVKKMSWEVMELKIRSWLKAVKVSMETLFKGEKILCDHVFESSDAIRESCFSDISRDGALLLFGFPEIINTKTSKKHSPPEKVFRLLDMYTAIAGNWQAIESIFSFDSISVVRSLALKSLISLSESIRSLLVEFESGIQKDSSKVVVPGGGVHPLTISVMDHLSLLADYSNVLVDILAGSPPPDRSLLPESYFNVSESDDSPSSELTIRFAWIILVLLCKIDRKSIHYKDFSIQYLFLTNNLQHVVSRARSSNLKNLLGEDWITRHFAKMRQFAGSYKRLAWGPVVATLPENRTVEMTPEEVKERFEKFSESFENAYSKHSVCVVADPNIRDEIKVSISRKLVPIYREFYNTRGSVILGEGDGARNLNSVVRFTPEDIENYLSDLFREKGSSGNSSASSPSSCRSRQSMS

SEQ ID NO: 71860 - protein, 622 aa, Arabidopsis thaliana
  peptide (1)..(622): Ceres Seq. ID no. 4815814
MINICCVATTPSKYPPPPPLTLTPRQSLESAAIYGVIESAADIIERWNTETNTFAKVTCMFYENKPEAMMFIERVKDLQKTMDVLVSEDPNSERLLRSHKLMQIAMKRLQKEFYQILSMNRAYLDPESVSTRSSLTSARSSYSDFPDYVEDLDTIIELEEVSTNVMTDLKSIAECMIGSGYAKECLSIYKSIRKSIIDEGIYRLEVEKTSTGKVKKMSWEVMELKIRSWLKAVKVSMETLFKGEKILCDHVFESSDAIRESCFSDISRDGALLLFGFPEIINTKTSKKHSPPEKVFRLLDMYTAIAGNWQAIESIFSFDSISVVRSLALKSLISLSESIRSLLVEFESGIQKDSSKVVVPGGGVHPLTISVMDHLSLLADYSNVLVDILAGSPPPDRSLLPESYFNVSESDDSPSSELTIRFAWIILVLLCKIDRKSIHYKDFSIQYLFLTNNLQHVVSRARSSNLKNLLGEDWITRHFAKMRQFAGSYKRLAWGPVVATLPENRTVEMTPEEVKERFEKFSESFENAYSKHSVCVVADPNIRDEIKVSISRKLVPIYREFYNTRGSVILGEGDGARNLNSVVRFTPEDIENYLSDLFREKGSSGNSSASSPSSCRSRQSMS

SEQ ID NO: 71861 - DNA, 1125 bp, Arabidopsis thaliana
  misc_feature (1)..(1125): Ceres Seq. ID no. 4815875
  misc_feature (1)..(1125): Ortholog of  Ceres SEQ ID NO 14303604 as cited in SEQ ID NO 62525
atgtcggaggatgtctggttgacttgcctcactcacgcattatccaccgagaccgaagaaatcatgggtctccttctcggcgacatcgagtactcaaagaacggcgaaagtgccacagctatgatctggggagcatcgcctcagccacgatctgatcggcagaaggatcgagttgaaaccaatcctgaacaattggctgctgcttctgctcaggctgatatatcctttttaatgacgatatcaacgggcagaactacacgggtcattggatggtaccactcccatcctcatattaccgttcttccttcccatgtcgatgttcggacacaagctatgtatcagcttttagattctggttttattggcctcatattttcctgttttagtgaagatgctaacaaggttggtagaatccaagttatcgctttccagtcttctgatggaaagccgaatagtattcctaaatcaatgagcctggttcttgctaataaagattctgtcatcgatatagaatcttcatctagttcttcggactcgatataccagcgatcctcttcttctaagcccgagctagacacaattgatactgctacaacttccggatctaagggtggaggacgggtttcagattttgggcctttctttacaaacaatattgaggccaatatcaccggcagagatgaaactcacaaatcaggcaatctcagcagcacaactataggaattgactcgatggacatgtctgaaagtatgcaagaggcaatgctccgttcaaatttagataccagtggtgcggggtatgttagaaaagaagtcccacttcatgttttgccaacttcatcccttcttccagtcaattcacctttagcatcttttaaaagcctgcaacgagtactgtacgaggaggaacgagcagcgtactaccaatcagtgcagcaaaacatgagcttgagtcctgccattaacgcacttcaagataggcagaaggagaacaagatccggttagcaatgctgatggatgaagctgaggttttggaggcacaaaaacttaaaggagcagagacaagccggagaccatctcatctggttcacggttctggcagccgaagcagaagaggatcgtag

SEQ ID NO: 71862 - protein, 374 aa, Arabidopsis thaliana
  peptide (1)..(374): Ceres Seq. ID no. 4815876
MSEDVWLTCLTHALSTETEEIMGLLLGDIEYSKNGESATAMIWGASPQPRSDRQKDRVETNPEQLAAASAQADISFLMTISTGRTTRVIGWYHSHPHITVLPSHVDVRTQAMYQLLDSGFIGLIFSCFSEDANKVGRIQVIAFQSSDGKPNSIPKSMSLVLANKDSVIDIESSSSSSDSIYQRSSSSKPELDTIDTATTSGSKGGGRVSDFGPFFTNNIEANITGRDETHKSGNLSSTTIGIDSMDMSESMQEAMLRSNLDTSGAGYVRKEVPLHVLPTSSLLPVNSPLASFKSLQRVLYEEERAAYYQSVQQNMSLSPAINALQDRQKENKIRLAMLMDEAEVLEAQKLKGAETSRRPSHLVHGSGSRSRRGS

SEQ ID NO: 71863 - protein, 353 aa, Arabidopsis thaliana
  peptide (1)..(353): Ceres Seq. ID no. 4815877
MGLLLGDIEYSKNGESATAMIWGASPQPRSDRQKDRVETNPEQLAAASAQADISFLMTISTGRTTRVIGWYHSHPHITVLPSHVDVRTQAMYQLLDSGFIGLIFSCFSEDANKVGRIQVIAFQSSDGKPNSIPKSMSLVLANKDSVIDIESSSSSSDSIYQRSSSSKPELDTIDTATTSGSKGGGRVSDFGPFFTNNIEANITGRDETHKSGNLSSTTIGIDSMDMSESMQEAMLRSNLDTSGAGYVRKEVPLHVLPTSSLLPVNSPLASFKSLQRVLYEEERAAYYQSVQQNMSLSPAINALQDRQKENKIRLAMLMDEAEVLEAQKLKGAETSRRPSHLVHGSGSRSRRGS

SEQ ID NO: 71864 - protein, 334 aa, Arabidopsis thaliana
  peptide (1)..(334): Ceres Seq. ID no. 4815878
MIWGASPQPRSDRQKDRVETNPEQLAAASAQADISFLMTISTGRTTRVIGWYHSHPHITVLPSHVDVRTQAMYQLLDSGFIGLIFSCFSEDANKVGRIQVIAFQSSDGKPNSIPKSMSLVLANKDSVIDIESSSSSSDSIYQRSSSSKPELDTIDTATTSGSKGGGRVSDFGPFFTNNIEANITGRDETHKSGNLSSTTIGIDSMDMSESMQEAMLRSNLDTSGAGYVRKEVPLHVLPTSSLLPVNSPLASFKSLQRVLYEEERAAYYQSVQQNMSLSPAINALQDRQKENKIRLAMLMDEAEVLEAQKLKGAETSRRPSHLVHGSGSRSRRGS

SEQ ID NO: 71865 - DNA, 1317 bp, Arabidopsis thaliana
  misc_feature (1)..(1317): Ceres Seq. ID no. 4815930
  misc_feature (1)..(1317): Ortholog of  Ceres SEQ ID NO 14311553 as cited in SEQ ID NO 51462
  misc_feature (1)..(1317): Ortholog of  Ceres SEQ ID NO 13599003 as cited in SEQ ID NO 0
atgacacttgctagcgattttggttttccatccgctatatcttcatcttttacaattctagaagagagataccacaataactttcctaacactttgtgtgtttcatcaggacaggaatcgatgaataacaaccccgtcccctgtcaggtgtttcctctggtctctggtggtagttctggtgggaatttgttttcatcttcttccggattctgcaatggtgtctatgtttcatcttcctcccaggcacggccatctgtttctaccgtgccaagagacagaattactgttgctcacgtctctggtgaagggcagaggcaggaatgccctgtggaaacacattccttgcaattgatcaatcaacctcaagaacagaaaattatgacttggtcttcagaccagattcggggcttcttcgattttcctgttccagatccacaagcagcgagcagcagaactatggtttcatccaaggaagtgctttcaaaatgcgaatggccagactgggcggatcagttgatctctgatgatagtcttgaaccaaattggtcggagcttctaggtgatcctaatgtactcaatctatattcaaaggttcaaacacagtcttctgatatagcaaggcaagagatcgtctttagaaatcagcatcaggtggatccatcaatggagccgtttaatgccaaaagcccaccagctagttcaatgacatctaagcaaagaatgcgttggacaccagaacttcatgaagcatttgtcgaagctatcaatcagctcggtggtagtgaacgagccacccctaaggctgttttgaagctcatcaatagccctgggttgaccgtttatcatgtcaaaagccatttgcagaaatacagaactgcaaggtataaaccagagctttccaaagatacagtaaagaatttgaaaaccattgaagatatcaaatctcttgacttgaagacgagcattgaaatcactgaagctctccggttacagatgaaagttcaaaaacaactccacgagcaacttgagatccaaagatcactgcagttacaaatcgaagaacaaggtcggtatcttcagatgatgattgagaaacaacagaagatgcaagagaacaaaaaagactctacttcctcatcatcaatgccagaagctgacccttcagctccatcaccaaacctttcacaacctttcctccataaagcaaccaattcagaaccatcaataactcagaaactgcagaatggttctagcacaatggatcaaagtgaatctacttctgggactagtaatagaaaacgggttagagaagattag

SEQ ID NO: 71866 - protein, 438 aa, Arabidopsis thaliana
  peptide (1)..(438): Ceres Seq. ID no. 4815931
MTLASDFGFPSAISSSFTILEERYHNNFPNTLCVSSGQESMNNNPVPCQVFPLVSGGSSGGNLFSSSSGFCNGVYVSSSSQARPSVSTVPRDRITVAHVSGEGQRQECPVETHSLQLINQPQEQKIMTWSSDQIRGFFDFPVPDPQAASSRTMVSSKEVLSKCEWPDWADQLISDDSLEPNWSELLGDPNVLNLYSKVQTQSSDIARQEIVFRNQHQVDPSMEPFNAKSPPASSMTSKQRMRWTPELHEAFVEAINQLGGSERATPKAVLKLINSPGLTVYHVKSHLQKYRTARYKPELSKDTVKNLKTIEDIKSLDLKTSIEITEALRLQMKVQKQLHEQLEIQRSLQLQIEEQGRYLQMMIEKQQKMQENKKDSTSSSSMPEADPSAPSPNLSQPFLHKATNSEPSITQKLQNGSSTMDQSESTSGTSNRKRVRED

SEQ ID NO: 71867 - protein, 398 aa, Arabidopsis thaliana
  peptide (1)..(398): Ceres Seq. ID no. 4815932
MNNNPVPCQVFPLVSGGSSGGNLFSSSSGFCNGVYVSSSSQARPSVSTVPRDRITVAHVSGEGQRQECPVETHSLQLINQPQEQKIMTWSSDQIRGFFDFPVPDPQAASSRTMVSSKEVLSKCEWPDWADQLISDDSLEPNWSELLGDPNVLNLYSKVQTQSSDIARQEIVFRNQHQVDPSMEPFNAKSPPASSMTSKQRMRWTPELHEAFVEAINQLGGSERATPKAVLKLINSPGLTVYHVKSHLQKYRTARYKPELSKDTVKNLKTIEDIKSLDLKTSIEITEALRLQMKVQKQLHEQLEIQRSLQLQIEEQGRYLQMMIEKQQKMQENKKDSTSSSSMPEADPSAPSPNLSQPFLHKATNSEPSITQKLQNGSSTMDQSESTSGTSNRKRVRED

SEQ ID NO: 71868 - protein, 312 aa, Arabidopsis thaliana
  peptide (1)..(312): Ceres Seq. ID no. 4815933
MTWSSDQIRGFFDFPVPDPQAASSRTMVSSKEVLSKCEWPDWADQLISDDSLEPNWSELLGDPNVLNLYSKVQTQSSDIARQEIVFRNQHQVDPSMEPFNAKSPPASSMTSKQRMRWTPELHEAFVEAINQLGGSERATPKAVLKLINSPGLTVYHVKSHLQKYRTARYKPELSKDTVKNLKTIEDIKSLDLKTSIEITEALRLQMKVQKQLHEQLEIQRSLQLQIEEQGRYLQMMIEKQQKMQENKKDSTSSSSMPEADPSAPSPNLSQPFLHKATNSEPSITQKLQNGSSTMDQSESTSGTSNRKRVRED

SEQ ID NO: 71869 - DNA, 1626 bp, Arabidopsis thaliana
  misc_feature (1)..(1626): Ceres Seq. ID no. 4816070
  misc_feature (1)..(1626): Ortholog of  Ceres SEQ ID NO 15174626 as cited in SEQ ID NO 59393
  misc_feature (1)..(1626): Ortholog of  Ceres SEQ ID NO 13656177 as cited in SEQ ID NO 64997
atggagaaaagctcatattttctgtttggtggaacaaacttcaataagaagaagtttgctcctgattttgctaaattcaagaattctacggaggatgatgattccaataagaaagtgaacttctttgtggaagaagaagaggacactgaacagccggaggcggagaaagttattgtgtcctctaagaagaggaaacgaagatcttctaattctgtgccagttgaaggattcgatgtgttcaagagctcaaagaaggcacgtgctaaaggtaaagcagaagaacaaatcacaaagaatgagattgtagagaatcccaagaaggaacttaatcgtcaaatggagcgagatgctttgtcgaggaaacagtacagcattcatgtttccggtaacaatattccaccgccgcttaaaagtttcgcagagttgtcatccaggtatggctgtgaaggatacatattacgcaatttggctgaactaggatttaaagagcctaccccaatccaaagacaggctattccaattctcctatcgggtcgtgaatgctttgcctgtgctccgactgggtcaggaaaaacctttgcttttatttgtcccatgcttataaaactcaagcgcccttcaactgatggaataagagctgttatcctttctcctgctcgggaactggctgcccaaacagctagagaaggaaagaaacttattaaaggaagcaatttccacattagattgatgactaaaccccttgtcaaaacagctgacttctcaaagctgtggtgtgatgttctcatatcaacgccgatgcggttgaaaagagcaatcaaggctaaaaagattgacttaagcaaggtcgagtaccttgtccttgatgaatctgacaagctgtttgagcagagcttgttaaagcagatagattgtgtggttaaggcttgttcaaatccttcgatcatacgttcattgttcagtgctactttgcccgattctgttgaagaacttgcacgttccataatgcatgatgctgttcgtgttatcattggccgaaaaaacacagcatctgaaaccgtcaagcaaaagctggtttttgctggaagtgaagaagggaaacttcttgctcttcgccaaagctttgcagagagtctgaatccaccggtactgatctttgtacaaagcaaagaacgagcaaaagaactctatgatgaactgaaatgtgaaaacatcagagccggagtcatccattccgatctccctccgggagagcgggaaaatgcagttgatcaattcagagcgggagaaaaatgggttttgatagccactgatgtgattgccagaggtatggatttcaaaggcatcaactgcgtgataaactatgatttcccggattcagcttctgcatacatccacaggattggacggtctgggagagcgggaaggagcggagaagcgataactttctacacggaacaagatgtgcctttcctaaggaacatagccaacacaatgatgtcatcaggctgtgaggttccatcgtggatcatgtctttgaagaagaagaaatggaggaagcataggccgagacgtgattctatatctactaaaccaaaagccgataaaaacgatacagatgagtaa

SEQ ID NO: 71870 - protein, 541 aa, Arabidopsis thaliana
  peptide (1)..(541): Ceres Seq. ID no. 4816071
MEKSSYFLFGGTNFNKKKFAPDFAKFKNSTEDDDSNKKVNFFVEEEEDTEQPEAEKVIVSSKKRKRRSSNSVPVEGFDVFKSSKKARAKGKAEEQITKNEIVENPKKELNRQMERDALSRKQYSIHVSGNNIPPPLKSFAELSSRYGCEGYILRNLAELGFKEPTPIQRQAIPILLSGRECFACAPTGSGKTFAFICPMLIKLKRPSTDGIRAVILSPARELAAQTAREGKKLIKGSNFHIRLMTKPLVKTADFSKLWCDVLISTPMRLKRAIKAKKIDLSKVEYLVLDESDKLFEQSLLKQIDCVVKACSNPSIIRSLFSATLPDSVEELARSIMHDAVRVIIGRKNTASETVKQKLVFAGSEEGKLLALRQSFAESLNPPVLIFVQSKERAKELYDELKCENIRAGVIHSDLPPGERENAVDQFRAGEKWVLIATDVIARGMDFKGINCVINYDFPDSASAYIHRIGRSGRAGRSGEAITFYTEQDVPFLRNIANTMMSSGCEVPSWIMSLKKKKWRKHRPRRDSISTKPKADKNDTDE

SEQ ID NO: 71871 - protein, 429 aa, Arabidopsis thaliana
  peptide (1)..(429): Ceres Seq. ID no. 4816072
MERDALSRKQYSIHVSGNNIPPPLKSFAELSSRYGCEGYILRNLAELGFKEPTPIQRQAIPILLSGRECFACAPTGSGKTFAFICPMLIKLKRPSTDGIRAVILSPARELAAQTAREGKKLIKGSNFHIRLMTKPLVKTADFSKLWCDVLISTPMRLKRAIKAKKIDLSKVEYLVLDESDKLFEQSLLKQIDCVVKACSNPSIIRSLFSATLPDSVEELARSIMHDAVRVIIGRKNTASETVKQKLVFAGSEEGKLLALRQSFAESLNPPVLIFVQSKERAKELYDELKCENIRAGVIHSDLPPGERENAVDQFRAGEKWVLIATDVIARGMDFKGINCVINYDFPDSASAYIHRIGRSGRAGRSGEAITFYTEQDVPFLRNIANTMMSSGCEVPSWIMSLKKKKWRKHRPRRDSISTKPKADKNDTDE

SEQ ID NO: 71872 - protein, 343 aa, Arabidopsis thaliana
  peptide (1)..(343): Ceres Seq. ID no. 4816073
MLIKLKRPSTDGIRAVILSPARELAAQTAREGKKLIKGSNFHIRLMTKPLVKTADFSKLWCDVLISTPMRLKRAIKAKKIDLSKVEYLVLDESDKLFEQSLLKQIDCVVKACSNPSIIRSLFSATLPDSVEELARSIMHDAVRVIIGRKNTASETVKQKLVFAGSEEGKLLALRQSFAESLNPPVLIFVQSKERAKELYDELKCENIRAGVIHSDLPPGERENAVDQFRAGEKWVLIATDVIARGMDFKGINCVINYDFPDSASAYIHRIGRSGRAGRSGEAITFYTEQDVPFLRNIANTMMSSGCEVPSWIMSLKKKKWRKHRPRRDSISTKPKADKNDTDE

SEQ ID NO: 71873 - DNA, 702 bp, Arabidopsis thaliana
  misc_feature (1)..(702): Ceres Seq. ID no. 4816221
  misc_feature (1)..(702): Ortholog of  Ceres SEQ ID NO 15168436 as cited in SEQ ID NO 56974
atgtcaatcccaccatcttcaggttcttcttcttcatcttcctcgtctcagtacacatacgcagctaattcttactattccgctccgtatcagcctccacagccttacgcggcggcgccttcgcctgctgtaccggcgcctgtggcatccattcccggagctacggtctatcctcagcctgttggaccggttcctgccgtctacgcttaccctcagtaccaacaggcacatcaattgttccaaagagatgcacagacaattacaccagaagctcttgagaatgtaaaagctgctttggcaagtagtgaaaccgaacacaaagcagaaactaaaaagagagccattcctcgtaaagctgctggacagtcttgggaggatcctactctttcagaatggccagaaaatgactatcgtctgttctgtggtgatcttgggaacgaagtgaatgatgatgttctttccaaagcatttgctagattccccaccttcaatatggccaaggtcattagagataagcggactggtaaaaccaagggttatgggtttgtgagtttcttaaatcctgcggatctagcagcagccttaaaagaaatgaatggtaagtatgttggaaatcgtccgataaaactacgaaagagtagctggaaagagagaacagatcaggaggctgctgaaagacaaaaggcaacatcacagcaataa

SEQ ID NO: 71874 - protein, 233 aa, Arabidopsis thaliana
  peptide (1)..(233): Ceres Seq. ID no. 4816222
MSIPPSSGSSSSSSSSQYTYAANSYYSAPYQPPQPYAAAPSPAVPAPVASIPGATVYPQPVGPVPAVYAYPQYQQAHQLFQRDAQTITPEALENVKAALASSETEHKAETKKRAIPRKAAGQSWEDPTLSEWPENDYRLFCGDLGNEVNDDVLSKAFARFPTFNMAKVIRDKRTGKTKGYGFVSFLNPADLAAALKEMNGKYVGNRPIKLRKSSWKERTDQEAAERQKATSQQ

SEQ ID NO: 71875 - DNA, 2085 bp, Arabidopsis thaliana
  misc_feature (1)..(2085): Ceres Seq. ID no. 4816279
  misc_feature (1)..(2085): Ortholog of  Ceres SEQ ID NO 14307496 as cited in SEQ ID NO 58986
atggctatgcctagggcaacctctggtcccgcttacccggagaggttctacgctgctgcatcttatgtcggtctcgacggatctgattcgtcggcgaaaaacgtcatctcgaaattccccgatgatactgcactacttctctatgcgctataccagcaggctactgtaggaccatgcaacactccgaaacctagtgcctggagaccagtggagcaaagcaaatggaaaaggagatgtcttagatttcatcaattactagagcgtaagaatccaaatgcattagggaaacgggaaaggagtactttagtttggcaggggctcggaaccatgccctccattgaggcaatgcgtctctttgtgaaaattctggaggaagatgatcctggttggtattcgagggcatctaatgatattccagatcctgttgtagatgtccaaattaatagagcaaaagatgagcctgttgttgagaatgggagcacatttagtgagacaaaaacaatttctacggagaatggacgtttggctgaaacccaagataaagatgtagtctcagaagactcaaatactgtttctgtatataaccagtggactgcaccccaaacatcaggtcagcgtccaaaagctcgttacgagcatggcgcagcagttattcaagataagatgtatatatatggtggaaatcacaatggccgttaccttggtgatcttcatgttctagatttaaaaagttggacttggtcaagagttgaaaccaaggttgcaacagaatctcaggaaacatcaactccgacattgttagctccttgtgctggtcattctttgatagcatgggacaacaagctgctgtctatcggtggtcacacaaaggatccctcagaatctatgcaagtgaaggtctttgatccccataccattacatggtcaatgttaaagacatatggaaaaccaccggtttcacgtggaggccagtcagttacaatggtgggtaaaaccttggtgatatttggcgggcaagatgcaaagagatcacttctgaacgatttgcatatacttgacctagacacgatgacctgggatgagatagatgccgtgggtgtatctccatctccgaggtctgatcatgctgctgcagtgcatgcagaacggttccttcttatctttggtggcggctcacatgcaacctgtttcgatgacctgcatgtccttgatttgcaaactatggagtggtcaagaccagcacagcaaggtgatgcaccaactccaagagctggacatgctggcgtgacaattggggagaactggtttattgttggtggcggtgataacaagagtggggcatcggagagtgttgtactaaacatgtcaactcttgcatggtcggtcgttgcttcagttcaaggacgtgtacctcttgctagcgagggattaagtttagtggtgagttcatacaatggtgaagatgtactagtcgcttttggtggatacaatggacgttacaataacgaaattaatcttcttaaaccaagccacaaatcaacattgcaaacaaagactctggaagcgcctttgccaggtagtctttctgctgttaataatgccacaaccagagacattgagtctgaggttgaggtgagccaagaaggcagggtacgggaaattgtcatggacaatgttaaccctggatcaaaggttgaaggaaacagcgaacgcattattgcgactattaaatctgagaaggaagagctggaggcatcactgaacaaagagaggatgcagactctccaactaaggcaagagttaggagaagcagaattacgaaacacagatttgtacaaggaacttcaatctgttcgtggccaacttgcagccgaacaatcaaggtgtttcaaactggaggttgatgttgcagagctaagacaaaagcttcaaacattggaaacactacagaaggaactcgaactcctgcaacgtcaaaaggctgcctcagaacaagctgcaatgaacgctaaacgacagggctcgggtggcgtatggggctggctcgctggaagccctcaggaaaaagatgatgattcgccttga

SEQ ID NO: 71876 - protein, 694 aa, Arabidopsis thaliana
  peptide (1)..(694): Ceres Seq. ID no. 4816280
MAMPRATSGPAYPERFYAAASYVGLDGSDSSAKNVISKFPDDTALLLYALYQQATVGPCNTPKPSAWRPVEQSKWKRRCLRFHQLLERKNPNALGKRERSTLVWQGLGTMPSIEAMRLFVKILEEDDPGWYSRASNDIPDPVVDVQINRAKDEPVVENGSTFSETKTISTENGRLAETQDKDVVSEDSNTVSVYNQWTAPQTSGQRPKARYEHGAAVIQDKMYIYGGNHNGRYLGDLHVLDLKSWTWSRVETKVATESQETSTPTLLAPCAGHSLIAWDNKLLSIGGHTKDPSESMQVKVFDPHTITWSMLKTYGKPPVSRGGQSVTMVGKTLVIFGGQDAKRSLLNDLHILDLDTMTWDEIDAVGVSPSPRSDHAAAVHAERFLLIFGGGSHATCFDDLHVLDLQTMEWSRPAQQGDAPTPRAGHAGVTIGENWFIVGGGDNKSGASESVVLNMSTLAWSVVASVQGRVPLASEGLSLVVSSYNGEDVLVAFGGYNGRYNNEINLLKPSHKSTLQTKTLEAPLPGSLSAVNNATTRDIESEVEVSQEGRVREIVMDNVNPGSKVEGNSERIIATIKSEKEELEASLNKERMQTLQLRQELGEAELRNTDLYKELQSVRGQLAAEQSRCFKLEVDVAELRQKLQTLETLQKELELLQRQKAASEQAAMNAKRQGSGGVWGWLAGSPQEKDDDSP

SEQ ID NO: 71877 - protein, 692 aa, Arabidopsis thaliana
  peptide (1)..(692): Ceres Seq. ID no. 4816281
MPRATSGPAYPERFYAAASYVGLDGSDSSAKNVISKFPDDTALLLYALYQQATVGPCNTPKPSAWRPVEQSKWKRRCLRFHQLLERKNPNALGKRERSTLVWQGLGTMPSIEAMRLFVKILEEDDPGWYSRASNDIPDPVVDVQINRAKDEPVVENGSTFSETKTISTENGRLAETQDKDVVSEDSNTVSVYNQWTAPQTSGQRPKARYEHGAAVIQDKMYIYGGNHNGRYLGDLHVLDLKSWTWSRVETKVATESQETSTPTLLAPCAGHSLIAWDNKLLSIGGHTKDPSESMQVKVFDPHTITWSMLKTYGKPPVSRGGQSVTMVGKTLVIFGGQDAKRSLLNDLHILDLDTMTWDEIDAVGVSPSPRSDHAAAVHAERFLLIFGGGSHATCFDDLHVLDLQTMEWSRPAQQGDAPTPRAGHAGVTIGENWFIVGGGDNKSGASESVVLNMSTLAWSVVASVQGRVPLASEGLSLVVSSYNGEDVLVAFGGYNGRYNNEINLLKPSHKSTLQTKTLEAPLPGSLSAVNNATTRDIESEVEVSQEGRVREIVMDNVNPGSKVEGNSERIIATIKSEKEELEASLNKERMQTLQLRQELGEAELRNTDLYKELQSVRGQLAAEQSRCFKLEVDVAELRQKLQTLETLQKELELLQRQKAASEQAAMNAKRQGSGGVWGWLAGSPQEKDDDSP

SEQ ID NO: 71878 - protein, 585 aa, Arabidopsis thaliana
  peptide (1)..(585): Ceres Seq. ID no. 4816282
MPSIEAMRLFVKILEEDDPGWYSRASNDIPDPVVDVQINRAKDEPVVENGSTFSETKTISTENGRLAETQDKDVVSEDSNTVSVYNQWTAPQTSGQRPKARYEHGAAVIQDKMYIYGGNHNGRYLGDLHVLDLKSWTWSRVETKVATESQETSTPTLLAPCAGHSLIAWDNKLLSIGGHTKDPSESMQVKVFDPHTITWSMLKTYGKPPVSRGGQSVTMVGKTLVIFGGQDAKRSLLNDLHILDLDTMTWDEIDAVGVSPSPRSDHAAAVHAERFLLIFGGGSHATCFDDLHVLDLQTMEWSRPAQQGDAPTPRAGHAGVTIGENWFIVGGGDNKSGASESVVLNMSTLAWSVVASVQGRVPLASEGLSLVVSSYNGEDVLVAFGGYNGRYNNEINLLKPSHKSTLQTKTLEAPLPGSLSAVNNATTRDIESEVEVSQEGRVREIVMDNVNPGSKVEGNSERIIATIKSEKEELEASLNKERMQTLQLRQELGEAELRNTDLYKELQSVRGQLAAEQSRCFKLEVDVAELRQKLQTLETLQKELELLQRQKAASEQAAMNAKRQGSGGVWGWLAGSPQEKDDDSP

SEQ ID NO: 71879 - DNA, 761 bp, Arabidopsis thaliana
  misc_feature (1)..(761): Ceres Seq. ID no. 4901034
  misc_feature (1)..(761): Ortholog of  Ceres SEQ ID NO 12610129 as cited in SEQ ID NO 55779
aaaaaaacacaatccctcttagaaacagagagcttctcttctttctccattattcatcactttcttccccgaagatgcgtcctttagacgagaccgagacaaccgtcgtcttcgagaagctcttcaaattcgtcggcaacaacctcaagaagatcgtcgagaacccatcagacgaaggacccgaatctacacccggcagctactgcttccgcctccagaaaaacagagtctactacgtcagcgaagccctcgtgaagcgagccacaaacatctcaggaaaaacctagtctcttcggaacctgcatcgggaaatacactcacgccggtagtttccatctgacgattatgtcactcaatatcttggcggcgaatgctaaacacaaggtatggcttaaacccacttcggagatgtcgtttctttatgggaaccatgtcttgaaaggtggattagggaggattactgatagtattgttcctggagatggtgttgttgtgttctcgatgtctgatgttccgttagggtttgggattgctgcgaagagtacacaggattgtaggaaattggatcctaatggtattgttgtgcttcatcaggctgatattggagagtatttgaggggtgaagatgacctttgaaagtttaaaggttttgtctttgttgtgtcttagtttgattctgcttgttgctttgagttttaaagtatgtagctgttacaagtttcgtggaacttggttctggatctatgaaagtctcgattttt

SEQ ID NO: 71880 - protein, 96 aa, Arabidopsis thaliana
  peptide (1)..(96): Ceres Seq. ID no. 4901035
MSLNILAANAKHKVWLKPTSEMSFLYGNHVLKGGLGRITDSIVPGDGVVVFSMSDVPLGFGIAAKSTQDCRKLDPNGIVVLHQADIGEYLRGEDDL

SEQ ID NO: 71881 - protein, 94 aa, Arabidopsis thaliana
  peptide (1)..(94): Ceres Seq. ID no. 4901036
KNTIPLRNRELLFFLHYSSLSSPKMRPLDETETTVVFEKLFKFVGNNLKKIVENPSDEGPESTPGSYCFRLQKNRVYYVSEALVKRATNISGKT

SEQ ID NO: 71882 - protein, 75 aa, Arabidopsis thaliana
  peptide (1)..(75): Ceres Seq. ID no. 4901037
MSFLYGNHVLKGGLGRITDSIVPGDGVVVFSMSDVPLGFGIAAKSTQDCRKLDPNGIVVLHQADIGEYLRGEDDL

SEQ ID NO: 71883 - DNA, 2085 bp, Arabidopsis thaliana
  misc_feature (1)..(2085): Ceres Seq. ID no. 4902421
  misc_feature (1)..(2085): Ortholog of  Ceres SEQ ID NO 15170666 as cited in SEQ ID NO 63386
atgcctttaacgagatcaaagagtcttccggcgacggagaacggtggatccgatcgggagacactccaatcaggaagatcagtggctgggattctctataaatggactaattacggaaaaggatggagatctagatggttcctcctccgcgacggaatcttatcgtattccaagatccgaagaccggagaatgtcaatctcttatctccttccgatgatctgaggttaatcggagatatttccaccgatcgtctcttgagaatgaagagttgtagtggccgtagtcgtcggaaacatcacaaaaacattggcattgttcatctcaagcaggtttcatcttaccgagaaagcaagtctgatcatagaaagttttatatctttactgcaaccaagactctgcatctgaggactgattctagaagtgatagagcagcatggttacaagctttagcatctaccaggggcatagttcctctccagtcaattaatggggatttctccttcgtatcaccaaaggatttatccatatctaccgagagactaaagaaacggttgtttgaagagggaatgaacgagagtcttgtaaaagagtgcgagcagatcgtggattcagagttctgtgaagttcaagaacagattaaacttcttcacgaagagcggaaaaagttgcttgatgctttgaggcagctagagatggccaaccttgaagctgaagcctcagggatccatgacgatgtctaccaattaagaaatcacaagtattccagcttaggacgtggaaaatatagtgaatgcagtacaagtgcttcatctgatgataagcaagagtttgaggatatctctgaggaagacgaggcttccttccatgacacaaaggagtcatttggtgaacctgatgttggttctgtgctcacgcattttaagagacgaacaaagcttcctgatccagcagagaaagagagaggtgtcagtctctggtctatgatcaaagacaatgttggaaaggatctcacacgagtttgtcttcctgtttatttcaatgaaccaatatcttccctccaaaagtgttttgaagacttggagtactcttatctcttggaccaagcatatgaatacggaaaatccgggaagagtctccttagagccctcaatgtcgctgcttttgcagtctctggttatgcttccaccgaaggacgacactgtaaacctttcaaccctttgctcggagaaacatatgaagctgactttcctgaaaagggaattcgtttcttctctgagaaggttagccaccatccaacagttatcgcctgccattgcgaaggtaaagggtggaagttctggggcgacacaaacctccggtcgaagttttgggggagatcgatccaacttgaacccgttggaatcttgactctcgagtttgatgatggagaaattttccagtggagcaaagtaacaacaactatatacaatatcctacttggtaaactgtactgcgatcaccatgggataatgaaaatccgtggaaatcgccaatattcttgtatgttaaagttcaaggagcaatcgattcttgatagaaatccccaccaggttaatggttttgtagaagatgtaactggaaaaaaggctgcgacggtatttggtaaatggaatgatagcctttattatgttgctggtgatggaatcaacaaggcaagcgcctcattactgtggaaagcgacaaaggcaccacctaatgtcaccagatacaactttacatcattcgcgatgacgctaaatgaattgatacctggtttggaggaaaagctgcctccaacagattctaggctccgaccagatcaacgacacttggagaacggtgaatatgagaaggcaaatgaagagaaacaaagattagagagaagacaaagaatgtcacggcaaattcaggaaagtgggtggagaccgagatggttcgagcctcaaggagagagtgaaagctataagtatacgggcggttattgggaagcacgagatgttaaaagttgggatgattgccctaacatatttggagagttcaccgaagaggttgcagattgtgcttaa

SEQ ID NO: 71884 - protein, 694 aa, Arabidopsis thaliana
  peptide (1)..(694): Ceres Seq. ID no. 4902422
MPLTRSKSLPATENGGSDRETLQSGRSVAGILYKWTNYGKGWRSRWFLLRDGILSYSKIRRPENVNLLSPSDDLRLIGDISTDRLLRMKSCSGRSRRKHHKNIGIVHLKQVSSYRESKSDHRKFYIFTATKTLHLRTDSRSDRAAWLQALASTRGIVPLQSINGDFSFVSPKDLSISTERLKKRLFEEGMNESLVKECEQIVDSEFCEVQEQIKLLHEERKKLLDALRQLEMANLEAEASGIHDDVYQLRNHKYSSLGRGKYSECSTSASSDDKQEFEDISEEDEASFHDTKESFGEPDVGSVLTHFKRRTKLPDPAEKERGVSLWSMIKDNVGKDLTRVCLPVYFNEPISSLQKCFEDLEYSYLLDQAYEYGKSGKSLLRALNVAAFAVSGYASTEGRHCKPFNPLLGETYEADFPEKGIRFFSEKVSHHPTVIACHCEGKGWKFWGDTNLRSKFWGRSIQLEPVGILTLEFDDGEIFQWSKVTTTIYNILLGKLYCDHHGIMKIRGNRQYSCMLKFKEQSILDRNPHQVNGFVEDVTGKKAATVFGKWNDSLYYVAGDGINKASASLLWKATKAPPNVTRYNFTSFAMTLNELIPGLEEKLPPTDSRLRPDQRHLENGEYEKANEEKQRLERRQRMSRQIQESGWRPRWFEPQGESESYKYTGGYWEARDVKSWDDCPNIFGEFTEEVADCA

SEQ ID NO: 71885 - protein, 607 aa, Arabidopsis thaliana
  peptide (1)..(607): Ceres Seq. ID no. 4902423
MKSCSGRSRRKHHKNIGIVHLKQVSSYRESKSDHRKFYIFTATKTLHLRTDSRSDRAAWLQALASTRGIVPLQSINGDFSFVSPKDLSISTERLKKRLFEEGMNESLVKECEQIVDSEFCEVQEQIKLLHEERKKLLDALRQLEMANLEAEASGIHDDVYQLRNHKYSSLGRGKYSECSTSASSDDKQEFEDISEEDEASFHDTKESFGEPDVGSVLTHFKRRTKLPDPAEKERGVSLWSMIKDNVGKDLTRVCLPVYFNEPISSLQKCFEDLEYSYLLDQAYEYGKSGKSLLRALNVAAFAVSGYASTEGRHCKPFNPLLGETYEADFPEKGIRFFSEKVSHHPTVIACHCEGKGWKFWGDTNLRSKFWGRSIQLEPVGILTLEFDDGEIFQWSKVTTTIYNILLGKLYCDHHGIMKIRGNRQYSCMLKFKEQSILDRNPHQVNGFVEDVTGKKAATVFGKWNDSLYYVAGDGINKASASLLWKATKAPPNVTRYNFTSFAMTLNELIPGLEEKLPPTDSRLRPDQRHLENGEYEKANEEKQRLERRQRMSRQIQESGWRPRWFEPQGESESYKYTGGYWEARDVKSWDDCPNIFGEFTEEVADCA

SEQ ID NO: 71886 - protein, 505 aa, Arabidopsis thaliana
  peptide (1)..(505): Ceres Seq. ID no. 4902424
MNESLVKECEQIVDSEFCEVQEQIKLLHEERKKLLDALRQLEMANLEAEASGIHDDVYQLRNHKYSSLGRGKYSECSTSASSDDKQEFEDISEEDEASFHDTKESFGEPDVGSVLTHFKRRTKLPDPAEKERGVSLWSMIKDNVGKDLTRVCLPVYFNEPISSLQKCFEDLEYSYLLDQAYEYGKSGKSLLRALNVAAFAVSGYASTEGRHCKPFNPLLGETYEADFPEKGIRFFSEKVSHHPTVIACHCEGKGWKFWGDTNLRSKFWGRSIQLEPVGILTLEFDDGEIFQWSKVTTTIYNILLGKLYCDHHGIMKIRGNRQYSCMLKFKEQSILDRNPHQVNGFVEDVTGKKAATVFGKWNDSLYYVAGDGINKASASLLWKATKAPPNVTRYNFTSFAMTLNELIPGLEEKLPPTDSRLRPDQRHLENGEYEKANEEKQRLERRQRMSRQIQESGWRPRWFEPQGESESYKYTGGYWEARDVKSWDDCPNIFGEFTEEVADCA

SEQ ID NO: 71887 - DNA, 1312 bp, Arabidopsis thaliana
  misc_feature (1)..(1312): Ceres Seq. ID no. 4902436
  misc_feature (1)..(1312): Ortholog of  Ceres SEQ ID NO 13596392 as cited in SEQ ID NO 62136
  misc_feature (1)..(1312): Ortholog of  Ceres SEQ ID NO 13654360 as cited in SEQ ID NO 67980
  misc_feature (1)..(1312): Ortholog of  Ceres SEQ ID NO 13596394 as cited in SEQ ID NO 68561
ctctccctctttcccccttacgtaaccctaagcggacggagcaatgctctgctagatctatctttctttcaattcttcaccagagatcgtcgagactcaccattgaaatcgaagaaacagcaccaatttccacttcaccaccgaaagagagagacagagaggataataaaaggccgccatggatttagatcaatggatttccaaggttaaagacggccaacatctctctgaggacgagcttcaacttctctgcgaatacgtgaaagaaattcttattgaggaatcaaatgtacaacctgtcaacagtcctgtcaccgtctgtggtgatatccatggccagtttcatgatcttatgaaacttttccagaccggaggtcatgttcccgagaccaattacatatttatgggggatttcgttgatagaggttacaacagtcttgaagttttcaccattcttttgcttcttaaagcaagacatccagccaatatcactcttttgcgtggaaatcatgaaagtagacagctaactcaggtgtatggtttctatgacgaatgccaaaggaagtatggtaatgctaatgcttggagatattgcacggatgtttttgactatcttacactttcagctattatagatggcactgttctatgtgttcatggtggcctttcacctgatgtacggacaattgaccagataagattgattgagcggaattgcgaaataccgcatgaaggacccttctgtgatcttatgtggagtgatcctgaagatattgaaacatgggctgtcagtccacgtggagctggttggcttttcgggtccagggttaccactgagtttaaccatattaacaatcttgatctagtatgtcgcgctcaccagcttgtacaagaaggtctcaagtacatgttccaagataaaggtcttgtaactgtgtggtctgcgcctaattactgctaccgttgtgggaatgtggcttctatattgagtttcaatgacaacatggaaagggaagtgaagttcttcacggagacagaagagaacaatcaaatgagagggccaaggacaggtgttccttatttcctgtgattcatgatgatgatcctacatcattattagtctcgtattgctcttatcaagttagccattatcatgattgccattggcttatgttctttcaaggtatatcttctgatgttgtttacacttccattgttttttttttcctttttccattttggaaacattttcttgtgaaagtgaatgtcactttggtaattttagtggttttgatgcactttaacctgaacc

SEQ ID NO: 71888 - protein, 303 aa, Arabidopsis thaliana
  peptide (1)..(303): Ceres Seq. ID no. 4902437
MDLDQWISKVKDGQHLSEDELQLLCEYVKEILIEESNVQPVNSPVTVCGDIHGQFHDLMKLFQTGGHVPETNYIFMGDFVDRGYNSLEVFTILLLLKARHPANITLLRGNHESRQLTQVYGFYDECQRKYGNANAWRYCTDVFDYLTLSAIIDGTVLCVHGGLSPDVRTIDQIRLIERNCEIPHEGPFCDLMWSDPEDIETWAVSPRGAGWLFGSRVTTEFNHINNLDLVCRAHQLVQEGLKYMFQDKGLVTVWSAPNYCYRCGNVASILSFNDNMEREVKFFTETEENNQMRGPRTGVPYFL

SEQ ID NO: 71889 - protein, 245 aa, Arabidopsis thaliana
  peptide (1)..(245): Ceres Seq. ID no. 4902438
MKLFQTGGHVPETNYIFMGDFVDRGYNSLEVFTILLLLKARHPANITLLRGNHESRQLTQVYGFYDECQRKYGNANAWRYCTDVFDYLTLSAIIDGTVLCVHGGLSPDVRTIDQIRLIERNCEIPHEGPFCDLMWSDPEDIETWAVSPRGAGWLFGSRVTTEFNHINNLDLVCRAHQLVQEGLKYMFQDKGLVTVWSAPNYCYRCGNVASILSFNDNMEREVKFFTETEENNQMRGPRTGVPYFL

SEQ ID NO: 71890 - protein, 228 aa, Arabidopsis thaliana; identical to SEQ ID NO: 23042
  peptide (1)..(228): Ceres Seq. ID no. 4902439

SEQ ID NO: 71891 - DNA, 970 bp, Arabidopsis thaliana
  misc_feature (1)..(970): Ceres Seq. ID no. 4902493
  misc_feature (1)..(970): Ortholog of  Ceres SEQ ID NO 12623748 as cited in SEQ ID NO 61143
gaacaggatctgttctataggctcgtacctctgtttccttgatttctaaggagacaggccctaaaccctggttgatgaaccatgaccgtgcggtcagagcgtgattgatggctacgatcgtcttcggacgcatccggtgctgtagaggatcgttactcggcttggtcttccttgccggggtggtcgcacggcggtctgacagaaaacaagagataaggttgaagagtgaagcaaagcttagtaatggcttcaatgcacgaagctctgttctcttctcggcttcttcaagtcaattcttctttttccttccgttgcgctcttccaattatctcttcaccagctgcagtatcttgcgcaatcaaatcgacccagttttttaaacagcgttgtagaaccaaagtgagggacttttctctatcttcactgtcccggagagggttcgtttgcagagctgctgagtacaagtttccggatcccatacctgaattcgccgaagctgagactgagaaatttagggaccatatgttaaacaaactatcaaaaagagatctttttgaagactctgttgatgaaattgttggagtctgcactgagatcttcgagacgttcttgcgcagtgagtatggaggacctggtacactcttggtgatacctttcattgacatggcagatactctcaacgaaagggaattgcctggaggtccacaagccgcccgagcagctattaaatgggctcaggatcatgtagacaaggactggaaggaatggaccggcactgattagtcccctgggagcattaagtataatccgtgagttatttagtttagtagtggggtagcagatgtgtcattgtaaaactctgattactatgtcgtgaagcacttaatctttgatcaaaaactgtttggtgtaaacttgtccaaacgactggaaacaagaaaaagaaaagatggcaaaagctttttattgt

SEQ ID NO: 71892 - protein, 179 aa, Arabidopsis thaliana
  peptide (1)..(179): Ceres Seq. ID no. 4902494
MASMHEALFSSRLLQVNSSFSFRCALPIISSPAAVSCAIKSTQFFKQRCRTKVRDFSLSSLSRRGFVCRAAEYKFPDPIPEFAEAETEKFRDHMLNKLSKRDLFEDSVDEIVGVCTEIFETFLRSEYGGPGTLLVIPFIDMADTLNERELPGGPQAARAAIKWAQDHVDKDWKEWTGTD

SEQ ID NO: 71893 - protein, 176 aa, Arabidopsis thaliana
  peptide (1)..(176): Ceres Seq. ID no. 4902495
MHEALFSSRLLQVNSSFSFRCALPIISSPAAVSCAIKSTQFFKQRCRTKVRDFSLSSLSRRGFVCRAAEYKFPDPIPEFAEAETEKFRDHMLNKLSKRDLFEDSVDEIVGVCTEIFETFLRSEYGGPGTLLVIPFIDMADTLNERELPGGPQAARAAIKWAQDHVDKDWKEWTGTD

SEQ ID NO: 71894 - protein, 90 aa, Arabidopsis thaliana; identical to SEQ ID NO: 37069
  peptide (1)..(90): Ceres Seq. ID no. 4902496

SEQ ID NO: 71895 - DNA, 1068 bp, Arabidopsis thaliana
  misc_feature (1)..(1068): Ceres Seq. ID no. 4903808
  misc_feature (1)..(1068): Ortholog of  Ceres SEQ ID NO 14316161 as cited in SEQ ID NO 52384
  misc_feature (1)..(1068): Ortholog of  Ceres SEQ ID NO 14315249 as cited in SEQ ID NO 52512
  misc_feature (1)..(1068): Ortholog of  Ceres SEQ ID NO 15174595 as cited in SEQ ID NO 53460
  misc_feature (1)..(1068): Ortholog of  Ceres SEQ ID NO 13503553 as cited in SEQ ID NO 64822
  misc_feature (1)..(1068): Ortholog of  Ceres SEQ ID NO 13660155 as cited in SEQ ID NO 67635
cccccacaccttctctttctcttagcatactctgctcttcctctctctgttgttctctgttccaaaggctttgagaaaaaatggagttcgagaaccggtacggacttgcaacgtcgcagaagtacgactgtctcttgttcgatttggacgatactctttatcctcttagctccggaatcgcaagagaatgtgggaacaacatcaaagattacatgaccgagaaactcggtatacctaaggacaaaatcgtcgaattgtctgatcttctatacaagaactatggaacaacaatggctggtcttagggcgatcggatatgaatttgactacgatgagtaccacagcttcgtccacggtcgtttaccctatgacaacataaaacccgaccttgttcttcgcagcctcttgcttagcctccctctccgcaaagtcatctttaccaacgcggacagagttcacgcggccaaggcgttgaagaagttgggattagaggattgtttcgaaggaatcatatgtttcgaaacgctaaacctcatgcacacaaacgctgcgtctaacaattccgagatttttgatatcgttggacattttaaccggtctgaaccggtcggttcacttcccaaaacgcctgttgtgtgtaaaccatctgaatctgctatcgagaaagctcttgaaatcgccaatattgatcctaaccgaacgctgttctttgaggacagtgtccgaaacgtacaagctggaaaacgcgttggtctttacacggttctggttggtaaatcgaccaaagtcaaaggagcggattacgcgttggaaaacattcacaacatgaaagaggcgataccggagttatgggaatccgacaggaaatcgtcggatgttggatattccggcaaggtcgccgttgagacttctgttagagcttaggaggagtactgtttcgccgttgtacctaattttccaccactgtcattttcattttcttttttcaaatgacgtaatgtcatttttgttttttttttcgacttgtgtttataaaagattaataaaaaatgagaaaataatttccatc

SEQ ID NO: 71896 - protein, 280 aa, Arabidopsis thaliana; identical to SEQ ID NO: 29464
  peptide (1)..(280): Ceres Seq. ID no. 4903809

SEQ ID NO: 71897 - protein, 236 aa, Arabidopsis thaliana; identical to SEQ ID NO: 23607
  peptide (1)..(236): Ceres Seq. ID no. 4903810

SEQ ID NO: 71898 - protein, 210 aa, Arabidopsis thaliana; identical to SEQ ID NO: 23608
  peptide (1)..(210): Ceres Seq. ID no. 4903811

SEQ ID NO: 71899 - DNA, 1248 bp, Arabidopsis thaliana
  misc_feature (1)..(1248): Ceres Seq. ID no. 4903820
  misc_feature (1)..(1248): Ortholog of  Ceres SEQ ID NO 15169005 as cited in SEQ ID NO 55180
attctaaagatttttctctccggagacgttaagagaagaaacagccaacggattagggatcttaccgttctgcgattcgccgagtttgaagctttttttagagacttcaatggtgagccaaggaatggtatctcttacaaagtctctatgcactatgactccaagagtccgtctcaagaatccgaatatgttgcagaaactaaagactggatcttgtaatttccgtttcagaaatctccgtgtcttatgcacaccaaagctgtctcagtgggaaccgtcacctttcattcatgcttctgcagaagaagctgctgatatagtattggacaaaaccgcgaatgtgttcgaatctattgtctccgagagtgcagaggaagagaaagtagatatgtcagcgcaacaacgaactaattctcaagttcaggtacttaaatggccaatatggcttttgggtccatctgttctcctcacaagcggtatggcgcctactttatggcttccgttgtcatcggtttttctcggttccaacgtggttagtctactttctttgatcggtctagattgcattttcaatcttggagcaacccttttcctcttaatggctgattcttgcgcacgtcctaaagacccatcacagtcctgcaacagcaaaccaccatttagctataagttctggaacatgttttcactcataatcgggtttctagtcccaatgttacttctcttcggatcccaatctggccttctcgcttctctccagccccagattcctttcctctcgtccgctgttatcctcttcccgtacttcattctccttgctgttcagacattaacagagatcctcacatggcactggcaatcaccggtctggctagtcacaccagttgtctacgaggcttaccgaatcttgcaactgatgagagggttgacacttagtgcagaggtcaacgcaccggtttgggtggttcatatgcttcgtgggcttgtctcttggtgggtattgatcttgggaatgcaactcatgagagttgcttggtttgctggttttgcatctagaacaacaacaggtcagcaaccacaatctgttgcttctaagtaaagacagataaatgtttcttcgtttagtttttaaagtcatgtcaaagatttgtaactctttcttcactgtatagcttttattattcgtgggttggtgataaggattaaaaaaaaacacatattctttatgatcatattcgctcttttagt

SEQ ID NO: 71900 - protein, 329 aa, Arabidopsis thaliana
  peptide (1)..(329): Ceres Seq. ID no. 4903821
MVSQGMVSLTKSLCTMTPRVRLKNPNMLQKLKTGSCNFRFRNLRVLCTPKLSQWEPSPFIHASAEEAADIVLDKTANVFESIVSESAEEEKVDMSAQQRTNSQVQVLKWPIWLLGPSVLLTSGMAPTLWLPLSSVFLGSNVVSLLSLIGLDCIFNLGATLFLLMADSCARPKDPSQSCNSKPPFSYKFWNMFSLIIGFLVPMLLLFGSQSGLLASLQPQIPFLSSAVILFPYFILLAVQTLTEILTWHWQSPVWLVTPVVYEAYRILQLMRGLTLSAEVNAPVWVVHMLRGLVSWWVLILGMQLMRVAWFAGFASRTTTGQQPQSVASK

SEQ ID NO: 71901 - protein, 324 aa, Arabidopsis thaliana
  peptide (1)..(324): Ceres Seq. ID no. 4903822
MVSLTKSLCTMTPRVRLKNPNMLQKLKTGSCNFRFRNLRVLCTPKLSQWEPSPFIHASAEEAADIVLDKTANVFESIVSESAEEEKVDMSAQQRTNSQVQVLKWPIWLLGPSVLLTSGMAPTLWLPLSSVFLGSNVVSLLSLIGLDCIFNLGATLFLLMADSCARPKDPSQSCNSKPPFSYKFWNMFSLIIGFLVPMLLLFGSQSGLLASLQPQIPFLSSAVILFPYFILLAVQTLTEILTWHWQSPVWLVTPVVYEAYRILQLMRGLTLSAEVNAPVWVVHMLRGLVSWWVLILGMQLMRVAWFAGFASRTTTGQQPQSVASK

SEQ ID NO: 71902 - protein, 314 aa, Arabidopsis thaliana
  peptide (1)..(314): Ceres Seq. ID no. 4903823
MTPRVRLKNPNMLQKLKTGSCNFRFRNLRVLCTPKLSQWEPSPFIHASAEEAADIVLDKTANVFESIVSESAEEEKVDMSAQQRTNSQVQVLKWPIWLLGPSVLLTSGMAPTLWLPLSSVFLGSNVVSLLSLIGLDCIFNLGATLFLLMADSCARPKDPSQSCNSKPPFSYKFWNMFSLIIGFLVPMLLLFGSQSGLLASLQPQIPFLSSAVILFPYFILLAVQTLTEILTWHWQSPVWLVTPVVYEAYRILQLMRGLTLSAEVNAPVWVVHMLRGLVSWWVLILGMQLMRVAWFAGFASRTTTGQQPQSVASK

SEQ ID NO: 71903 - DNA, 1151 bp, Arabidopsis thaliana
  misc_feature (1)..(1151): Ceres Seq. ID no. 4903859
  misc_feature (1)..(1151): Ortholog of  Ceres SEQ ID NO 14311579 as cited in SEQ ID NO 51717
tcgccgcaaaatttgttctccggaagagaatggattttcttaaggcaacgattatagttgccctaatttgcaatttcgcctcactggcgtcttctgttcctttcatagttctgcatggaattggggataaatgcagtaatgcaggagtgacacaattcacagagcttttaagcgattggtctggttctcaaggatattgcttggagattgggaatggctcatgggactcatggactatgcctctccttgatcagacatcagttgtttgtgagaaggtgaaaagtatgccagagcttagtgacggttacagcattgtggggctttctcagggtaacatgattggtcgagctctcattgagttttgcgatggagcaccacctgttaagagttttgtttcggtagcgggtcctcatgctggcactgcatcgattccgttctgtggtgctacctggatttgcatcatgttggacagtatgatcaaagcagagatctatagcgactatatgcaggaacatttggctcctagcggttttctcaaaatcccaactgacatagcgggttacatggaaggctgtaggtttctcccaaagctaaacaacgaacttccagtcaaaaactcgacttataaggagaggttctcgagtttggagaatcttgtgcttattatgtttgagcatgacacaatattgatacctaaagaaacctcatggtttggatattatcctgatgggtctttcaagaccattcttccgccgcaagagaccaagctatatactgaagactggattggtttgagaaccttagatgaagctggaaaagtgaagttcgttaacgtctctggaaatcatcttcagatatctcatacagacatgaagaagcatatagtgccatacctctgtgataaatcatcgtcgtcatcatccacaacaatggcagtttccggatcatcttcctcacaccagtggcttccaagtgtagggaacattattatggatcttattggtccagaagtggatcagcttcagcttgtgctacgtcatgtgtaaatctgatgtcctgtgttgttgtttgttctcttactaaacacgatcgtctcgtgatatgtttgtaacttgaagataaaacaagaaaactgttccaaaatccctctc

SEQ ID NO: 71904 - protein, 347 aa, Arabidopsis thaliana
  peptide (1)..(347): Ceres Seq. ID no. 4903860
AAKFVLRKRMDFLKATIIVALICNFASLASSVPFIVLHGIGDKCSNAGVTQFTELLSDWSGSQGYCLEIGNGSWDSWTMPLLDQTSVVCEKVKSMPELSDGYSIVGLSQGNMIGRALIEFCDGAPPVKSFVSVAGPHAGTASIPFCGATWICIMLDSMIKAEIYSDYMQEHLAPSGFLKIPTDIAGYMEGCRFLPKLNNELPVKNSTYKERFSSLENLVLIMFEHDTILIPKETSWFGYYPDGSFKTILPPQETKLYTEDWIGLRTLDEAGKVKFVNVSGNHLQISHTDMKKHIVPYLCDKSSSSSSTTMAVSGSSSSHQWLPSVGNIIMDLIGPEVDQLQLVLRHV

SEQ ID NO: 71905 - protein, 338 aa, Arabidopsis thaliana; identical to SEQ ID NO: 41246
  peptide (1)..(338): Ceres Seq. ID no. 4903861

SEQ ID NO: 71906 - protein, 269 aa, Arabidopsis thaliana; identical to SEQ ID NO: 41247
  peptide (1)..(269): Ceres Seq. ID no. 4903862

SEQ ID NO: 71907 - DNA, 1344 bp, Arabidopsis thaliana
  misc_feature (1)..(1344): Ceres Seq. ID no. 4904003
  misc_feature (1)..(1344): Ortholog of  Ceres SEQ ID NO 15170239 as cited in SEQ ID NO 54977
  misc_feature (1)..(1344): Ortholog of  Ceres SEQ ID NO 12615622 as cited in SEQ ID NO 62802
  misc_feature (1)..(1344): Ortholog of  Ceres SEQ ID NO 13596203 as cited in SEQ ID NO 68499
aaaatccagctgataaataaataatttttctcttgtcgtcatattaaaaaaaagaaagattatctgtatttcaagtttcatgagcgtttgccaccacaacattgtcttttcggggttttagtcatacttaatggcttccaattcggagaaaaatcctcttctttcagatgagaaacccaaatcgacggaggagaataagagttctaagccggaatcagcttctgggagttcaacttcatcagctatgcctggcttgaatttcaatgcttttgatttctctaatatggctagtattctcaacgatcctagcatcagagaaatggctgagcaaatagctaaagatcctgcgtttaaccaattggctgagcagcttcagagatctattcctaacgctggccaggaaggtggtttccctaactttgatcctcaacagtatgtcaatacaatgcaacaggttatgcataaccctgagtttaagacaatggccgagaaacttggtaccgccttagttcaggatccacaaatgtctccttttttggatgctttctcgaatcctgaaacagcagaacactttactgagcgtatggcgcggatgaaagaagatccagagttgaaacctatactagatgagattgatgctggtggtccttctgccatgatgaagtactggaatgatccagaagtgctgaaaaagctgggtgaagcaatgggtatgcctgttgctggcttaccagaccagactgtttcagctgaacctgaggtagcagaagaaggtgaagaagaagagtctattgttcaccaaactgccagtcttggtgatgttgagggtttgaaagctgccttggcatctggtggtaacaaagatgaagaagattctgaaggaaggacagcattgcattttgcttgtggatacggcgagttgaaatgtgctcaagttcttatcgatgctggagcaagtgttaatgcggttgacaaaaacaagaacacacctctgcattatgctgctggttacgggaggaaagagtgtgtaagccttctcctggagaatggtgctgcagtcactctgcaaaacctagacgagaagacgccaattgatgtagcgaagctcaacagccagctggaggtggtgaagctgcttgagaaggatgctttcctttgagctctgctggttaaaggaaagctctaagctcatattgtctttgaggcatttgtcttgtgtgtgtcctgaaccagtttcacaggctttttgtgtacactttttattagttcctctcttcttctaaatttgtctcttatgttgttttaaaagtcaataaagaaagaaatagcaatcaatgatttaat

SEQ ID NO: 71908 - protein, 342 aa, Arabidopsis thaliana
  peptide (1)..(342): Ceres Seq. ID no. 4904004
MASNSEKNPLLSDEKPKSTEENKSSKPESASGSSTSSAMPGLNFNAFDFSNMASILNDPSIREMAEQIAKDPAFNQLAEQLQRSIPNAGQEGGFPNFDPQQYVNTMQQVMHNPEFKTMAEKLGTALVQDPQMSPFLDAFSNPETAEHFTERMARMKEDPELKPILDEIDAGGPSAMMKYWNDPEVLKKLGEAMGMPVAGLPDQTVSAEPEVAEEGEEEESIVHQTASLGDVEGLKAALASGGNKDEEDSEGRTALHFACGYGELKCAQVLIDAGASVNAVDKNKNTPLHYAAGYGRKECVSLLLENGAAVTLQNLDEKTPIDVAKLNSQLEVVKLLEKDAFL

SEQ ID NO: 71909 - protein, 304 aa, Arabidopsis thaliana
  peptide (1)..(304): Ceres Seq. ID no. 4904005
MPGLNFNAFDFSNMASILNDPSIREMAEQIAKDPAFNQLAEQLQRSIPNAGQEGGFPNFDPQQYVNTMQQVMHNPEFKTMAEKLGTALVQDPQMSPFLDAFSNPETAEHFTERMARMKEDPELKPILDEIDAGGPSAMMKYWNDPEVLKKLGEAMGMPVAGLPDQTVSAEPEVAEEGEEEESIVHQTASLGDVEGLKAALASGGNKDEEDSEGRTALHFACGYGELKCAQVLIDAGASVNAVDKNKNTPLHYAAGYGRKECVSLLLENGAAVTLQNLDEKTPIDVAKLNSQLEVVKLLEKDAFL

SEQ ID NO: 71910 - protein, 291 aa, Arabidopsis thaliana
  peptide (1)..(291): Ceres Seq. ID no. 4904006
MASILNDPSIREMAEQIAKDPAFNQLAEQLQRSIPNAGQEGGFPNFDPQQYVNTMQQVMHNPEFKTMAEKLGTALVQDPQMSPFLDAFSNPETAEHFTERMARMKEDPELKPILDEIDAGGPSAMMKYWNDPEVLKKLGEAMGMPVAGLPDQTVSAEPEVAEEGEEEESIVHQTASLGDVEGLKAALASGGNKDEEDSEGRTALHFACGYGELKCAQVLIDAGASVNAVDKNKNTPLHYAAGYGRKECVSLLLENGAAVTLQNLDEKTPIDVAKLNSQLEVVKLLEKDAFL

SEQ ID NO: 71911 - DNA, 1506 bp, Arabidopsis thaliana
  misc_feature (1)..(1506): Ceres Seq. ID no. 4904634
  misc_feature (1)..(1506): Ortholog of  Ceres SEQ ID NO 14311961 as cited in SEQ ID NO 51512
aaatttgctccaatgcctgtacttttctcctctcgttctctcatactctccattattgtccccttacttatatctatcgctctctacaaactcgacacattcgaccccgctattgttccttccgatgcattcacatcctctgctacttcactcccgccgcttataaacgacgaatttctcaccggagctgagtttatcggtgtcggtcttctcaatatacccgaagatatcgcctaccataaggaatctaatctcatctacactggttgtgttgatggatgggtgaaacgagtcaaggtcgccgactcggttaatgactcagtcgttgaggattgggtcaatactggtggtagaccgctcggaatcgcgttcggaatccacggcgaagtcattgtcgcagacgtacacaaggttggggttttgaaatcgaattttgaaaaatcacaatcttaggtttgactttgttgttatgtatagggactgttgaatataagcggtgacggaaagaagacggaattgttgacggacgaagcggacggtgtgaagtttaagctgacggatgcagttaccgttgcagataacggcgttttgtatttcacagatgcttcttacaagtacactctcaatcaattgagtttagacatgttagaagggaaaccttttggacgactcttgagctttgatcccaccacacgtgttacaaaagtacttctcaaagacctctacttcgctaatggcatcaccatctctcctgatcaaactcatctcatcttctgtgaaactccaatgtatgtgcattggatcagttaaattttttataaatttccgactcagtttgatttggcaataagttaatttatctatatctgttatatactactttaggaaaaggtgcagcaagtattacatcagtgaggagcgtgtggaggtattcactcaaagcttaccaggttatccagataacattcgttacgatggagatggacattactggattgcattgccttcggtaacgttacaaattgaatttcttttcttttctttgaggtcatgttattaactcattacatgctaataaaggatcatctttgtgttgtggttgtgcaaacagggagtcacgacattgtggaatatctcgttgaaataccctttcttgaggaaactcacagcaatggtggctaagtacggcgtggatcttatgtttatggagaatgcaggcgttttacaggtggatttggatggaaatcccatcgcgtactaccatgatccaaaactctctcacatagccacatgtgacaagattgggaaatatctctattgtggaagtctctcgcaatcacatatcctccgacttgatctcctgaaatatcctgcacagaacaagaaactttgaaatattatgttttcacaaataaggaaagtttccattttaggaaggagcattcactgtcacaaaaaatgtaaactcatttcctgagaatgaatgatgattgtatctcttttttt

SEQ ID NO: 71912 - protein, 150 aa, Arabidopsis thaliana
  peptide (1)..(150): Ceres Seq. ID no. 4904635
KFAPMPVLFSSRSLILSIIVPLLISIALYKLDTFDPAIVPSDAFTSSATSLPPLINDEFLTGAEFIGVGLLNIPEDIAYHKESNLIYTGCVDGWVKRVKVADSVNDSVVEDWVNTGGRPLGIAFGIHGEVIVADVHKVGVLKSNFEKSQS

SEQ ID NO: 71913 - protein, 146 aa, Arabidopsis thaliana
  peptide (1)..(146): Ceres Seq. ID no. 4904636
MPVLFSSRSLILSIIVPLLISIALYKLDTFDPAIVPSDAFTSSATSLPPLINDEFLTGAEFIGVGLLNIPEDIAYHKESNLIYTGCVDGWVKRVKVADSVNDSVVEDWVNTGGRPLGIAFGIHGEVIVADVHKVGVLKSNFEKSQS

SEQ ID NO: 71914 - DNA, 842 bp, Arabidopsis thaliana
  misc_feature (1)..(842): Ceres Seq. ID no. 4905347
  misc_feature (1)..(842): Ortholog of  Ceres SEQ ID NO 13656436 as cited in SEQ ID NO 69154
ctacgattagtttaatctctcagtccaccggagagtgtaaaaacagcgagaaaatcgacgtcgttcgatcgccgactgcgagcgaagaagaagatggctgaagaagaggttgactacgtattcaaggttgttttgaacggagattcagcggttgggaagtcacagctacgagctcggttcacaagagacgaattcagtatggattccaaagccacaattcggtgtcgatttcaatactcgaacgctcgttattgacgataagaacatcaaagctcagatctgggacatcgcaggccagaaacgacacagagctattacataagcctactacaaaggtgctgttggtgcaatgttagtttacgatatgacaatacgtgaaagctttgagcacattcctcagtggttggaagaactacgagtgcacgcggataagaacattgtcatcatcttgattggtaacaagacggatttagagaaccagagatcggttcctgtggaagatgccaaggaatttgcagagaaggaagggctttttttccttgagacttcagcactaaactccacaaatgtcgagaactctttcaacactctcttgactgagatcttcaacaaggtgaacaagaagaatctcgctaagaccaccgtgtcttgcagctcacaagtcagtcttctaagaccaccgtgtgttgcagctcaataagtcagtcttctcgatttggtccattacagtttagaataaaataaaccatttcatatacttcaaaaatattgttttgatttggtttttagatagtgagttttgtgtagtgtacgttgatttttagaacaaaatctttcatttt

SEQ ID NO: 71915 - protein, 116 aa, Arabidopsis thaliana; identical to SEQ ID NO: 29880
  peptide (1)..(116): Ceres Seq. ID no. 4905348

SEQ ID NO: 71916 - protein, 111 aa, Arabidopsis thaliana; identical to SEQ ID NO: 29881
  peptide (1)..(111): Ceres Seq. ID no. 4905349

SEQ ID NO: 71917 - DNA, 971 bp, Arabidopsis thaliana
  misc_feature (1)..(971): Ceres Seq. ID no. 4905361
  misc_feature (1)..(971): Ortholog of  Ceres SEQ ID NO 12610385 as cited in SEQ ID NO 55938
  misc_feature (1)..(971): Ortholog of  Ceres SEQ ID NO 13661939 as cited in SEQ ID NO 61170
  misc_feature (1)..(971): Ortholog of  Ceres SEQ ID NO 15178805 as cited in SEQ ID NO 0
aacacatctctctctctctctctctctttctctctttttatatttttgtgtcccaatctcttcttcatttctgtttggttgccgagaaaacgcaggaaacttttctgcaaaaaaactcggtgaccatattcaaaactttcccacgttaattctctcttctttgttttgtttcagattcattacttttctccaaaaaactttcttcaagatctgttcttttaaataattatggcggaagaacatcgatgcgagacgcctgaaggtcaccgtctctgcgttaacaactgcggtttcttcggaagctcagcgacaatgaatctatgttcaaactgttacggcgatctctgtctcaaacaacaacaacaagcttccatgaaatcaaccgtcgaatcatctctctctccggtgatcgcacctgttctcgaaaactacgcggcggagttagagatcccgacgacgaagaagacagaggagaaaaaaccgattcaaattccgacggagcaaccgtctccgccgcaacggccgaatcgatgcaccgtatgtaggaaacgggtcgggttaaccgggtttatgtgtcggtgtgggacgactttttgtgggagtcataggtatccggaggttcatggttgtacgtttgatttcaaatcggcgggacgtgaagagatcgcgaaagctaatccgttggttattgcggcgaagcttcagaaaatatgaatcggagccgttgaccgatttctatctttaccctgagaaaatttcgattgtctcggtggatctcagccgttcattatgttattgtattacggacacgtgtcgcaagattaaggttgagatggtttcgtaactttttaattattttctttgtttatttccgaagaaattaaagtttttatgattgtgtggcttttgcttgtaaaaaaaaaaagggtttctctttgggaaaaagaaaagaaaatatatgaaattgtgtc

SEQ ID NO: 71918 - protein, 161 aa, Arabidopsis thaliana; identical to SEQ ID NO: 35639
  peptide (1)..(161): Ceres Seq. ID no. 4905362

SEQ ID NO: 71919 - protein, 133 aa, Arabidopsis thaliana; identical to SEQ ID NO: 35640
  peptide (1)..(133): Ceres Seq. ID no. 4905363

SEQ ID NO: 71920 - protein, 113 aa, Arabidopsis thaliana; identical to SEQ ID NO: 35641
  peptide (1)..(113): Ceres Seq. ID no. 4905364

SEQ ID NO: 71921 - DNA, 1035 bp, Arabidopsis thaliana
  misc_feature (1)..(1035): Ceres Seq. ID no. 4905610
  misc_feature (1)..(1035): Ortholog of  Ceres SEQ ID NO 13594298 as cited in SEQ ID NO 57803
  misc_feature (1)..(1035): Ortholog of  Ceres SEQ ID NO 13503476 as cited in SEQ ID NO 61978
  misc_feature (1)..(1035): Ortholog of  Ceres SEQ ID NO 12578438 as cited in SEQ ID NO 62201
aatgtgattaagtaaagtgagggagaagcaacgagagatagagatagagagatcaagatgagaggatctgatcagaagattctactgatggttatggtggttgtagcagttgtagctgcggctcaaggccaagaagagactactggattcgtgacatggggtaacaattactaccagacatggggacatcaagctttggttattaataaaacctctgagctccagctcaccctcgataaaaactctgggtccgggtttgaatcccaattgatttacggatcaggatacttcaacgtaagaatcaaggcacctcaaactacgtctacgggagtcattacttccttctatttaatctcccgttcaagccgccatgatgagctctgtttccagatcttgggaaagaatgggccaccgtatttgctgaatacgaatatgtatctgtacggtgaaggaggcaaagatcagaggtttcgtctctggtttgatccaacaaaagattaccattcctacagttttctttggaaccctaatcaacttgtgttttatgttgacgatacaccgatcagggtgtacagcaagaatccagatgtttactacccatcggtgcagacaatgttcctaatgggaagtgtgcaaaacggatcgataattgacccgaagcagatgccttacattgctaagttccaggcatcaaagattgaagggtgtaagactgagttcatgggaatagataaatgcactgatcctaagttctggtggaatcgcaaacagctaagctctaaagagaagacactgtacctaaacgcaaggaagacgtacctggattatgactattgttctgacagacagcgatatccaaaggtgcctcaagaatgtggaagttacacttagagaaagatcaatacctgtcacagggttaagcctacaaaacaattatcttgaaaaaataacttatgttactgtaagatgctttatgataagccttttctatcaaataacaacattattgtcatcaatgctagatacattactatg

SEQ ID NO: 71922 - protein, 277 aa, Arabidopsis thaliana; identical to SEQ ID NO: 28169
  peptide (1)..(277): Ceres Seq. ID no. 4905611

SEQ ID NO: 71923 - protein, 267 aa, Arabidopsis thaliana; identical to SEQ ID NO: 28170
  peptide (1)..(267): Ceres Seq. ID no. 4905612

SEQ ID NO: 71924 - protein, 265 aa, Arabidopsis thaliana; identical to SEQ ID NO: 28171
  peptide (1)..(265): Ceres Seq. ID no. 4905613

SEQ ID NO: 71925 - DNA, 830 bp, Arabidopsis thaliana
  misc_feature (1)..(830): Ceres Seq. ID no. 4905806
  misc_feature (1)..(830): Ortholog of  Ceres SEQ ID NO 14315067 as cited in SEQ ID NO 57249
  misc_feature (1)..(830): Ortholog of  Ceres SEQ ID NO 15173278 as cited in SEQ ID NO 58144
aacacataacaacaacaaagaaccaaataaaagaaaaaaattctataagtaatctttattttgctaaagaaaacatagaaatctgtttgcaaagaagaagatatgggaaacagtttacggtgttgtttggcttgtgtacttccatgtggagctttagatttgatccgtatcgtacatctcaacggccacgtcgacgagatcactagtccaatgaccgccggcgagattcttcaggcgaatcctaaccatgtcttaagcaaaccttgttctcaaggagttgtgcgtaagatcttgatcttgtctcctgaatctgagcttaagcgtggaagcatctattttcttatcccggatacttctatgccggagaagaagaaaacaaagaagagaaaagagctccgatgccggaaaaagcctcttgaaagcggcaacgatattaatagtgatcatgtgagtactaataaggatcttgatggtcattgtttgacgttgtgtgagaaatatttggaagatgttatgttgtcggagaagatgagttcggccggtaaagagaatcgtcaccgtcggaaacatagccggtcggcgtcagtgtccacgtggcggcctcaccttgatagcatcactgaggatcttaattaaattagtacttcttctttttttcacaccttgttaattatgtctctattttcttaaattcttttttttttttttggatccggaatcggatttttatttaacatgcccggtgagaaaatttcaaatattttatttattatgaagttaaaaccaaaactatgtactgttctcatgtggataagatctatgttaaattg

SEQ ID NO: 71926 - protein, 177 aa, Arabidopsis thaliana; identical to SEQ ID NO: 26731
  peptide (1)..(177): Ceres Seq. ID no. 4905807

SEQ ID NO: 71927 - protein, 141 aa, Arabidopsis thaliana; identical to SEQ ID NO: 26732
  peptide (1)..(141): Ceres Seq. ID no. 4905808

SEQ ID NO: 71928 - protein, 92 aa, Arabidopsis thaliana; identical to SEQ ID NO: 26733
  peptide (1)..(92): Ceres Seq. ID no. 4905809

SEQ ID NO: 71929 - DNA, 1060 bp, Arabidopsis thaliana
  misc_feature (1)..(1060): Ceres Seq. ID no. 4905826
  misc_feature (1)..(1060): Ortholog of  Ceres SEQ ID NO 14311859 as cited in SEQ ID NO 51658
  misc_feature (1)..(1060): Ortholog of  Ceres SEQ ID NO 13638685 as cited in SEQ ID NO 51871
  misc_feature (1)..(1060): Ortholog of  Ceres SEQ ID NO 13599200 as cited in SEQ ID NO 0
atgatctgatctgatctcccaaaaagtcccaaatccaaatctacgaatctccgtctcctccgtcgcattttccgaggtagagagagagatcaaaccaaagagacacagagagagtatccaccgatggaatccgcagcaacggctgttgtacctccggcagccgccgccaccaccgccaccgccaccgatgataatctccaatcaagcgactcatcatctcccgccgacgccgttaaccgattgatccacgccttttcgcagcgacaacaacatcttctcgacaaaacggttcctcacgttctctatcgatggatcgcatgtctctgtgttgtattgatctacatcgttcgtgtttactttgtggaaggcttctacatcatcacttacgccatcggcatctaccttttgaatctcatcattgcttttctatctcctcaagaagatcccgaagcttctctcacttccggtggttctcttcctactcggagatccgatgagtatcgtcctttcgttcgccgtctccctgagttcaaattctggttatcgatcataagggctttcatcatcggatttatgatgacgttcttcgaggtgtttgatgtacctgtattctggccaatacttctcttctactgggtgatgttgtttttccttacgatgaggaaacagatacagcatatgatcaaatacagatatgtccctttctcttttgggaaaaagcagtatggaaagaaaccggctccaacagagagcagtgaatgatcaatcaaaactgttcaggtcagcaattttacagtcttttgagagaagtagcatttgaaaaggtcggtcttttgttctcttttgatggcctatatctttgttagggatgaagtagagatagacatattttgctcttttatcatcctgactattttactggtttcacctgaactcaatgtacaatcttatttttttacatccttttttcagtgagaaaataatgtttcatacttgacccttttgtaatcatcatggtggaaaactaaagactaatcagtaatcactgtccggttctatc

SEQ ID NO: 71930 - protein, 212 aa, Arabidopsis thaliana; identical to SEQ ID NO: 35807
  peptide (1)..(212): Ceres Seq. ID no. 4905827

SEQ ID NO: 71931 - DNA, 1652 bp, Arabidopsis thaliana
  misc_feature (1)..(1652): Ceres Seq. ID no. 4905980
  misc_feature (1)..(1652): Ortholog of  Ceres SEQ ID NO 12613725 as cited in SEQ ID NO 68196
attatagaatatctaataatgaagaatcggtttcaaaattaataatgactgattataattacattgacaacatgcagggactaataacaattacactcacagcatcgtttcctcaactccacccagcatcatgcaacagccaggacccactcagttgcggcggtccgaataagctccagatcggagttttgctattgggactctgtttcctctccgtagggagtggaggaatacgaccttgtagcatcccttttggggttgatcagtttgaccaacgaactgaggaaggggttaaaggagtggccagtttcttcaactggtattacatgactttcactgtggttctgatcattacacagaccgtagttgtgtatatccaggatcaagtcagttggattatcggttttagtatccctaccggactcatggctcttgcggttgttatgttttttgccggaatgaagcgttatgtctacgttaaaccagaaggaagtatattctctgggatcgctcaagttatcgtggcagctcgtaagaagcgaaagctgaaacttccggcggaagatgacggcactgtcacctattacgacccagccatcaagtctagcgtgttatccaagttacaccgcagtaaccaattcaggtgtcttgacaaagccgcggtggttatagaaggtgacctaacacccgagggacctcccgcagacaagtggcggttatgcagcgtccaagaagtggaagaagtgaagtgtttgatccgaattgttcctatctggtcggccggaataatctcactcgcggccatgacaacacaaggcactttcacggtctctcaagctttgaaaatggatcgaaacttaggtcctaaattcgagattccggctggttcactctccgtcatctctctcctcacaatcggcatctttcttcccttctacgaccgcgtttttgtaccattcatgcggcgaatcaccggccataaatccggaatcacactcctccaaaggataggaacagggatcgttttcgcgatcttttctatgatcgttgcgggcattgtggagcgtatgagacgcatacgctccatcaatgccggagatccaacgggaatgactccaatgtcggtgttttggctttcgccgcagctaattctcatgggactatgtgaagcattcaatatcatcggacaaattgagttcttcaacagtcagtttccagagcacatgagaagtatcgctaactctctcttctctttatcgttcgccggttcgagctaccttagtagtttccttgtgactgtcgttcataaattctccggtgggcatgatcgtccggattggctaaacaagaatctcaacgcgggaaaattggattacttctattatctgattgcggttttgggtgtggttaatctggtttacttttggtattgtgctcggggataccggtacaaggtcggtttaccgattgaagactttgaggaggacaagtcctccgatgatgttgagatgacttcgaagaaatcgatgaaatgatttaatagactatccttagggacaacaagaagattgtcgatgttgtttgaataattactatgacaatgtatgtatcataatatgtaagaactagaatatttaataaaattttacctt

SEQ ID NO: 71932 - protein, 510 aa, Arabidopsis thaliana
  peptide (1)..(510): Ceres Seq. ID no. 4905981
YRISNNEESVSKLIMTDYNYIDNMQGLITITLTASFPQLHPASCNSQDPLSCGGPNKLQIGVLLLGLCFLSVGSGGIRPCSIPFGVDQFDQRTEEGVKGVASFFNWYYMTFTVVLIITQTVVVYIQDQVSWIIGFSIPTGLMALAVVMFFAGMKRYVYVKPEGSIFSGIAQVIVAARKKRKLKLPAEDDGTVTYYDPAIKSSVLSKLHRSNQFRCLDKAAVVIEGDLTPEGPPADKWRLCSVQEVEEVKCLIRIVPIWSAGIISLAAMTTQGTFTVSQALKMDRNLGPKFEIPAGSLSVISLLTIGIFLPFYDRVFVPFMRRITGHKSGITLLQRIGTGIVFAIFSMIVAGIVERMRRIRSINAGDPTGMTPMSVFWLSPQLILMGLCEAFNIIGQIEFFNSQFPEHMRSIANSLFSLSFAGSSYLSSFLVTVVHKFSGGHDRPDWLNKNLNAGKLDYFYYLIAVLGVVNLVYFWYCARGYRYKVGLPIEDFEEDKSSDDVEMTSKKSMK

SEQ ID NO: 71933 - protein, 496 aa, Arabidopsis thaliana
  peptide (1)..(496): Ceres Seq. ID no. 4905982
MTDYNYIDNMQGLITITLTASFPQLHPASCNSQDPLSCGGPNKLQIGVLLLGLCFLSVGSGGIRPCSIPFGVDQFDQRTEEGVKGVASFFNWYYMTFTVVLIITQTVVVYIQDQVSWIIGFSIPTGLMALAVVMFFAGMKRYVYVKPEGSIFSGIAQVIVAARKKRKLKLPAEDDGTVTYYDPAIKSSVLSKLHRSNQFRCLDKAAVVIEGDLTPEGPPADKWRLCSVQEVEEVKCLIRIVPIWSAGIISLAAMTTQGTFTVSQALKMDRNLGPKFEIPAGSLSVISLLTIGIFLPFYDRVFVPFMRRITGHKSGITLLQRIGTGIVFAIFSMIVAGIVERMRRIRSINAGDPTGMTPMSVFWLSPQLILMGLCEAFNIIGQIEFFNSQFPEHMRSIANSLFSLSFAGSSYLSSFLVTVVHKFSGGHDRPDWLNKNLNAGKLDYFYYLIAVLGVVNLVYFWYCARGYRYKVGLPIEDFEEDKSSDDVEMTSKKSMK

SEQ ID NO: 71934 - protein, 487 aa, Arabidopsis thaliana
  peptide (1)..(487): Ceres Seq. ID no. 4905983
MQGLITITLTASFPQLHPASCNSQDPLSCGGPNKLQIGVLLLGLCFLSVGSGGIRPCSIPFGVDQFDQRTEEGVKGVASFFNWYYMTFTVVLIITQTVVVYIQDQVSWIIGFSIPTGLMALAVVMFFAGMKRYVYVKPEGSIFSGIAQVIVAARKKRKLKLPAEDDGTVTYYDPAIKSSVLSKLHRSNQFRCLDKAAVVIEGDLTPEGPPADKWRLCSVQEVEEVKCLIRIVPIWSAGIISLAAMTTQGTFTVSQALKMDRNLGPKFEIPAGSLSVISLLTIGIFLPFYDRVFVPFMRRITGHKSGITLLQRIGTGIVFAIFSMIVAGIVERMRRIRSINAGDPTGMTPMSVFWLSPQLILMGLCEAFNIIGQIEFFNSQFPEHMRSIANSLFSLSFAGSSYLSSFLVTVVHKFSGGHDRPDWLNKNLNAGKLDYFYYLIAVLGVVNLVYFWYCARGYRYKVGLPIEDFEEDKSSDDVEMTSKKSMK

SEQ ID NO: 71935 - DNA, 978 bp, Arabidopsis thaliana
  misc_feature (1)..(978): Ceres Seq. ID no. 4906235
  misc_feature (1)..(978): Ortholog of  Ceres SEQ ID NO 14306264 as cited in SEQ ID NO 1386
  misc_feature (1)..(978): Ortholog of  Ceres SEQ ID NO 15179159 as cited in SEQ ID NO 0
aaagaacaagaaaaaagggtgttgttacgatggcatcgagtgataaggttccggtggcgtgtccggcaagcagtggagatggaaaggagccaatgggaaatccgacgaaaaccactacggcgatgctagagaaaggaacggctatgatgcaatcgatgaaaccgatcaggcaaatgagcctccacgtgtgttcattcgcttgctatagccatgatcccggtcgtcagatcgaagttcatatttacggccaccgtgtaaaccaggatttcctccaatgtgctgtctacgattccaattcctctaaggctcatctcatagggatcgaatatatagtgtcggaaaagttattcgaaagtctctcaccggaggaacaaaagctttggcactcgcatgattacgaggttcatgattttcgatacattgtccgatatgtttattatttatctgaaaaacgaaaatgatcgaatgagagttgtttttagatccaaatggctcttctagtaactccaagggtccctgagctcgttgcgaaaccggagcttaaaaatcttgccaaatcttacgggaaattttggtgtacatggcagattgaccgaggggataaattaccactaggtgtaccatcactaatggtatcgccacaagacgtgaatctcgggagaatcaaaccggagttggtgaaaaagagagatgaagaacatggaatctcgactgaatcgttgaagccgtcaagagatgggatctgtggaccagagaagaagaacctggttgctgattattgggttaggtttaggaaaggctttgcgcttgatgttgttgaaacagatatgaagagaacagctcccttcccctaacttttgtgtgtgctttttttctcagacattaattatataagttttcgtaagcttacactagatgggttgtgtacttattatgttatggagtatgataatgtcataaacatgagaattttttcgc

SEQ ID NO: 71936 - protein, 143 aa, Arabidopsis thaliana; identical to SEQ ID NO: 29572
  peptide (1)..(143): Ceres Seq. ID no. 4906236

SEQ ID NO: 71937 - protein, 122 aa, Arabidopsis thaliana; identical to SEQ ID NO: 29573
  peptide (1)..(122): Ceres Seq. ID no. 4906237

SEQ ID NO: 71938 - protein, 152 aa, Arabidopsis thaliana; identical to SEQ ID NO: 29571
  peptide (1)..(152): Ceres Seq. ID no. 4906238

SEQ ID NO: 71939 - DNA, 751 bp, Arabidopsis thaliana
  misc_feature (1)..(751): Ceres Seq. ID no. 4906360
  misc_feature (1)..(751): Ortholog of  Ceres SEQ ID NO 12586195 as cited in SEQ ID NO 63768
  misc_feature (1)..(751): Ortholog of  Ceres SEQ ID NO 13599518 as cited in SEQ ID NO 0
agaactcagatttgaagcaaaacatcaatcggagaaggaagaaagaaaagatgggagctttagggaagctaatcgacgtagctctcttcgtatactttgtttcaatggcgataattgcgccgctcatcgacgggcaaacctcacttccttcaggaatatatccagcgtttctcaccgatctgaaaagcaagtacattgccgattttggagattacttgctcatggagaagccgcatttcctagttggactcgtttggcatgagcttctgttcttatggccgctctccattgctaacgtctacgccattcttgccggaaagtcgtggtttggtaccacctgcttgttgtatggagcttccctcgtcacttccatggctgcaatcctaggagatatgataggttcagggaaggcatctgatcgattgctaatgatgtatgtgcctttcatgggttttgggattctggctgttcttcgtggcttagtttatcgatccaccaaaaacactggatcttctggcaagagatccactatcatgcccagaagaaagctggcctgagattcaaaaaaaaaaaaaagcagttgatttttctctctggaagacttactcatcctttttctgtatatgcctagaaagaggtgtttatttttccttgtgaaaactttattgctttctgatttatgtggaattcttgtttgttgactcagcaacaatgaaatgtttacttggttgatataaaattcattcttgac

SEQ ID NO: 71940 - protein, 184 aa, Arabidopsis thaliana
  peptide (1)..(184): Ceres Seq. ID no. 4906361
NSDLKQNINRRRKKEKMGALGKLIDVALFVYFVSMAIIAPLIDGQTSLPSGIYPAFLTDLKSKYIADFGDYLLMEKPHFLVGLVWHELLFLWPLSIANVYAILAGKSWFGTTCLLYGASLVTSMAAILGDMIGSGKASDRLLMMYVPFMGFGILAVLRGLVYRSTKNTGSSGKRSTIMPRRKLA

SEQ ID NO: 71941 - protein, 168 aa, Arabidopsis thaliana; identical to SEQ ID NO: 21380
  peptide (1)..(168): Ceres Seq. ID no. 4906362

SEQ ID NO: 71942 - protein, 150 aa, Arabidopsis thaliana; identical to SEQ ID NO: 21381
  peptide (1)..(150): Ceres Seq. ID no. 4906363

SEQ ID NO: 71943 - DNA, 752 bp, Arabidopsis thaliana
  misc_feature (1)..(752): Ceres Seq. ID no. 4906628
  misc_feature (1)..(752): Ortholog of  Ceres SEQ ID NO 15173624 as cited in SEQ ID NO 60470
attaattttgacatgcgtgatgatctttcaaaataaaaaggaaacggaggatttggctagggacgttcgagaccgcagaggaggcagcaagagcatacgacgaggccgccgttttaatgagcggccgcaacgccaaaaccaactttcccctcaacaacaacaacaccggagaaacttccgagggcaaaaccgatatttcagcttcgtccacaatgtcatcctcaacatcatcttcatcgctctcttccatcctcagcgccaaactgaggaaatgctgcaagtctccttccccatccctcacctgcctccgtcttgacacagccagctcccatatcggcgtctggcagaaacgggccggttcaaagtctgactccagctgggtcatgacggtggagctaggtcccgcaagctcctcccaagagactactagtaaagcttcacaagacgctattcttgctccgaccactgaagttgaaattggtggcagcagagaagaagtattggatgaggaagaaaaggttgctttgcaaatgatagaggagcttctcaatacaaactaaatcttatttgcttatatatatgtacctattttcattgctgatttacagccaaaataatcaattataccgtgtattttatagatgttttatattaaaaggttgttagctatatattgtttctctttttccacatttgtatctaataaagtattggtgtttgtaactaaaatccagaagtgacctttttctttc

SEQ ID NO: 71944 - protein, 147 aa, Arabidopsis thaliana; identical to SEQ ID NO: 30301
  peptide (1)..(147): Ceres Seq. ID no. 4906629

SEQ ID NO: 71945 - protein, 115 aa, Arabidopsis thaliana; identical to SEQ ID NO: 30302
  peptide (1)..(115): Ceres Seq. ID no. 4906630

SEQ ID NO: 71946 - protein, 104 aa, Arabidopsis thaliana
  peptide (1)..(104): Ceres Seq. ID no. 4906631
LILTCVMIFQNKKETEDLARDVRDRRGGSKSIRRGRRFNERPQRQNQLSPQQQQHRRNFRGQNRYFSFVHNVILNIIFIALFHPQRQTEEMLQVSFPIPHLPPS

SEQ ID NO: 71947 - DNA, 587 bp, Arabidopsis thaliana
  misc_feature (1)..(587): Ceres Seq. ID no. 4906669
  misc_feature (1)..(587): Ortholog of  Ceres SEQ ID NO 13581902 as cited in SEQ ID NO 52223
  misc_feature (1)..(587): Ortholog of  Ceres SEQ ID NO 12585528 as cited in SEQ ID NO 62991
atccagatctcaactttctctcatcttcaaattaaaatcaaacagtttcttaataacattttacttcatggctcgtaccaagcagacggctaggaaatcaaccggaggaaaggctccaaggaagcagctggcgacaaaagcggcgaggaaatctgctccggccaccggaggagtgaagaagccacacagattcagacccggaactgttgctttaagagaaatcaggaagtaccagaagagcactgagcttcttatccgtaaactccctttccagaggcttgtcagagagatcgctcaggacttcaaaaccgatcttcgtttccagagcagtgccgtcgccgctcttcaggaagctgctgaagcttacctcgtcggactcttcgaagacaccaatctctgcgccattcacgccaagagggtcacgatcatgcccaaggacatccagctcgcgagaagaatcagaggagaacgagcttagatctaagtattctggttactcttgtgttttgattagaaccataagattgtaaaatttcaagttaaatccaagggttataatattaattccaagcaattatcttttgttc

SEQ ID NO: 71948 - protein, 158 aa, Arabidopsis thaliana
  peptide (1)..(158): Ceres Seq. ID no. 4906670
SRSQLSLIFKLKSNSFLITFYFMARTKQTARKSTGGKAPRKQLATKAARKSAPATGGVKKPHRFRPGTVALREIRKYQKSTELLIRKLPFQRLVREIAQDFKTDLRFQSSAVAALQEAAEAYLVGLFEDTNLCAIHAKRVTIMPKDIQLARRIRGERA

SEQ ID NO: 71949 - protein, 136 aa, Arabidopsis thaliana; identical to SEQ ID NO: 8709
  peptide (1)..(136): Ceres Seq. ID no. 4906671

SEQ ID NO: 71950 - DNA, 940 bp, Arabidopsis thaliana
  misc_feature (1)..(940): Ceres Seq. ID no. 4907228
  misc_feature (1)..(940): Ortholog of  Ceres SEQ ID NO 13594037 as cited in SEQ ID NO 55666
  misc_feature (1)..(940): Ortholog of  Ceres SEQ ID NO 13657707 as cited in SEQ ID NO 66407
atagaatataaaagttgctaaatttgattaaagatatggacaaagttccaagattttttgtttcttaatcttaaaatgttttatgttattacttggttttggttttggtaggagttctcggtgatggatttatggctcgtgatttaactatagagaacacggcaggagcagatgcgcaccaagcggttgcgtttagatcagacagtgatttttcggtacttgaaaactgcgagtttcttgggaaccaagacactctttatgctcactctctccgtcagttctacaaacaatgtcgaatccaaggcaacgtagacttcatctttggtaactcagctgccgtattccaagattgtgatatcctaatcgcttcaaaacactccaaactcgagcaaggcggtgcaaacaacgcgatcacagcacacgggaggattgatgcgtcgcagtccacgggatttgtgtttttgaactgttcgattaacggaacagaggaatacatgaaggagtttcaagctaaccctgaagggcataagaacttcttgggaagaccgtggaaggagttttcgaggacggtttttgtaaactgtaatcttgagtctttgattagtcctgatggatggatgccttggaacggggatttcgcattgaagactttgtattacggtgagtataagaatacgggtccgggatcggttagatcgagtagggttccatggagtagtgagataccagagaagcatgttgatgtttactctgttgccaattttattcaggctgatgagtgggcttccacgactgcttgatttttgtaaaggaaacatgaggttttaggattttgaaaagaagagaagagaagtcgtcattgtaactttattgtagtgtcaaatattagtgtggtttctttatcgctcattggggattcataatagattaataattgaag

SEQ ID NO: 71951 - protein, 222 aa, Arabidopsis thaliana
  peptide (1)..(222): Ceres Seq. ID no. 4907229
MARDLTIENTAGADAHQAVAFRSDSDFSVLENCEFLGNQDTLYAHSLRQFYKQCRIQGNVDFIFGNSAAVFQDCDILIASKHSKLEQGGANNAITAHGRIDASQSTGFVFLNCSINGTEEYMKEFQANPEGHKNFLGRPWKEFSRTVFVNCNLESLISPDGWMPWNGDFALKTLYYGEYKNTGPGSVRSSRVPWSSEIPEKHVDVYSVANFIQADEWASTTA

SEQ ID NO: 71952 - DNA, 751 bp, Arabidopsis thaliana
  misc_feature (1)..(751): Ceres Seq. ID no. 4907328
  misc_feature (1)..(751): Ortholog of  Ceres SEQ ID NO 12584790 as cited in SEQ ID NO 62648
aaaacaaccccttgagatttccgaagatcatcaaatccaaaaccctagaaaccgaacaaaagctagcagaagctaggactattcaatggcgtcgaaaagaattaacaaagagcttagggacttgcaaagagatcctcctgtgtcctgcagtgcaggtcctacgggagatgatatgttccaatggcaagcaactatcatgggtccagcagatagcccgtttgccggaggtgtgtttcttgttaccattcacttcccaccagattaccctttcaagccaccaaaggttgccttccggaccaaggtttatcacccaaacatcaacagtaatggaagtatctgtcttgacattctgaaagagcagtggagccctgcacttaccgtatccaaggttcttctgtcgatatgctcattgctgacggatccaaaccctgacgatcctttggttcctgaaatagcgcacatctacaagacagaccgagtcaagtacgagtccacagctcaatcctggactcagaagtatgcaatgggatgataacaagcaataatacccaccaccagtacattgcgtattaaacaggagaaataagaaagaaagaaaaaaactcagtttggcttttactttggctacttttgcttattagttttttttttttaattatatcttgaagctgtgtgttgggtgtgtacatgagctttatgccttatttgaaacattgagatcttgcaaatgcttttaagccaataatccgct

SEQ ID NO: 71953 - protein, 148 aa, Arabidopsis thaliana; identical to SEQ ID NO: 28390
  peptide (1)..(148): Ceres Seq. ID no. 4907329

SEQ ID NO: 71954 - protein, 119 aa, Arabidopsis thaliana; identical to SEQ ID NO: 28391
  peptide (1)..(119): Ceres Seq. ID no. 4907330

SEQ ID NO: 71955 - protein, 116 aa, Arabidopsis thaliana; identical to SEQ ID NO: 28392
  peptide (1)..(116): Ceres Seq. ID no. 4907331

SEQ ID NO: 71956 - DNA, 1706 bp, Arabidopsis thaliana
  misc_feature (1)..(1706): Ceres Seq. ID no. 4907601
  misc_feature (1)..(1706): Ortholog of  Ceres SEQ ID NO 13658707 as cited in SEQ ID NO 66286
  misc_feature (1)..(1706): Ortholog of  Ceres SEQ ID NO 13654528 as cited in SEQ ID NO 68080
aaaaaaggcttctctgtgttgttctctgtggtcattcttctttcttttcacttcttcttcttcttcgctcttcttctcactgtcgggttccatttggcgcgaaaagttcttcactttttccagcttttttttgttctctgacagtttttttttttgtttggttacaaataaagatgccagtaagtgtggcactagttttgctgttgacattgagcagtgtgattctgattaatgggagaagttacggcgtcggaaacatatgcgatcgtggtcggagaccgagcgagagaccacacagtgtcaaaatcactgattttggtgctgtgggagatgggaaaacgttgaacacacttgcgtttcaaaatgctgtcttttatctaaagtctttcgctgataaaggtggtgctcagctttatgttcctccgggacggtggctcaccggaagtttcaacctcaccagtcatctcactctctttctcgagaaagacgccgtcatacttgcctcacaggatccatcgcattggcaagtcacggatgccttaccgtcatatgggcggggtattgatctaccagggaagagatacatgagtttgataaacggtgacatgctacatgatgtagtagtaacaggtgataacggtaccatagatgggcaaggccttgtttggtgggatcggtttaattctcattctttagagtacagtcgccctcaccttgtcgagtttgtctctgccgaaaatgtcattgtatcaaatcttacattcttgaacgctccggcttatactatccattcagtttattgtcgcaatttatacattcatagagtaacggctaatacttgtccagaatctccttataccatcggtattgtcccagattcttctgaaaatgtgtgtatccaagaatctagtatcaacatggggtatgatgccatttctcttaaaagtggttgtgatgaatacggtttatcgtatgcaagacctactgctaatgtccagataagaaatgtttaccttagagcagcttctggttcctccatttcctttggtagtgaaatgtctggtggtatatctgatgttgaggtcagtgatgctcacatacacaactcgttatccgggattgcctttagaacaacaaatggaagaggtggttatattaaggagattgatatttccaacatccatatggttaatgttggtactgcatttctagccaacggtagcttcggtactcatccggattctggtttcgatgaaaatgcttacccgcttgtgagtcacatcaggttacatgacattgttggagaaaacataagcactgctggatatttctttggaacgaaagagtctcctttcacttcgattttgttatcgaatatctctctgtcgattaaaaactcggcttcccctgctgattcttggcaatgctcatatgttgacgggtcttcggaattcgtagtccctgaaccgtgccttgagctgaagagttttgatagttactatggtagagctgaggccttatgaaaccaaacttcattaggaatgatgattcatatttgtttaagagagagcaaatggttctgattcttttcttttccccaaaaataaaccacagtgtgtagaattattacctgttccttgttggtgttgttgtccctgttatttgcagcttgtgagattaatatatcttgtacaggttcatttctt

SEQ ID NO: 71957 - protein, 506 aa, Arabidopsis thaliana
  peptide (1)..(506): Ceres Seq. ID no. 4907602
KRLLCVVLCGHSSFFSLLLLLRSSSHCRVPFGAKSSSLFPAFFCSLTVFFFVWLQIKMPVSVALVLLLTLSSVILINGRSYGVGNICDRGRRPSERPHSVKITDFGAVGDGKTLNTLAFQNAVFYLKSFADKGGAQLYVPPGRWLTGSFNLTSHLTLFLEKDAVILASQDPSHWQVTDALPSYGRGIDLPGKRYMSLINGDMLHDVVVTGDNGTIDGQGLVWWDRFNSHSLEYSRPHLVEFVSAENVIVSNLTFLNAPAYTIHSVYCRNLYIHRVTANTCPESPYTIGIVPDSSENVCIQESSINMGYDAISLKSGCDEYGLSYARPTANVQIRNVYLRAASGSSISFGSEMSGGISDVEVSDAHIHNSLSGIAFRTTNGRGGYIKEIDISNIHMVNVGTAFLANGSFGTHPDSGFDENAYPLVSHIRLHDIVGENISTAGYFFGTKESPFTSILLSNISLSIKNSASPADSWQCSYVDGSSEFVVPEPCLELKSFDSYYGRAEAL

SEQ ID NO: 71958 - protein, 449 aa, Arabidopsis thaliana; identical to SEQ ID NO: 39155
  peptide (1)..(449): Ceres Seq. ID no. 4907603

SEQ ID NO: 71959 - protein, 312 aa, Arabidopsis thaliana; identical to SEQ ID NO: 39156
  peptide (1)..(312): Ceres Seq. ID no. 4907604

SEQ ID NO: 71960 - DNA, 725 bp, Arabidopsis thaliana
  misc_feature (1)..(725): Ceres Seq. ID no. 4907605
  misc_feature (1)..(725): Ortholog of  Ceres SEQ ID NO 14306309 as cited in SEQ ID NO 1394
  misc_feature (1)..(725): Ortholog of  Ceres SEQ ID NO 13595377 as cited in SEQ ID NO 56088
  misc_feature (1)..(725): Ortholog of  Ceres SEQ ID NO 13598648 as cited in SEQ ID NO 64497
  misc_feature (1)..(725): Ortholog of  Ceres SEQ ID NO 13660598 as cited in SEQ ID NO 67591
acactactctaaccgttttttttcttctctcaaatctcaaaatctcaatttcttcaacaatgtcatcgaagaacggagttgttcgtagctgtttaggatcaatggacgacatcaaaaaagtcttccaacgattcgacaaaaacggcgacgggaaaatctccgtcgacgagctcaaagaagtgatccgcgctctctcaccaacagcatcaccagaagaaacagtaacgatgatgaaacaattcgatctagacggtaacggattcatagatctggacgaattcgtcgcgcttttccaaatcggaatcggaggaggaggtaacaatcgaaacgacgtaagcgatttgaaagaagcgtttgagttatatgatttggatggtaatggaaggatctcggcgaaagagcttcattcagtgatgaagaatttgggtgagaagtgctctgtgcaagattgtaagaagatgattagtaaagttgatattgatggtgatggttgtgttaattttgatgagtttaagaagatgatgagtaatggtggtggtgcttgaggatttggaagatttcgccggagattagattagtcgacggtgatgattcgtattagcagattaattttagtgacggcgattaaaaaccctagaagtatgtggtgattgatgaatattgattttaacggttgtttctatatcttctgctctttttataattaatatgctttgttgagtgtt

SEQ ID NO: 71961 - protein, 180 aa, Arabidopsis thaliana
  peptide (1)..(180): Ceres Seq. ID no. 4907606
TTLTVFFLLSNLKISISSTMSSKNGVVRSCLGSMDDIKKVFQRFDKNGDGKISVDELKEVIRALSPTASPEETVTMMKQFDLDGNGFIDLDEFVALFQIGIGGGGNNRNDVSDLKEAFELYDLDGNGRISAKELHSVMKNLGEKCSVQDCKKMISKVDIDGDGCVNFDEFKKMMSNGGGA

SEQ ID NO: 71962 - protein, 161 aa, Arabidopsis thaliana; identical to SEQ ID NO: 35900
  peptide (1)..(161): Ceres Seq. ID no. 4907607

SEQ ID NO: 71963 - protein, 147 aa, Arabidopsis thaliana; identical to SEQ ID NO: 35901
  peptide (1)..(147): Ceres Seq. ID no. 4907608

SEQ ID NO: 71964 - DNA, 1594 bp, Arabidopsis thaliana
  misc_feature (1)..(1594): Ceres Seq. ID no. 4907633
  misc_feature (1)..(1594): Ortholog of  Ceres SEQ ID NO 13657677 as cited in SEQ ID NO 66119
aaattctcgattttttttttcttctaattctggagttttcttttccatatgtggcaaaatccgtgatcctcacgtttcaaaattacctaaaacccctaacaattctacaattcttcttctatgtcgattctatttagtaatctcgaagaatggttcgtggattgatgaaattcccaggaatctcaacgaagttattaaacataagcgttaattctctctgcaaatttcgaaacttggagagagcagaaacattactcatagacggaatcagattaggtgttcttcctgatgtgatcacttacaacactctaatcaaagggtacactcgtttcattggaatcgacgaagcttatgctgtaacacgtcgtatgagagaagctgggatcgaaccagatgttactacttacaattcattgatctcaggagctgctaaaaacttgatgttgaatcgtgtactccaactgttcgacgaaatgcttcactcaggtttgtctcctgatatgtggagttataatactttaatgtcttgttacttcaaattagggagacatggagaagcgtttaagattcttcatgaggatattcatttagctgggttggttcctgggattgatacttataacattctgcttgatgcgctttgtaaaagcggtcatacggataatgcgattgagttgtttaagcatctgaagagtcgggttaaacccgagcttatgacgtataatattctcatcaatggtctttgtaaatcgagaagggttggttctgtggattggatgatgagagagcttaagaaatcgggctatactccgaatgcggttacgtatacaacgatgcttaaaatgtattttaagactaagaggattgagaaaggtcttcagttgtttttgaagatgaagaaagaagggtatacgtttgacgggtttgcgaattgtgcggttgttagtgcgttgattaaaaccggaagagcagaggaggcgtatgagtgtatgcacgagcttgtgagaagtggtacaaggagtcaagacattgtttcgtacaatacattgttgaatttgtattttaaagatgggaacttggatgcagtagatgatctattggaggagattgagatgaaggggttgaaacctgatgactatactcatacgattatagtcaatggtttgttaaatataggcaatacgggaggagccgagaagcatttggcatgtatcggagagatggggatgcagccgagtgttgtcacttgtaactgtttgattgatgggttgtgcaaagcaggtcatgtagatcgtgcaatgaggttgtttgcgtcaatggaagttagagatgagttcacttacacttctgttgtgcataatctatgcaaagacggacggcttgtttgtgcttcgaagctgctcttgtcgtgttacaataaaggaatgaagattccgtcatcggctagacgagcagtgttgtccggcatacgggagacggtatcttaccaagcagcaaggaagacacatatcaaaatcaaagcagctattgagtgtaatacactaatgtacccttaagacattgaaaagtatctaatagaaaaattattgaattg

SEQ ID NO: 71965 - protein, 468 aa, Arabidopsis thaliana; identical to SEQ ID NO: 40016
  peptide (1)..(468): Ceres Seq. ID no. 4907634

SEQ ID NO: 71966 - protein, 463 aa, Arabidopsis thaliana; identical to SEQ ID NO: 40017
  peptide (1)..(463): Ceres Seq. ID no. 4907635

SEQ ID NO: 71967 - protein, 395 aa, Arabidopsis thaliana; identical to SEQ ID NO: 40018
  peptide (1)..(395): Ceres Seq. ID no. 4907636

SEQ ID NO: 71968 - DNA, 801 bp, Arabidopsis thaliana
  misc_feature (1)..(801): Ceres Seq. ID no. 4907656
  misc_feature (1)..(801): Ortholog of  Ceres SEQ ID NO 13656871 as cited in SEQ ID NO 65884
aggctccaatgtcgctggacttagctcgttgatcatcgtacaaaaagcttgctcgtagctatcagctccccggagaagaagatggtgcggaaacagtttcaacaggctaaaactggaatagaggcattgaagtcaatggatgctaacaactacttgaagaaggttggattagggcgtgacgatatgttcttttggaaacaagtgggaaaagcattgctatgcacttacacaatctttggtatggcttggatttacaatgaaacgtctcctttaggttggtggacgctgaagccaagaccaaaggaagagagagaattggctcatttgtatgagcggcgtgagtttccttatcctggtgatacagaggctatggaggattttgttgcaaaggggggaatgattggtactgcaattggaccgaaaggaattgttgagtccgaaggtgaggctgataattaccagaaggaaatggagaagaagaagtttgataaagaggctcagaaactgtggttgagaatgaggaatgaggttattactgaacttcaagagaaagggcataatcttgaataaggaagtgcaatagggttttgataaataaaaaagctgtgtgtaatttagggtgtgtatcagttagactaaggattcaaccactcgtacaagtgtttctgtctacgtatagctgaaagtactatactggttgatgttcttgctcttggggaagtagctcttgtcctttattggtggcttgattcatgttttggcttaaaccctttggaatataacttgatgctttttgccccc

SEQ ID NO: 71969 - protein, 162 aa, Arabidopsis thaliana; identical to SEQ ID NO: 26580
  peptide (1)..(162): Ceres Seq. ID no. 4907657

SEQ ID NO: 71970 - protein, 144 aa, Arabidopsis thaliana; identical to SEQ ID NO: 26581
  peptide (1)..(144): Ceres Seq. ID no. 4907658

SEQ ID NO: 71971 - protein, 128 aa, Arabidopsis thaliana; identical to SEQ ID NO: 26582
  peptide (1)..(128): Ceres Seq. ID no. 4907659

SEQ ID NO: 71972 - DNA, 1387 bp, Arabidopsis thaliana
  misc_feature (1)..(1387): Ceres Seq. ID no. 4908231
  misc_feature (1)..(1387): Ortholog of  Ceres SEQ ID NO 13595861 as cited in SEQ ID NO 58153
  misc_feature (1)..(1387): Ortholog of  Ceres SEQ ID NO 13584292 as cited in SEQ ID NO 63687
tcgttagctctctcaatgaggagcccgatttagggtttcctccattggttatatcaattcgatcatctccacaaagctctcgaagactctttcggtgatctcatcttcttcttcttgtttagcctcctggaggttactttgtttgttactagttccaaaacatgccgaaagagaggaaagaacggtccgtatctcttgataagtataaacgatcgccactgtgttgtgaggcaagccttgctttgaagccgagtgagaaacaagttaaggaatgggaagaggctcgttgtcctgtttgtatggaacatcctcacaatgggattcttctcatttgttcttcttatgaaaatggttgtcgaccttacatgtgcgacactagccatcggcattctaactgtttcgatcagttccgcaaagcttctaaagagaaaccttctttgtctttacttcgtgaggaagaggaaagtaatgaaccaactgagatggaagatgtggattcagactcaactgctgtaaatctattaggagaagctgcatctgagataacagttgtggatttaagtgatggtgagagaggagaagaagaagtagaagaagatcaagaaaaaaacaaaccacaaaagcttacttgtccgttatgtcgtggacatataaaagaatgggtagttgttaaagcagctcgatgtttcatgaactcaaaacatagaagctgttcttgtgagacttgtgatttcagtggaagctattccgatctgagaaagcacgcaaggcttctacatccaggagttaggccatcagaagcagatccagagagacagagaagctggaggaggctagaaaggcagagcgatttaggggatttacttagcacactccaatcttcttttggaggagatgaaataagtaacgatgatgggtttctatttgctgatactcgcttgcttacagtgtactttctcatccgcgtgtttagaccagaatcgagtggctcaaggagtagtagctggtctggtacatctagagctaggacacatacaagtgggagaagaagatcttcaagacctgcaagtctttggggagagagctatgaaggtaatacaggaacatcacctagagatgaggagaataatcaatcttctgatgaacaagtgtctggaactcggagacgtcgttctagaagaagaactgtcattgatgatgatgatgaagaagaagaaccgtgatgctctgcagtttggaaatttggtctttggagtttatgataaaatgggggaaaccttgtagtaataaccccacttatgaaaccctattatgtaaaatttctttggagattgaaaaaagtttctactattgggaaacaaaatgttcaatatttcattaccgttta

SEQ ID NO: 71973 - protein, 353 aa, Arabidopsis thaliana
  peptide (1)..(353): Ceres Seq. ID no. 4908232
MPKERKERSVSLDKYKRSPLCCEASLALKPSEKQVKEWEEARCPVCMEHPHNGILLICSSYENGCRPYMCDTSHRHSNCFDQFRKASKEKPSLSLLREEEESNEPTEMEDVDSDSTAVNLLGEAASEITVVDLSDGERGEEEVEEDQEKNKPQKLTCPLCRGHIKEWVVVKAARCFMNSKHRSCSCETCDFSGSYSDLRKHARLLHPGVRPSEADPERQRSWRRLERQSDLGDLLSTLQSSFGGDEISNDDGFLFADTRLLTVYFLIRVFRPESSGSRSSSWSGTSRARTHTSGRRRSSRPASLWGESYEGNTGTSPRDEENNQSSDEQVSGTRRRRSRRRTVIDDDDEEEEP

SEQ ID NO: 71974 - protein, 307 aa, Arabidopsis thaliana
  peptide (1)..(307): Ceres Seq. ID no. 4908233
MEHPHNGILLICSSYENGCRPYMCDTSHRHSNCFDQFRKASKEKPSLSLLREEEESNEPTEMEDVDSDSTAVNLLGEAASEITVVDLSDGERGEEEVEEDQEKNKPQKLTCPLCRGHIKEWVVVKAARCFMNSKHRSCSCETCDFSGSYSDLRKHARLLHPGVRPSEADPERQRSWRRLERQSDLGDLLSTLQSSFGGDEISNDDGFLFADTRLLTVYFLIRVFRPESSGSRSSSWSGTSRARTHTSGRRRSSRPASLWGESYEGNTGTSPRDEENNQSSDEQVSGTRRRRSRRRTVIDDDDEEEEP

SEQ ID NO: 71975 - protein, 285 aa, Arabidopsis thaliana
  peptide (1)..(285): Ceres Seq. ID no. 4908234
MCDTSHRHSNCFDQFRKASKEKPSLSLLREEEESNEPTEMEDVDSDSTAVNLLGEAASEITVVDLSDGERGEEEVEEDQEKNKPQKLTCPLCRGHIKEWVVVKAARCFMNSKHRSCSCETCDFSGSYSDLRKHARLLHPGVRPSEADPERQRSWRRLERQSDLGDLLSTLQSSFGGDEISNDDGFLFADTRLLTVYFLIRVFRPESSGSRSSSWSGTSRARTHTSGRRRSSRPASLWGESYEGNTGTSPRDEENNQSSDEQVSGTRRRRSRRRTVIDDDDEEEEP

SEQ ID NO: 71976 - DNA, 1763 bp, Arabidopsis thaliana
  misc_feature (1)..(1763): Ceres Seq. ID no. 4908352
  misc_feature (1)..(1763): Ortholog of  Ceres SEQ ID NO 13594209 as cited in SEQ ID NO 59089
  misc_feature (1)..(1763): Ortholog of  Ceres SEQ ID NO 13502874 as cited in SEQ ID NO 66298
  misc_feature (1)..(1763): Ortholog of  Ceres SEQ ID NO 12614124 as cited in SEQ ID NO 68392
atttttcacttctatcgataaccaaacgaaaaaaaacatggccatctctttcctctgtttttgcctcattaccctcgcttcgttaatctttttcgccaagaagattaaacacttgaaatggaatcttcctccaagccctccaaagtttccggtcatcggaaatttacaccagattggagaattgcctcacaggtcacttcaacatctcgccgaaagatacggacctgtgatgcttcttcactttgggtttgtccctgtaactgtggtctcatcaagagaagcagctgaagaagtgctcagaactcatgacctagactgttgcagcaggcctaaacttgtcgggacaaggttactctcgcggaattttaaagatgtctgttttacgccatacggtaacgagtggaaggcgcggcgtaagtttgccctgcgtgagcttttctgtttgaaaaaggttcagtcctttaggcatatccgagaggaagaatgtaactttctggtcaagcaactgtcggaatccgcggttaatcgctctccggtcgatttgagcaaatcacttttctggctaaccgctagtatctttttcagagttgccttaggacagaattttcatgagagcaattttatcgataaagaaaagatcgaagagctcgtgttcgaagctgagactgccctagcaagtttcacttgttctgatttcttccctgttgccggacttggatggcttgttgattggttttccggacaacacaagagactcaacgatgttttttacaagctcgatgctctgtttcaacatgtcatagatgatcatttaaatccaggaagatcaaaagagcacgaagacatcatcgattcaatgttggatgcgattcataaagaaggaaaagatagttccttagagctcataatagatcatattaaggggtttctcgcggtaatcaagagttatttaaacacattaaaattgtaattggatcgaaatctttaacttacttttcttgtgggttgttagaatatatttcttgcagggatagacacaggggccctcaccatgatatgggcaatgacggagctcgttaaaaacccgaaacttataaagaaagttcaaggcgagatccgagaacaacttggcagcaataaggcgagaatcaccgaggaagatatcgataaagttccttacttgaagatggtaatcaaagaaacattcaggttacacccggcagctcctcttatacttccaagagaaacaatggctcacatcaaagttcaagggtatgatattcctcccaagaggcggatcttggtcaatgtttcggctatcggaagagatcccaaactctggacaaacccggaagagtttgaccctgagaggtttatggatagctctgttgattataggggacaacattacgagctcttaccatttgggtccggtcgaaggatatgtcccgggatgccaatggggattgctgccgtcgaattgggactcttgaacttactttacttcttcgattggaagttgcctgatgggatgacacataaagatattgatactgaagaagctggtactcttacaatcgtcaagaaagtacctctccagctcgttccagttcgagttcagtgatcagaccaaactccaaacggtttggaccaaaccttttgaataaatatatcatgcaaatcatgtaagcttctctgatgatgtatgaagtatatttttcagtaaaatactaaattgaacgttcatttgcgtttgaggaatg

SEQ ID NO: 71977 - protein, 322 aa, Arabidopsis thaliana
  peptide (1)..(322): Ceres Seq. ID no. 4908353
FFTSIDNQTKKNMAISFLCFCLITLASLIFFAKKIKHLKWNLPPSPPKFPVIGNLHQIGELPHRSLQHLAERYGPVMLLHFGFVPVTVVSSREAAEEVLRTHDLDCCSRPKLVGTRLLSRNFKDVCFTPYGNEWKARRKFALRELFCLKKVQSFRHIREEECNFLVKQLSESAVNRSPVDLSKSLFWLTASIFFRVALGQNFHESNFIDKEKIEELVFEAETALASFTCSDFFPVAGLGWLVDWFSGQHKRLNDVFYKLDALFQHVIDDHLNPGRSKEHEDIIDSMLDAIHKEGKDSSLELIIDHIKGFLAVIKSYLNTLKL

SEQ ID NO: 71978 - protein, 310 aa, Arabidopsis thaliana
  peptide (1)..(310): Ceres Seq. ID no. 4908354
MAISFLCFCLITLASLIFFAKKIKHLKWNLPPSPPKFPVIGNLHQIGELPHRSLQHLAERYGPVMLLHFGFVPVTVVSSREAAEEVLRTHDLDCCSRPKLVGTRLLSRNFKDVCFTPYGNEWKARRKFALRELFCLKKVQSFRHIREEECNFLVKQLSESAVNRSPVDLSKSLFWLTASIFFRVALGQNFHESNFIDKEKIEELVFEAETALASFTCSDFFPVAGLGWLVDWFSGQHKRLNDVFYKLDALFQHVIDDHLNPGRSKEHEDIIDSMLDAIHKEGKDSSLELIIDHIKGFLAVIKSYLNTLKL

SEQ ID NO: 71979 - protein, 246 aa, Arabidopsis thaliana
  peptide (1)..(246): Ceres Seq. ID no. 4908355
MLLHFGFVPVTVVSSREAAEEVLRTHDLDCCSRPKLVGTRLLSRNFKDVCFTPYGNEWKARRKFALRELFCLKKVQSFRHIREEECNFLVKQLSESAVNRSPVDLSKSLFWLTASIFFRVALGQNFHESNFIDKEKIEELVFEAETALASFTCSDFFPVAGLGWLVDWFSGQHKRLNDVFYKLDALFQHVIDDHLNPGRSKEHEDIIDSMLDAIHKEGKDSSLELIIDHIKGFLAVIKSYLNTLKL

SEQ ID NO: 71980 - DNA, 1044 bp, Arabidopsis thaliana
  misc_feature (1)..(1044): Ceres Seq. ID no. 4908555
  misc_feature (1)..(1044): Ortholog of  Ceres SEQ ID NO 14307654 as cited in SEQ ID NO 54606
  misc_feature (1)..(1044): Ortholog of  Ceres SEQ ID NO 15168370 as cited in SEQ ID NO 55687
  misc_feature (1)..(1044): Ortholog of  Ceres SEQ ID NO 12620302 as cited in SEQ ID NO 65999
ctccgatttagatagaaacaacaatcctccggtggtcactcgctaatctccgtttgatctcgccgacactcgagccttttaccgatgaaggatggagattccttaccaataagcacttcttccgtcgcggcgacgacggtgaccggaaagaaggaaaccggttattccgctctcttctcgaaaggccggtacaagttttgggccttagctgcgattctgttactcgctttctggtcaatgctcactggcacggtcaatctccgttggtctgccggtaacattaaccatttcaccgacgatctcgtctttcccatccacgaggatctcgatgttcttgtgagtcttcttcttcttcttcgcgatctgttttctgatttctgtgaattacgtttgatttgtgttgtgttgatgaggttattaggaaatggaggagagggagaaagtggtgaagcacatgtgggatgtgtataacaatggccgtcgtatcagattacctaggttttggcaagaggccttcgaggctgcttacgaggagcttaccagtgatgtacctgatgtggttgaggctgccatttccgagatcgctaggatgtctattcgctccattgttatagatccgcctccgcttcattccacgaatgtacgagaattgacaaagactctaaaacttgcggacaaaggaagagcaactcaaatatcaaaaccaagcagccgtcgattgaaatagctatggaggctttacgaaaaaggtagtgtagcagtcagccgtcgtggcgtgaccatacatatacttgatgtcagaaagatcaatcaacctcatccctagaatatatgtccatcattagtgttattttttcttccactaggggcattaatcctttcactatcatcatcatctcttctataaacaaaattttgaggaagctttttatccacaccttattagctctgaacggtaatgtcttttattttggatttatgaaatatttcatatgtagttagcccatacatttaaataccttccaatgaattttctagttatat

SEQ ID NO: 71981 - protein, 128 aa, Arabidopsis thaliana
  peptide (1)..(128): Ceres Seq. ID no. 4908556
MKDGDSLPISTSSVAATTVTGKKETGYSALFSKGRYKFWALAAILLLAFWSMLTGTVNLRWSAGNINHFTDDLVFPIHEDLDVLVSLLLLLRDLFSDFCELRLICVVLMRLLGNGGEGESGEAHVGCV

SEQ ID NO: 71982 - protein, 100 aa, Arabidopsis thaliana; identical to SEQ ID NO: 37003
  peptide (1)..(100): Ceres Seq. ID no. 4908557

SEQ ID NO: 71983 - protein, 90 aa, Arabidopsis thaliana; identical to SEQ ID NO: 37004
  peptide (1)..(90): Ceres Seq. ID no. 4908558

SEQ ID NO: 71984 - DNA, 820 bp, Arabidopsis thaliana
  misc_feature (1)..(820): Ceres Seq. ID no. 4908848
  misc_feature (1)..(820): Ortholog of  Ceres SEQ ID NO 15171235 as cited in SEQ ID NO 52469
  misc_feature (1)..(820): Ortholog of  Ceres SEQ ID NO 15172705 as cited in SEQ ID NO 56069
  misc_feature (1)..(820): Ortholog of  Ceres SEQ ID NO 15174852 as cited in SEQ ID NO 67166
  misc_feature (1)..(820): Ortholog of  Ceres SEQ ID NO 12635657 as cited in SEQ ID NO 0
  misc_feature (1)..(820): Ortholog of  Ceres SEQ ID NO 12635879 as cited in SEQ ID NO 0
  misc_feature (1)..(820): Ortholog of  Ceres SEQ ID NO 13599649 as cited in SEQ ID NO 0
  misc_feature (1)..(820): Ortholog of  Ceres SEQ ID NO 14309205 as cited in SEQ ID NO 0
  misc_feature (1)..(820): Ortholog of  Ceres SEQ ID NO 15177492 as cited in SEQ ID NO 0
attttcagattcaccgttttagaaattaaatcctctctataagaacctctccaaaaaccctaatttgtcatcatcactttcacaatcttcttcatcgatttctctcttccaaatctcccaaaagatgtcgaaccctagagttttcttcgacatgagtctcagcggtactcccatcggacggatcgagatggagcttttcgctgatacaaccccaaacacggcggagaatttccgtgctctctgtaccggcgagaaaggaatgggaaagctaggtaagccacttcacttcaaaggatcgatcttccaccgtgtgattcccggattcatgtgtcaaggaggtgatttcaccgccaagaacggaaccggtggtgaatcgatctacggtgctaagttcaaggacgagaactttatcaagaagcatacaggagctgggattctctcaatggctaactctggtcctaacactaacggatctcagttcttcatctgtaccgataagacgtcgtggttagatggtaagcacgttgtgtttggacaagttgttaaaggcttggacgtcgtgaaggcgattgagaaagttggatctgattctggaaagacttccaaagtcgttaccatcactgattgtggtcagctttcttagatctgagtgagaaagtgagagactttgatctttatgagtaataatggtgtcttttgctttcggttgttcttcctcttaccttaatggattattctgtttagggtttgagttttcgtttcagagtttgtaacaaaacccttttgtgttttctggggtttgaaataattatgagcttac

SEQ ID NO: 71985 - protein, 172 aa, Arabidopsis thaliana; identical to SEQ ID NO: 25632
  peptide (1)..(172): Ceres Seq. ID no. 4908849

SEQ ID NO: 71986 - protein, 163 aa, Arabidopsis thaliana; identical to SEQ ID NO: 25633
  peptide (1)..(163): Ceres Seq. ID no. 4908850

SEQ ID NO: 71987 - protein, 151 aa, Arabidopsis thaliana; identical to SEQ ID NO: 25634
  peptide (1)..(151): Ceres Seq. ID no. 4908851

SEQ ID NO: 71988 - DNA, 1348 bp, Arabidopsis thaliana
  misc_feature (1)..(1348): Ceres Seq. ID no. 4908863
  misc_feature (1)..(1348): Ortholog of  Ceres SEQ ID NO 15226049 as cited in SEQ ID NO 55683
  misc_feature (1)..(1348): Ortholog of  Ceres SEQ ID NO 13597225 as cited in SEQ ID NO 63994
atctatcttctccacgttactaccacctaacctctcatccaccttttctcctttaagcatatttcatttcatctccgaaaggaattgtatcgttcctcacacacgcctctcatctcttatccattcttgtccttttttcagctcaacaagaatggataattgtactggagaaaatcccatggcttctcagttgaacattctccgatgcccgttcttgaggaacatcaatgagcccactaacctctctttctcttcatccttgccttttcccatccctgcaagagctgggaaaggacctatatttgaagatggtcccaattttgatacggcgtttaggcttttccatggccaagatggagttgtccctctctctgacaccgctcgaactgaagcccagaagcctgtgcctgtattccatccacttgctgctaaggcggccactattagtctctcatcctttggatctggagggccttttggatttgatgcattttctgacatgtttaaaaatcaaaagaagaagtcagattcatccaaaaataagggaggaaaccacgaagccatgggcgacgaatggcttaaaacaggaaactgcccaatagcaaaatcatatcgagctgtaagtggtgtggcaccacttgtggcaaagatcctgcaaccccctccaggcatgaaatttaaatgccctcaagcaatagtcacagctcgagcagcgatatcaaaaacacctttcgccaagaacctccgtccacaacctttaccagctaaagtactagtgatcgggatgctgggcatggcgttaaatgtgcctttaggggtctggagagagcacactgaaaagttttcggcatcttggtttatagctcttcacgcagcggttccattcataggaatactgagaaagtcagtgttgatgcctaaaacagctatggtattcaccatagcagcatcagttttgggacaggtgattgggtcaagagcagagaggcggagactcaagtctgtagctgagaagaagttgacattggaggtaccaaatccgtcttctgttgaagcagatcagatgcaatttgccggagtttcatcagatggaagatgcggtgataaagtggtgatgaagtggaatcccatgatgcttgatgttgcaagccctgtgtcttccggagcagctactgttgtctgctaaaaggattttgtaattctcttcgaggatttatatatataattgtttttcttgtatttttttcggctgattgtatttaaaaagtttcttaatgtttgagaaaaacaagaataaagccattttttaaactgttaattgtattttaatgtaaaagacttgtttgat

SEQ ID NO: 71989 - protein, 394 aa, Arabidopsis thaliana; identical to SEQ ID NO: 30061
  peptide (1)..(394): Ceres Seq. ID no. 4908864

SEQ ID NO: 71990 - protein, 344 aa, Arabidopsis thaliana; identical to SEQ ID NO: 30062
  peptide (1)..(344): Ceres Seq. ID no. 4908865

SEQ ID NO: 71991 - protein, 335 aa, Arabidopsis thaliana; identical to SEQ ID NO: 30063
  peptide (1)..(335): Ceres Seq. ID no. 4908866

SEQ ID NO: 71992 - DNA, 843 bp, Arabidopsis thaliana
  misc_feature (1)..(843): Ceres Seq. ID no. 4909009
  misc_feature (1)..(843): Ortholog of  Ceres SEQ ID NO 13661768 as cited in SEQ ID NO 61427
  misc_feature (1)..(843): Ortholog of  Ceres SEQ ID NO 15179176 as cited in SEQ ID NO 0
atgaaaaaacacacacaccaaaaatatcagatatctcaaacaatgtcttcagtttttggatctgtccatatcttggccatgatagccatacaactcctccttacacacagtgtttcatctctgaaccttaccaatgcgtatctgcaccacaaatgcagcaacactcaaggaaaatataagcaggggagcgcgttcgagaaaaatctcaacttagtcctcagtaccatcacctcgattggaaattttcgtgacggtttccgctacaccgaagaaggtgaggatcccaataacgtctttgtcatgttccagtgtcgcggcgactcctactggtccaagtgccccccttgcattagcaccgccgtctctgggcttcgtaggagatgtccaagaaataagggagcaataatatggtatgaccaatgtcttttaaagatatcttcagttgcctccttcaataagatagattatgagaacgatttctatttgtccaacccaaacaacatgagtgatcgggggttgttcaacaaggagacgtcggctctcctggagaagctggcatataaagcctccgatagaaacaacttggatggtaaacaattggtgttgtacgcagcaggggagaagagaattgggacaaagaaggtgtatgcaatggtgcagtgtacgaaagacttaatatttacaaagtgctttgagtgtttggaagggattttgaggaagtttccacagtgttgtgacggtaaacgaggagggagagttttcggtacgagctgtaactttaggtatgagttatatccttttcttagaaactacagcaacagtacaatgagagctccatattaa

SEQ ID NO: 71993 - protein, 280 aa, Arabidopsis thaliana
  peptide (1)..(280): Ceres Seq. ID no. 4909010
MKKHTHQKYQISQTMSSVFGSVHILAMIAIQLLLTHSVSSLNLTNAYLHHKCSNTQGKYKQGSAFEKNLNLVLSTITSIGNFRDGFRYTEEGEDPNNVFVMFQCRGDSYWSKCPPCISTAVSGLRRRCPRNKGAIIWYDQCLLKISSVASFNKIDYENDFYLSNPNNMSDRGLFNKETSALLEKLAYKASDRNNLDGKQLVLYAAGEKRIGTKKVYAMVQCTKDLIFTKCFECLEGILRKFPQCCDGKRGGRVFGTSCNFRYELYPFLRNYSNSTMRAPY

SEQ ID NO: 71994 - protein, 266 aa, Arabidopsis thaliana
  peptide (1)..(266): Ceres Seq. ID no. 4909011
MSSVFGSVHILAMIAIQLLLTHSVSSLNLTNAYLHHKCSNTQGKYKQGSAFEKNLNLVLSTITSIGNFRDGFRYTEEGEDPNNVFVMFQCRGDSYWSKCPPCISTAVSGLRRRCPRNKGAIIWYDQCLLKISSVASFNKIDYENDFYLSNPNNMSDRGLFNKETSALLEKLAYKASDRNNLDGKQLVLYAAGEKRIGTKKVYAMVQCTKDLIFTKCFECLEGILRKFPQCCDGKRGGRVFGTSCNFRYELYPFLRNYSNSTMRAPY

SEQ ID NO: 71995 - protein, 254 aa, Arabidopsis thaliana
  peptide (1)..(254): Ceres Seq. ID no. 4909012
MIAIQLLLTHSVSSLNLTNAYLHHKCSNTQGKYKQGSAFEKNLNLVLSTITSIGNFRDGFRYTEEGEDPNNVFVMFQCRGDSYWSKCPPCISTAVSGLRRRCPRNKGAIIWYDQCLLKISSVASFNKIDYENDFYLSNPNNMSDRGLFNKETSALLEKLAYKASDRNNLDGKQLVLYAAGEKRIGTKKVYAMVQCTKDLIFTKCFECLEGILRKFPQCCDGKRGGRVFGTSCNFRYELYPFLRNYSNSTMRAPY

SEQ ID NO: 71996 - DNA, 1107 bp, Arabidopsis thaliana
  misc_feature (1)..(1107): Ceres Seq. ID no. 4909150
  misc_feature (1)..(1107): Ortholog of  Ceres SEQ ID NO 13595626 as cited in SEQ ID NO 51116
aaaacactagagataaccctagaaagatctctctcgatctctggttcgaagaaaatccaccatttccgattgttctttctctttgacaaaacccagatagataaaaattcgttccaattccagtgagctccggaaatggcgtccttcaagttgatgtcttcttccaattccgacttgtctcgccgtaattcttcttctgcttcatcttccccttctataagatcatcgcaccatctccgaccaaatcctcacgccgatcactccagaatcagtttcgcttacggcggaggagtcaacgattacactttcgcgtctgattcaaagcccttcgagatggcgattgatgttgatcggagtatcggagatcggaacagcgttaacaacggaaagagtgttgacgatgtttggaaagagattgtatctggagagcaaaagacgatcatgatgaaggaagaagaaccagaagatataatgacacttgaggatttcttagcgaaagcagaaatggacgagggagcttcagatgaaatcgatgtgaagattccaacggagagactcaacaacgacggtagctatacatttgattttccgatgcagcgacacagttcgttccagatggttgaaggatcaatgggtggaggagtaacgagaggaaagagagggagagtgatgatggaggcaatggataaagctgcagctcagagacagaagaggatgatcaagaaccgtgaatccgctgctaggtctcgagagaggaaacaggcttatcaggttgagttagagactttggctgccaagttagaggaggagaatgagcagcttttgaaggagattgaagagagcactaaagagagatacaagaagctcatggaggttctgattccggtcgatgagaaaccaaggccaccgtcgaggcccttaagcaggagccattccttggaatggtgaagtgtggtaaaaaaaacttttgtatgtaaaaaaaataaaaacatatgggcttgattactatattataatctatatagtaaagtgatggtgatatggttagtacttagttacctgtaatgtatctaagggatgtaatggataatacatagctttttgctg

SEQ ID NO: 71997 - protein, 270 aa, Arabidopsis thaliana; identical to SEQ ID NO: 23727
  peptide (1)..(270): Ceres Seq. ID no. 4909151

SEQ ID NO: 71998 - protein, 264 aa, Arabidopsis thaliana; identical to SEQ ID NO: 23728
  peptide (1)..(264): Ceres Seq. ID no. 4909152

SEQ ID NO: 71999 - protein, 204 aa, Arabidopsis thaliana; identical to SEQ ID NO: 23729
  peptide (1)..(204): Ceres Seq. ID no. 4909153

SEQ ID NO: 72000 - DNA, 815 bp, Arabidopsis thaliana
  misc_feature (1)..(815): Ceres Seq. ID no. 4909291
  misc_feature (1)..(815): Ortholog of  Ceres SEQ ID NO 15178302 as cited in SEQ ID NO 0
aattgtcttatctttcgacttttcttcttcttcttcttaagagatttttctccaagaaagttcgctccttttctctgttcttaacaaaaaagtctcggtttttttctctttgttttgggtactagcgtgatgtcttctgagaatgatttcgttgagttttcttctatgttcgagagaattatacaaggaagaggtgatggtctctctcgatttttgccggtgattgtagctttagccgccagagaagacgatgatgaccaaggatctaccgatcaaacaacgagacggggagatccgttgagtccaaggttcgtgatgatcggatcgcgatcgggactcgacgatttctttagcgacggtggaaaacaagggaggtcgccggcgttgaagtcagaagtggagaatatgccacgtgtcgtgatcggagaagataaggagaaatatggtggttcttgcgcgatttgtttggatgagtggtctaaaggtgacgtggcggcggagatgccttgtaaacataagtttcactcaaagtgtgtggaggagtggttagggaggcacgccacgtgtcctatgtgtaggtatgagatgcctgttgaagaagttgaagaagagaagaagattgggatttggattggtttctccattaacgccggcgacagaagaaactaagaagacggaggaagaagaagttaaaagtgactcgaaccctcaagatgcaacatggggctaggtttaggtttaggtttgctagaatgttttgtatagtttcgttttcgtttactgaaatcaatttcgaattcaataaaattggttgc

SEQ ID NO: 72001 - protein, 179 aa, Arabidopsis thaliana
  peptide (1)..(179): Ceres Seq. ID no. 4909292
MSSENDFVEFSSMFERIIQGRGDGLSRFLPVIVALAAREDDDDQGSTDQTTRRGDPLSPRFVMIGSRSGLDDFFSDGGKQGRSPALKSEVENMPRVVIGEDKEKYGGSCAICLDEWSKGDVAAEMPCKHKFHSKCVEEWLGRHATCPMCRYEMPVEEVEEEKKIGIWIGFSINAGDRRN

SEQ ID NO: 72002 - protein, 167 aa, Arabidopsis thaliana
  peptide (1)..(167): Ceres Seq. ID no. 4909293
MFERIIQGRGDGLSRFLPVIVALAAREDDDDQGSTDQTTRRGDPLSPRFVMIGSRSGLDDFFSDGGKQGRSPALKSEVENMPRVVIGEDKEKYGGSCAICLDEWSKGDVAAEMPCKHKFHSKCVEEWLGRHATCPMCRYEMPVEEVEEEKKIGIWIGFSINAGDRRN

SEQ ID NO: 72003 - protein, 117 aa, Arabidopsis thaliana
  peptide (1)..(117): Ceres Seq. ID no. 4909294
MIGSRSGLDDFFSDGGKQGRSPALKSEVENMPRVVIGEDKEKYGGSCAICLDEWSKGDVAAEMPCKHKFHSKCVEEWLGRHATCPMCRYEMPVEEVEEEKKIGIWIGFSINAGDRRN

SEQ ID NO: 72004 - DNA, 1312 bp, Arabidopsis thaliana
  misc_feature (1)..(1312): Ceres Seq. ID no. 4909460
  misc_feature (1)..(1312): Ortholog of  Ceres SEQ ID NO 14304838 as cited in SEQ ID NO 59750
tcgatcttactcaattttgcgtttctgcttttcattttctctcaagaagcgtaaatggcgaacaatggacctaactgggacggattactcaaatggagcctctcacattccgatggagcttcctcttctagccgtataagtgaggaagatcgacaatggtttgtggaagctatgcaagcacatacaatcgattcaatctctcgtatgaaagtaatatctcaaatcatgaagatgcctgaacaagtcttggaggctcaaggagttacacctgatgatcttgaaggaatgttggctgagctgcaggaacacgtcgagtcgatagatttggccaatgatcttcactccattggaggtttggttcctctccttagctatctcaagaactctaatgcgaaaattcgagcaaagtctgccgatgttttgactacggttgtccaaaacaatccaagaagccagcaacttgttatggaagcaaatgggttcgaaccattattaactaactttattgctgatcctgacattagagtccggaccaaggcactcggggctatatcttctcttatccgtaacaaccaacccgggattacagcattccgtctggcaaatggttatgctggcctgcgagacgctttggtctctgataccgttagattccaaagaaaagcgttgaacttgcttcactatcttctccaagaaagcaactcagactgtaaaatcgttagagatcttggattccctcgcataatgatccacctagcatccaaccaagattttgaagttcgggaattcgctcttcgtggtctcctagagcttgcccgtgaagaatctgtgagaaaccttgatagaggggatgtgaatctaagacagcttcttgaggagagaacaagacgaataattgtgatgtcggacgaagatctttgtgcagctagagaagaaagacagctagtggatagtctttggaccgtgtgttatgatgaaccgtcccttctaagagaaagaggtctggtctacctcccttctgacgacgagctggctcctgatgtggttagggaccgctttgaacctcctctaagggcttgggctgcaagacgacatgatgaaacgagtgaatccccggttccacttcttcttggtcctgcaccgtgatctcgttcaaccaaattattagattttgcagttatcaacaaatcagctttgctttagaatttctctagctcttgtttatgtatatctgagcgacaacaagacgctattaaagagattatctgtgttctgtttctgtaatacaaatctacactcatggacttcaagt

SEQ ID NO: 72005 - protein, 324 aa, Arabidopsis thaliana; identical to SEQ ID NO: 24190
  peptide (1)..(324): Ceres Seq. ID no. 4909461

SEQ ID NO: 72006 - protein, 313 aa, Arabidopsis thaliana; identical to SEQ ID NO: 24191
  peptide (1)..(313): Ceres Seq. ID no. 4909462

SEQ ID NO: 72007 - protein, 363 aa, Arabidopsis thaliana; identical to SEQ ID NO: 24189
  peptide (1)..(363): Ceres Seq. ID no. 4909463

SEQ ID NO: 72008 - DNA, 604 bp, Arabidopsis thaliana
  misc_feature (1)..(604): Ceres Seq. ID no. 4909588
  misc_feature (1)..(604): Ortholog of  Ceres SEQ ID NO 12329459 as cited in SEQ ID NO 20533
gaagtaacatactttttacaatcacatttttgaagaactttcattccataaatctacagatctttgtgtatcaagtaaagagatgtcaggaagaggaaagggaggaaaaggattgggaaagggaggagcgaagaggcacaggaaggttctgagggataacattcaaggaatcaccaagcctgctattcgtcgtcttgctcgtagaggtggtgtcaagcgtatcagtggtctcatctacgaagagaccagaggtgtcctcaagatcttcctcgagaatgttatccgtgacgccgttacctacactgagcacgccaggaggaagacggtgaccgccatggatgttgtctacgctttgaagaggcaaggtcgtactctctacggtttcggaggttaatccgatttgggggattagggtttatgcaagtttggggatttcttcttgtttctgagatccgtgttaaatggtttgaattagtcaaaagtaaattcaggagttagtttttgtttctcgtttttcgttgttattagccaatgtgatgtagtagttaattatcttttgcaagctttgtgctaagaaaatctaatgagaattatccatttgctt

SEQ ID NO: 72009 - protein, 103 aa, Arabidopsis thaliana; identical to SEQ ID NO: 7737
  peptide (1)..(103): Ceres Seq. ID no. 4909589

SEQ ID NO: 72010 - DNA, 712 bp, Arabidopsis thaliana
  misc_feature (1)..(712): Ceres Seq. ID no. 4909590
  misc_feature (1)..(712): Ortholog of  Ceres SEQ ID NO 12329459 as cited in SEQ ID NO 20533
  misc_feature (1)..(712): Ortholog of  Ceres SEQ ID NO 14302474 as cited in SEQ ID NO 60589
ccgtcaaattcaattgatcctctctccaaatcatcttaaaagtatcttcttcttctccatctggtttattgttcgatcgtcaattcaattgattgatttggaaatctagcgtttctgttcgttaccattcactgaataatttttcttctgttcttcacagtcacagatctttgggtatcaagtaaaactgtgaagtgatgtcgggaagaggaaagggaggaaaaggattgggaaagggaggagcgaagaggcacaggaaggttctgagggataacattcaaggaatcaccaagcctgccattcgtcgtcttgctcgtagaggtggtgtcaagcgtatcagtggtctcatctacgaagagaccagaggtgtcctcaagatcttcctcgagaatgtcatccgtgacgccgttacttacactgagcacgctagaaggaagacggtgaccgccatggatgttgtctacgctttgaagaggcaaggtcgtactctctacggtttcggaggttaatccgatttgggggattagggtttatgcaagtttggggatttcttcttgtttctgagatctgtgttaaatggtttgaattagtctaaagtaaatctaggagtgttagctactgcttttgttttctattgtgatgtcgttgttagccaatgcggtgtagttgaaaatctttgcaaacttaaagctaagaaaatctaatgaggatg

SEQ ID NO: 72011 - protein, 103 aa, Arabidopsis thaliana; identical to SEQ ID NO: 7737
  peptide (1)..(103): Ceres Seq. ID no. 4909591

SEQ ID NO: 72012 - DNA, 805 bp, Arabidopsis thaliana
  misc_feature (1)..(805): Ceres Seq. ID no. 4909688
  misc_feature (1)..(805): Ortholog of  Ceres SEQ ID NO 13599232 as cited in SEQ ID NO 991
gctctaagacccagtttgactcgttgatcaacgaaaggtaacgacaaaactctgatttccgatttcattactatgaatcgattcgaatttctgagtttctgactttgtttcagtgtgagtttgaggtgaaagatgacggcgacgatagatcggaggttatcaacgctgaatccaaacgcgccggtgtttgatccggtggaatttcgtgaggtggaggatttttcaccgaaatggtgggatctagtaacgacttcgaaatggttccgtgacttttggctcagtgctaactctgagaatgagttcctcggcggcgacgatttctcagttatggaagaagagttcgaggagatgatcgcatcgtctgatggtggatccatggctgatacagttacaggtaacgatttgtttactgttttgaaattagttgagatttagggattcgaaacattcagatctgaggatttttgtgtgttttaatggcagaagcagatgtggctagttatttgaagatgcttttgaacatagcggagtctacgaaagagaagatttatagatcgaaggtttcgtcttgttcaccaaagtataatcagaagaagtacatgaatccgaactttaattgtcgccggaatcatcatatctatcagccacggtgaagcttctagaaggaacaaagctcttcttcttcttctttcgagatgataatcagagtcgtgtctgtgtttatggctgaatctgatcttttctgctttcttgttttttgtaattctgtgaatattcctactttctataataacatcactttatg

SEQ ID NO: 72013 - protein, 100 aa, Arabidopsis thaliana
  peptide (1)..(100): Ceres Seq. ID no. 4909689
MTATIDRRLSTLNPNAPVFDPVEFREVEDFSPKWWDLVTTSKWFRDFWLSANSENEFLGGDDFSVMEEEFEEMIASSDGGSMADTVTGNDLFTVLKLVEI

SEQ ID NO: 72014 - protein, 58 aa, Arabidopsis thaliana; identical to SEQ ID NO: 25656
  peptide (1)..(58): Ceres Seq. ID no. 4909690

SEQ ID NO: 72015 - DNA, 1096 bp, Arabidopsis thaliana
  misc_feature (1)..(1096): Ceres Seq. ID no. 4909790
  misc_feature (1)..(1096): Ortholog of  Ceres SEQ ID NO 13662984 as cited in SEQ ID NO 64419
ttcggtttcatttccacgagatctctttggctttcttgttgagatctttccacaagaaagtttagttgttttcttcttcctgtgatttcttcgcctaattttttctggatttaaaaacacgagaagtcaaggtgaaatattatcgaagtctctgaatctgtttttgaatggaaccatcatctggaaccggtcctgagaagagaccaaccgttgacttggtcaaggatagaaatggaacggatcagattcttcttcagaatcctagaggcgcctctgtaaagattagtttacatggaggacaagttctttcatggaagactgacaagggtgatgaattgttattcaacagcaccaaggccaacttgaagcctccccatccggtacgaggaggaatccctatatgctttcctcagtttggaactcggggatcacttgagcaacacgggtttgcaagaaacaagatgtggcttgtagaaaacaatccacctgctttaccttcatttgactcaactggaaaagcctatgttgatttggtgcttaagtcatctgatgaagatacgatgaggatctggccttacagctttgagtttcatctgagagtctcattggcattagatgggaacctaacactgatatcacgagtcagaaacatcaattcaaagccttttagcttttccattgcttaccacacttacttctccatttccgatattagtgaagttagacttgaagggctggaaactcttgactatcttgataatatgcatgatagagagcggttcacagagcaaggcgatgcattaacctttgaatcagagatcgatagagtgtacctaaattctaaagacgtggttgccattttcgaccatgagagaaaacgcacattcctcatcaagaaagaaggtctacctgatgtcgtggtatggaatccatgggagaagaaagcgagagcattgacggatttgggagatgatgagtatagacacatgttgtgtgtggatggagcagccattgagaaacccatcaccttgaaaccgggtgaagaatggaccgggaaattacatctctcgcttgttctttccacctaaaacccggt

SEQ ID NO: 72016 - protein, 306 aa, Arabidopsis thaliana; identical to SEQ ID NO: 35231
  peptide (1)..(306): Ceres Seq. ID no. 4909791

SEQ ID NO: 72017 - protein, 208 aa, Arabidopsis thaliana; identical to SEQ ID NO: 35232
  peptide (1)..(208): Ceres Seq. ID no. 4909792

SEQ ID NO: 72018 - protein, 175 aa, Arabidopsis thaliana; identical to SEQ ID NO: 35233
  peptide (1)..(175): Ceres Seq. ID no. 4909793

SEQ ID NO: 72019 - DNA, 428 bp, Arabidopsis thaliana
  misc_feature (1)..(428): Ceres Seq. ID no. 4909822
  misc_feature (1)..(428): Ortholog of  Ceres SEQ ID NO 13593557 as cited in SEQ ID NO 175
aagcaaaacgcaaaaaccaaagatgggtgagatgatcaaagccagacgcatactcctcttctccatcgtattcctcttcttcttctctcaggcctttcttttgtgttcagctgagggtgagcatggctcaagaaatctcgcagtggtgatgaagaaaagggtgaaatacagaggacctcgcaacacaacaacatcctctgcagcctcaactattatgttcccaggctccttccatattggtgctgcttcctctttactccttgctcttcttttataagctcccttgtagtgatcattattgtactgtttgacaatgattcatgtaatttgcttttctcgattgattttgtagaaatttctcaaatggtctaaaattctgtttgtaaattatttgctctgtttcaaaagtatatggtcacttgtcccac

SEQ ID NO: 72020 - protein, 91 aa, Arabidopsis thaliana; identical to SEQ ID NO: 27915
  peptide (1)..(91): Ceres Seq. ID no. 4909823

SEQ ID NO: 72021 - protein, 84 aa, Arabidopsis thaliana; identical to SEQ ID NO: 27916
  peptide (1)..(84): Ceres Seq. ID no. 4909824

SEQ ID NO: 72022 - protein, 81 aa, Arabidopsis thaliana; identical to SEQ ID NO: 27917
  peptide (1)..(81): Ceres Seq. ID no. 4909825

SEQ ID NO: 72023 - DNA, 1247 bp, Arabidopsis thaliana
  misc_feature (1)..(1247): Ceres Seq. ID no. 4909884
  misc_feature (1)..(1247): Ortholog of  Ceres SEQ ID NO 15179926 as cited in SEQ ID NO 57010
  misc_feature (1)..(1247): Ortholog of  Ceres SEQ ID NO 14316075 as cited in SEQ ID NO 60059
ttgaaactcttgactggttctaaacacagctcattatatgtctatttagtattttacacattggtttcagacggctcttaaaggtctctctagcttcatgtcaaccatctaaaccaaccaccattaatgttcctctgcccattttcaagaaattagaaatcatttttctctaagttcttgatcgtcgccatgaacgatcttatctcaagctcattcaagagatacacagacttaaaccaccaggtccaactcgatgacatcgagtctcaaaatgtttctcttgattcaggcaacctcgatgagttctttggatatgtcgagagtgttaaagaagacatgaaagctgtcgacgagattcataagcgtctccaagatgctaatgaagagtccaagaccgtacatgattccaaggccgtgaagaagcttcgtgctcgtatggattcgagtgttacagaggtcttgaaacgtgtcaagatgataaagactaagcttgtagctttggagaaatcaaatgctgcgcagaggaaagtcgctggttgtggtcctggctcgtctgctgatcggaccagaacatcggtcgttagtggattggggaagaagcttaaagacatgatggatgattttcagagactacgaaccaaaatggctactgaatacaaagaaacggtcgagagaaggtacttcactgtaacggggcaaaaagcggacgaagagacggtcgagaagctcatatcgagcggagagagcgaacgttttctccaaaaagcaatacaagagcaaggtcgcggacaggtcatggacacattatcagagattcaagaacgacacgacacggtcaaggagatagaacggagtctgttagagctgcaccaagtgttcctcgacatggctgctcttgtcgaagctcaagggaatatgctcaatgacattgaatcaaatgtctcaaaggcgagctctttcgtcatgagagggactgatcaattgcatggggctaaagtacttcagaggaacaacaggaaatgggcttgtatcgccactatcctcgctattgtagttgttattgtgattcttttcccaatcctctttaacactctacttcgaccttgatttcaaaatgtaacttattgttttctccaaactccttttgttagagccctttcgatttcttgtattgaatccagagctgaagcgagagtttaatttgaagctctctctaaccattcttgctactgtaattgctttatatc

SEQ ID NO: 72024 - protein, 305 aa, Arabidopsis thaliana; identical to SEQ ID NO: 24124
  peptide (1)..(305): Ceres Seq. ID no. 4909885

SEQ ID NO: 72025 - protein, 256 aa, Arabidopsis thaliana; identical to SEQ ID NO: 24125
  peptide (1)..(256): Ceres Seq. ID no. 4909886

SEQ ID NO: 72026 - protein, 223 aa, Arabidopsis thaliana; identical to SEQ ID NO: 24126
  peptide (1)..(223): Ceres Seq. ID no. 4909887

SEQ ID NO: 72027 - DNA, 1304 bp, Arabidopsis thaliana
  misc_feature (1)..(1304): Ceres Seq. ID no. 4909966
  misc_feature (1)..(1304): Ortholog of  Ceres SEQ ID NO 13648488 as cited in SEQ ID NO 20419
  misc_feature (1)..(1304): Ortholog of  Ceres SEQ ID NO 15171378 as cited in SEQ ID NO 51582
atcttataaccatccttcaatctccttcttcctctaaaactcttctaaagaagaaaacagaggaacgagaagaagaagaagagtgaacaatgaagaacggatcagggaacacgaacacaaaactaatccttcttcatccttacatccaaaaacaaacgagcacgactcgtttatggcttctcgctttcgtctctttcttcaccatagtttttctcctcactcttctctacactagagacacaatcccttccaaaaacacctccgtcgccgcagccgtagctgcagtcgtcaccggaggatccacaccttcagcatcatctcccatctccaactccaacttaccaactagtgcaatcaacgctttgcttcactacgcgtcaagatccaacgatagtttccacatgtcttacggagagatgaaatcaatctctgacgtcctccgccgctgcgctccaccgtgtaatcttctcgttttcggactcacacacgagactctcctttggaagtcgttaaaccacaacggtagaacagtgttcatcgaggagaatcgttactacgcggcttacttcgaagaaatccacccggagatcgacgttttcgacgttcaatacacgacaaaagctcacgaagctggagagctcgtcaccgcggctaaagaagccgcgggaaacgagtgtcgtcctgtgcaaaatcttctcttctcagattgtaaattaggtctcaatgatttgcctaatcatgtctacgatgttgattgggatgtaatctttgtggacgggccacgtggcgatgctcacgaaggaccggggaggatgtcgtcgattttcacggcggcggttcttgctcggagcaaaaagggcgggactccgaagacgcatgtgtttgtgcatgactattatagagacgttgagaggctttgtggtgatgagttcttgtgccgagagaatcttgttgagtctaatgatttgcttgcacactacgtgttggataagatggataaaaacagcacaaagttttgcaatggtcgtaagaaacgttcggtttcgtctttgtcttaaaagtgatgccagaagacttcatacgtacatttgcttattgtaagaaataaagttttttccttgaagttttgctttttgtgctggtgtaaattttcgatcttggatttattgaagactttaatttaatctcttttttttttttttttttttctcaaaggccaaagcaatcaatttgatgaaacatctagggatatatataaccaaatgtaaactgaacttttgaaccaaaatcaatattttattcat

SEQ ID NO: 72028 - protein, 322 aa, Arabidopsis thaliana
  peptide (1)..(322): Ceres Seq. ID no. 4909967
MKNGSGNTNTKLILLHPYIQKQTSTTRLWLLAFVSFFTIVFLLTLLYTRDTIPSKNTSVAAAVAAVVTGGSTPSASSPISNSNLPTSAINALLHYASRSNDSFHMSYGEMKSISDVLRRCAPPCNLLVFGLTHETLLWKSLNHNGRTVFIEENRYYAAYFEEIHPEIDVFDVQYTTKAHEAGELVTAAKEAAGNECRPVQNLLFSDCKLGLNDLPNHVYDVDWDVIFVDGPRGDAHEGPGRMSSIFTAAVLARSKKGGTPKTHVFVHDYYRDVERLCGDEFLCRENLVESNDLLAHYVLDKMDKNSTKFCNGRKKRSVSSLS

SEQ ID NO: 72029 - protein, 218 aa, Arabidopsis thaliana
  peptide (1)..(218): Ceres Seq. ID no. 4909968
MSYGEMKSISDVLRRCAPPCNLLVFGLTHETLLWKSLNHNGRTVFIEENRYYAAYFEEIHPEIDVFDVQYTTKAHEAGELVTAAKEAAGNECRPVQNLLFSDCKLGLNDLPNHVYDVDWDVIFVDGPRGDAHEGPGRMSSIFTAAVLARSKKGGTPKTHVFVHDYYRDVERLCGDEFLCRENLVESNDLLAHYVLDKMDKNSTKFCNGRKKRSVSSLS

SEQ ID NO: 72030 - protein, 213 aa, Arabidopsis thaliana
  peptide (1)..(213): Ceres Seq. ID no. 4909969
MKSISDVLRRCAPPCNLLVFGLTHETLLWKSLNHNGRTVFIEENRYYAAYFEEIHPEIDVFDVQYTTKAHEAGELVTAAKEAAGNECRPVQNLLFSDCKLGLNDLPNHVYDVDWDVIFVDGPRGDAHEGPGRMSSIFTAAVLARSKKGGTPKTHVFVHDYYRDVERLCGDEFLCRENLVESNDLLAHYVLDKMDKNSTKFCNGRKKRSVSSLS

SEQ ID NO: 72031 - DNA, 1209 bp, Arabidopsis thaliana
  misc_feature (1)..(1209): Ceres Seq. ID no. 4910017
  misc_feature (1)..(1209): Ortholog of  Ceres SEQ ID NO 13657170 as cited in SEQ ID NO 65651
  misc_feature (1)..(1209): Ortholog of  Ceres SEQ ID NO 12586854 as cited in SEQ ID NO 69102
agaaaaaaaatggcggaactgttgttggtggaaactccaatcccacagcaaaagcactacgaatccaaaccattcccggcggtgatatcaccaccgtctgcttcgattccaattcctgctctgtctctcccactattcactcaaactatcaaaactcagaaacactatctcgattctctcttgcacgaatccggagcagtgctattcagaggttttccggtgaattccgccgatgatttcaacgacgtcgttgaagctttcggtttcgatgagcttccttacgtcggaggcgctgctcctcgcactagcgtcgtcggtcgtgtcttcactgctaatgaatctcctcctgatcagaagattccttttcaccacgagatggctcaggtattgatcaaaatcagatttgggtttatgtgaatttgattttttacatctaaagttttgagctttattgaatttgattgatggtgtttgttaggttcgtgagtttccatcaaagttgttcttttactgtgagattgagcctaagtgtggtggagagactccaattgtgttgagtcatgttgtgtatgagagaatgaaagataaacatccagagtttgttcagagattagaggaacatggtttgctttatgttagggttttaggtgaagatgatgatccttcatctcccattggacgtggttggaaatctacattcttaacccatgacaagaaccttgctgagcaaagggcggttgatttgggaatgaaactggaatggacagaggatggtggagccaagacggtaatgggtccgattccggctatcaaatatgacgagtcgagaaaccgtaaagtatggtttaacagcatggtagctgcttatacgggatgggaggataagcggaatgatccaagaaaggctgtgacttttggggatggaaagcctttacctgcggatatagtccatgattgtcttaggattcttgaagaggaatgtgttgctgttccgtggcagagaggagatgttttgcttatagataactgggcggttcttcattctcgaagaccgtttgatcctcctcgtcgagttcttgcatcactctgcaaatagattatgttgtctttcatgcataaatcaaagctttggatttcgaatttagaggcaacaacaacactgtacatattttggatacatatatgtgggtacatagtaacccatttcct

SEQ ID NO: 72032 - protein, 172 aa, Arabidopsis thaliana; identical to SEQ ID NO: 43625
  peptide (1)..(172): Ceres Seq. ID no. 4910018

SEQ ID NO: 72033 - protein, 138 aa, Arabidopsis thaliana
  peptide (1)..(138): Ceres Seq. ID no. 4910019
RKKMAELLLVETPIPQQKHYESKPFPAVISPPSASIPIPALSLPLFTQTIKTQKHYLDSLLHESGAVLFRGFPVNSADDFNDVVEAFGFDELPYVGGAAPRTSVVGRVFTANESPPDQKIPFHHEMAQVLIKIRFGFM

SEQ ID NO: 72034 - protein, 135 aa, Arabidopsis thaliana
  peptide (1)..(135): Ceres Seq. ID no. 4910020
MAELLLVETPIPQQKHYESKPFPAVISPPSASIPIPALSLPLFTQTIKTQKHYLDSLLHESGAVLFRGFPVNSADDFNDVVEAFGFDELPYVGGAAPRTSVVGRVFTANESPPDQKIPFHHEMAQVLIKIRFGFM

SEQ ID NO: 72035 - DNA, 1220 bp, Arabidopsis thaliana
  misc_feature (1)..(1220): Ceres Seq. ID no. 4910090
  misc_feature (1)..(1220): Ortholog of  Ceres SEQ ID NO 14315440 as cited in SEQ ID NO 57161
ctcttccccttcgctctcgaatcaatcactctctcttctttagcgtttttattttgtcttcctcgttttcttctacctttttatattttctctcttttcagttttctctagaaaaaaacactagtaatcagtttgcgtttgataaatatttgatgtggcaaaactcttgtggatcttgatgttcaaacattcatgtctccggtgattagtgaaatccttagatctggtttaactatagactcgtctcttagacgcaggacccatcttgttcaatctttctccgtcgtctttctctactggttctatgttttctcataaatcagctctcctttagccctttattattatatattctataaccataataatatattaaaactatatactataatctttttacataataaactttgggtcctgcgtcttaatcatagtacttaattttctctgtgtgttttaatatgaataataaaactgaaatgggatcttccacaagtggaaattgctcgtcggtttcaaccactggtttagctaactccggttcagaatctgatctccggcaacgtgatctaatcgacgagcggaagagaaagaggaaacagtcgaacagagaatctgcgaggaggtcgaggatgaggaagcagaagcatttggatgatctcactgctcaggtgactcatctacgtaaagaaaacgctcagatcgtcgccggaatcgccgtcacgacgcagcactacgtcactatcgaggcggagaacgacattctcagagctcaggttcttgaacttaaccaccgtctccaatctcttaacgagatcgttgatttcgtcgaatcttcttcttcaggattcggtatggagaccggtcagggattattcgacggtggattattcgacggcgtgatgaatcctatgaatctagggttttataatcaaccaatcatggcttctgcttctactgctggtgatgttttcaactgttagaaaacttcacatcattatcatcgtgagtgagactaatcatcgcagcaggggtaaaactgtaatttttcttataaattatgtgatgatgctttgtttctttattttataagatggttaattagtgtttaaaactgattgtaatgatagacagtgtaagaaatgtgtgatatcatggagatggtgatgtgagtttggtacaaatattttaagatcttttctttctatatattaaaagtg

SEQ ID NO: 72036 - protein, 173 aa, Arabidopsis thaliana; identical to SEQ ID NO: 26820
  peptide (1)..(173): Ceres Seq. ID no. 4910091

SEQ ID NO: 72037 - protein, 167 aa, Arabidopsis thaliana; identical to SEQ ID NO: 26821
  peptide (1)..(167): Ceres Seq. ID no. 4910092

SEQ ID NO: 72038 - protein, 116 aa, Arabidopsis thaliana; identical to SEQ ID NO: 26822
  peptide (1)..(116): Ceres Seq. ID no. 4910093

SEQ ID NO: 72039 - DNA, 1453 bp, Arabidopsis thaliana
  misc_feature (1)..(1453): Ceres Seq. ID no. 4912006
  misc_feature (1)..(1453): Ortholog of  Ceres SEQ ID NO 15170752 as cited in SEQ ID NO 52719
aaaagaaaattgtcaatttcgaaaaatgttgagcacaagctctgatcttcatggccgtcttctccgattatcagaaccaatagcagagattcttagacgtacacagtacacaccgcaagagagcagcaaagtatccaccaaagatatactcttgtccttgttaccaaacacttcgtcttctcgtctcgccaatgaagaatcgatcaaaagtctcgcgcttgcttgtgcccttctcgcttcttcacgttcatccactcacgaacttctctcatggattccagaaaacctctctgtcatgggggaatctacattttgggagatttcaagggattgtttcagtgatttttctagcaacagtaatgctgagaagcttgtggaattggtagaggatagtgagaagatcgaaatgttgccgatagttttgccggagttaaaagatggaatcgaaaagagttcacttggtaaaggcagtgatgcagaggatgtttcagctgcaatggctagaacacctgttggttatgctatacttgctgctcaccagctcaggtggtttgttactcaggttaaaaaaccgaatttggtgaaattttgtaacttggtggttccttgtgctttgacagcacttgatcattggtctcctgaagtcaaagggcagggtatgataacctttgttcatcttgctaaaaatgtgagttccggtgatcttggtttgtatggagatgtggttcttgatgcgtgttgccagaatatagcttccgatgatgagatttggatacatgtggtagagttatctgtgcttcttgttactaaaatccacccaaataatcctcgaagcccgtggtatgagaagatcatgaatgagatgctcgggcatttggaacgccaaccaagaaataaggagcgacgtatcacttggctaagatttgttgagccactcttgaactctctagggcttttcttacttgctcattttcgacgtatcttccctcttttctttcagtggatgcattcagacgacgccgaaacagttctgttggttcttgagagactggagacagttgtgaggttgacgtggattagacactcacctgtgttcccaagattggtggatgagcttgtttccttgtacaaagagtcatcgatgcgtaaggatcgcgatgatattagacctcttatcctccgtatcttgatgctactccgccagtgcaaaggtctacggtttgagtcagcgtggagtcaataccaggaggatccaaatctgagtactgttagtcaacatatatggactagttcaagttgatctcaagagcgtatgtttgactaaaacagccatttttttttctaattttcgatattagtttggtctaggcctagtgatgcaagtaattactggcgaatcctcgaatttttgtaagcatttggctcttgactcttcttaagctaatctgatttg

SEQ ID NO: 72040 - protein, 432 aa, Arabidopsis thaliana
  peptide (1)..(432): Ceres Seq. ID no. 4912007
KENCQFRKMLSTSSDLHGRLLRLSEPIAEILRRTQYTPQESSKVSTKDILLSLLPNTSSSRLANEESIKSLALACALLASSRSSTHELLSWIPENLSVMGESTFWEISRDCFSDFSSNSNAEKLVELVEDSEKIEMLPIVLPELKDGIEKSSLGKGSDAEDVSAAMARTPVGYAILAAHQLRWFVTQVKKPNLVKFCNLVVPCALTALDHWSPEVKGQGMITFVHLAKNVSSGDLGLYGDVVLDACCQNIASDDEIWIHVVELSVLLVTKIHPNNPRSPWYEKIMNEMLGHLERQPRNKERRITWLRFVEPLLNSLGLFLLAHFRRIFPLFFQWMHSDDAETVLLVLERLETVVRLTWIRHSPVFPRLVDELVSLYKESSMRKDRDDIRPLILRILMLLRQCKGLRFESAWSQYQEDPNLSTVSQHIWTSSS

SEQ ID NO: 72041 - protein, 424 aa, Arabidopsis thaliana; identical to SEQ ID NO: 43088
  peptide (1)..(424): Ceres Seq. ID no. 4912008

SEQ ID NO: 72042 - protein, 334 aa, Arabidopsis thaliana
  peptide (1)..(334): Ceres Seq. ID no. 4912009
MGESTFWEISRDCFSDFSSNSNAEKLVELVEDSEKIEMLPIVLPELKDGIEKSSLGKGSDAEDVSAAMARTPVGYAILAAHQLRWFVTQVKKPNLVKFCNLVVPCALTALDHWSPEVKGQGMITFVHLAKNVSSGDLGLYGDVVLDACCQNIASDDEIWIHVVELSVLLVTKIHPNNPRSPWYEKIMNEMLGHLERQPRNKERRITWLRFVEPLLNSLGLFLLAHFRRIFPLFFQWMHSDDAETVLLVLERLETVVRLTWIRHSPVFPRLVDELVSLYKESSMRKDRDDIRPLILRILMLLRQCKGLRFESAWSQYQEDPNLSTVSQHIWTSSS

SEQ ID NO: 72043 - DNA, 2028 bp, Arabidopsis thaliana
  misc_feature (1)..(2028): Ceres Seq. ID no. 4916239
  misc_feature (1)..(2028): Ortholog of  Ceres SEQ ID NO 12586556 as cited in SEQ ID NO 64667
  misc_feature (1)..(2028): Ortholog of  Ceres SEQ ID NO 13660894 as cited in SEQ ID NO 67475
atggaagtagattgtcggcgttattacgtacgtcttcttcaatcatgcagcagcagaaatcgcgaaactttatggagacaaaccaatggattgctcttgaagaagggttttcttagttcaattgtcattgttgctaaccatctcctccaaatgtactcccggtctggtaaaatgggaattgcgcggaacttgttcgacgaaatgcctgatagaaactatttctcgtggaacactatgattgaagggtacatgaattctggggaaaagggaacgtctttgaggttttttgatatgatgccagaaagagatgggtactcttggaacgtggttgtttccgggtttgctaaagctggtgagctaagtgtcgctaggaggttattcaatgccatgccggaaaaagatgttgtgacgttgaactctctgcttcatggatatattttaaacggttatgcagaggaagctctgaggttgtttaaagaattgaattttagcgctgatgcgatcacattgacgacagttcttaaagcttgtgctgagttagaagctttgaaatgtgggaagcagatacatgctcagattctgatcggtggtgttgaatgtgactcgaaaatgaatagttctttagttaatgtgtatgcaaagtgtggtgatttgagaatggcaagctatatgctggagcagattagggaacctgatgaccattctctatctgccttaatttcaggttatgcaaattgtgggagagtgaatgagtctagaggacttttcgataggaaaagtaacagatgtgtaattctatggaactctatgatttcaggctatattgctaacaatatgaaaatggaggcattggttcttttcaatgagatgaggaatgaaacccgggaagattctcgtacgctggcagcggttataaatgcttgcatcggtttgggcttcctagagactggtaaacaaatgcattgtcatgcttgtaaatttgggttaattgatgacattgttgtagctagcactttgcttgacatgtactccaagtgtggaagcccaatggaagcttgcaaacttttcagtgaggtcgaatcctatgacactatcttacttaacagtatgatcaaggtatatttcagctgcggaagaatcgatgatgcaaaacgggtatttgagagaattgaaaataagagcttgatttcttggaactcaatgactaacggattcagtcaaaatggttgtactgttgaaactttagagtatttccatcagatgcataagctggatttgcctacagatgaggttagcctctctagtgtcattagtgcgtgtgcaagtatatcttctctcgaactcggtgagcaagtttttgcgagggcaactattgttggtcttgactctgatcaagtagtatcatcttctctcattgatctctactgcaagtgtggattcgttgagcatggcaggagagtattcgatacaatggttaaatcagatgaagtaccatggaactcaatgatatcaggttatgctacgaatggtcaaggatttgaagcgattgacttgttcaagaaaatgagtgttgctggtataagacctactcagatcacttttatggttgttctaacagcatgcaattactgtggtttagtcgaagagggacgaaaattgtttgagtcaatgaaggttgatcatggttttgttccagataaagagcatttttcatgtatggttgatcttttggctcgtgctggttatgtggaagaagctataaatcttgtagaagagatgcctttcgatgtggatggaagcatgtggtcatctattctaagaggatgtgtagcaaatggatataaagccatgggaaagaaagctgctgagaagattatagagcttgaacctgagaactcagttgcttatgtgcagttgtccgctatattcgcaacctcgggagattgggaaagctcggcgcttgtaagaaaactgatgagggagaacaatgtgacaaagaatccaggttctagttggactgattgttga

SEQ ID NO: 72044 - protein, 675 aa, Arabidopsis thaliana; identical to SEQ ID NO: 69800
  peptide (1)..(675): Ceres Seq. ID no. 4916240

SEQ ID NO: 72045 - protein, 625 aa, Arabidopsis thaliana; identical to SEQ ID NO: 69801
  peptide (1)..(625): Ceres Seq. ID no. 4916241

SEQ ID NO: 72046 - protein, 618 aa, Arabidopsis thaliana
  peptide (1)..(618): Ceres Seq. ID no. 4916242
MGIARNLFDEMPDRNYFSWNTMIEGYMNSGEKGTSLRFFDMMPERDGYSWNVVVSGFAKAGELSVARRLFNAMPEKDVVTLNSLLHGYILNGYAEEALRLFKELNFSADAITLTTVLKACAELEALKCGKQIHAQILIGGVECDSKMNSSLVNVYAKCGDLRMASYMLEQIREPDDHSLSALISGYANCGRVNESRGLFDRKSNRCVILWNSMISGYIANNMKMEALVLFNEMRNETREDSRTLAAVINACIGLGFLETGKQMHCHACKFGLIDDIVVASTLLDMYSKCGSPMEACKLFSEVESYDTILLNSMIKVYFSCGRIDDAKRVFERIENKSLISWNSMTNGFSQNGCTVETLEYFHQMHKLDLPTDEVSLSSVISACASISSLELGEQVFARATIVGLDSDQVVSSSLIDLYCKCGFVEHGRRVFDTMVKSDEVPWNSMISGYATNGQGFEAIDLFKKMSVAGIRPTQITFMVVLTACNYCGLVEEGRKLFESMKVDHGFVPDKEHFSCMVDLLARAGYVEEAINLVEEMPFDVDGSMWSSILRGCVANGYKAMGKKAAEKIIELEPENSVAYVQLSAIFATSGDWESSALVRKLMRENNVTKNPGSSWTDC

SEQ ID NO: 72047 - DNA, 1290 bp, Arabidopsis thaliana
  misc_feature (1)..(1290): Ceres Seq. ID no. 4916263
  misc_feature (1)..(1290): Ortholog of  Ceres SEQ ID NO 13597574 as cited in SEQ ID NO 64677
  misc_feature (1)..(1290): Ortholog of  Ceres SEQ ID NO 12617417 as cited in SEQ ID NO 65089
  misc_feature (1)..(1290): Ortholog of  Ceres SEQ ID NO 13597678 as cited in SEQ ID NO 65375
  misc_feature (1)..(1290): Ortholog of  Ceres SEQ ID NO 12779098 as cited in SEQ ID NO 67698
  misc_feature (1)..(1290): Ortholog of  Ceres SEQ ID NO 13591190 as cited in SEQ ID NO 68044
atgccgcagccgcgaccggaaactatacgtggcagtttaaaacctcacatcatggtgtttccatatccagcacaaggccacttgcttcctcttctcgacttaacccatcaactctgtcttcgtggcctcacagtctccatcatcgtcactcctaaaaaccttccttacctctctcctcttctctccgctcatccatccgctgtttccgtcgtcactttacctttccctcaccatcctttaatcccttccggggttgaaaacgttaaagatctaggtggttacggaaatcccttgatcatggcttctcttcgtcagcttcgagagcctatcgtcaactggttaagttctcatccaaatccaccggtcgctctcatttctgatttcttccttggatggaccaaagatcttggtattcctcgctttgctttcttcagttctggagcattcttagcttcgattctccattttgtctctgacaagcctcatctctttgaatcaactgagcctgtctgtttatcggatcttcctcgctcccctgttttcaaaacagagcatctcccgtctttaatccctcagtctccattatcgcaagatcttgaaagtgttaaagacagtaccatgaatttttcgagttatggttgtattttcaatacttgtgagtgtctggaagaggattacatggagtatgtgaagcagaaagtgagtgagaaccgcgttttcggtgttggtccgctttcttcagtcgggttaagtaaggaagattccgtatccaatgtagacgcaaaggcattgttgagttggctagatggatgtccagatgattcagtgctctacatctgcttcggaagtcaaaaggtgttaaccaaagagcagtgtgatgatctggctcttggtctcgagaagagtatgacccgattcgtatgggtggttaagaaagacccgataccggatgggtttgaggatcgggtcgcaggtcgaggaatgattgtgagagggtgggctcctcaagtggctatgttgagtcatgtggcggttggcgggttcttaatccattgtggatggaactcggtgctggaagcgatggctagcggaacaatgatcttggcatggccaatggaagcagaccagtttgtagatgcgaggttggtagtggagcatatgggtgtggcggttagtgtatgtgaagggggtaagactgtgcctgacccgtatgagatgggtcggattatcgctgacacaatgggtgagagtggaggcgaggcgcgtgctcgggctaaggagatgggatag

SEQ ID NO: 72048 - protein, 429 aa, Arabidopsis thaliana
  peptide (1)..(429): Ceres Seq. ID no. 4916264
MPQPRPETIRGSLKPHIMVFPYPAQGHLLPLLDLTHQLCLRGLTVSIIVTPKNLPYLSPLLSAHPSAVSVVTLPFPHHPLIPSGVENVKDLGGYGNPLIMASLRQLREPIVNWLSSHPNPPVALISDFFLGWTKDLGIPRFAFFSSGAFLASILHFVSDKPHLFESTEPVCLSDLPRSPVFKTEHLPSLIPQSPLSQDLESVKDSTMNFSSYGCIFNTCECLEEDYMEYVKQKVSENRVFGVGPLSSVGLSKEDSVSNVDAKALLSWLDGCPDDSVLYICFGSQKVLTKEQCDDLALGLEKSMTRFVWVVKKDPIPDGFEDRVAGRGMIVRGWAPQVAMLSHVAVGGFLIHCGWNSVLEAMASGTMILAWPMEADQFVDARLVVEHMGVAVSVCEGGKTVPDPYEMGRIIADTMGESGGEARARAKEMG

SEQ ID NO: 72049 - protein, 412 aa, Arabidopsis thaliana
  peptide (1)..(412): Ceres Seq. ID no. 4916265
MVFPYPAQGHLLPLLDLTHQLCLRGLTVSIIVTPKNLPYLSPLLSAHPSAVSVVTLPFPHHPLIPSGVENVKDLGGYGNPLIMASLRQLREPIVNWLSSHPNPPVALISDFFLGWTKDLGIPRFAFFSSGAFLASILHFVSDKPHLFESTEPVCLSDLPRSPVFKTEHLPSLIPQSPLSQDLESVKDSTMNFSSYGCIFNTCECLEEDYMEYVKQKVSENRVFGVGPLSSVGLSKEDSVSNVDAKALLSWLDGCPDDSVLYICFGSQKVLTKEQCDDLALGLEKSMTRFVWVVKKDPIPDGFEDRVAGRGMIVRGWAPQVAMLSHVAVGGFLIHCGWNSVLEAMASGTMILAWPMEADQFVDARLVVEHMGVAVSVCEGGKTVPDPYEMGRIIADTMGESGGEARARAKEMG

SEQ ID NO: 72050 - protein, 330 aa, Arabidopsis thaliana
  peptide (1)..(330): Ceres Seq. ID no. 4916266
MASLRQLREPIVNWLSSHPNPPVALISDFFLGWTKDLGIPRFAFFSSGAFLASILHFVSDKPHLFESTEPVCLSDLPRSPVFKTEHLPSLIPQSPLSQDLESVKDSTMNFSSYGCIFNTCECLEEDYMEYVKQKVSENRVFGVGPLSSVGLSKEDSVSNVDAKALLSWLDGCPDDSVLYICFGSQKVLTKEQCDDLALGLEKSMTRFVWVVKKDPIPDGFEDRVAGRGMIVRGWAPQVAMLSHVAVGGFLIHCGWNSVLEAMASGTMILAWPMEADQFVDARLVVEHMGVAVSVCEGGKTVPDPYEMGRIIADTMGESGGEARARAKEMG

SEQ ID NO: 72051 - DNA, 801 bp, Arabidopsis thaliana
  misc_feature (1)..(801): Ceres Seq. ID no. 4916451
  misc_feature (1)..(801): Ortholog of  Ceres SEQ ID NO 13661768 as cited in SEQ ID NO 61427
  misc_feature (1)..(801): Ortholog of  Ceres SEQ ID NO 15179176 as cited in SEQ ID NO 0
atgtcttcagtttttggatctgtccatatcttggccatgatagccatacaactcctccttacacacagtgtttcatctctgaaccttaccaatgcgtatctgcaccacaaatgcagcaacactcaaggaaaatataagcaggggagcgcgttcgagaaaaatctcaacttagtcctcagtaccatcacctcgattggaaattttcgtgacggtttccgctacaccgaagaaggtgaggatcccaataacgtctttgtcatgttccagtgtcgcggcgactcctactggtccaagtgccccccttgcattagcaccgccgtctctgggcttcgtaggagatgtccaagaaataagggagcaataatatggtatgaccaatgtcttttaaagatatcttcagttgcctccttcaataagatagattatgagaacgatttctatttgtccaacccaaacaacatgagtgatcgggggttgttcaacaaggagacgtcggctctcctggagaagctggcatataaagcctccgatagaaacaacttggatggtaaacaattggtgttgtacgcagcaggggagaagagaattgggacaaagaaggtgtatgcaatggtgcagtgtacgaaagacttaatatttacaaagtgctttgagtgtttggaagggattttgaggaagtttccacagtgttgtgacggtaaacgaggagggagagttttcggtacgagctgtaactttaggtatgagttatatccttttcttagaaactacagcaacagtacaatgagagctccatattaa

SEQ ID NO: 72052 - protein, 266 aa, Arabidopsis thaliana; identical to SEQ ID NO: 71994
  peptide (1)..(266): Ceres Seq. ID no. 4916452

SEQ ID NO: 72053 - protein, 254 aa, Arabidopsis thaliana; identical to SEQ ID NO: 71995
  peptide (1)..(254): Ceres Seq. ID no. 4916453

SEQ ID NO: 72054 - protein, 180 aa, Arabidopsis thaliana
  peptide (1)..(180): Ceres Seq. ID no. 4916454
MFQCRGDSYWSKCPPCISTAVSGLRRRCPRNKGAIIWYDQCLLKISSVASFNKIDYENDFYLSNPNNMSDRGLFNKETSALLEKLAYKASDRNNLDGKQLVLYAAGEKRIGTKKVYAMVQCTKDLIFTKCFECLEGILRKFPQCCDGKRGGRVFGTSCNFRYELYPFLRNYSNSTMRAPY

SEQ ID NO: 72055 - DNA, 1485 bp, Arabidopsis thaliana
  misc_feature (1)..(1485): Ceres Seq. ID no. 4916626
  misc_feature (1)..(1485): Ortholog of  Ceres SEQ ID NO 12612314 as cited in SEQ ID NO 51420
  misc_feature (1)..(1485): Ortholog of  Ceres SEQ ID NO 14311095 as cited in SEQ ID NO 53197
atgtttccttcaatatccaatatctctttatcaccatcgtcgctgtttacagcgtacgcgtccttaaccggattcttgatgctctttagatcactgttcaatgatgaagtaccggagaggctccgatcatacatcaccgacttactcaaccggtttttcactccgaaatcaaagaatttgactatggttatcgacgagatcatcggatttaagaggaaccaagtgttcgacgcggcagaggtgtacctccggaacaaaatcggacccgagacagcccgtttacgagtaggtaaactccctaagcagaagcacttcacaatctatatcgagaaaggagaagagatcttggatactttcgagaatagcgagctgagatggacttatgttgaatcagagaacgaggcaagccaaaaagagaaacgttactacgagctcacgttcgagaagaagcttagagataaagtcatgaactcttatttgagccacgttgtagctgaatctgaggagactaagagggatctgagagcggtgaagctttatagccgagatgtgcgtgcgagcaaagatgatgacggaatggctggtgccggttggggatgtatcaatcttgagcatccatcgacattcgaaacattggcaatggacccgggtgcgaagaagaagataatcgatgatatggagaggtttttgaagagaagagagttttacaaaagagttggtaaagcttggaaacgaggttacttgttgtatgggccaccaggaactggtaaatctagtttgattgctgccatggcgaattatcttaagtttgatgtgtttgatcttgagcttagtagtatttatgaaaatgctcaactaaagagcatcttgttatcaaccacgaaccgttcgattttggttattgaggatatcgattgtagtagtgccgaggtggtagacagggaagctgatgagtatcaagaatacgaagaaggttattatggaagggtgactctatcagggcttttgaatttcgttgatgggttgtggtcaagttttggggatgagagaatcattgtgttcacgacgaatcacaaagaacggcttgaccctgctctgttacgtcctggaagaatggatatgcatatcaacatgtcttactgtacaggtttagggtttaggacattggtctctaattacctcggtttaggtggcttaaaccatcctctttgcgaggaaatcgaggcgctgatcgattccactgaggtgactccggctgagttagctgaagagttgatgcaagaagatgatactgatgttgtccttcgtggagtagttagctttgttgagaatagaaaggtcgagataagcaaaaccaaggagctggaaggttctacttgtagaaaacttgatggtgacgataaacacaatgtttcttctaccaatgatttgaagaagacgaagaagaagaagaaaggtggaaaaggaaaagcgaaaggaaactag

SEQ ID NO: 72056 - protein, 494 aa, Arabidopsis thaliana
  peptide (1)..(494): Ceres Seq. ID no. 4916627
MFPSISNISLSPSSLFTAYASLTGFLMLFRSLFNDEVPERLRSYITDLLNRFFTPKSKNLTMVIDEIIGFKRNQVFDAAEVYLRNKIGPETARLRVGKLPKQKHFTIYIEKGEEILDTFENSELRWTYVESENEASQKEKRYYELTFEKKLRDKVMNSYLSHVVAESEETKRDLRAVKLYSRDVRASKDDDGMAGAGWGCINLEHPSTFETLAMDPGAKKKIIDDMERFLKRREFYKRVGKAWKRGYLLYGPPGTGKSSLIAAMANYLKFDVFDLELSSIYENAQLKSILLSTTNRSILVIEDIDCSSAEVVDREADEYQEYEEGYYGRVTLSGLLNFVDGLWSSFGDERIIVFTTNHKERLDPALLRPGRMDMHINMSYCTGLGFRTLVSNYLGLGGLNHPLCEEIEALIDSTEVTPAELAEELMQEDDTDVVLRGVVSFVENRKVEISKTKELEGSTCRKLDGDDKHNVSSTNDLKKTKKKKKGGKGKAKGN

SEQ ID NO: 72057 - protein, 468 aa, Arabidopsis thaliana
  peptide (1)..(468): Ceres Seq. ID no. 4916628
MLFRSLFNDEVPERLRSYITDLLNRFFTPKSKNLTMVIDEIIGFKRNQVFDAAEVYLRNKIGPETARLRVGKLPKQKHFTIYIEKGEEILDTFENSELRWTYVESENEASQKEKRYYELTFEKKLRDKVMNSYLSHVVAESEETKRDLRAVKLYSRDVRASKDDDGMAGAGWGCINLEHPSTFETLAMDPGAKKKIIDDMERFLKRREFYKRVGKAWKRGYLLYGPPGTGKSSLIAAMANYLKFDVFDLELSSIYENAQLKSILLSTTNRSILVIEDIDCSSAEVVDREADEYQEYEEGYYGRVTLSGLLNFVDGLWSSFGDERIIVFTTNHKERLDPALLRPGRMDMHINMSYCTGLGFRTLVSNYLGLGGLNHPLCEEIEALIDSTEVTPAELAEELMQEDDTDVVLRGVVSFVENRKVEISKTKELEGSTCRKLDGDDKHNVSSTNDLKKTKKKKKGGKGKAKGN

SEQ ID NO: 72058 - protein, 433 aa, Arabidopsis thaliana
  peptide (1)..(433): Ceres Seq. ID no. 4916629
MVIDEIIGFKRNQVFDAAEVYLRNKIGPETARLRVGKLPKQKHFTIYIEKGEEILDTFENSELRWTYVESENEASQKEKRYYELTFEKKLRDKVMNSYLSHVVAESEETKRDLRAVKLYSRDVRASKDDDGMAGAGWGCINLEHPSTFETLAMDPGAKKKIIDDMERFLKRREFYKRVGKAWKRGYLLYGPPGTGKSSLIAAMANYLKFDVFDLELSSIYENAQLKSILLSTTNRSILVIEDIDCSSAEVVDREADEYQEYEEGYYGRVTLSGLLNFVDGLWSSFGDERIIVFTTNHKERLDPALLRPGRMDMHINMSYCTGLGFRTLVSNYLGLGGLNHPLCEEIEALIDSTEVTPAELAEELMQEDDTDVVLRGVVSFVENRKVEISKTKELEGSTCRKLDGDDKHNVSSTNDLKKTKKKKKGGKGKAKGN

SEQ ID NO: 72059 - DNA, 1632 bp, Arabidopsis thaliana
  misc_feature (1)..(1632): Ceres Seq. ID no. 4916724
  misc_feature (1)..(1632): Ortholog of  Ceres SEQ ID NO 13502874 as cited in SEQ ID NO 66298
  misc_feature (1)..(1632): Ortholog of  Ceres SEQ ID NO 12614124 as cited in SEQ ID NO 68392
atggatactttagcttcaaactcttcggatctcacgaccaagtcaagtctcggaatgtcgtcgtttaccaacatgtatctcctcacaacgcttcaagcccttgcggccctttgcttcttgatgattctcaacaaaataaagtcatcttcacgaaacaagaagttgcatcctctcccgccaggacccaccggttttccaattgttggaatgattccggcgatgcttaaaaaccgtccagttttccggtggctccacagcctcatgaaggagcttaacacggagatagcttgtgtgcgtctaggaaacactcacgtgatccctgtgacatgtcctaagattgcacgtgagatcttcaagcaacaagacgcactctttgcgtcaagaccactcacttatgctcaaaagattctctctaacggctacaaaacctgcgtgatcacaccgtttggcgaacaattcaagaagatgaggaaagtgatcatgacagagattgtttgtccagcgagacaccgttggctacacgacaatagagctgaggaaaccgatcacttgaccgcttggctctacaacatggttaagaactctgaaccagtcgatctccgttttgttacgaggcattattgtggaaatgcaatcaagaggcttatgttcgggacgaggacgttctcggagaaaaccgaagccgatggtggaccgactttggaagatatcgagcatatggatgctatgttcgaggggttagggtttacgtttgcgttttgtatatcggattatctaccgatgcttacgggattggatctaaacggacatgaaaagattatgagagaatccagtgcaattatggataaatatcacgatcctataattgatgagaggattaagatgtggagagaaggtaagagaactcagatcgaagattttctagacattttcatctctatcaaggacgaagctggccagcctttgcttaccgctgatgaaatcaaaccaaccattaaggaacttgtaatggcggcgccagacaacccatcaaacgccgtggaatgggccattgcggagatgataaacaaaccggagatcctccacaaagctatggaagagatcgatagagtcgtcggaaaagaaagattcgtccaagaatccgatataccaaaacttaactatgttaaagctattatccgagaagctttccgtcttcatcccgtcgccgccttcaacctcccacacgtggcactctctgatacgaccgtcgcaggttaccatattcctaaaggaagtcaagttttacttagccgttacggtcttggtcgtaaccccaaggtttggtctgatccacttagcttcaaaccagaaaggcatctcaatgagtgttcggaagtgactttgacggagaatgatctccgttttatctcgtttagtaccggaaagagaggatgtgctgctccggcgttaggtacggcgataacgaccatgatgctagcgaggcttttgcaagggtttaagtggaaactagcaggaagtgagacacgtgtcgagcttatggaatcgagtcatgatatgtttctttcgaagcctttggtgttggtcggagaattgagattgtcggaggacctttacccaatggtgaagtga

SEQ ID NO: 72060 - protein, 543 aa, Arabidopsis thaliana; identical to SEQ ID NO: 70305
  peptide (1)..(543): Ceres Seq. ID no. 4916725

SEQ ID NO: 72061 - protein, 525 aa, Arabidopsis thaliana; identical to SEQ ID NO: 70306
  peptide (1)..(525): Ceres Seq. ID no. 4916726

SEQ ID NO: 72062 - protein, 519 aa, Arabidopsis thaliana
  peptide (1)..(519): Ceres Seq. ID no. 4916727
MYLLTTLQALAALCFLMILNKIKSSSRNKKLHPLPPGPTGFPIVGMIPAMLKNRPVFRWLHSLMKELNTEIACVRLGNTHVIPVTCPKIAREIFKQQDALFASRPLTYAQKILSNGYKTCVITPFGEQFKKMRKVIMTEIVCPARHRWLHDNRAEETDHLTAWLYNMVKNSEPVDLRFVTRHYCGNAIKRLMFGTRTFSEKTEADGGPTLEDIEHMDAMFEGLGFTFAFCISDYLPMLTGLDLNGHEKIMRESSAIMDKYHDPIIDERIKMWREGKRTQIEDFLDIFISIKDEAGQPLLTADEIKPTIKELVMAAPDNPSNAVEWAIAEMINKPEILHKAMEEIDRVVGKERFVQESDIPKLNYVKAIIREAFRLHPVAAFNLPHVALSDTTVAGYHIPKGSQVLLSRYGLGRNPKVWSDPLSFKPERHLNECSEVTLTENDLRFISFSTGKRGCAAPALGTAITTMMLARLLQGFKWKLAGSETRVELMESSHDMFLSKPLVLVGELRLSEDLYPMVK

SEQ ID NO: 72063 - DNA, 543 bp, Arabidopsis thaliana
  misc_feature (1)..(543): Ceres Seq. ID no. 4916807
  misc_feature (1)..(543): Ortholog of  Ceres SEQ ID NO 14309870 as cited in SEQ ID NO 20595
atgcttcagcttgaggccttttcactagccttagagaagctagatgcagacgtccctagacccaagctccaatttgtgggaagttgtagaaacaattcagatgaagaacgtctgcagaaattgaaagacagagcagtggaactaaaagtagatggagacgtgcaattctataaaaatgccatgtacagagaactagtggaactgttaggaaatgcagttgcaggactgcatgggatgatagatgaacactttggtataagtgttgttgagtacatggctgctggtgcaatcccaatagctcacaactcagctggacctaaaatggacattgtgttggaagaagacggacaaaaaaccgggtttcttgctgagactgtggaggaatacgctgaagcgatccttgagattgtgaagatgaatgaaacagagaggcttaaaatggctgaatctgctagaaaacgagcggcaaggttctctgaacaacggttttgtgaggacttcaaaactgcgattcgacccattttcacaggtcctcttaaatga

SEQ ID NO: 72064 - protein, 180 aa, Arabidopsis thaliana
  peptide (1)..(180): Ceres Seq. ID no. 4916808
MLQLEAFSLALEKLDADVPRPKLQFVGSCRNNSDEERLQKLKDRAVELKVDGDVQFYKNAMYRELVELLGNAVAGLHGMIDEHFGISVVEYMAAGAIPIAHNSAGPKMDIVLEEDGQKTGFLAETVEEYAEAILEIVKMNETERLKMAESARKRAARFSEQRFCEDFKTAIRPIFTGPLK

SEQ ID NO: 72065 - protein, 120 aa, Arabidopsis thaliana
  peptide (1)..(120): Ceres Seq. ID no. 4916809
MYRELVELLGNAVAGLHGMIDEHFGISVVEYMAAGAIPIAHNSAGPKMDIVLEEDGQKTGFLAETVEEYAEAILEIVKMNETERLKMAESARKRAARFSEQRFCEDFKTAIRPIFTGPLK

SEQ ID NO: 72066 - protein, 102 aa, Arabidopsis thaliana
  peptide (1)..(102): Ceres Seq. ID no. 4916810
MIDEHFGISVVEYMAAGAIPIAHNSAGPKMDIVLEEDGQKTGFLAETVEEYAEAILEIVKMNETERLKMAESARKRAARFSEQRFCEDFKTAIRPIFTGPLK

SEQ ID NO: 72067 - DNA, 1095 bp, Arabidopsis thaliana
  misc_feature (1)..(1095): Ceres Seq. ID no. 4916967
  misc_feature (1)..(1095): Ortholog of  Ceres SEQ ID NO 13595351 as cited in SEQ ID NO 55934
  misc_feature (1)..(1095): Ortholog of  Ceres SEQ ID NO 13639645 as cited in SEQ ID NO 57488
atgaaggaagaacaatgggcaccagtgatagtaatgttaatatcaagtgttgcaatgggatcagtgaacgctctcgttaagaaagcacttgatgttggtgttaaccatatgatctttggtgcttatagaatggctatttctgctctaatcttggttccgttttcttatatttgggagaggaaaacaaggccacaactaacgttcatgcttttgtgcgaacatttcatcagcggattacttggggcaagtttgatgcaatttttctttttacttgggctttcgtacacgtcagcaactgtttcgatggctctagttagcatgttacctgctatcacctttgcgttagcccttattttccggatagagaatgcgcaaaacctaaagagcaaagcaggcgtgctcaaagtaatgggaaccctaatttgcataatgggagcaatgttgttgacattttacaaaggcccagagttatcaaaccctcattctcatccacaagctcgtcacaacaacaacaataacaatggtcacgaccaaacaaagaaatggcttctaggctgtctttatttagtcattgggacagtgttgttgtctctatggatgttgtttcaagggaaattaagctttaagtatcctggaaataaatactcaagcacttgtctcatgtcagtcttcgcatcatttcaatgtgctattttgagtctttataaaagtagagacgtcaaagattggatcattgaagataaattcgtcattttggtcaccctttacgctggaatagtgggacaagcgatgtcgacagtggtaacgtcatggtccataaaaatgacaggagcagttttcgtctcaacattcagccccgtcagcctcgtcgccgctacgttattcgatttcctcatcttacactctcctttataccttggcagcatacttggatcagtagtgactataactggcctctacgtttttctttggggaaggaagaatgagacagatcagtctgtttcgaagactttgaacagttcccagttttctcagaataaggataacgaagaccatacaatagcaaatcataaggatactaatttgcccgtttga

SEQ ID NO: 72068 - protein, 364 aa, Arabidopsis thaliana; identical to SEQ ID NO: 45410
  peptide (1)..(364): Ceres Seq. ID no. 4916968

SEQ ID NO: 72069 - protein, 353 aa, Arabidopsis thaliana
  peptide (1)..(353): Ceres Seq. ID no. 4916969
MLISSVAMGSVNALVKKALDVGVNHMIFGAYRMAISALILVPFSYIWERKTRPQLTFMLLCEHFISGLLGASLMQFFFLLGLSYTSATVSMALVSMLPAITFALALIFRIENAQNLKSKAGVLKVMGTLICIMGAMLLTFYKGPELSNPHSHPQARHNNNNNNGHDQTKKWLLGCLYLVIGTVLLSLWMLFQGKLSFKYPGNKYSSTCLMSVFASFQCAILSLYKSRDVKDWIIEDKFVILVTLYAGIVGQAMSTVVTSWSIKMTGAVFVSTFSPVSLVAATLFDFLILHSPLYLGSILGSVVTITGLYVFLWGRKNETDQSVSKTLNSSQFSQNKDNEDHTIANHKDTNLPV

SEQ ID NO: 72070 - protein, 346 aa, Arabidopsis thaliana
  peptide (1)..(346): Ceres Seq. ID no. 4916970
MGSVNALVKKALDVGVNHMIFGAYRMAISALILVPFSYIWERKTRPQLTFMLLCEHFISGLLGASLMQFFFLLGLSYTSATVSMALVSMLPAITFALALIFRIENAQNLKSKAGVLKVMGTLICIMGAMLLTFYKGPELSNPHSHPQARHNNNNNNGHDQTKKWLLGCLYLVIGTVLLSLWMLFQGKLSFKYPGNKYSSTCLMSVFASFQCAILSLYKSRDVKDWIIEDKFVILVTLYAGIVGQAMSTVVTSWSIKMTGAVFVSTFSPVSLVAATLFDFLILHSPLYLGSILGSVVTITGLYVFLWGRKNETDQSVSKTLNSSQFSQNKDNEDHTIANHKDTNLPV

SEQ ID NO: 72071 - DNA, 627 bp, Arabidopsis thaliana
  misc_feature (1)..(627): Ceres Seq. ID no. 4917031
  misc_feature (1)..(627): Ortholog of  Ceres SEQ ID NO 14316060 as cited in SEQ ID NO 52465
  misc_feature (1)..(627): Ortholog of  Ceres SEQ ID NO 13664032 as cited in SEQ ID NO 67527
atgaccagctcagtcgtagtagccggcgccggtgacaagaacaatggtatcgtggtccagcagcaaccaccatgtgtggctcgtgagcaagaccaatacatgccaatcgcaaacgtcataagaatcatgcgtaaaaccttaccgtctcacgccaaaatctctgacgacgccaaagaaacgattcaagaatgtgtctccgagtacatcagcttcgtgaccggtgaagccaacgagcgttgccaacgtgagcaacgtaagaccataactgctgaagatatcctttgggctatgagcaagcttgggttcgataactacgtggaccccctcaccgtgttcattaaccggtaccgtgagatagagaccgatcgtggttctgcacttagaggtgagccaccgtcgttgagacaaacctatggaggaaatggtattgggtttcacggcccatctcatggcctacctcctccgggtccttatggttatggtatgttggaccaatccatggttatgggaggtggtcggtactaccaaaacgggtcgtcgggtcaagatgaatccagtgttggtggtggctcttcgtcttccattaacggaatgccggcttttgaccattatggtcagtataagtga

SEQ ID NO: 72072 - protein, 208 aa, Arabidopsis thaliana
  peptide (1)..(208): Ceres Seq. ID no. 4917032
MTSSVVVAGAGDKNNGIVVQQQPPCVAREQDQYMPIANVIRIMRKTLPSHAKISDDAKETIQECVSEYISFVTGEANERCQREQRKTITAEDILWAMSKLGFDNYVDPLTVFINRYREIETDRGSALRGEPPSLRQTYGGNGIGFHGPSHGLPPPGPYGYGMLDQSMVMGGGRYYQNGSSGQDESSVGGGSSSSINGMPAFDHYGQYK

SEQ ID NO: 72073 - protein, 175 aa, Arabidopsis thaliana
  peptide (1)..(175): Ceres Seq. ID no. 4917033
MPIANVIRIMRKTLPSHAKISDDAKETIQECVSEYISFVTGEANERCQREQRKTITAEDILWAMSKLGFDNYVDPLTVFINRYREIETDRGSALRGEPPSLRQTYGGNGIGFHGPSHGLPPPGPYGYGMLDQSMVMGGGRYYQNGSSGQDESSVGGGSSSSINGMPAFDHYGQYK

SEQ ID NO: 72074 - protein, 166 aa, Arabidopsis thaliana
  peptide (1)..(166): Ceres Seq. ID no. 4917034
MRKTLPSHAKISDDAKETIQECVSEYISFVTGEANERCQREQRKTITAEDILWAMSKLGFDNYVDPLTVFINRYREIETDRGSALRGEPPSLRQTYGGNGIGFHGPSHGLPPPGPYGYGMLDQSMVMGGGRYYQNGSSGQDESSVGGGSSSSINGMPAFDHYGQYK

SEQ ID NO: 72075 - DNA, 681 bp, Arabidopsis thaliana
  misc_feature (1)..(681): Ceres Seq. ID no. 4917212
  misc_feature (1)..(681): Ortholog of  Ceres SEQ ID NO 14308080 as cited in SEQ ID NO 55218
atgaattcatttcctgcacaaaaccttatgctatctgctacaaacgcaaacaaggactcaggcttgcgtacgtctaatgctcattggttacattcatgtatcgccgttccaaagaccacaggcattgatctttctcaggaacctcctgctgaaggtgtgatggtgcctcaatctcatttgtttcctcctcctattagagattccagaaacgatactgaaactgtgaaacagaagtccgtaaatcagtctccttcgaaagctttgaagccaaaaccgcaaaggaagaaacgctctgtatccaacaagtcaaagaaaacacctagcataccagaaacaaaacgtgagaaaaagaatctggacatcaacattgacatctcaagctttgatacttctggggttcctcctcctgtatgttcatgtacaggcgtttcaagggtttgctacaaatggggcatgggcggttggcaatcctcatgttgtaccatcagcatatcgacatacccactacccatgagcacaacaagacctggagctcgtcttgcaggaagaaaaatgagcaatggtgcttatgttaagctccttgcgaggcttgcggacgaaggctatgacctctctcaccctcttgatctcaagaaccattgggccagacacggtactaacaagtttgtgaccatcaagtag

SEQ ID NO: 72076 - protein, 226 aa, Arabidopsis thaliana
  peptide (1)..(226): Ceres Seq. ID no. 4917213
MNSFPAQNLMLSATNANKDSGLRTSNAHWLHSCIAVPKTTGIDLSQEPPAEGVMVPQSHLFPPPIRDSRNDTETVKQKSVNQSPSKALKPKPQRKKRSVSNKSKKTPSIPETKREKKNLDINIDISSFDTSGVPPPVCSCTGVSRVCYKWGMGGWQSSCCTISISTYPLPMSTTRPGARLAGRKMSNGAYVKLLARLADEGYDLSHPLDLKNHWARHGTNKFVTIK

SEQ ID NO: 72077 - protein, 217 aa, Arabidopsis thaliana
  peptide (1)..(217): Ceres Seq. ID no. 4917214
MLSATNANKDSGLRTSNAHWLHSCIAVPKTTGIDLSQEPPAEGVMVPQSHLFPPPIRDSRNDTETVKQKSVNQSPSKALKPKPQRKKRSVSNKSKKTPSIPETKREKKNLDINIDISSFDTSGVPPPVCSCTGVSRVCYKWGMGGWQSSCCTISISTYPLPMSTTRPGARLAGRKMSNGAYVKLLARLADEGYDLSHPLDLKNHWARHGTNKFVTIK

SEQ ID NO: 72078 - protein, 173 aa, Arabidopsis thaliana
  peptide (1)..(173): Ceres Seq. ID no. 4917215
MVPQSHLFPPPIRDSRNDTETVKQKSVNQSPSKALKPKPQRKKRSVSNKSKKTPSIPETKREKKNLDINIDISSFDTSGVPPPVCSCTGVSRVCYKWGMGGWQSSCCTISISTYPLPMSTTRPGARLAGRKMSNGAYVKLLARLADEGYDLSHPLDLKNHWARHGTNKFVTIK

SEQ ID NO: 72079 - DNA, 489 bp, Arabidopsis thaliana
  misc_feature (1)..(489): Ceres Seq. ID no. 4917233
  misc_feature (1)..(489): Ortholog of  Ceres SEQ ID NO 13595497 as cited in SEQ ID NO 51127
atgaatcggttaccgtcgtctgaagacggagacgatgaagaattcagtcacgatgatggctctgctcctccgcgaaagaaactccgtctaaccagagaacagtcacgtcttcttgaagatagtttcagacagaatcatacccttaatcccaaacaaaaggaagtacttgccaagcatttgatgctacggccaagacaaattgaagtttggtttcaaaaccgtagagcaaggagcaaattgaagcaaaccgagatggaatgcgagtatctcaaaaggtggtttggttcattaacggaagaaaaccacaggctccatagagaagtagaagagcttagagccatgaaggttggcccaacaacggtgaactctgcctcgagccttactatgtgtcctcgctgcgagcgagttacccctgccgcgagcccttcgagggcggtggtgccggttccggctaagaaaacgtttccgccgcaagagcgtgatcgttga

SEQ ID NO: 72080 - protein, 162 aa, Arabidopsis thaliana
  peptide (1)..(162): Ceres Seq. ID no. 4917234
MNRLPSSEDGDDEEFSHDDGSAPPRKKLRLTREQSRLLEDSFRQNHTLNPKQKEVLAKHLMLRPRQIEVWFQNRRARSKLKQTEMECEYLKRWFGSLTEENHRLHREVEELRAMKVGPTTVNSASSLTMCPRCERVTPAASPSRAVVPVPAKKTFPPQERDR

SEQ ID NO: 72081 - protein, 102 aa, Arabidopsis thaliana
  peptide (1)..(102): Ceres Seq. ID no. 4917235
MLRPRQIEVWFQNRRARSKLKQTEMECEYLKRWFGSLTEENHRLHREVEELRAMKVGPTTVNSASSLTMCPRCERVTPAASPSRAVVPVPAKKTFPPQERDR

SEQ ID NO: 72082 - DNA, 1431 bp, Arabidopsis thaliana
  misc_feature (1)..(1431): Ceres Seq. ID no. 4917266
  misc_feature (1)..(1431): Ortholog of  Ceres SEQ ID NO 13503610 as cited in SEQ ID NO 62416
  misc_feature (1)..(1431): Ortholog of  Ceres SEQ ID NO 13657610 as cited in SEQ ID NO 66165
  misc_feature (1)..(1431): Ortholog of  Ceres SEQ ID NO 13598312 as cited in SEQ ID NO 68448
  misc_feature (1)..(1431): Ortholog of  Ceres SEQ ID NO 13596100 as cited in SEQ ID NO 68573
atggttttcttcaagatcctctttatctctttaatggcaggattagccatgaaaggatctaagatcaacgtagaagatctccaaaagttctccctccaccatacacagaacaacctccaaaccataagccttctattgtttcttgtcgtttttgtgtggatcctctacatgttaacccgacctaaacccgtttaccttgttgatttctcctgctaccttccaccgtcgcatctcaaggtcagtatccaaaccctaatgggacacgcaagacgtgcaagagaagcaggcatgtgttggaagaacaaagagagcgaccatttagttgacttccaggagaagattcttgaacgttccggtcttggtcaagaaacctacatccccgagggtcttcagtgcttcccacttcagcaaggcatgggtgcttcacgtaaagagacggaagaagtaatcttcggagctcttgacaatctttttcgcaacaccggtgtaaaacctgatgatatcggtatattggtggtgaattctagcacgtttaatccaactccatcactcgcctccatgattgtgaacaagtacaaactcagagacaacatcaagagtttgaatcttggagggatgggttgcagtgccggagttatagctgttgatgtcgctaagggattactacaagttcataggaacacttatgctattgtagtaagcacagagaacatcactcagaacttatacttggggaaaaacaaatcaatgctagtcacaaactgtttgttccgcgttggtggtgctgcggttctgctttcaaacagatctagagaccgtaaccgcgccaaatacgagcttgttcacaccgtacggatccataccggatcagatgataggtcgttcgaatgtgcgacacaagaagaggatgaagatggtataattggagttaccttgacaaagaatctacctatggtggctgcaaggactcttaagataaatatcgcaactttgggtcctcttgtacttccattaaaagagaagctagccttctttattacttttgtcaagaagaagtatttcaagccagagttaaggaattatacaccagatttcaagcttgcctttgagcatttctgtatccacgctggtggaagagctctaatagatgagctggagaagaaccttaagctttctccgttacacgtagaggcgtcaagaatgacactacacaggtttggtaacacttcttctagctcaatctggtacgagttagcttatacagaagctaaaggaaggatgaaggaaggagataggatttggcagattgctttggggtcaggttttaagtgtaacagttcagtatgggtggctctgcgagacgttaagccttcagctaacagtccatgggaagactgtatggatagatatccggttgagattgatatttaa

SEQ ID NO: 72083 - protein, 476 aa, Arabidopsis thaliana; identical to SEQ ID NO: 70945
  peptide (1)..(476): Ceres Seq. ID no. 4917267

SEQ ID NO: 72084 - protein, 465 aa, Arabidopsis thaliana; identical to SEQ ID NO: 70946
  peptide (1)..(465): Ceres Seq. ID no. 4917268

SEQ ID NO: 72085 - protein, 460 aa, Arabidopsis thaliana
  peptide (1)..(460): Ceres Seq. ID no. 4917269
MKGSKINVEDLQKFSLHHTQNNLQTISLLLFLVVFVWILYMLTRPKPVYLVDFSCYLPPSHLKVSIQTLMGHARRAREAGMCWKNKESDHLVDFQEKILERSGLGQETYIPEGLQCFPLQQGMGASRKETEEVIFGALDNLFRNTGVKPDDIGILVVNSSTFNPTPSLASMIVNKYKLRDNIKSLNLGGMGCSAGVIAVDVAKGLLQVHRNTYAIVVSTENITQNLYLGKNKSMLVTNCLFRVGGAAVLLSNRSRDRNRAKYELVHTVRIHTGSDDRSFECATQEEDEDGIIGVTLTKNLPMVAARTLKINIATLGPLVLPLKEKLAFFITFVKKKYFKPELRNYTPDFKLAFEHFCIHAGGRALIDELEKNLKLSPLHVEASRMTLHRFGNTSSSSIWYELAYTEAKGRMKEGDRIWQIALGSGFKCNSSVWVALRDVKPSANSPWEDCMDRYPVEIDI

SEQ ID NO: 72086 - DNA, 1047 bp, Arabidopsis thaliana
  misc_feature (1)..(1047): Ceres Seq. ID no. 4917323
  misc_feature (1)..(1047): Ortholog of  Ceres SEQ ID NO 14308061 as cited in SEQ ID NO 55155
  misc_feature (1)..(1047): Ortholog of  Ceres SEQ ID NO 13654238 as cited in SEQ ID NO 67874
atgaaaggtctcttcaagaacaaatcacgtcttcctggtgaaatcgtacgtcagactcgagatctcatcgctttagcggaatccgaagaagaagaaaccgatgcgagaaactcgaaaaggttagggatttgtgcggagttgtgtcgaaacattagagatttgaaatcgattctttatggtaatggtgaagctgagcctgttcctgaagcttgtcttttgttaactcaagagtttttccgagcagacacgcttcgtcctttgatcaaatctataccaaaacttgacctagaagcaagaaaagacgcgacacagattgtcgcgaatcttcagaagcaacaagtcgaatttcgactcgttgcttctgaatatcttgaatcgaacttagatgttatcgattcgttagtcgaaggtatcgatcacgaccatgagctggcgttgcattacacgggaatgcttaaagaatgtgtgcggcatcaggttgttgcaaagtacatactcgaatcgaagaatttggagaagtttttcgattatgttcagcttccgtatttcgatgtagctaccgatgctagcaagatcttcagagagcttttgacgaggcataaatcgactgtagcggagtatcttgcgaagaactacgaatggtttttcgcagagtataacaccaagttgttggagaaaggaagctattttacgaagagacaagcgtcgaaattgcttggagatgtgttgatggatcgttcgaattcaggtgtgatggtaaagtatgtgagcagtttggataatttgagaatcatgatgaatcttttaagagaaccaaccaagaacattcagttagaagcatttcatatctttaaactctttgtggcaaacgagaacaaacctgaggatatcgtggcgattctcgtggcgaatcggaccaagattcttcgtttgtttgctgatttgaaacctgagaaagaagatgtaggttttgaaactgataaagcattggttatgaatgagattgctacactttctcttctcgatatcaaaaccgcagatcgataa

SEQ ID NO: 72087 - protein, 348 aa, Arabidopsis thaliana
  peptide (1)..(348): Ceres Seq. ID no. 4917324
MKGLFKNKSRLPGEIVRQTRDLIALAESEEEETDARNSKRLGICAELCRNIRDLKSILYGNGEAEPVPEACLLLTQEFFRADTLRPLIKSIPKLDLEARKDATQIVANLQKQQVEFRLVASEYLESNLDVIDSLVEGIDHDHELALHYTGMLKECVRHQVVAKYILESKNLEKFFDYVQLPYFDVATDASKIFRELLTRHKSTVAEYLAKNYEWFFAEYNTKLLEKGSYFTKRQASKLLGDVLMDRSNSGVMVKYVSSLDNLRIMMNLLREPTKNIQLEAFHIFKLFVANENKPEDIVAILVANRTKILRLFADLKPEKEDVGFETDKALVMNEIATLSLLDIKTADR

SEQ ID NO: 72088 - protein, 198 aa, Arabidopsis thaliana
  peptide (1)..(198): Ceres Seq. ID no. 4917325
MLKECVRHQVVAKYILESKNLEKFFDYVQLPYFDVATDASKIFRELLTRHKSTVAEYLAKNYEWFFAEYNTKLLEKGSYFTKRQASKLLGDVLMDRSNSGVMVKYVSSLDNLRIMMNLLREPTKNIQLEAFHIFKLFVANENKPEDIVAILVANRTKILRLFADLKPEKEDVGFETDKALVMNEIATLSLLDIKTADR

SEQ ID NO: 72089 - DNA, 1074 bp, Arabidopsis thaliana
  misc_feature (1)..(1074): Ceres Seq. ID no. 4917434
  misc_feature (1)..(1074): Ortholog of  Ceres SEQ ID NO 13593889 as cited in SEQ ID NO 53305
  misc_feature (1)..(1074): Ortholog of  Ceres SEQ ID NO 13581959 as cited in SEQ ID NO 56156
atgatgcagagtgacctcttgaaagagcgaggtgttgatgattcatctccttactctccagatgaaaagaatgtctctggtttccagcttgattcccatgacctagtgtctggtgaatgttcgacagtatatccgcggaagtcaatatcattgccgtcatctccgcgaagctatcaaattcaattatctgaaagaagtgaacattcacctcaagaaataagccacatttggaatgaagtgctggagtctccaatgttccagaataaacctttgttaccatttgaagaatggaacatagatttctccaagttgaaagttggggcttctgttgggagtggaacttctggagtagtatgtcgtggcgtctggaataaaactgaagttgcgatcaagatatttcttggacaacagcttacagctgagaacatgaaagttttctgcaatgagatatctattcttagccgtcttcaacatcccaatgttattctgctccttggagcatgcacaaagcctcctcagttatcactggtcacagagtatatgagtacggggtccttgtatgatgtgatccgtaccagaaaaaaggagttgagctggcaaaggaaactaaagattctggctgaaatttgcaggggtttgatgtacatacacaagatggggatagtccaccgtgatctaaccagtgcgaactgcctgttaaacaagtcgatagtcaagatctgtgattttgggctctcgagaaggatgacaggtacggcagtgaaagatactgaagctgcaggaactcctgagtggatggctcctgaacttatccgcaatgaacccgtcacagaaaaaagcgacatctttagctttggtgttataatgtgggaacttagcactctatccaagccctggaaaggagtcccaaaagaaaaagtcattcatatcgttgcaaacgaaggagcccggctcaaaatacctgaaggaccactacagaagcttattgcagattgttggtcggaaccagagcaaaggccgagctgtaaagagatactgcaccgtcttaagacctgcgagattccgatttgctga

SEQ ID NO: 72090 - protein, 357 aa, Arabidopsis thaliana
  peptide (1)..(357): Ceres Seq. ID no. 4917435
MMQSDLLKERGVDDSSPYSPDEKNVSGFQLDSHDLVSGECSTVYPRKSISLPSSPRSYQIQLSERSEHSPQEISHIWNEVLESPMFQNKPLLPFEEWNIDFSKLKVGASVGSGTSGVVCRGVWNKTEVAIKIFLGQQLTAENMKVFCNEISILSRLQHPNVILLLGACTKPPQLSLVTEYMSTGSLYDVIRTRKKELSWQRKLKILAEICRGLMYIHKMGIVHRDLTSANCLLNKSIVKICDFGLSRRMTGTAVKDTEAAGTPEWMAPELIRNEPVTEKSDIFSFGVIMWELSTLSKPWKGVPKEKVIHIVANEGARLKIPEGPLQKLIADCWSEPEQRPSCKEILHRLKTCEIPIC

SEQ ID NO: 72091 - protein, 356 aa, Arabidopsis thaliana
  peptide (1)..(356): Ceres Seq. ID no. 4917436
MQSDLLKERGVDDSSPYSPDEKNVSGFQLDSHDLVSGECSTVYPRKSISLPSSPRSYQIQLSERSEHSPQEISHIWNEVLESPMFQNKPLLPFEEWNIDFSKLKVGASVGSGTSGVVCRGVWNKTEVAIKIFLGQQLTAENMKVFCNEISILSRLQHPNVILLLGACTKPPQLSLVTEYMSTGSLYDVIRTRKKELSWQRKLKILAEICRGLMYIHKMGIVHRDLTSANCLLNKSIVKICDFGLSRRMTGTAVKDTEAAGTPEWMAPELIRNEPVTEKSDIFSFGVIMWELSTLSKPWKGVPKEKVIHIVANEGARLKIPEGPLQKLIADCWSEPEQRPSCKEILHRLKTCEIPIC

SEQ ID NO: 72092 - protein, 273 aa, Arabidopsis thaliana
  peptide (1)..(273): Ceres Seq. ID no. 4917437
MFQNKPLLPFEEWNIDFSKLKVGASVGSGTSGVVCRGVWNKTEVAIKIFLGQQLTAENMKVFCNEISILSRLQHPNVILLLGACTKPPQLSLVTEYMSTGSLYDVIRTRKKELSWQRKLKILAEICRGLMYIHKMGIVHRDLTSANCLLNKSIVKICDFGLSRRMTGTAVKDTEAAGTPEWMAPELIRNEPVTEKSDIFSFGVIMWELSTLSKPWKGVPKEKVIHIVANEGARLKIPEGPLQKLIADCWSEPEQRPSCKEILHRLKTCEIPIC

SEQ ID NO: 72093 - DNA, 1533 bp, Arabidopsis thaliana
  misc_feature (1)..(1533): Ceres Seq. ID no. 4917453
  misc_feature (1)..(1533): Ortholog of  Ceres SEQ ID NO 15177304 as cited in SEQ ID NO 52668
atgttcatcgagagcttcaaagtagagagtccaaatgtcaaatacacagagaatgagatcaattcggtgtacgattacgaaacaacagaggtcgtccacgagaatcgtaacggtacatatcaatgggtcgtgaagccaaagactgtcaaatacgatttcaaaacagacactcgtgtccccaaattaggggttatgcttgttggttggggaggaaacaatggatcaacactaaccgctggtgtcattgctaacaaagaaggaatatcgtgggcgactaaagacaaagtgcaacaagctaattactttggttcacttactcaagcttcatcgattcgtgttggctcttacaatggtgaagagatctatgctcctttcaagagtcttcttccaatggtgaatccagaggatgttgtgtttggtggttgggatataagtgacatgaatttagcagacgctatggctagagctagagttcttgatattgatctgcagaaacaacttagaccttacatggagaacatgatcccacttcctggtatctatgaccctgatttcatcgctgctaatcaaggttcacgtgctaatagcgtgatcaaaggtaccaagaaggaacaagttgatcacatcatcaaggacatgagggagtttaaggagaagaacaaagtggataagttggttgtgttatggactgcaaacacagagcgttatagcaatgtgattgtaggacttaacgatacgacggagaatctattggcttctgttgaaaaggacgagtctgagatctcgccgtctacgttgtatgcgattgcttgtgttcttgaaggcattcctttcatcaatgggagtcctcagaatacttttgtccccggtcttatcgaattggctatatcgaagaattgtttgattggtggggatgatttcaagagtggtcagactaagatgaaatccgttttggttgatttccttgttggagctggcattaagcctacttcgattgtgagctataatcatttgggaaacaacgacgggatgaacctctcagcgccacagactttccgctctaaggagatttcaaagagcaatgttgtagacgacatggtagctagtaatggcatcctctttgagcctggtgaacaccctgaccatgtcgttgtcatcaagtatgtgccatatgttgcggatagtaaaagagcaatggatgagtacacgtctgagatattcatgggagggaggaacactatagtgttgcataacacttgtgaggactctctcttggctgcaccaattatcttggatcttgtccttctcgctgaactcagcaccagaatccaatttaaagctgaaggagaggggaagtttcactctttccacccggtagctaccatactcagttacctcacaaaggcacctcttgtaccgcccggaacaccggtggttaacgctctgtcgaagcagcgggcaatgctggaaaacattcttagggcatgtgttgggcttgcgccagagaacaacatgatcatggagtacaagtga

SEQ ID NO: 72094 - protein, 510 aa, Arabidopsis thaliana; identical to SEQ ID NO: 44889
  peptide (1)..(510): Ceres Seq. ID no. 4917454

SEQ ID NO: 72095 - protein, 446 aa, Arabidopsis thaliana
  peptide (1)..(446): Ceres Seq. ID no. 4917455
MLVGWGGNNGSTLTAGVIANKEGISWATKDKVQQANYFGSLTQASSIRVGSYNGEEIYAPFKSLLPMVNPEDVVFGGWDISDMNLADAMARARVLDIDLQKQLRPYMENMIPLPGIYDPDFIAANQGSRANSVIKGTKKEQVDHIIKDMREFKEKNKVDKLVVLWTANTERYSNVIVGLNDTTENLLASVEKDESEISPSTLYAIACVLEGIPFINGSPQNTFVPGLIELAISKNCLIGGDDFKSGQTKMKSVLVDFLVGAGIKPTSIVSYNHLGNNDGMNLSAPQTFRSKEISKSNVVDDMVASNGILFEPGEHPDHVVVIKYVPYVADSKRAMDEYTSEIFMGGRNTIVLHNTCEDSLLAAPIILDLVLLAELSTRIQFKAEGEGKFHSFHPVATILSYLTKAPLVPPGTPVVNALSKQRAMLENILRACVGLAPENNMIMEYK

SEQ ID NO: 72096 - protein, 380 aa, Arabidopsis thaliana
  peptide (1)..(380): Ceres Seq. ID no. 4917456
MVNPEDVVFGGWDISDMNLADAMARARVLDIDLQKQLRPYMENMIPLPGIYDPDFIAANQGSRANSVIKGTKKEQVDHIIKDMREFKEKNKVDKLVVLWTANTERYSNVIVGLNDTTENLLASVEKDESEISPSTLYAIACVLEGIPFINGSPQNTFVPGLIELAISKNCLIGGDDFKSGQTKMKSVLVDFLVGAGIKPTSIVSYNHLGNNDGMNLSAPQTFRSKEISKSNVVDDMVASNGILFEPGEHPDHVVVIKYVPYVADSKRAMDEYTSEIFMGGRNTIVLHNTCEDSLLAAPIILDLVLLAELSTRIQFKAEGEGKFHSFHPVATILSYLTKAPLVPPGTPVVNALSKQRAMLENILRACVGLAPENNMIMEYK

SEQ ID NO: 72097 - DNA, 1146 bp, Arabidopsis thaliana
  misc_feature (1)..(1146): Ceres Seq. ID no. 4917476
  misc_feature (1)..(1146): Ortholog of  Ceres SEQ ID NO 13584744 as cited in SEQ ID NO 69137
atggagcaaaaagttttcccatttcaagttttagtttccgctaccaaagattttcacccgacccataaactcggtgaaggtggtttcggtcccgtcttcaagggaagattacctgacgggagagacatagcagtgaagaagctatctcaggtttcaaggcaaggcaaaaacgagtttgtgaacgaggctaagttgttggctaaagttcagcatcgcaatgttgttaatctttggggttattgtacacatggagatgataagctcttggtttatgagtatgtcgttaatgagagcctcgacaaggtcctcttcaaatccaacagaaaatcggagatagattggaagcagaggtttgagatcataacaggcattgctcgaggactgctctatctacatgaagacgcgccaaactgcatcatccacagggatattaaggctggcaatattttgctggatgaaaaatgggttcctaagattgcagattttgggatggctagactctatcaggaagatgtaacacatgtcaacactcgtgttgcaggaaccaatggttatatggcgccagagtacgtaatgcacggggttctatcggtaaaggcagacgtattcagctttggggttttggttctggagctcgtaagtggacagaagaactcgagttttagcatgagacaccctgaccagactcttcttgaatgggcatttaagttgtacaagaaaggccggaccatggagatactagaccaagatatagcagcttcagctgatccagatcaagtcaaactctgtgtacagatcggactactctgcgttcaaggcgatccgcatcaaagaccgagcatgagacgggtatctctacttctctctagaaaaccaggacatctagaagaaccggatcatcctggtgtcccgggatctagataccgtcggcgaacacaacgtccttcaggagcagcatcacttggaacattgtcgaccactggttccagcacagattctttcggttcaaacctgaacacaaacacgggaactggtgttagaggtacccccgcatcttctaaagcttcaactcggagtaatgccactagaagtgctggtcagagctctagctcagaccctcacgggaaacgacatatgagttattga

SEQ ID NO: 72098 - protein, 381 aa, Arabidopsis thaliana
  peptide (1)..(381): Ceres Seq. ID no. 4917477
MEQKVFPFQVLVSATKDFHPTHKLGEGGFGPVFKGRLPDGRDIAVKKLSQVSRQGKNEFVNEAKLLAKVQHRNVVNLWGYCTHGDDKLLVYEYVVNESLDKVLFKSNRKSEIDWKQRFEIITGIARGLLYLHEDAPNCIIHRDIKAGNILLDEKWVPKIADFGMARLYQEDVTHVNTRVAGTNGYMAPEYVMHGVLSVKADVFSFGVLVLELVSGQKNSSFSMRHPDQTLLEWAFKLYKKGRTMEILDQDIAASADPDQVKLCVQIGLLCVQGDPHQRPSMRRVSLLLSRKPGHLEEPDHPGVPGSRYRRRTQRPSGAASLGTLSTTGSSTDSFGSNLNTNTGTGVRGTPASSKASTRSNATRSAGQSSSSDPHGKRHMSY

SEQ ID NO: 72099 - protein, 218 aa, Arabidopsis thaliana
  peptide (1)..(218): Ceres Seq. ID no. 4917478
MARLYQEDVTHVNTRVAGTNGYMAPEYVMHGVLSVKADVFSFGVLVLELVSGQKNSSFSMRHPDQTLLEWAFKLYKKGRTMEILDQDIAASADPDQVKLCVQIGLLCVQGDPHQRPSMRRVSLLLSRKPGHLEEPDHPGVPGSRYRRRTQRPSGAASLGTLSTTGSSTDSFGSNLNTNTGTGVRGTPASSKASTRSNATRSAGQSSSSDPHGKRHMSY

SEQ ID NO: 72100 - protein, 196 aa, Arabidopsis thaliana
  peptide (1)..(196): Ceres Seq. ID no. 4917479
MAPEYVMHGVLSVKADVFSFGVLVLELVSGQKNSSFSMRHPDQTLLEWAFKLYKKGRTMEILDQDIAASADPDQVKLCVQIGLLCVQGDPHQRPSMRRVSLLLSRKPGHLEEPDHPGVPGSRYRRRTQRPSGAASLGTLSTTGSSTDSFGSNLNTNTGTGVRGTPASSKASTRSNATRSAGQSSSSDPHGKRHMSY

SEQ ID NO: 72101 - DNA, 1017 bp, Arabidopsis thaliana
  misc_feature (1)..(1017): Ceres Seq. ID no. 4917580
  misc_feature (1)..(1017): Ortholog of  Ceres SEQ ID NO 12608463 as cited in SEQ ID NO 60238
atgtatcctggtcaaatccctgaccttgagcttctcttcctctgccatgatagacccgccatttggaaaagagacttgaagaaaaaacgaaaggatacgtggcctcctccgccgttgtttcactactgtggtcaccgtgatgcatacgacatagttttccctgattggagcttctggggatggcctgagctgaatataaaggagtggaataaattatctgtggcactaaaagaagggaacaaaaaggtgaaatgggaagatagagttccgtacgcttattggaaaggaaaccctcatgtttctcctataagaggagatcttatgagatgtaacttctccgacaagtatgatcctatggttcgtctctatgtccaggattggaggagtgagatagaggcagggttcagaggatcgaacctagaagatcaatgtactcatagatataagatctacatagaaggaaacgcatggtcggtgagcgaaaagtatatactttcgtgtgatagtatgactctgttggttaaaccagagtactacgactttttcttccgaagtatggtcccaatgaagcatttttggcctattagacaaaacaacaaatgtggtgacctcaaatttgcagtcgaatggggcaacaacaacaccgaaaaggcacaaatcatagggagacaaggaagtgagtacatgatgaagaacctaaagatgaagtatgtgtatgattacatgttgtatgtgttacaaggctatgggaaattgatgaagttggatgtgacagtgcctgaaaatgccacggaggtttgttcagagacgatggcttgttcgattactgatggtggacggatcaggcagtgcatggacgactcgttggttatgtctccgagtgtcaaggcggcttgtgatttgccaccttcttatggagactatgagctcaagaagtttcgtaagaaacaagaaagtgcggagagaaaggttgagcagtggaccaataagtattggaacttgagagatccaaaataa

SEQ ID NO: 72102 - protein, 338 aa, Arabidopsis thaliana; identical to SEQ ID NO: 71025
  peptide (1)..(338): Ceres Seq. ID no. 4917581

SEQ ID NO: 72103 - protein, 231 aa, Arabidopsis thaliana
  peptide (1)..(231): Ceres Seq. ID no. 4917582
MRCNFSDKYDPMVRLYVQDWRSEIEAGFRGSNLEDQCTHRYKIYIEGNAWSVSEKYILSCDSMTLLVKPEYYDFFFRSMVPMKHFWPIRQNNKCGDLKFAVEWGNNNTEKAQIIGRQGSEYMMKNLKMKYVYDYMLYVLQGYGKLMKLDVTVPENATEVCSETMACSITDGGRIRQCMDDSLVMSPSVKAACDLPPSYGDYELKKFRKKQESAERKVEQWTNKYWNLRDPK

SEQ ID NO: 72104 - protein, 220 aa, Arabidopsis thaliana
  peptide (1)..(220): Ceres Seq. ID no. 4917583
MVRLYVQDWRSEIEAGFRGSNLEDQCTHRYKIYIEGNAWSVSEKYILSCDSMTLLVKPEYYDFFFRSMVPMKHFWPIRQNNKCGDLKFAVEWGNNNTEKAQIIGRQGSEYMMKNLKMKYVYDYMLYVLQGYGKLMKLDVTVPENATEVCSETMACSITDGGRIRQCMDDSLVMSPSVKAACDLPPSYGDYELKKFRKKQESAERKVEQWTNKYWNLRDPK

SEQ ID NO: 72105 - DNA, 1074 bp, Arabidopsis thaliana
  misc_feature (1)..(1074): Ceres Seq. ID no. 4917600
  misc_feature (1)..(1074): Ortholog of  Ceres SEQ ID NO 13598368 as cited in SEQ ID NO 62140
atggagtatcaggggcttcaaaattgggacggtcttttagacccattggacgacaatctccggcgagagattctccggtacggtcaatttgtcgaatcggcttatcaagcatttgatttcgatccttcctctccaacctacgggacatgccggtttccgaggagcacgttgttagagcgatccggtttacccaactccggttatcgactaacgaagaaccttcgtgccacgtcaggtattaacttgccacgttggattgagaaagcgccaagctggatggctacacaatctagctggattggttacgtggcagtttgccaggacaaagaagagatctcgcggcttgggcgtagagacgtcgtcatctccttccgtggaaccgccacgtgtctcgagtggttagagaaccttcgcgccacgctgactcatctccctaatgggcctactggagcaaatctaaacgggtctaactctgggcccatggttgagagcgggtttttaagcttgtatacttcaggtgttcacagtttgagagacatggtaagagaagagatcgcaaggctactccaatcttacggcgacgagccgttaagtgtaacgataaccggtcacagcctcggcgctgcgatcgcgacactagcagcttacgatatcaaaacgacgtttaaacgtgcgcctatggttaccgtaatatctttcggaggtccacgtgtcggaaacagatgctttcggaaactccttgagaagcaaggcacgaaggttctaagaatcgtgaactccgacgacgtcatcaccaaagttcctggagttgttttagaaaacagagagcaagataacgttaagatgacagcgtcgataatgccgagctggatacagagacgcgtggaggagacgccgtgggtttacgctgaaatcggtaaggagcttcggctgagtagccgtgactcgccgcacttgagcagcatcaatgtggccacgtgtcatgagctgaaaacgtatttacatttggtagacgggtttgtgagctccacgtgtccattcagagaaacagctcggagagttctccatagatga

SEQ ID NO: 72106 - protein, 357 aa, Arabidopsis thaliana
  peptide (1)..(357): Ceres Seq. ID no. 4917601
MEYQGLQNWDGLLDPLDDNLRREILRYGQFVESAYQAFDFDPSSPTYGTCRFPRSTLLERSGLPNSGYRLTKNLRATSGINLPRWIEKAPSWMATQSSWIGYVAVCQDKEEISRLGRRDVVISFRGTATCLEWLENLRATLTHLPNGPTGANLNGSNSGPMVESGFLSLYTSGVHSLRDMVREEIARLLQSYGDEPLSVTITGHSLGAAIATLAAYDIKTTFKRAPMVTVISFGGPRVGNRCFRKLLEKQGTKVLRIVNSDDVITKVPGVVLENREQDNVKMTASIMPSWIQRRVEETPWVYAEIGKELRLSSRDSPHLSSINVATCHELKTYLHLVDGFVSSTCPFRETARRVLHR

SEQ ID NO: 72107 - protein, 265 aa, Arabidopsis thaliana
  peptide (1)..(265): Ceres Seq. ID no. 4917602
MATQSSWIGYVAVCQDKEEISRLGRRDVVISFRGTATCLEWLENLRATLTHLPNGPTGANLNGSNSGPMVESGFLSLYTSGVHSLRDMVREEIARLLQSYGDEPLSVTITGHSLGAAIATLAAYDIKTTFKRAPMVTVISFGGPRVGNRCFRKLLEKQGTKVLRIVNSDDVITKVPGVVLENREQDNVKMTASIMPSWIQRRVEETPWVYAEIGKELRLSSRDSPHLSSINVATCHELKTYLHLVDGFVSSTCPFRETARRVLHR

SEQ ID NO: 72108 - protein, 197 aa, Arabidopsis thaliana
  peptide (1)..(197): Ceres Seq. ID no. 4917603
MVESGFLSLYTSGVHSLRDMVREEIARLLQSYGDEPLSVTITGHSLGAAIATLAAYDIKTTFKRAPMVTVISFGGPRVGNRCFRKLLEKQGTKVLRIVNSDDVITKVPGVVLENREQDNVKMTASIMPSWIQRRVEETPWVYAEIGKELRLSSRDSPHLSSINVATCHELKTYLHLVDGFVSSTCPFRETARRVLHR

SEQ ID NO: 72109 - DNA, 1059 bp, Arabidopsis thaliana
  misc_feature (1)..(1059): Ceres Seq. ID no. 4917604
  misc_feature (1)..(1059): Ortholog of  Ceres SEQ ID NO 12636774 as cited in SEQ ID NO 372
  misc_feature (1)..(1059): Ortholog of  Ceres SEQ ID NO 13596470 as cited in SEQ ID NO 62158
  misc_feature (1)..(1059): Ortholog of  Ceres SEQ ID NO 12615466 as cited in SEQ ID NO 62761
  misc_feature (1)..(1059): Ortholog of  Ceres SEQ ID NO 12615907 as cited in SEQ ID NO 62860
  misc_feature (1)..(1059): Ortholog of  Ceres SEQ ID NO 13597295 as cited in SEQ ID NO 63743
  misc_feature (1)..(1059): Ortholog of  Ceres SEQ ID NO 12617090 as cited in SEQ ID NO 64005
  misc_feature (1)..(1059): Ortholog of  Ceres SEQ ID NO 13597439 as cited in SEQ ID NO 64081
  misc_feature (1)..(1059): Ortholog of  Ceres SEQ ID NO 13597233 as cited in SEQ ID NO 64370
  misc_feature (1)..(1059): Ortholog of  Ceres SEQ ID NO 13600370 as cited in SEQ ID NO 0
atgagtttgcttgatgattcttttacaagtgcaatgacacttaccaattcaggtgtgcctcaagtccctgatcgctacgttcttcctccttcgcaaaggccagctcttggttcaagcttaggcaccagcgagactacacttcctgtcattgatctctctcttttgcaccaacctttccttcgatccctcgcaatccacgagattagcatggcctgcaaggagtttggtttctttcaggttataaaccatggaataccatcatcagtggttaacgatgccttagatgcagcaacacagttcttcgacttacctgtggaagagaagatgcttctggtgtctgcaaacgttcatgagccagtcaggtatggcacaagccttaaccattcaacagacagagttcactactggagagatttcatcaagcattactctcatccactctcaaagtggatcgatatgtggccatcaaatcctccatgctacaaggataaagtgggcaagtatgcagaggcaacacatttgctacacaagcagttaatagaagctatctcagaaagcctgggactggagaaaaattacttacaagaagagatagaagaaggctcacaagtcatggcagtgaattgttatccagcatgcccggaacctgaaatggccttgggaatgccaccacactcagacttcagctcactgaccatcttacttcagagtagcaagggactccagataatggactgcaacaaaaactgggtttgtgtgccgtatatagaaggagctttgatagttcagctgggagatcaggtagaggtgatgagcaacggcatatacaagagcgtcattcatcgtgtaacagtgaacaaagaagtcaaaaggctatcttttgcaagtcttcacagtctacctctgcacaagaaaataagtccagcaccaaaactcgtcaacccaaacaatgcaccagcctatggagagtttagtttcaacgattttctgaactacatctcaagcaacgattttatacaagaaagattcattgacacaataaagaaaagcagttcctaa

SEQ ID NO: 72110 - protein, 352 aa, Arabidopsis thaliana; identical to SEQ ID NO: 71051
  peptide (1)..(352): Ceres Seq. ID no. 4917605

SEQ ID NO: 72111 - protein, 341 aa, Arabidopsis thaliana; identical to SEQ ID NO: 71052
  peptide (1)..(341): Ceres Seq. ID no. 4917606

SEQ ID NO: 72112 - protein, 283 aa, Arabidopsis thaliana
  peptide (1)..(283): Ceres Seq. ID no. 4917607
MACKEFGFFQVINHGIPSSVVNDALDAATQFFDLPVEEKMLLVSANVHEPVRYGTSLNHSTDRVHYWRDFIKHYSHPLSKWIDMWPSNPPCYKDKVGKYAEATHLLHKQLIEAISESLGLEKNYLQEEIEEGSQVMAVNCYPACPEPEMALGMPPHSDFSSLTILLQSSKGLQIMDCNKNWVCVPYIEGALIVQLGDQVEVMSNGIYKSVIHRVTVNKEVKRLSFASLHSLPLHKKISPAPKLVNPNNAPAYGEFSFNDFLNYISSNDFIQERFIDTIKKSSS

SEQ ID NO: 72113 - DNA, 1035 bp, Arabidopsis thaliana
  misc_feature (1)..(1035): Ceres Seq. ID no. 4917612
  misc_feature (1)..(1035): Ortholog of  Ceres SEQ ID NO 13594276 as cited in SEQ ID NO 57728
  misc_feature (1)..(1035): Ortholog of  Ceres SEQ ID NO 13594147 as cited in SEQ ID NO 58975
  misc_feature (1)..(1035): Ortholog of  Ceres SEQ ID NO 13655302 as cited in SEQ ID NO 63307
  misc_feature (1)..(1035): Ortholog of  Ceres SEQ ID NO 13597380 as cited in SEQ ID NO 64054
  misc_feature (1)..(1035): Ortholog of  Ceres SEQ ID NO 12625474 as cited in SEQ ID NO 64169
  misc_feature (1)..(1035): Ortholog of  Ceres SEQ ID NO 13597502 as cited in SEQ ID NO 64681
atgtctaaagcttgttggttagttgctgccatcatatttacagcggccacggtggtttacggacaacaagcgccgtgtttcttcgtttttggagactcaatgtccgataatggcaataataataacttgaaatccgaggcaaaagtcaacttttcaccttatggtaatgactttcctaaaggcccgaccggccgtttttcaaatggccgcactatccctgatattatcggtgaattatccggttttaaggattttataccgccattcgccgaagcatcacctgaacaagctcacaccgggatgaactacgcttccggtggaagtggacttcgtgaagaaactagcgaacacttgggagatagaatcagtataagaaagcaactacaaaatcacaagacgtccataacgaaagcgaatgtaccagcagaaagattgcaacaatgtctctacatgatcaacattggaagcaacgattacatcaacaattacttcatgtcaaagccgtacaacactaaacgacgctacactcctaaacaatacgcatattctctcattattatttaccgttcccacttaaagaatttgcaccgtctaggagcgaggaaggtggcagttttcggactcagccagattgggtgcacaccaaagataatgaagtcacacagtgacggtaaaatctgttcccgcgaagtgaatgaagcagtgaagatttttaataagaaccttgacgaccttgtcatggatttcaataagaaggtcagaggtgcaaagtttacctacgtcgatcttttctccggtggagatccccaagccttcattttcctaggatttaaggttggaggtaagagttgttgcacagtaaacccgggggaagaactttgtgtcccaaaccagccggtttgtgcaaacaggactgaatatgtcttttgggatgatcttcacagcacggaagccactaatatggtagtggcgaagggctcgttcgacggaatcataagtaaaccgtatagtatcgcccagcttgcgaaggaatag

SEQ ID NO: 72114 - protein, 344 aa, Arabidopsis thaliana
  peptide (1)..(344): Ceres Seq. ID no. 4917613
MSKACWLVAAIIFTAATVVYGQQAPCFFVFGDSMSDNGNNNNLKSEAKVNFSPYGNDFPKGPTGRFSNGRTIPDIIGELSGFKDFIPPFAEASPEQAHTGMNYASGGSGLREETSEHLGDRISIRKQLQNHKTSITKANVPAERLQQCLYMINIGSNDYINNYFMSKPYNTKRRYTPKQYAYSLIIIYRSHLKNLHRLGARKVAVFGLSQIGCTPKIMKSHSDGKICSREVNEAVKIFNKNLDDLVMDFNKKVRGAKFTYVDLFSGGDPQAFIFLGFKVGGKSCCTVNPGEELCVPNQPVCANRTEYVFWDDLHSTEATNMVVAKGSFDGIISKPYSIAQLAKE

SEQ ID NO: 72115 - protein, 311 aa, Arabidopsis thaliana
  peptide (1)..(311): Ceres Seq. ID no. 4917614
MSDNGNNNNLKSEAKVNFSPYGNDFPKGPTGRFSNGRTIPDIIGELSGFKDFIPPFAEASPEQAHTGMNYASGGSGLREETSEHLGDRISIRKQLQNHKTSITKANVPAERLQQCLYMINIGSNDYINNYFMSKPYNTKRRYTPKQYAYSLIIIYRSHLKNLHRLGARKVAVFGLSQIGCTPKIMKSHSDGKICSREVNEAVKIFNKNLDDLVMDFNKKVRGAKFTYVDLFSGGDPQAFIFLGFKVGGKSCCTVNPGEELCVPNQPVCANRTEYVFWDDLHSTEATNMVVAKGSFDGIISKPYSIAQLAKE

SEQ ID NO: 72116 - protein, 244 aa, Arabidopsis thaliana
  peptide (1)..(244): Ceres Seq. ID no. 4917615
MNYASGGSGLREETSEHLGDRISIRKQLQNHKTSITKANVPAERLQQCLYMINIGSNDYINNYFMSKPYNTKRRYTPKQYAYSLIIIYRSHLKNLHRLGARKVAVFGLSQIGCTPKIMKSHSDGKICSREVNEAVKIFNKNLDDLVMDFNKKVRGAKFTYVDLFSGGDPQAFIFLGFKVGGKSCCTVNPGEELCVPNQPVCANRTEYVFWDDLHSTEATNMVVAKGSFDGIISKPYSIAQLAKE

SEQ ID NO: 72117 - DNA, 1110 bp, Arabidopsis thaliana
  misc_feature (1)..(1110): Ceres Seq. ID no. 4917621
  misc_feature (1)..(1110): Ortholog of  Ceres SEQ ID NO 15179593 as cited in SEQ ID NO 1057
  misc_feature (1)..(1110): Ortholog of  Ceres SEQ ID NO 14306904 as cited in SEQ ID NO 53566
  misc_feature (1)..(1110): Ortholog of  Ceres SEQ ID NO 13658640 as cited in SEQ ID NO 66419
atgaaaaaagaggaagcagagttagtttctgtgtgttggaatcaggattcaagttgttttgcagctggaacgagtcatggttttcgtatatataactgtgaacctttcaaagaaactttcaggcgtgagctaaaggacggtggttttaaaatcgtagagatgcttttccgtagcaatatactggcacttgttggtggtggacctaactctcagtatccttcaagcaaagtactaatttgggatgatcatcagagccgttgcattagtgaatttgcatttaggtctgagattcgtgcagtgaaattaagaagggatcggattgttgttgttcttgaacataagatttatgtttataactttatggatcttagacttcttcatcagattgaaactcaagctaatcctagaggattgtgttgcctttctcatcattctaatacgtctgtgttggcttgccctggtctcaatcgaggagagattcgtgttgaacatttcgggcttaacatggtacaaatcataaatgctcatgattcaagtattgcgtgtatgaccttgacattggatggtttgttgcttgcaactgctagtacaaagggaactctgattagaatcttcaacacaatggatggaactcgtttgcaagaggtacgaagaggagtcgacagagcagatatatatagcattgcactttcaccaaatgtgcagtggctggcggtatcaagtgacaaggggactgttcacattttctctcttagagttagggttgttggggaggattcttattccactgaaaatggagctctgttgacacaacaaaattattctaattctctgcaaggccttgtttctccaaccattggtaccaatcccggttcgtcattgtcgtttatgagaggtgttctaccaaagtatttcagctcggaatggtcatatgcacagtttcatgtatcagaagtcacacaattcttcgcagcatttggcagtaacaacacggttgctattatcggcatggatggaagtttctaccgatgcagctttgatcccgtgaacggaggagagatggggcaactggaatatatccactttatgaagatggacaaccgcccgtga

SEQ ID NO: 72118 - protein, 369 aa, Arabidopsis thaliana; identical to SEQ ID NO: 45179
  peptide (1)..(369): Ceres Seq. ID no. 4917622

SEQ ID NO: 72119 - protein, 316 aa, Arabidopsis thaliana; identical to SEQ ID NO: 45180
  peptide (1)..(316): Ceres Seq. ID no. 4917623

SEQ ID NO: 72120 - protein, 249 aa, Arabidopsis thaliana
  peptide (1)..(249): Ceres Seq. ID no. 4917624
MDLRLLHQIETQANPRGLCCLSHHSNTSVLACPGLNRGEIRVEHFGLNMVQIINAHDSSIACMTLTLDGLLLATASTKGTLIRIFNTMDGTRLQEVRRGVDRADIYSIALSPNVQWLAVSSDKGTVHIFSLRVRVVGEDSYSTENGALLTQQNYSNSLQGLVSPTIGTNPGSSLSFMRGVLPKYFSSEWSYAQFHVSEVTQFFAAFGSNNTVAIIGMDGSFYRCSFDPVNGGEMGQLEYIHFMKMDNRP

SEQ ID NO: 72121 - DNA, 747 bp, Arabidopsis thaliana
  misc_feature (1)..(747): Ceres Seq. ID no. 4917673
  misc_feature (1)..(747): Ortholog of  Ceres SEQ ID NO 12612314 as cited in SEQ ID NO 51420
atggagcctgagctcaagaacacattgatccgtgacctagacgctttctccaatggaaaagacttcttcaaaaccgtgggacgagcttggaaacgcggttatcttctttacggtccacctggaaccggaaaatcatcgcttgttgctgcaattgctaattttatgaactatagtatctatgatcttcagattcagagcgttaaagatgatgcaatgcttagacagattcttacctcaaccgagaaccgctccattcttctcattgaagatcttgattgcagtggagcagatactacttgtagaaaggaaaataaagatgaaacagagtatggtgagaatcagaacaagaagaagaagaaggatcctaaggtaactctgtctgggctactaaactttgtagacgggttatggtcaagctgtgtagaagagaggatcatcatattcacaacgaaccataaggagaaactcgatccggcattgctgagaccaggaaggatggatgttcacatcctcatggattattgcacgcctattgttttcaagaaacttgctgcattgtatcttgaaatcgaagaacacgagttgtttgaccctattgagaagatgttccttgaggtgaaagcaactccagctgagatcacagagaagcttatggtaagcaaggatccggatgttacgcttaagggtcttgttgagtttcttgaatccaagaagatgaccaaggagagtgttgattctgaaatttaa

SEQ ID NO: 72122 - protein, 248 aa, Arabidopsis thaliana
  peptide (1)..(248): Ceres Seq. ID no. 4917674
MEPELKNTLIRDLDAFSNGKDFFKTVGRAWKRGYLLYGPPGTGKSSLVAAIANFMNYSIYDLQIQSVKDDAMLRQILTSTENRSILLIEDLDCSGADTTCRKENKDETEYGENQNKKKKKDPKVTLSGLLNFVDGLWSSCVEERIIIFTTNHKEKLDPALLRPGRMDVHILMDYCTPIVFKKLAALYLEIEEHELFDPIEKMFLEVKATPAEITEKLMVSKDPDVTLKGLVEFLESKKMTKESVDSEI

SEQ ID NO: 72123 - protein, 194 aa, Arabidopsis thaliana
  peptide (1)..(194): Ceres Seq. ID no. 4917675
MNYSIYDLQIQSVKDDAMLRQILTSTENRSILLIEDLDCSGADTTCRKENKDETEYGENQNKKKKKDPKVTLSGLLNFVDGLWSSCVEERIIIFTTNHKEKLDPALLRPGRMDVHILMDYCTPIVFKKLAALYLEIEEHELFDPIEKMFLEVKATPAEITEKLMVSKDPDVTLKGLVEFLESKKMTKESVDSEI

SEQ ID NO: 72124 - protein, 177 aa, Arabidopsis thaliana
  peptide (1)..(177): Ceres Seq. ID no. 4917676
MLRQILTSTENRSILLIEDLDCSGADTTCRKENKDETEYGENQNKKKKKDPKVTLSGLLNFVDGLWSSCVEERIIIFTTNHKEKLDPALLRPGRMDVHILMDYCTPIVFKKLAALYLEIEEHELFDPIEKMFLEVKATPAEITEKLMVSKDPDVTLKGLVEFLESKKMTKESVDSEI

SEQ ID NO: 72125 - DNA, 1140 bp, Arabidopsis thaliana
  misc_feature (1)..(1140): Ceres Seq. ID no. 4917757
  misc_feature (1)..(1140): Ortholog of  Ceres SEQ ID NO 13597376 as cited in SEQ ID NO 64002
  misc_feature (1)..(1140): Ortholog of  Ceres SEQ ID NO 13503573 as cited in SEQ ID NO 65402
  misc_feature (1)..(1140): Ortholog of  Ceres SEQ ID NO 13659615 as cited in SEQ ID NO 67248
atgggcaagattatcttggttgtttctcttactgctttatgcatttttatgctcaagcacgcaccgagtttcacatcaccaaccgcgttctctcgtagcgaggaaggtgtgactcatgtgttagtcactggtggtgctggatatatcggatcacatgctgcgttgaggctcttaaaagattcataccgtgtaaccattgtggacaatctttctcggggaaatcttggtgccgtcaaggttttacaaggattgttcccagaacccgggaggcttcaatttatttatgctgacttaggagatgccaaagctgttgataaaatcttctcagagaacgcgtttgatgctgttatgcattttgctgcagtagcatatgttggagagagcactctagatcctctaaagtattaccacaacattacatcaaacacattagtagttcttgaagctgtggctagacataaagtgaagaagttgatatattcaagcacatgtgccacttatggagaacctgacaagatgcctattgttgaagttactccacaggtccccattaacccttatggaaaagctaagaagatggctgaagatatgatcctggatttctctaaaaactctgacatggcagtcatgatcctaagatactttaacgtgataggttcagatccagaaggtagactaggagaagctccaaagcccgagctacgtgaacacggacggatttcgggtgcctgtttcgatgcagctcgtggcgtgattccaggccttcaggtcaaaggaacagactacaaaacaggagatggaacttgtgttcgtgactacatagatgttactgaccttgtagatgctcacgtaaaagctctcgagaaagctaagcctagaaatgtgggaatatacaatgtaggtacaggaaaaggaagatcggtgaaagagtttgtggaagcatgtaagaaagcgacaggagtagatatcaaagtagattttttgcctcgaagacctggagattacgcagaggtttacagtgatccagcaaagattctgagagatcttaattggtctgctcgttacactaatcttcaagaaagtcttgaggttgcttggaagtggcaaaagactcatccccatggatatgcttcttcttaa

SEQ ID NO: 72126 - protein, 379 aa, Arabidopsis thaliana
  peptide (1)..(379): Ceres Seq. ID no. 4917758
MGKIILVVSLTALCIFMLKHAPSFTSPTAFSRSEEGVTHVLVTGGAGYIGSHAALRLLKDSYRVTIVDNLSRGNLGAVKVLQGLFPEPGRLQFIYADLGDAKAVDKIFSENAFDAVMHFAAVAYVGESTLDPLKYYHNITSNTLVVLEAVARHKVKKLIYSSTCATYGEPDKMPIVEVTPQVPINPYGKAKKMAEDMILDFSKNSDMAVMILRYFNVIGSDPEGRLGEAPKPELREHGRISGACFDAARGVIPGLQVKGTDYKTGDGTCVRDYIDVTDLVDAHVKALEKAKPRNVGIYNVGTGKGRSVKEFVEACKKATGVDIKVDFLPRRPGDYAEVYSDPAKILRDLNWSARYTNLQESLEVAWKWQKTHPHGYASS

SEQ ID NO: 72127 - protein, 363 aa, Arabidopsis thaliana
  peptide (1)..(363): Ceres Seq. ID no. 4917759
MLKHAPSFTSPTAFSRSEEGVTHVLVTGGAGYIGSHAALRLLKDSYRVTIVDNLSRGNLGAVKVLQGLFPEPGRLQFIYADLGDAKAVDKIFSENAFDAVMHFAAVAYVGESTLDPLKYYHNITSNTLVVLEAVARHKVKKLIYSSTCATYGEPDKMPIVEVTPQVPINPYGKAKKMAEDMILDFSKNSDMAVMILRYFNVIGSDPEGRLGEAPKPELREHGRISGACFDAARGVIPGLQVKGTDYKTGDGTCVRDYIDVTDLVDAHVKALEKAKPRNVGIYNVGTGKGRSVKEFVEACKKATGVDIKVDFLPRRPGDYAEVYSDPAKILRDLNWSARYTNLQESLEVAWKWQKTHPHGYASS

SEQ ID NO: 72128 - protein, 263 aa, Arabidopsis thaliana
  peptide (1)..(263): Ceres Seq. ID no. 4917760
MHFAAVAYVGESTLDPLKYYHNITSNTLVVLEAVARHKVKKLIYSSTCATYGEPDKMPIVEVTPQVPINPYGKAKKMAEDMILDFSKNSDMAVMILRYFNVIGSDPEGRLGEAPKPELREHGRISGACFDAARGVIPGLQVKGTDYKTGDGTCVRDYIDVTDLVDAHVKALEKAKPRNVGIYNVGTGKGRSVKEFVEACKKATGVDIKVDFLPRRPGDYAEVYSDPAKILRDLNWSARYTNLQESLEVAWKWQKTHPHGYASS

SEQ ID NO: 72129 - DNA, 1464 bp, Arabidopsis thaliana
  misc_feature (1)..(1464): Ceres Seq. ID no. 4917893
  misc_feature (1)..(1464): Ortholog of  Ceres SEQ ID NO 13597546 as cited in SEQ ID NO 65017
  misc_feature (1)..(1464): Ortholog of  Ceres SEQ ID NO 13654353 as cited in SEQ ID NO 68318
atggtttcactctttttagtgaagatatttcattgggtctatcagtggagaaatccaaaaactaatggaaaactacctccagggtctatgggctttccgttcattggagagacttttgagttctttaagcctcatgacgctcttcaattttcaacattcatcaaagacagagtccttaggttttttgctgatttctctagcattcatttgtcattttttcggacaagcttatttggagacaaagctataatctcaatggatatggaattgaatctcgagatggcgaaggcaaattccgtccctggtgtcacgaagagcgtaatacgactatttggggagaacaacttgtttttgcagagcaaggagtcccataaacatgttcggaacttgacgttccagttgttgggtccacaaggtttaaaatcaaggatgattgaagacgtggatctcttggctcgcacgtacatggaggaaggagctaggaacggctaccttgacgtaaaggaaacatcaagcaagattttaattggatgccttgcgaagaaagttatgggcgagatggaaccagaggcggcgaaagaactcgccctctgctggagatattttcagagtggctggtttagattctttctcaaccttcctgggacaggtgtctataaaatgatgaaggtgctttttgtgcaatacactgaggctgatatttcgtggcaggcaagaaagaggatgatgaagttactaaggaagacagtgttgacgaagagagcatcaggagaggagttaggggagttcttcaacatcatatttggagaaatggaaggagaaggagaaacgatgagcgtagagaatgcggtcgagtacatatataccttctttttggttgctaatgaaacaacaccaaggattcttgcggctacagtaaagtttataagcgaccaccctaaagtcaagcaagagttacaaagagaacatgaagaaattgttcggggtaaggcagagaaggaaggcggcctaacatgggaagactacaaatcaatgcatttcactcagatggttatcaatgagtcgcttagaatcataagcacagcaccaacagttcttagagtacttgaacatgatttccaagttggtgattatacaattccagctggttggacctttatgggatatcctcatatccatttcaattcagaaaaatacgaagacccttacgcatttaatccatggcgctgggagggaaaggatttgggcgcgatcgtctccaagactttcattcccttcggtgcaggtcgtagactttgtgtaggggctgagtttgctaagatgcagatggccgtttttatccatcatttgtttagatacaggtggtctatgaagtcagggacaacaataattcgaagctttatgcttatgtttccaggtgggtgtgatgttcaaatttcagaagacactgaagtcgataagtga

SEQ ID NO: 72130 - protein, 487 aa, Arabidopsis thaliana
  peptide (1)..(487): Ceres Seq. ID no. 4917894
MVSLFLVKIFHWVYQWRNPKTNGKLPPGSMGFPFIGETFEFFKPHDALQFSTFIKDRVLRFFADFSSIHLSFFRTSLFGDKAIISMDMELNLEMAKANSVPGVTKSVIRLFGENNLFLQSKESHKHVRNLTFQLLGPQGLKSRMIEDVDLLARTYMEEGARNGYLDVKETSSKILIGCLAKKVMGEMEPEAAKELALCWRYFQSGWFRFFLNLPGTGVYKMMKVLFVQYTEADISWQARKRMMKLLRKTVLTKRASGEELGEFFNIIFGEMEGEGETMSVENAVEYIYTFFLVANETTPRILAATVKFISDHPKVKQELQREHEEIVRGKAEKEGGLTWEDYKSMHFTQMVINESLRIISTAPTVLRVLEHDFQVGDYTIPAGWTFMGYPHIHFNSEKYEDPYAFNPWRWEGKDLGAIVSKTFIPFGAGRRLCVGAEFAKMQMAVFIHHLFRYRWSMKSGTTIIRSFMLMFPGGCDVQISEDTEVDK

SEQ ID NO: 72131 - protein, 458 aa, Arabidopsis thaliana
  peptide (1)..(458): Ceres Seq. ID no. 4917895
MGFPFIGETFEFFKPHDALQFSTFIKDRVLRFFADFSSIHLSFFRTSLFGDKAIISMDMELNLEMAKANSVPGVTKSVIRLFGENNLFLQSKESHKHVRNLTFQLLGPQGLKSRMIEDVDLLARTYMEEGARNGYLDVKETSSKILIGCLAKKVMGEMEPEAAKELALCWRYFQSGWFRFFLNLPGTGVYKMMKVLFVQYTEADISWQARKRMMKLLRKTVLTKRASGEELGEFFNIIFGEMEGEGETMSVENAVEYIYTFFLVANETTPRILAATVKFISDHPKVKQELQREHEEIVRGKAEKEGGLTWEDYKSMHFTQMVINESLRIISTAPTVLRVLEHDFQVGDYTIPAGWTFMGYPHIHFNSEKYEDPYAFNPWRWEGKDLGAIVSKTFIPFGAGRRLCVGAEFAKMQMAVFIHHLFRYRWSMKSGTTIIRSFMLMFPGGCDVQISEDTEVDK

SEQ ID NO: 72132 - protein, 402 aa, Arabidopsis thaliana
  peptide (1)..(402): Ceres Seq. ID no. 4917896
MDMELNLEMAKANSVPGVTKSVIRLFGENNLFLQSKESHKHVRNLTFQLLGPQGLKSRMIEDVDLLARTYMEEGARNGYLDVKETSSKILIGCLAKKVMGEMEPEAAKELALCWRYFQSGWFRFFLNLPGTGVYKMMKVLFVQYTEADISWQARKRMMKLLRKTVLTKRASGEELGEFFNIIFGEMEGEGETMSVENAVEYIYTFFLVANETTPRILAATVKFISDHPKVKQELQREHEEIVRGKAEKEGGLTWEDYKSMHFTQMVINESLRIISTAPTVLRVLEHDFQVGDYTIPAGWTFMGYPHIHFNSEKYEDPYAFNPWRWEGKDLGAIVSKTFIPFGAGRRLCVGAEFAKMQMAVFIHHLFRYRWSMKSGTTIIRSFMLMFPGGCDVQISEDTEVDK

SEQ ID NO: 72133 - DNA, 2481 bp, Arabidopsis thaliana
  misc_feature (1)..(2481): Ceres Seq. ID no. 4917964
  misc_feature (1)..(2481): Ortholog of  Ceres SEQ ID NO 15168977 as cited in SEQ ID NO 20587
atgactgttccgggaatcatcaccgacgtagacggtgatacaacctccgaagtaacttctacctccggtggttcacgtgagaggaagatcattgtagctaacatgttaccactccaatctaaaagagatgcagaaactggtaaatggtgttttaactgggacgaagactctctccagttacaacttagagatgggttctcttcagaaacagagtttctctacgttggatcacttaacgtagacatcgaaactaacgaacaagaagaagtttcacagaagcttttagaggaatttaactgcgttgcaacgtttttgtctcaagagttgcaagaaatgttctatcttggtttctgtaaacatcagttatggccactctttcattacatgcttccaatgtttcctgatcatggtgatcgttttgatcgacgtctatggcaagcttatgtatcagccaacaagatattttcagatagagttatggaagttatcaaccctgaggatgattacgtttggattcaagattatcatcttatggttcttcctactttcttgaggaaacgttttaataggatcaaactcggtttcttccttcatagtccgtttccttcttcagagatttaccgcacattgcctgttcgtgacgagattttgagaggtttgttgaattgtgatctcattggtttccatacgtttgattacgcgaggcatttcttgtcttgttgtagtagaatgcttggtcttgattacgagtctaagcgcggtcacataggtcttgattactttggtaggactgtgtatatcaaaatacttcctgttggtgttcatatgggtagattggagtctgttttgagtcttgattctactgcggcgaagacgaaagagattcaagaacagtttaaagggaagaagcttgttcttggtatcgatgatatggatatatttaaagggataagcttaaagcttatagcaatggaacatctctttgagacttattggcatttgaaagggaaagttgttcttgttcagatagtgaaccctgcaagatcttctggtaaagatgttgaagaagcgaagagggagacgtatgagactgcgaggaggatcaatgagcgttacggtacttctgactataagccgatagttttgatcgatcgtcttgttccacgttctgagaaaaccgcgtattatgctgcagcagattgttgcttagtgaatgcagtgagagatggtatgaacttagttccttataagtatatcgtctgcaggcaggggactcgaagtaataaggccgttgtggattcatcgcctcgcacaagcactcttgtcgtgtctgagtttattggatgctcaccttctttgagtggtgccattagggtgaatccatgggatgtggatgctgttgctgaagcggtaaactcggctcttaaaatgagtgagactgagaagcaactacggcatgagaaacattatcattatattagcactcatgatgttggttattgggcaaagagctttatgcaggatcttgagagagcgtgccgagatcattatagtaaacgttgttgggggattggttttggtttggggttcagagttttgtcactctctccaagttttaggaagctatctgtggaacacattgttccagtttatagaaaaacacagagaagagctatatttcttgattatgatggtactcttgttcctgaaagctccattgttcaagatccaagcaacgaggttgtctctgttctgaaagctctctgtgaagatccgaataacacggtgtttattgttagtggaagaggtagagagtctctgagcaattggctatctccttgtgaaaatcttggaatagcagctgaacatggatacttcattagatggaagagcaaagatgagtgggagacttgttattcgcctacggatacagagtggaggtcaatggtggaaccggttatgagatcgtatatggaggcaacagatgggacgagtatagagtttaaagaaagtgctttggtgtggcaccatcaagacgcagatcctgactttggatcatgtcaagctaaggagatgcttgatcatctagagagtgttctcgccaatgagcctgtggttgtcaagagaggtcaacacatcgttgaagtcaaaccacaaggtgtaagcaaaggtctagctgcggagaaagtaatccgagaaatggtagaacgcggggagccaccggaaatggtgatgtgcataggagacgatagatcagacgaagacatgtttgagagcatattaagcacagtgacaaatccggaacttcttgtgcagccagaggtttttgcatgcacggttggaagaaaaccaagcaaagctaaatacttcttggacgatgaagccgacgtgcttaagctcctaagaggtcttggagactcatcatcgagcttaaaacctagttcttctcacacacaagttgcatttgaaagcatcgtttaa

SEQ ID NO: 72134 - protein, 826 aa, Arabidopsis thaliana; identical to SEQ ID NO: 71102
  peptide (1)..(826): Ceres Seq. ID no. 4917965

SEQ ID NO: 72135 - protein, 792 aa, Arabidopsis thaliana; identical to SEQ ID NO: 71103
  peptide (1)..(792): Ceres Seq. ID no. 4917966

SEQ ID NO: 72136 - protein, 715 aa, Arabidopsis thaliana
  peptide (1)..(715): Ceres Seq. ID no. 4917967
MFYLGFCKHQLWPLFHYMLPMFPDHGDRFDRRLWQAYVSANKIFSDRVMEVINPEDDYVWIQDYHLMVLPTFLRKRFNRIKLGFFLHSPFPSSEIYRTLPVRDEILRGLLNCDLIGFHTFDYARHFLSCCSRMLGLDYESKRGHIGLDYFGRTVYIKILPVGVHMGRLESVLSLDSTAAKTKEIQEQFKGKKLVLGIDDMDIFKGISLKLIAMEHLFETYWHLKGKVVLVQIVNPARSSGKDVEEAKRETYETARRINERYGTSDYKPIVLIDRLVPRSEKTAYYAAADCCLVNAVRDGMNLVPYKYIVCRQGTRSNKAVVDSSPRTSTLVVSEFIGCSPSLSGAIRVNPWDVDAVAEAVNSALKMSETEKQLRHEKHYHYISTHDVGYWAKSFMQDLERACRDHYSKRCWGIGFGLGFRVLSLSPSFRKLSVEHIVPVYRKTQRRAIFLDYDGTLVPESSIVQDPSNEVVSVLKALCEDPNNTVFIVSGRGRESLSNWLSPCENLGIAAEHGYFIRWKSKDEWETCYSPTDTEWRSMVEPVMRSYMEATDGTSIEFKESALVWHHQDADPDFGSCQAKEMLDHLESVLANEPVVVKRGQHIVEVKPQGVSKGLAAEKVIREMVERGEPPEMVMCIGDDRSDEDMFESILSTVTNPELLVQPEVFACTVGRKPSKAKYFLDDEADVLKLLRGLGDSSSSLKPSSSHTQVAFESIV

SEQ ID NO: 72137 - DNA, 1443 bp, Arabidopsis thaliana
  misc_feature (1)..(1443): Ceres Seq. ID no. 4917972
  misc_feature (1)..(1443): Ortholog of  Ceres SEQ ID NO 15172020 as cited in SEQ ID NO 59739
atggggtataaagatgtcaaaatcgcccctttgattgagaggaaagactcaggtcgacgatcaaacctagagagattctcccactatgttgcaaggcagctcggatttgaggatccaaatgaatacccacaactatgcaaattagcaaatggatatttgttgaaaacaaaagggtatgatgagaatgtggatgagtatttggagaatgaagctgagcgtgattctctctatgttcatctccttgaagaatttgatagatgcattctcacttatttttctttcaattggacccaatcttccaacctcatctctcaggctttaagcgatgagtcggatcagaaagttccaaaactcaaggatttcgtgatggcagcaacaaggaaacagaggtttgagagagtaacaaaagatctcaaggtgaaaagggtaatttcgacattagtagaagagatgagagtcattgggagcggaagcagtgagccacactgtacggaagtaatgtctccggtggctcataacaaacgaagtcccgtccttctccttatgggcggaggaatgggcgcaggaaagagcaccgtcctcaaagatatcttcctagagtcgttttggtcggaggcacaggccgacgcggtggttatagaggcagacgcgtttaaggagacggatgtaatttatagagctcttagctctagaggtcaccacgatgatatgcttcaaactgctgaattggttcatcaatcatcaacggatgctgcatcgtccttactagtaacagcattgaacgacggacgtgatgtgataatggatggaacattgtcatgggagccattcgtcgaacaaatgatcgaaatggcaagaaacgtccacaaacaaaaatatcgaatgggcgaaggctacaaggtgtccgaagaggggacgataaccgaaaaatattgggaagaagaagaagaagaaacgaaagaaaatggcaaacaacaaaatctgaaaccttacagaatcgagctggtcggtgtggtttgtgacgcttatcttgccgtagcaagaggcatacggagagctctaatggtgaagagagcagtgagagtgaaaccacaattgaattcacacaagagatttgctaatgcattcccaaagtattgtgagcttgttgataacgctaggctttattgcaccaatgctgttggtggtcctccaaggcttatagcgtggaaagacggaaatagtaagcttctggtggatccagaggatattgattgtctaaaacgggtcagcagtctcaacccggatgcagaatccatttacgagctttatccggatccaagccaattaagcaaacccggttctgtttggaatgatgttgtgttagttccatcgaggcccaaggtccagaaggaacttagcgatgcaatcaggagaatcgaaaaggcccaaccaaaaaattga

SEQ ID NO: 72138 - protein, 480 aa, Arabidopsis thaliana; identical to SEQ ID NO: 69986
  peptide (1)..(480): Ceres Seq. ID no. 4917973

SEQ ID NO: 72139 - protein, 358 aa, Arabidopsis thaliana; identical to SEQ ID NO: 69987
  peptide (1)..(358): Ceres Seq. ID no. 4917974

SEQ ID NO: 72140 - protein, 330 aa, Arabidopsis thaliana
  peptide (1)..(330): Ceres Seq. ID no. 4917975
MRVIGSGSSEPHCTEVMSPVAHNKRSPVLLLMGGGMGAGKSTVLKDIFLESFWSEAQADAVVIEADAFKETDVIYRALSSRGHHDDMLQTAELVHQSSTDAASSLLVTALNDGRDVIMDGTLSWEPFVEQMIEMARNVHKQKYRMGEGYKVSEEGTITEKYWEEEEEETKENGKQQNLKPYRIELVGVVCDAYLAVARGIRRALMVKRAVRVKPQLNSHKRFANAFPKYCELVDNARLYCTNAVGGPPRLIAWKDGNSKLLVDPEDIDCLKRVSSLNPDAESIYELYPDPSQLSKPGSVWNDVVLVPSRPKVQKELSDAIRRIEKAQPKN

SEQ ID NO: 72141 - DNA, 597 bp, Arabidopsis thaliana
  misc_feature (1)..(597): Ceres Seq. ID no. 4918573
  misc_feature (1)..(597): Ortholog of  Ceres SEQ ID NO 13585342 as cited in SEQ ID NO 63601
atggtggctccggtggtgaatttccggtggccgtctattccaaagagtctgatgccaaaagactacagaagagaagtggcgaaatggtctgtttggatagctaactattttccgggacttttgcaatggttggtgactcagaacatgttctctacaacttccatgctagagaaaaaccctgtctacttcaacgaccaagacattgaagtccttaagcacatcaaaggcttcccaatgctcactaaggagaagttacgggagcgcggcgtcttcgggacgctgagaagcgattttttggtagcattcggcgactgggacttcgatccggcagacctacctgacccgtctctgtctggaccggaaaagggctcttcttctgttcacatatggcaaggctacgaagacaaagtgatgccatttcagctgcaaagatgtttgtgccgcaagctaccatggattaggtaccatgaggtccctaaaggaggccacctgatcgtgcactacgacggcatatgtgatgcgattttgaaatcacttcttttaggagaagatctcccaatgtacaaaccaaaagctgtgatcactgagccagcttag

SEQ ID NO: 72142 - protein, 198 aa, Arabidopsis thaliana
  peptide (1)..(198): Ceres Seq. ID no. 4918574
MVAPVVNFRWPSIPKSLMPKDYRREVAKWSVWIANYFPGLLQWLVTQNMFSTTSMLEKNPVYFNDQDIEVLKHIKGFPMLTKEKLRERGVFGTLRSDFLVAFGDWDFDPADLPDPSLSGPEKGSSSVHIWQGYEDKVMPFQLQRCLCRKLPWIRYHEVPKGGHLIVHYDGICDAILKSLLLGEDLPMYKPKAVITEPA

SEQ ID NO: 72143 - protein, 181 aa, Arabidopsis thaliana
  peptide (1)..(181): Ceres Seq. ID no. 4918575
MPKDYRREVAKWSVWIANYFPGLLQWLVTQNMFSTTSMLEKNPVYFNDQDIEVLKHIKGFPMLTKEKLRERGVFGTLRSDFLVAFGDWDFDPADLPDPSLSGPEKGSSSVHIWQGYEDKVMPFQLQRCLCRKLPWIRYHEVPKGGHLIVHYDGICDAILKSLLLGEDLPMYKPKAVITEPA

SEQ ID NO: 72144 - protein, 150 aa, Arabidopsis thaliana
  peptide (1)..(150): Ceres Seq. ID no. 4918576
MFSTTSMLEKNPVYFNDQDIEVLKHIKGFPMLTKEKLRERGVFGTLRSDFLVAFGDWDFDPADLPDPSLSGPEKGSSSVHIWQGYEDKVMPFQLQRCLCRKLPWIRYHEVPKGGHLIVHYDGICDAILKSLLLGEDLPMYKPKAVITEPA

SEQ ID NO: 72145 - DNA, 1791 bp, Arabidopsis thaliana
  misc_feature (1)..(1791): Ceres Seq. ID no. 4918992
  misc_feature (1)..(1791): Ortholog of  Ceres SEQ ID NO 12607856 as cited in SEQ ID NO 55419
atgtttcgtggtattctgaaatctgcaaaggatgagaagaagaagatggagtctcaaggcaatggagctgttgctaattcaggaaaatctctggttaatcgccgacgagctaacaaagaaaagaaaatggatttgctacaagatgttgataagcttaagaggaagctgagacaggaggagaatgttcatagagcattggagagagcttttactagacctttaggagctttacctcgtcttccgtcttacctccctcgacatacattggagcttcttgctgaagtagctgttcttgaagaggaagtggttcggttagaggagcaagttgtaaactttagacaaggtttataccaagaagctgtttacatatcttcaaagaggaatctggagagtcctaataacaacagtttgaatgagaattcgcccgttagaagcactaaacaccagagatcgaaatcaatgtcgcaacacgagttcaattctatgatcactcccactaaaaagcatcaacagtctcttagcagaagcatctcaagtaggaaactcttctcctctgatcaaacagttaatgaccgaagtggtcagagagtggtaagtggcaaacaagcgtcgcctaaatcaaatctaagcagtgttactaatactaagccagtagatgtgagagggaaagagaatcagacctctagtaatgcttcaaaagacaagaaaaataaagaatcacctgagaagaagcttggcagattcttgacatctgtgaagaagaagaaacctttgattaagccggaggctgcagcggataaacactcagaatcaaccaaattgcagctagatgatagattagcagatcaggacaaagctcaagagagtgtgtcaggatcatcttcggaagacaagacactgcaaagtggaaatgtagcaaacagagtttcagaggatttactgaaatgtcttgtgactattatcttgaggattagctcgtccaaggacattgtgttggatccatataataactgctcagagtggagaacaagagaacttggtgcatacaagcatttttcgtcggtcgatacatcttcagttgatcttggacgaagaatcaatgcttcatttctgatccatcgtctcaagttcctgcttaataagctttctgttgtcaatctagacggtcttagccaccagcagaagcttgcattctggataaatacttataattcctgcgttatgaatgcattcttggagcacgggatcccggcgactcctgaaatggttgtagcgctgatgcagaaggcaacaataattgtgggaggacactcgctaaatgcaatcacaatcgaacatttcatcttgagacttccataccacttgaaattcacttgtcccaaaactgcaacacatgaagaaatgagagctcatagcacatttggattggaatggtcagagcccttggtcacattcgctctcgcctgtggaagctggtcctctcctgctgtaagggtctacacagcagctaatgtagaggaagagctagaagctgcaaagagagattatctgcaagcatcagttgggatatcaaagaacaacaaactaatgcttccaaaggtattagattggtacttactcgactttgccaaggatttggaatcgttactggattgggtttgccttcagttacctgataaactaagagaagaagcaactaagtgtatggagagaaagaacaaagaatcactaatggaattggttcaagtagtaccatatgacttcagtttcagattgcttttgcatcaatga

SEQ ID NO: 72146 - protein, 596 aa, Arabidopsis thaliana
  peptide (1)..(596): Ceres Seq. ID no. 4918993
MFRGILKSAKDEKKKMESQGNGAVANSGKSLVNRRRANKEKKMDLLQDVDKLKRKLRQEENVHRALERAFTRPLGALPRLPSYLPRHTLELLAEVAVLEEEVVRLEEQVVNFRQGLYQEAVYISSKRNLESPNNNSLNENSPVRSTKHQRSKSMSQHEFNSMITPTKKHQQSLSRSISSRKLFSSDQTVNDRSGQRVVSGKQASPKSNLSSVTNTKPVDVRGKENQTSSNASKDKKNKESPEKKLGRFLTSVKKKKPLIKPEAAADKHSESTKLQLDDRLADQDKAQESVSGSSSEDKTLQSGNVANRVSEDLLKCLVTIILRISSSKDIVLDPYNNCSEWRTRELGAYKHFSSVDTSSVDLGRRINASFLIHRLKFLLNKLSVVNLDGLSHQQKLAFWINTYNSCVMNAFLEHGIPATPEMVVALMQKATIIVGGHSLNAITIEHFILRLPYHLKFTCPKTATHEEMRAHSTFGLEWSEPLVTFALACGSWSSPAVRVYTAANVEEELEAAKRDYLQASVGISKNNKLMLPKVLDWYLLDFAKDLESLLDWVCLQLPDKLREEATKCMERKNKESLMELVQVVPYDFSFRLLLHQ

SEQ ID NO: 72147 - protein, 581 aa, Arabidopsis thaliana
  peptide (1)..(581): Ceres Seq. ID no. 4918994
MESQGNGAVANSGKSLVNRRRANKEKKMDLLQDVDKLKRKLRQEENVHRALERAFTRPLGALPRLPSYLPRHTLELLAEVAVLEEEVVRLEEQVVNFRQGLYQEAVYISSKRNLESPNNNSLNENSPVRSTKHQRSKSMSQHEFNSMITPTKKHQQSLSRSISSRKLFSSDQTVNDRSGQRVVSGKQASPKSNLSSVTNTKPVDVRGKENQTSSNASKDKKNKESPEKKLGRFLTSVKKKKPLIKPEAAADKHSESTKLQLDDRLADQDKAQESVSGSSSEDKTLQSGNVANRVSEDLLKCLVTIILRISSSKDIVLDPYNNCSEWRTRELGAYKHFSSVDTSSVDLGRRINASFLIHRLKFLLNKLSVVNLDGLSHQQKLAFWINTYNSCVMNAFLEHGIPATPEMVVALMQKATIIVGGHSLNAITIEHFILRLPYHLKFTCPKTATHEEMRAHSTFGLEWSEPLVTFALACGSWSSPAVRVYTAANVEEELEAAKRDYLQASVGISKNNKLMLPKVLDWYLLDFAKDLESLLDWVCLQLPDKLREEATKCMERKNKESLMELVQVVPYDFSFRLLLHQ

SEQ ID NO: 72148 - protein, 554 aa, Arabidopsis thaliana
  peptide (1)..(554): Ceres Seq. ID no. 4918995
MDLLQDVDKLKRKLRQEENVHRALERAFTRPLGALPRLPSYLPRHTLELLAEVAVLEEEVVRLEEQVVNFRQGLYQEAVYISSKRNLESPNNNSLNENSPVRSTKHQRSKSMSQHEFNSMITPTKKHQQSLSRSISSRKLFSSDQTVNDRSGQRVVSGKQASPKSNLSSVTNTKPVDVRGKENQTSSNASKDKKNKESPEKKLGRFLTSVKKKKPLIKPEAAADKHSESTKLQLDDRLADQDKAQESVSGSSSEDKTLQSGNVANRVSEDLLKCLVTIILRISSSKDIVLDPYNNCSEWRTRELGAYKHFSSVDTSSVDLGRRINASFLIHRLKFLLNKLSVVNLDGLSHQQKLAFWINTYNSCVMNAFLEHGIPATPEMVVALMQKATIIVGGHSLNAITIEHFILRLPYHLKFTCPKTATHEEMRAHSTFGLEWSEPLVTFALACGSWSSPAVRVYTAANVEEELEAAKRDYLQASVGISKNNKLMLPKVLDWYLLDFAKDLESLLDWVCLQLPDKLREEATKCMERKNKESLMELVQVVPYDFSFRLLLHQ

SEQ ID NO: 72149 - DNA, 2688 bp, Arabidopsis thaliana
  misc_feature (1)..(2688): Ceres Seq. ID no. 4919129
  misc_feature (1)..(2688): Ortholog of  Ceres SEQ ID NO 13638292 as cited in SEQ ID NO 57738
atggttgctgcgtcttatgagccctacacgtatagctcaccaccaccaccattgtatgactctcctacaccaaaggttgactataagtctccaccacctccatacgtttacagttctccaccacctccactatcgtattcgccatctcccaaggtagactacaagtctccaccacctccatatgtttacagctctccaccaccaccatattactcaccatcccctaaagtcgaatacaaatccccaccacctccatatgtttatagttctccaccaccaccatattactcaccctcacctaaagtagattacaagtctccaccaccaccgtatgtttacagctccccaccaccaccatactattcaccttctccaaagcccacatacaaatcaccaccacctccatatgtttacaattctccaccaccaccatactactcaccatcccctaaggtcgaatacaaatctccaccacctccatacgtctatagctctccacccccaccatactactcaccctcacctaaagtagattataagtctccaccaccaccgtatgtttacaactctccaccaccaccatactattcaccttctccaaaacccacatacaagtccccaccaccaccatatatttacagctctccaccaccaccatactattctccttctcctaaaccagtatacaaatctccaccaccaccatacgtctattcctctccaccaccaccatactattcaccttctcctaaaccagcatacaaatctccaccaccaccgtatgtttatagctctccacctcctccatactactcgccttctcctaaacccatatacaagtctccaccaccaccgtacgtctacaactctcctccaccaccatactactctccttctccaaaaccggcatacaaatctccaccaccaccatacgtatacagctttccacctcctccatactactcgccttctcctaaacccgtatacaagtctccaccaccaccatacgtctacaactctcctccaccaccatactactctccttctccaaaaccggcatacaaatctccaccaccaccatacgtatacagctctccaccaccaccatactactcgccttctcctaaaccaacatacaaatctccaccaccaccatatgtttatagctctccacctcctccatactactcgccttctcctaaacccgtatacaagtctccaccaccaccgtacatctacaactctccaccaccaccatactactccccttcacctaaaccatcatacaaatccccaccaccaccatatgtttacagctctccaccaccaccatattactcgccttctcctaagcttacatacaaatcctcaccaccaccctatgtttacagctctccaccaccaccatattactctccttctcctaaggttgtatacaaatctccaccaccaccatatgtttacagctctccaccaccaccatactactccccttcacctaaaccatcatacaaatccccaccaccaccgtacgtctataactctccacctcctccttactactctccttcacctaaggtcatatacaaatcgccaccacacccacatgtatgtgtttgtcccccacctccaccatgctactctcattctccaaagattgagtacaaatccccaccaacaccatatgtttaccactcaccacctcccccaccttattattcgccttcgcctaaacctgcatataaatcttcaccaccaccttacgtctacagctctccaccaccaccatattactcacctgctcctaagcccgtatacaaatctccaccaccaccatacgtgtacaactccccaccaccaccatattactcaccatcccctaaacctacatacaaatctccaccaccaccatatgtatacagctctccaccaccaccatattactcacctactcctaaacctacatacaaatctccaccacccccatatgtctacagttccccaccaccaccatattactcgccttctcctaagccaacatacaaatccccaccaccaccatacgtctacagttctccaccaccaccatattactcacctgctcctaagcccacatacaaatctccaccaccaccatacgtttacagctccccaccaccaccatactactcgccttcccctaagcctacatacaaatctccaccacctccatatgtatatagctctccacctccaccaccttattactctccttctccaaaggttgagtacaaatctccgccaccaccatatgtctacagttctcctcccccaccatattactctccttctccaaaggttgagtacaaatctcctcctccaccgtatgtttatagttctccacctccaccaccatattactctccttctccaaaggttgagtacaaatcccctccaccaccgtatgtctacagctccccaccaccacccacgtattattctccttctccaaaggttgaatacaaatctccaccacctccatatgtctacaactctccacctccaccggcgtattactctccatctccaaagattgagtacaaatctccacctccaccatatgtctacagttctccaccaccaccatcatattctccttctccaaaagctgaatacaaatctcctcctcccccatccttatattactaa

SEQ ID NO: 72150 - protein, 895 aa, Arabidopsis thaliana
  peptide (1)..(895): Ceres Seq. ID no. 4919130
MVAASYEPYTYSSPPPPLYDSPTPKVDYKSPPPPYVYSSPPPPLSYSPSPKVDYKSPPPPYVYSSPPPPYYSPSPKVEYKSPPPPYVYSSPPPPYYSPSPKVDYKSPPPPYVYSSPPPPYYSPSPKPTYKSPPPPYVYNSPPPPYYSPSPKVEYKSPPPPYVYSSPPPPYYSPSPKVDYKSPPPPYVYNSPPPPYYSPSPKPTYKSPPPPYIYSSPPPPYYSPSPKPVYKSPPPPYVYSSPPPPYYSPSPKPAYKSPPPPYVYSSPPPPYYSPSPKPIYKSPPPPYVYNSPPPPYYSPSPKPAYKSPPPPYVYSFPPPPYYSPSPKPVYKSPPPPYVYNSPPPPYYSPSPKPAYKSPPPPYVYSSPPPPYYSPSPKPTYKSPPPPYVYSSPPPPYYSPSPKPVYKSPPPPYIYNSPPPPYYSPSPKPSYKSPPPPYVYSSPPPPYYSPSPKLTYKSSPPPYVYSSPPPPYYSPSPKVVYKSPPPPYVYSSPPPPYYSPSPKPSYKSPPPPYVYNSPPPPYYSPSPKVIYKSPPHPHVCVCPPPPPCYSHSPKIEYKSPPTPYVYHSPPPPPYYSPSPKPAYKSSPPPYVYSSPPPPYYSPAPKPVYKSPPPPYVYNSPPPPYYSPSPKPTYKSPPPPYVYSSPPPPYYSPTPKPTYKSPPPPYVYSSPPPPYYSPSPKPTYKSPPPPYVYSSPPPPYYSPAPKPTYKSPPPPYVYSSPPPPYYSPSPKPTYKSPPPPYVYSSPPPPPYYSPSPKVEYKSPPPPYVYSSPPPPYYSPSPKVEYKSPPPPYVYSSPPPPPYYSPSPKVEYKSPPPPYVYSSPPPPTYYSPSPKVEYKSPPPPYVYNSPPPPAYYSPSPKIEYKSPPPPYVYSSPPPPSYSPSPKAEYKSPPPPSLYY

SEQ ID NO: 72151 - protein, 710 aa, Arabidopsis thaliana
  peptide (1)..(710): Ceres Seq. ID no. 4919131
MFTTLHHHHTIHLLQNPHTSPHHHHIFTALHHHHTILLLLNQYTNLHHHHTSIPLHHHHTIHLLLNQHTNLHHHRMFIALHLLHTTRLLLNPYTSLHHHRTSTTLLHHHTTLLLQNRHTNLHHHHTYTAFHLLHTTRLLLNPYTSLHHHHTSTTLLHHHTTLLLQNRHTNLHHHHTYTALHHHHTTRLLLNQHTNLHHHHMFIALHLLHTTRLLLNPYTSLHHHRTSTTLHHHHTTPLHLNHHTNPHHHHMFTALHHHHITRLLLSLHTNPHHHPMFTALHHHHITLLLLRLYTNLHHHHMFTALHHHHTTPLHLNHHTNPHHHRTSITLHLLLTTLLHLRSYTNRHHTHMYVFVPHLHHATLILQRLSTNPHQHHMFTTHHLPHLIIRLRLNLHINLHHHLTSTALHHHHITHLLLSPYTNLHHHHTCTTPHHHHITHHPLNLHTNLHHHHMYTALHHHHITHLLLNLHTNLHHPHMSTVPHHHHITRLLLSQHTNPHHHHTSTVLHHHHITHLLLSPHTNLHHHHTFTAPHHHHTTRLPLSLHTNLHHLHMYIALHLHHLITLLLQRLSTNLRHHHMSTVLLPHHITLLLQRLSTNLLLHRMFIVLHLHHHITLLLQRLSTNPLHHRMSTAPHHHPRIILLLQRLNTNLHHLHMSTTLHLHRRITLHLQRLSTNLHLHHMSTVLHHHHHILLLQKLNTNLLLPHPYIT

SEQ ID NO: 72152 - protein, 635 aa, Arabidopsis thaliana
  peptide (1)..(635): Ceres Seq. ID no. 4919132
MFIALHLLHTTRLLLNPYTSLHHHRTSTTLLHHHTTLLLQNRHTNLHHHHTYTAFHLLHTTRLLLNPYTSLHHHHTSTTLLHHHTTLLLQNRHTNLHHHHTYTALHHHHTTRLLLNQHTNLHHHHMFIALHLLHTTRLLLNPYTSLHHHRTSTTLHHHHTTPLHLNHHTNPHHHHMFTALHHHHITRLLLSLHTNPHHHPMFTALHHHHITLLLLRLYTNLHHHHMFTALHHHHTTPLHLNHHTNPHHHRTSITLHLLLTTLLHLRSYTNRHHTHMYVFVPHLHHATLILQRLSTNPHQHHMFTTHHLPHLIIRLRLNLHINLHHHLTSTALHHHHITHLLLSPYTNLHHHHTCTTPHHHHITHHPLNLHTNLHHHHMYTALHHHHITHLLLNLHTNLHHPHMSTVPHHHHITRLLLSQHTNPHHHHTSTVLHHHHITHLLLSPHTNLHHHHTFTAPHHHHTTRLPLSLHTNLHHLHMYIALHLHHLITLLLQRLSTNLRHHHMSTVLLPHHITLLLQRLSTNLLLHRMFIVLHLHHHITLLLQRLSTNPLHHRMSTAPHHHPRIILLLQRLNTNLHHLHMSTTLHLHRRITLHLQRLSTNLHLHHMSTVLHHHHHILLLQKLNTNLLLPHPYIT

SEQ ID NO: 72153 - DNA, 1188 bp, Arabidopsis thaliana
  misc_feature (1)..(1188): Ceres Seq. ID no. 4919394
  misc_feature (1)..(1188): Ortholog of  Ceres SEQ ID NO 15171245 as cited in SEQ ID NO 52264
  misc_feature (1)..(1188): Ortholog of  Ceres SEQ ID NO 14303576 as cited in SEQ ID NO 68428
atgtcctggacggcagatggctatgtggctacggtaactatgaacaacttccaaatctaccggcacatacaaaaccctggttggacattaggttggacatgggcaaagaaagaggtgatttggtcaatggttggtgcacaaacaacagaacaaggagactgttccaagtttaagggaaatgtacctcattgctgtaagaaaacccctacagttgttgatctcttgccaggtgtgccttataatcaacagttctcaaactgttgcaaaggaggtgtaattggagcttggggtcaagatccatcagccgctgtatcccagtttcaggttagtgctggtttagctggaactacaaacaagactgtcaagcttcctaagaacttcactttgcttggtcccggccctggttacacttgcggtcctgccaaaatcgtgccctctaccgtttttctcacaactgacaaacggcgaaaaacacaagctttgatgacatggaatgttacctgcacatactcacagtttttagcaagaaagcatccaagctgttgtgtctccttctcttctttctacaacgacaccataactccttgcccgtcttgtgcctgtggctgcgagaacaaaaagagctgcgtcaaggctgattctaagattctaaccaagaaaggtctcaacacaccaaaaaaggacaacactcctttgttgcaatgcacacatcacatgtgccctgttagagtccactggcacgttaaaactaactacaaagactattggcgagtgaagatagcaatcacaaatttcaattaccggatgaatcatacactctggactttagcaattcagcatccaaatctcaacaatgtgactcaagttttcagctttgactacaaaccagtctctccttacggatccataaatgatactggaatgttctatggaacgaagttttacaatgatttattaatggaagctggaccttcagggaatgtgcaatcagaggttttgctacagaaagatcaaaagacttttactttcaagcaaggttgggcttttcctagaaaagtttactttaatggtgatgaatgtatgttacctccaccagattcatacccttttctaccaaactctgcacaagggaactttgcttcgttctcactcaccattcttcttctcctattcatctcaatatggtga

SEQ ID NO: 72154 - protein, 395 aa, Arabidopsis thaliana; identical to SEQ ID NO: 71459
  peptide (1)..(395): Ceres Seq. ID no. 4919395

SEQ ID NO: 72155 - protein, 382 aa, Arabidopsis thaliana
  peptide (1)..(382): Ceres Seq. ID no. 4919396
MNNFQIYRHIQNPGWTLGWTWAKKEVIWSMVGAQTTEQGDCSKFKGNVPHCCKKTPTVVDLLPGVPYNQQFSNCCKGGVIGAWGQDPSAAVSQFQVSAGLAGTTNKTVKLPKNFTLLGPGPGYTCGPAKIVPSTVFLTTDKRRKTQALMTWNVTCTYSQFLARKHPSCCVSFSSFYNDTITPCPSCACGCENKKSCVKADSKILTKKGLNTPKKDNTPLLQCTHHMCPVRVHWHVKTNYKDYWRVKIAITNFNYRMNHTLWTLAIQHPNLNNVTQVFSFDYKPVSPYGSINDTGMFYGTKFYNDLLMEAGPSGNVQSEVLLQKDQKTFTFKQGWAFPRKVYFNGDECMLPPPDSYPFLPNSAQGNFASFSLTILLLLFISIW

SEQ ID NO: 72156 - protein, 353 aa, Arabidopsis thaliana
  peptide (1)..(353): Ceres Seq. ID no. 4919397
MVGAQTTEQGDCSKFKGNVPHCCKKTPTVVDLLPGVPYNQQFSNCCKGGVIGAWGQDPSAAVSQFQVSAGLAGTTNKTVKLPKNFTLLGPGPGYTCGPAKIVPSTVFLTTDKRRKTQALMTWNVTCTYSQFLARKHPSCCVSFSSFYNDTITPCPSCACGCENKKSCVKADSKILTKKGLNTPKKDNTPLLQCTHHMCPVRVHWHVKTNYKDYWRVKIAITNFNYRMNHTLWTLAIQHPNLNNVTQVFSFDYKPVSPYGSINDTGMFYGTKFYNDLLMEAGPSGNVQSEVLLQKDQKTFTFKQGWAFPRKVYFNGDECMLPPPDSYPFLPNSAQGNFASFSLTILLLLFISIW

SEQ ID NO: 72157 - DNA, 912 bp, Arabidopsis thaliana
  misc_feature (1)..(912): Ceres Seq. ID no. 4919864
  misc_feature (1)..(912): Ortholog of  Ceres SEQ ID NO 13655302 as cited in SEQ ID NO 63307
  misc_feature (1)..(912): Ortholog of  Ceres SEQ ID NO 13597380 as cited in SEQ ID NO 64054
  misc_feature (1)..(912): Ortholog of  Ceres SEQ ID NO 12625474 as cited in SEQ ID NO 64169
  misc_feature (1)..(912): Ortholog of  Ceres SEQ ID NO 13597502 as cited in SEQ ID NO 64681
atggccagagccaattttgagccttacggtcgtgacttccctggtggtcgcgccaccggacgcttttgtaacggccgtctctcctccgatttcacttccgaggcttatggccttaaaccgaccgtgccagcctacctagatccgtcctataatatatctgattttgctaccggagtttgttttgcctccgccggcaccggttatgataattccacagccgatgtgcttggcgtgattccgttatggaaagaggtcgagtacttcaaggaataccaaagcaacctttccgcctatctcggccatcggagagctgccaaaatcatcagagaatctctgtacatagtaagcataggcaccaacgatttccttgagaactactacacattaccggacaggagatctcaattcagcatcagtcagtaccaagacttcctggtcgagattgctgaggtgttcttaaaggacatttacagacttggagctcggaaaatgtctttcactggaatctcacctatggggtgtctaccgctggagagagtgacaaatcttgacgacccttttagctgtgctcggagttataatgatttggctgtagatttcaatgggagattgagaagattggtgacaaaactgaatagagagcttactggaataaagatttatttcgctaatccttacgatatcatgtgggatattgttaccaaacctaatctttacggtctagagatatcaagttctgcctgttgcggtactggattgttcgagatgggatttctttgcggccaggacaatccgttaacttgcagtgatgccaataagttcgttttctgggacgcatttcacccgaccgagaggactaatcagattgtgtctgatcacttcttcaagcatctcaagaatctgtttcattga

SEQ ID NO: 72158 - protein, 303 aa, Arabidopsis thaliana; identical to SEQ ID NO: 43214
  peptide (1)..(303): Ceres Seq. ID no. 4919865

SEQ ID NO: 72159 - DNA, 600 bp, Arabidopsis thaliana
  misc_feature (1)..(600): Ceres Seq. ID no. 4920385
  misc_feature (1)..(600): Ortholog of  Ceres SEQ ID NO 14316436 as cited in SEQ ID NO 59213
atggaaacggatgatcacaacggtgatgttttagcgccgccgtcgaatttctcgatggttgaagatggaatttatcgatctgggtttcctcgacctgagaatttcagtttccttaaaaccctaaatcttcgttccatcatttatctgtgtcctgaaccatacccagaggagaatctcaagtttcttgaggctaacaacattaagctttaccaatttggaatcgaaggcaaaacggatcctccaactcctatgccaaaagatacagttttggatgctctcaaagttttagttgatgtgagaaaccatccaattctcatacattgcaaacgcgggaagcataggacaggttgtctagtgggatgcttaagaaaagttcagagctggtgtttatcatcggtgctcgaggagtaccagaagaacgcgggtttaaaatggagacaaagggacttgaattttatagaggcatttgatatagtgagcttgagacagtgtctcttgagcatcatgtatcagtatcacggttatggcttcaagaggagaaggttggcatatgaagaagagaatgtcaagacaccaaaaccgcaggctgctagagtttaa

SEQ ID NO: 72160 - protein, 199 aa, Arabidopsis thaliana; identical to SEQ ID NO: 71634
  peptide (1)..(199): Ceres Seq. ID no. 4920386

SEQ ID NO: 72161 - protein, 181 aa, Arabidopsis thaliana; identical to SEQ ID NO: 71635
  peptide (1)..(181): Ceres Seq. ID no. 4920387

SEQ ID NO: 72162 - protein, 116 aa, Arabidopsis thaliana
  peptide (1)..(116): Ceres Seq. ID no. 4920388
MPKDTVLDALKVLVDVRNHPILIHCKRGKHRTGCLVGCLRKVQSWCLSSVLEEYQKNAGLKWRQRDLNFIEAFDIVSLRQCLLSIMYQYHGYGFKRRRLAYEEENVKTPKPQAARV

SEQ ID NO: 72163 - DNA, 1566 bp, Arabidopsis thaliana
  misc_feature (1)..(1566): Ceres Seq. ID no. 4920469
  misc_feature (1)..(1566): Ortholog of  Ceres SEQ ID NO 12586556 as cited in SEQ ID NO 64667
  misc_feature (1)..(1566): Ortholog of  Ceres SEQ ID NO 14316045 as cited in SEQ ID NO 66810
  misc_feature (1)..(1566): Ortholog of  Ceres SEQ ID NO 13660894 as cited in SEQ ID NO 67475
atggcggagcagttactgaatcaattcatctccgcagtgatatcaaagtcgagacatttgaatcatttgaagcaagttcagtcctttatgatagtttctggactaagtcattcacatttcctctgttttaagcttcttcgtttttgtacgcttcgtctctgtaatctctcttacgctcgctttatctttgatcgtttctctttccccaatacgcatctttacgctgccgttttaactgcttactcttcttctcttcctcttcatgcttcttcagctttctccttctttcgtctcatggttaatcgttctgttcctcggcctaatcactttatctacccacttgttcttaagtctacaccatatctctcctctgctttttcaactcctttggtgcatacccatttgtttaaatctgggtttcatctctatgtcgttgttcaaactgctcttcttcactcctacgcttcctctgtttctcatataactcttgcaagacaactgttcgacgaaatgtctgagagaaatgttgtttcttggactgctatgctttctgggtatgctaggtctggtgatatctctaatgctgttgctctttttgaagatatgcctgagcgtgatgttccttcctggaatgcgattcttgctgcttgtactcagaatggtctttttcttgaagcggtttctctgtttagaaggatgattaatgagcctagcattcgtcctaatgaggtaactgtagtttgtgtcctctctgcgtgtgctcaaactggtacgcttcagctggctaaagggattcatgcctttgcttaccgtcgtgatctttcttctgatgtgtttgtttcgaattctttagttgacttgtatggaaaatgtggtaacttggaggaagcaagctctgtttttaagatggcatccaagaaaagtttaacagcttggaattctatgatcaattgctttgcactccatggtagaagtgaagaagccatagctgtgtttgaagaaatgatgaagttgaacattaacgatatcaaaccagatcacattactttcatcggtcttctcaatgcgtgtactcatggaggtttggtatcaaaaggccgaggttatttcgatctgatgacaaacagattcggtattgagccaaggattgagcattatggctgtctaatagatcttttaggcagggcaggtcggtttgatgaagctttagaagttatgtccacgatgaagatgaaagcggatgaggctatttggggatcactgcttaatgcttgtaagatacatggccatctggatttggctgaagttgctgtaaaaaacctggttgctttaaatcctaataatggaggttatgtcgctatgatggcaaatttatatggagagatgggtaattgggaagaggcacgtagagctagaaagatgatcaagcaccaaaatgcttataaaccaccaggctggagtcggattgagatcgataacgaggtccatcagttctactctcttgacaaatcacatccggagactgaggagatatacatgatacttgacagtctgatctctttctga

SEQ ID NO: 72164 - protein, 521 aa, Arabidopsis thaliana
  peptide (1)..(521): Ceres Seq. ID no. 4920470
MAEQLLNQFISAVISKSRHLNHLKQVQSFMIVSGLSHSHFLCFKLLRFCTLRLCNLSYARFIFDRFSFPNTHLYAAVLTAYSSSLPLHASSAFSFFRLMVNRSVPRPNHFIYPLVLKSTPYLSSAFSTPLVHTHLFKSGFHLYVVVQTALLHSYASSVSHITLARQLFDEMSERNVVSWTAMLSGYARSGDISNAVALFEDMPERDVPSWNAILAACTQNGLFLEAVSLFRRMINEPSIRPNEVTVVCVLSACAQTGTLQLAKGIHAFAYRRDLSSDVFVSNSLVDLYGKCGNLEEASSVFKMASKKSLTAWNSMINCFALHGRSEEAIAVFEEMMKLNINDIKPDHITFIGLLNACTHGGLVSKGRGYFDLMTNRFGIEPRIEHYGCLIDLLGRAGRFDEALEVMSTMKMKADEAIWGSLLNACKIHGHLDLAEVAVKNLVALNPNNGGYVAMMANLYGEMGNWEEARRARKMIKHQNAYKPPGWSRIEIDNEVHQFYSLDKSHPETEEIYMILDSLISF

SEQ ID NO: 72165 - protein, 492 aa, Arabidopsis thaliana
  peptide (1)..(492): Ceres Seq. ID no. 4920471
MIVSGLSHSHFLCFKLLRFCTLRLCNLSYARFIFDRFSFPNTHLYAAVLTAYSSSLPLHASSAFSFFRLMVNRSVPRPNHFIYPLVLKSTPYLSSAFSTPLVHTHLFKSGFHLYVVVQTALLHSYASSVSHITLARQLFDEMSERNVVSWTAMLSGYARSGDISNAVALFEDMPERDVPSWNAILAACTQNGLFLEAVSLFRRMINEPSIRPNEVTVVCVLSACAQTGTLQLAKGIHAFAYRRDLSSDVFVSNSLVDLYGKCGNLEEASSVFKMASKKSLTAWNSMINCFALHGRSEEAIAVFEEMMKLNINDIKPDHITFIGLLNACTHGGLVSKGRGYFDLMTNRFGIEPRIEHYGCLIDLLGRAGRFDEALEVMSTMKMKADEAIWGSLLNACKIHGHLDLAEVAVKNLVALNPNNGGYVAMMANLYGEMGNWEEARRARKMIKHQNAYKPPGWSRIEIDNEVHQFYSLDKSHPETEEIYMILDSLISF

SEQ ID NO: 72166 - protein, 423 aa, Arabidopsis thaliana
  peptide (1)..(423): Ceres Seq. ID no. 4920472
MVNRSVPRPNHFIYPLVLKSTPYLSSAFSTPLVHTHLFKSGFHLYVVVQTALLHSYASSVSHITLARQLFDEMSERNVVSWTAMLSGYARSGDISNAVALFEDMPERDVPSWNAILAACTQNGLFLEAVSLFRRMINEPSIRPNEVTVVCVLSACAQTGTLQLAKGIHAFAYRRDLSSDVFVSNSLVDLYGKCGNLEEASSVFKMASKKSLTAWNSMINCFALHGRSEEAIAVFEEMMKLNINDIKPDHITFIGLLNACTHGGLVSKGRGYFDLMTNRFGIEPRIEHYGCLIDLLGRAGRFDEALEVMSTMKMKADEAIWGSLLNACKIHGHLDLAEVAVKNLVALNPNNGGYVAMMANLYGEMGNWEEARRARKMIKHQNAYKPPGWSRIEIDNEVHQFYSLDKSHPETEEIYMILDSLISF

SEQ ID NO: 72167 - DNA, 1977 bp, Arabidopsis thaliana
  misc_feature (1)..(1977): Ceres Seq. ID no. 4920641
  misc_feature (1)..(1977): Ortholog of  Ceres SEQ ID NO 13659394 as cited in SEQ ID NO 67049
atgttggcaggttgttcgagttcatcattgttgtcgcctactcgaagattgaggagtgaagcagtagcagcaacatcagcaacagtatcagcgcattttcccatgaacacacagagattggacttaccatgcagtagtagcttctctcgcaaggaaactccttctagcagaccacttggaagaagcatctctcttgacaacagcaacaacaacaacaacaaaccgatcgagcgcaagacgaagaccagtggttgttcgcttaaacagaacataaagcttccacctttggcaacaacaagaggaaatggagaagggttttcttggaacaacgacaacaacaacagagggaagagtttgaagagattagctgaggaggacgagtcttgtttgagcagagcgaagaggacaaaatgcgaaaacgaaggtggtttctggtttgagcatttcactggccaggattcttcttcaccagcattacctttttctttgacttgttcaggtgatgatgaggaaaaggtttgctttgtgccaagtgaagtcatttctcagcctttaccaaactgggttgattcggtgattacggagctagctggtataggcgataaggacgttgagagtagccttcctgcagcagttaaggaagcatctggaggatcatctacaagcgcatcatccgagagtcgtagcttaagccatagagtaccagaacctacaaatggctcaaggaatccgtactcacaccgcggtgcaacagaggaaaggaccaccggaaacatcaacaacaacaacaacaggaacgatttgcagagggatttcgagcttgtcaatttgcttacgggatgcttagacgcgatcagatcaagaaacatagcagcgattaaccatttcattgcaagaaccggtgatcttgcttctcctagaggaagaacaccaatgactcgcctcatagcttactacattgaagctttggctctaagagtggcgcgtatgtggcctcacatcttccacatcgcaccccctcgtgaattcgatagaactgtcgaagatgaatcaggaaatgcattgaggttcttgaatcaagtaaccccaattccaaagttcattcatttcacagccaacgagatgttactcagagcatttgaagggaaagagagagttcacattattgacttcgacatcaagcaaggtttacagtggcctagcttcttccaaagcttagcttcgagaataaatccaccacaccatgtacgaatcactgggatcggagaatcgaaacttgagctaaacgaaaccggagatcgcctccacggatttgcagaggcgatgaatcttcaattcgagtttcatcctgtagttgatagactcgaagacgttagactatggatgcttcacgtcaaagaaggtgaatcagtagctgtaaactgtgtcatgcagatgcacaagacactctacgatggaaccggagcagcaattagggattttttgggtttaatcagaagcacaaacccaatagctctcgttcttgcggagcaagaagcagaacacaactcagagcaacttgagacacgagtttgtaactcgctaaagtactattcagctatgtttgatgcaattcacacgaatcttgctacagatagcttaatgagagtcaaagttgaggagatgttgtttgggagagagatcaggaacattgttgcgtgtgaaggaagtcatagacaagagaggcatgtgggttttcgtcattggaggaggatgttggagcagttagggtttcggagtcttggagtctcggagagagaggttttgcagagtaagatgttgcttaggatgtacggatctgataatgaagggtttttcaatgtggagaggagcgatgaagacaacggcggtgaaggcggacgcggcggtggagttactttacggtggtcggagcagccactttatacgatctcggcttggactaccggagggaattaa

SEQ ID NO: 72168 - protein, 658 aa, Arabidopsis thaliana; identical to SEQ ID NO: 71724
  peptide (1)..(658): Ceres Seq. ID no. 4920642

SEQ ID NO: 72169 - protein, 624 aa, Arabidopsis thaliana; identical to SEQ ID NO: 71725
  peptide (1)..(624): Ceres Seq. ID no. 4920643

SEQ ID NO: 72170 - protein, 347 aa, Arabidopsis thaliana
  peptide (1)..(347): Ceres Seq. ID no. 4920644
MTRLIAYYIEALALRVARMWPHIFHIAPPREFDRTVEDESGNALRFLNQVTPIPKFIHFTANEMLLRAFEGKERVHIIDFDIKQGLQWPSFFQSLASRINPPHHVRITGIGESKLELNETGDRLHGFAEAMNLQFEFHPVVDRLEDVRLWMLHVKEGESVAVNCVMQMHKTLYDGTGAAIRDFLGLIRSTNPIALVLAEQEAEHNSEQLETRVCNSLKYYSAMFDAIHTNLATDSLMRVKVEEMLFGREIRNIVACEGSHRQERHVGFRHWRRMLEQLGFRSLGVSEREVLQSKMLLRMYGSDNEGFFNVERSDEDNGGEGGRGGGVTLRWSEQPLYTISAWTTGGN

SEQ ID NO: 72171 - DNA, 1368 bp, Arabidopsis thaliana
  misc_feature (1)..(1368): Ceres Seq. ID no. 4920703
  misc_feature (1)..(1368): Ortholog of  Ceres SEQ ID NO 13594068 as cited in SEQ ID NO 58624
atggcgggaatcccagatcatatccaagaccaacatcttgtggaggaggatcaaccctttgatctggaagattggcttccaatcacagcatcaaggaatgccaattggtattattcagctttccacaacgtcactgccattgttggtgctggcgttctcggtcttccttacgccatgtcagagcttggatggggacctggggttgtggtgttgatcctgtcatgggtgatcacgttatacaccctctggcaaatgattgagatgcatgagatgtttgaagggcaacggttcgataggtaccatgagctgggtcaggcagcctttggtaaaaagcttggtttgtacatcatcgtgcccctacaactacttgtcgagatcagtgtgtgcatagtctatatggtcactggaggtaaatccctgaagaatgtacatgaccttgctttgggagatggtgacaagtgcacaaagcttagaattcaacacttcattttgatctttgcctcttcacagttcgtgctctcccttcttaagaacttcaactccatttctggtgtctccttggtagctgctgtcatgtctgtcagctattctacaattgcttgggtagcctcgctgaggaagggtgccaccaccgggagtgtagagtacggctatagaaaaagaacaacctcagtgccattagccttcttaagtgcactgggtgaaatggcttttgcgtacgcaggtcataacgttgttttggaaattcaagcaacgatcccatcaacaccagagaacccatcaaaacgacccatgtggaagggagcggttgtagcctatatcattgtagctttctgctacttccctgtggcacttgtaggtttcaagacctttggaaacagtgttgaagagagcatcctcgaatcactaacaaaaccaacggcacttgtcattgtggccaacatgtttgtggtcatacatctcttgggaagctaccaggtgtatgcgatgcccgtgtttgacatgatcgaatctgtaatgataaggatatggcacttcagtccaacaagagttctacggtttaccatccgatggacttttgtggccgccacgatgggaatagcggtcggtttaccgtattacagcgcattgctgtcattttttgggggatttgtgttcgccccgaccacatactttatcccatgcatcatgtggctgatcctaaagaaaccaaagagatttagtctctcatggtgtatgaactggttttgcatcatttttgggcttgtgctgatgatcatagcacctattgggggactggccaaactaatctataatattcaaaagggcactctacctaattcaagatgcaacttacctaaacactga

SEQ ID NO: 72172 - protein, 455 aa, Arabidopsis thaliana
  peptide (1)..(455): Ceres Seq. ID no. 4920704
MAGIPDHIQDQHLVEEDQPFDLEDWLPITASRNANWYYSAFHNVTAIVGAGVLGLPYAMSELGWGPGVVVLILSWVITLYTLWQMIEMHEMFEGQRFDRYHELGQAAFGKKLGLYIIVPLQLLVEISVCIVYMVTGGKSLKNVHDLALGDGDKCTKLRIQHFILIFASSQFVLSLLKNFNSISGVSLVAAVMSVSYSTIAWVASLRKGATTGSVEYGYRKRTTSVPLAFLSALGEMAFAYAGHNVVLEIQATIPSTPENPSKRPMWKGAVVAYIIVAFCYFPVALVGFKTFGNSVEESILESLTKPTALVIVANMFVVIHLLGSYQVYAMPVFDMIESVMIRIWHFSPTRVLRFTIRWTFVAATMGIAVGLPYYSALLSFFGGFVFAPTTYFIPCIMWLILKKPKRFSLSWCMNWFCIIFGLVLMIIAPIGGLAKLIYNIQKGTLPNSRCNLPKH

SEQ ID NO: 72173 - protein, 397 aa, Arabidopsis thaliana; identical to SEQ ID NO: 71793
  peptide (1)..(397): Ceres Seq. ID no. 4920705

SEQ ID NO: 72174 - protein, 371 aa, Arabidopsis thaliana; identical to SEQ ID NO: 71794
  peptide (1)..(371): Ceres Seq. ID no. 4920706

SEQ ID NO: 72175 - DNA, 1209 bp, Arabidopsis thaliana
  misc_feature (1)..(1209): Ceres Seq. ID no. 4920718
  misc_feature (1)..(1209): Ortholog of  Ceres SEQ ID NO 13596013 as cited in SEQ ID NO 61990
atggaggtggataagaaggacgagagagaggctgaatcttcggagcaagtggtgaatccatgggaagtgtccgccaaagacggcgggaagatcgattacgacaagcttattgacaaatttggatgtcaaaggcttgacgagtcactgattgatcgtgttcagagactgacttctcgtcaaccacacgtgttcctccgccgtagtgtcttcttcgcccaccgggatttcaatgagattttggacgcttatgagagaggagacaagttctatctctacactggaagaggaccttcatcagaagcattgcatttggggcatttgattcctttcatgtttaccaaatacttgcaagaagctttcaaggttccccttgttatacagctcacggatgatgaaaaaagtatatggaagaacttatcggtggaggaaagtcaaagacttgccagagaaaatgcgaaagatattattgcttgtggattcgatgtaacaaagaccttcattttctcggacttcgactatgttggcggtgctttctataaaaatatggtgaaggttggcaagtgcgttacacttaataaggctatgggaatctttggcttttccggtgaagatcctatcgcgaaactcagtttccctcctgtgcaggcagttccatcttttcctagctcattcccacatttgttccctggcaaggacaatctccgctgcttgattccttgtgctattgaccaggatccttattttagaatgactcgtgatgtcgcaccccggttaggctatagcaagcccgccctgattgagtcaacattttttcctgcgttgcagggagagaatggaaaaatgtctgctagtgatccaaattctgctatctatgtgactgattccgcaaaggacattaaaaacaagataaacagatatgcgtttagtggtgggcaagactccattgagaagcaccgagaacttggagcaaatctcgaggttgacatacccgtcaagtatctgagtttcttcctcgaagacgattctgaactagaacacattaaaaaggaatatggagaaggaagaatgctaacaggagaagtaaagaagagacttacggaagtgttgacagaaattgtggagagacaccgcagggctcgagctgctgttactgatgagatggttgatgcgttcatggcggtgagacctctcccaagcatgttcgaatag

SEQ ID NO: 72176 - protein, 402 aa, Arabidopsis thaliana; identical to SEQ ID NO: 41624
  peptide (1)..(402): Ceres Seq. ID no. 4920719

SEQ ID NO: 72177 - protein, 292 aa, Arabidopsis thaliana; identical to SEQ ID NO: 41625
  peptide (1)..(292): Ceres Seq. ID no. 4920720

SEQ ID NO: 72178 - protein, 221 aa, Arabidopsis thaliana
  peptide (1)..(221): Ceres Seq. ID no. 4920721
MVKVGKCVTLNKAMGIFGFSGEDPIAKLSFPPVQAVPSFPSSFPHLFPGKDNLRCLIPCAIDQDPYFRMTRDVAPRLGYSKPALIESTFFPALQGENGKMSASDPNSAIYVTDSAKDIKNKINRYAFSGGQDSIEKHRELGANLEVDIPVKYLSFFLEDDSELEHIKKEYGEGRMLTGEVKKRLTEVLTEIVERHRRARAAVTDEMVDAFMAVRPLPSMFE

SEQ ID NO: 72179 - DNA, 948 bp, Arabidopsis thaliana
  misc_feature (1)..(948): Ceres Seq. ID no. 4920882
  misc_feature (1)..(948): Ortholog of  Ceres SEQ ID NO 14309794 as cited in SEQ ID NO 20350
atggcttccggtgatgttcttcctagattcttcactgtcttcctctcccattgcagctccgaatccatggtgataccaaggtcttactacaatcttttaccacgtccgttgcccaagactgcgattctcatcggaactggtggaagattttggaaagtagcaatgacgagcaagcaagagcaagtgtattttgaacaaggctggggaaatttcgttgctgataaccagttaaaagagggagaattcttaacttttgtgtttgatgggcacaaaagttatgaagtaagtatctatggtcgtggagattgcaaagagactcgagcagtcattcaagttgaagagatctctgatgatacagaagatgacaacgtttctcttcatagccctagcaatgtttcacttgatagccttagcaacgattctcatcatagcactagcaacgtttctcttcgaagccttagcaacgattctcttcatggtgatgctgagatagagagcgacagtgagtattctcccgagaacctaccctcagcctctatatctgttgaatccgttgaggtggtgaatccaacaacaagcaggcagagaagttacaagaggaagaccattgagaatccacatctgtatttggatgatccaaacaatgtctgttttgagacgtgtcttaagcttagaaagtttgagctgttagttcatgcacagttggtgaaagactacggcttgatattcagcgacaatgttgactatattgacggatatggaaaactaaccgcgaaaacgaccaagtgggcagatcaacgggtttgcataaacaaatggcagaaaatatgcgagagaaaccagttcacagagaatgactccatcctatgtgaaattctccgcaacgaggacaaagtggtttatgcaatcaagattcacatcttccgcgatgcagcagcaagcacttga

SEQ ID NO: 72180 - protein, 315 aa, Arabidopsis thaliana; identical to SEQ ID NO: 71839
  peptide (1)..(315): Ceres Seq. ID no. 4920883

SEQ ID NO: 72181 - protein, 293 aa, Arabidopsis thaliana; identical to SEQ ID NO: 71840
  peptide (1)..(293): Ceres Seq. ID no. 4920884

SEQ ID NO: 72182 - protein, 261 aa, Arabidopsis thaliana
  peptide (1)..(261): Ceres Seq. ID no. 4920885
MTSKQEQVYFEQGWGNFVADNQLKEGEFLTFVFDGHKSYEVSIYGRGDCKETRAVIQVEEISDDTEDDNVSLHSPSNVSLDSLSNDSHHSTSNVSLRSLSNDSLHGDAEIESDSEYSPENLPSASISVESVEVVNPTTSRQRSYKRKTIENPHLYLDDPNNVCFETCLKLRKFELLVHAQLVKDYGLIFSDNVDYIDGYGKLTAKTTKWADQRVCINKWQKICERNQFTENDSILCEILRNEDKVVYAIKIHIFRDAAAST

SEQ ID NO: 72183 - DNA, 1533 bp, Arabidopsis thaliana
  misc_feature (1)..(1533): Ceres Seq. ID no. 4920891
  misc_feature (1)..(1533): Ortholog of  Ceres SEQ ID NO 14315469 as cited in SEQ ID NO 57169
  misc_feature (1)..(1533): Ortholog of  Ceres SEQ ID NO 13657008 as cited in SEQ ID NO 69164
atgaagatcaaagtcgcagctcgtcacatctcttaccgaactctcttccacactatcttaatcctcgctttcttgttaccttttgttttcatcctaaccgctgttgttacccttgaaggtgtcaacaagtgctcctcttttgattgtttcgggaggcggctaggaccacgtcttcttggtaggatagatgattcagagcagagactagttagagatttttacaaaattctaaatgaagtaagcactcaagaaattccagatggtttaaagcttccagagtcttttagtcaactggtttcggatatgaagaacaaccactatgatgctaaaacatttgccctcgtatttcgagctatggtagagaagtttgaaagggatttaagggaatccaaatttgcagaactcatgaacaagcactttgctgcaagttcaattccaaaaggaattcactgtctctctttaagactaaccgatgaatattcctccaatgctcatgcccggagacagcttccttccccggagcttctccctgttctctcagacaatgcttaccaccattttgttctagctacagataatatcttagctgcatcggttgtggtctcatctgctgttcaatcatcttcaaaacccgagaaaattgtcttccatgttatcacagacaagaaaacctatgcgggtatgcattcttggtttgcactcaattctgttgctcctgcgattgttgaagtgaaaagcgttcatcagtttgattggttaacaagagagaatgttccagttcttgaagctgtggaaagccataacagtatcagaaattattaccatgggaatcatattgctggtgcaaacctcagcgaaacaacccctcgaacatttgcttcgaaactgcagtcaagaagtcccaaatacatatctttgctcaaccatcttagaatatatctaccagagctttttccgaacttagacaaggtagtgttcttagatgatgatatagtgatacagaaagatttatctccgctttgggatattgaccttaacgggaaggttaatggagctgtggagacttgtcgaggagaagacgtatgggttatgtcaaagcgtcttaggaactacttcaatttttctcacccgctcatcgcaaagcatttagatcccgaagaatgtgcttgggcttatggaatgaatatctttgatctacggacttggaggaagacaaatatcagagaaacgtatcattcttggcttaaagagaatctgaagtcgaatctaacaatgtggaaacttggaacattgcctcctgctctaatagcatttaaaggtcatgttcagccaatagattcctcttggcatatgcttggattaggttatcagagcaagaccaacttagaaaatgcgaagaaagctgcagtgattcattacaatggccaatcaaagccgtggcttgagataggtttcgagcatctcagaccattctggacaaaatatgttaactactccaatgatttcattaagaattgtcatatcttggaatag

SEQ ID NO: 72184 - protein, 510 aa, Arabidopsis thaliana
  peptide (1)..(510): Ceres Seq. ID no. 4920892
MKIKVAARHISYRTLFHTILILAFLLPFVFILTAVVTLEGVNKCSSFDCFGRRLGPRLLGRIDDSEQRLVRDFYKILNEVSTQEIPDGLKLPESFSQLVSDMKNNHYDAKTFALVFRAMVEKFERDLRESKFAELMNKHFAASSIPKGIHCLSLRLTDEYSSNAHARRQLPSPELLPVLSDNAYHHFVLATDNILAASVVVSSAVQSSSKPEKIVFHVITDKKTYAGMHSWFALNSVAPAIVEVKSVHQFDWLTRENVPVLEAVESHNSIRNYYHGNHIAGANLSETTPRTFASKLQSRSPKYISLLNHLRIYLPELFPNLDKVVFLDDDIVIQKDLSPLWDIDLNGKVNGAVETCRGEDVWVMSKRLRNYFNFSHPLIAKHLDPEECAWAYGMNIFDLRTWRKTNIRETYHSWLKENLKSNLTMWKLGTLPPALIAFKGHVQPIDSSWHMLGLGYQSKTNLENAKKAAVIHYNGQSKPWLEIGFEHLRPFWTKYVNYSNDFIKNCHILE

SEQ ID NO: 72185 - protein, 409 aa, Arabidopsis thaliana
  peptide (1)..(409): Ceres Seq. ID no. 4920893
MKNNHYDAKTFALVFRAMVEKFERDLRESKFAELMNKHFAASSIPKGIHCLSLRLTDEYSSNAHARRQLPSPELLPVLSDNAYHHFVLATDNILAASVVVSSAVQSSSKPEKIVFHVITDKKTYAGMHSWFALNSVAPAIVEVKSVHQFDWLTRENVPVLEAVESHNSIRNYYHGNHIAGANLSETTPRTFASKLQSRSPKYISLLNHLRIYLPELFPNLDKVVFLDDDIVIQKDLSPLWDIDLNGKVNGAVETCRGEDVWVMSKRLRNYFNFSHPLIAKHLDPEECAWAYGMNIFDLRTWRKTNIRETYHSWLKENLKSNLTMWKLGTLPPALIAFKGHVQPIDSSWHMLGLGYQSKTNLENAKKAAVIHYNGQSKPWLEIGFEHLRPFWTKYVNYSNDFIKNCHILE

SEQ ID NO: 72186 - protein, 392 aa, Arabidopsis thaliana
  peptide (1)..(392): Ceres Seq. ID no. 4920894
MVEKFERDLRESKFAELMNKHFAASSIPKGIHCLSLRLTDEYSSNAHARRQLPSPELLPVLSDNAYHHFVLATDNILAASVVVSSAVQSSSKPEKIVFHVITDKKTYAGMHSWFALNSVAPAIVEVKSVHQFDWLTRENVPVLEAVESHNSIRNYYHGNHIAGANLSETTPRTFASKLQSRSPKYISLLNHLRIYLPELFPNLDKVVFLDDDIVIQKDLSPLWDIDLNGKVNGAVETCRGEDVWVMSKRLRNYFNFSHPLIAKHLDPEECAWAYGMNIFDLRTWRKTNIRETYHSWLKENLKSNLTMWKLGTLPPALIAFKGHVQPIDSSWHMLGLGYQSKTNLENAKKAAVIHYNGQSKPWLEIGFEHLRPFWTKYVNYSNDFIKNCHILE

SEQ ID NO: 72187 - DNA, 1563 bp, Arabidopsis thaliana
  misc_feature (1)..(1563): Ceres Seq. ID no. 4920902
  misc_feature (1)..(1563): Ortholog of  Ceres SEQ ID NO 15174591 as cited in SEQ ID NO 53383
atgaatgtgtgtccactggagttcaatgagtatataccttgtcacaatgtcacctatgtgcatcagctgctaccaagcttgaatctttctagaagagaagacctcgaaaggcattgcccgccactcgagcaccgccttttttgcttggtacctccgccaaatgattataagatacctattagatggccaaccagtagagactatgtatggagaagtaatgtgaaccatacacatcttgctcaagttaaaggtggccaaaattgggtccatgagcaaggtcagttttggtggttccctggtggtggtactcattttaagcatggagctgcagaatacatccagaggttggggaatatgatgactaatgaaacaggtgacttgcgttcagctggggtggtacaagttcttgatgttggctgtggagttgcgagctttgcggcttatcttcttcccttaggtatacagacaatttcatttgctcccaaagatggtcatgaaaaccagattcagtttgcattggagagaggcattggtgcaatgatatccgcggttgccaccaaacaattgccatatcctgcagcctcgtttgagatggttcattgttcgagatgtcgtgttgactggcatacaaatgatggcatcttacttaaagaagttcatcgtcttctccgaccaaatggattcttcgtgtattcatcaccaccagcatatagaaaggataaagagtatcctatgatttgggataagttggtcaatctaactagtgcaatgtgctggaagcttatttcccggaaggtacagactgcaatatggattaaagaagagaaggaggtttgtcttaagcagaaagcagagctaaagctaataagtttatgtgatgtggaagatgttttgaaaccatcatggaaagttcctcttaaagattgtgtgcaaatcagtggacaaacagaagagagaccctcttctttagctgaacgtctttctgcatatccagcaactctaagaaaaatagggatcagtgaagatgaatatacatcagatacagtgttctggagagaacaagttaatcattactggcggttaatgaatgtcaatgagactgaagtacggaatgtgatggacatgaacgcattcattggtggttttgctgcagctatgaattcgtatcctgtttgggtaatgaacatagtacctgcaaccatgaatgataccttgtctggaattttcgagagaggcttaaatggcgctttccatgattggtgtgaggcgttctcaacatatccacgcacgtatgatttggtgcattccgatcatgtcttctctcactacaacaaaagctacggagatggttgtttgctagaggatatcatgcttgagatggaccgcatagttcgccctcaggggtttgtcataataagggacgaggaatatatcatctcaaggatccgaggcttggctccaaaattcttgtgggaagtggaaactcatgagcttgaaaacaaagacaagaagataacagagtctgttttgttttgcagaaagagattctgggcaatcatttga

SEQ ID NO: 72188 - protein, 520 aa, Arabidopsis thaliana
  peptide (1)..(520): Ceres Seq. ID no. 4920903
MNVCPLEFNEYIPCHNVTYVHQLLPSLNLSRREDLERHCPPLEHRLFCLVPPPNDYKIPIRWPTSRDYVWRSNVNHTHLAQVKGGQNWVHEQGQFWWFPGGGTHFKHGAAEYIQRLGNMMTNETGDLRSAGVVQVLDVGCGVASFAAYLLPLGIQTISFAPKDGHENQIQFALERGIGAMISAVATKQLPYPAASFEMVHCSRCRVDWHTNDGILLKEVHRLLRPNGFFVYSSPPAYRKDKEYPMIWDKLVNLTSAMCWKLISRKVQTAIWIKEEKEVCLKQKAELKLISLCDVEDVLKPSWKVPLKDCVQISGQTEERPSSLAERLSAYPATLRKIGISEDEYTSDTVFWREQVNHYWRLMNVNETEVRNVMDMNAFIGGFAAAMNSYPVWVMNIVPATMNDTLSGIFERGLNGAFHDWCEAFSTYPRTYDLVHSDHVFSHYNKSYGDGCLLEDIMLEMDRIVRPQGFVIIRDEEYIISRIRGLAPKFLWEVETHELENKDKKITESVLFCRKRFWAII

SEQ ID NO: 72189 - protein, 402 aa, Arabidopsis thaliana
  peptide (1)..(402): Ceres Seq. ID no. 4920904
MMTNETGDLRSAGVVQVLDVGCGVASFAAYLLPLGIQTISFAPKDGHENQIQFALERGIGAMISAVATKQLPYPAASFEMVHCSRCRVDWHTNDGILLKEVHRLLRPNGFFVYSSPPAYRKDKEYPMIWDKLVNLTSAMCWKLISRKVQTAIWIKEEKEVCLKQKAELKLISLCDVEDVLKPSWKVPLKDCVQISGQTEERPSSLAERLSAYPATLRKIGISEDEYTSDTVFWREQVNHYWRLMNVNETEVRNVMDMNAFIGGFAAAMNSYPVWVMNIVPATMNDTLSGIFERGLNGAFHDWCEAFSTYPRTYDLVHSDHVFSHYNKSYGDGCLLEDIMLEMDRIVRPQGFVIIRDEEYIISRIRGLAPKFLWEVETHELENKDKKITESVLFCRKRFWAII

SEQ ID NO: 72190 - protein, 401 aa, Arabidopsis thaliana
  peptide (1)..(401): Ceres Seq. ID no. 4920905
MTNETGDLRSAGVVQVLDVGCGVASFAAYLLPLGIQTISFAPKDGHENQIQFALERGIGAMISAVATKQLPYPAASFEMVHCSRCRVDWHTNDGILLKEVHRLLRPNGFFVYSSPPAYRKDKEYPMIWDKLVNLTSAMCWKLISRKVQTAIWIKEEKEVCLKQKAELKLISLCDVEDVLKPSWKVPLKDCVQISGQTEERPSSLAERLSAYPATLRKIGISEDEYTSDTVFWREQVNHYWRLMNVNETEVRNVMDMNAFIGGFAAAMNSYPVWVMNIVPATMNDTLSGIFERGLNGAFHDWCEAFSTYPRTYDLVHSDHVFSHYNKSYGDGCLLEDIMLEMDRIVRPQGFVIIRDEEYIISRIRGLAPKFLWEVETHELENKDKKITESVLFCRKRFWAII

SEQ ID NO: 72191 - DNA, 1884 bp, Arabidopsis thaliana
  misc_feature (1)..(1884): Ceres Seq. ID no. 4920918
  misc_feature (1)..(1884): Ortholog of  Ceres SEQ ID NO 13598865 as cited in SEQ ID NO 0
atgacgagaaaagcaatgataaacatttgttgcgtggccacaacgccgtccaagtatccacctcctcctcctcttacgttaacccctcgccagagtttggaatcggcggctatctatggagtcattgaatccgcggcggatataatcgagagatggaacactgagaccaacactttcgctaaagttacttgtatgttctacgagaacaaacctgaagccatgatgttcatcgaacgtgtgaaggatcttcagaagacgatggacgtactcgtgagtgaggatccaaactctgagagactcttgagatcgcataagcttatgcaaatcgctatgaagaggttgcaaaaagagttttaccagattctttcgatgaatcgtgcttatcttgatccagaatcagtgtccactcgatcttcacttacttccgcaagatctagctactcagatttccccgactatgtcgaagatctagatacgatcatcgaactggaggaggtttctaccaacgtcatgacggatttgaaatccatcgctgagtgcatgatcggttctggttacgctaaggagtgtctaagcatctataaaagcattaggaaatcgatcatcgacgaagggatttatcgtttagaagtggagaagacgagtactgggaaggtgaagaaaatgtcatgggaagttatggagttgaagatcagaagctggttaaaagcagtcaaagtttctatggagactcttttcaaaggtgagaagattttgtgtgatcatgtctttgaatcctctgacgcaattagagagtcttgctttagtgatatctctcgagacggtgcgcttcttctctttggattcccggagatcattaatactaaaactagcaagaaacactctccgccggagaaagttttccggctgcttgacatgtacaccgccatcgccggaaactggcaagcgattgagtctatcttctcgtttgattcgatctccgtcgtcagatctcttgctcttaaatctctaatctctctcagcgaatcaattcgatcactacttgtggaattcgaatccggaatccagaaggactcgtcgaaggtggtggttcccggcggaggagtacatccactgacgatctccgtcatggatcacctctctctcctcgctgactacagcaacgtactagtcgatatcctcgccggatctccaccaccggacaggtcgctgttaccggagtcttacttcaacgtctcagaatccgacgactctccttcgtcggagctgacgatccgtttcgcttggatcatcctcgtcctcctttgtaaaatcgatcgtaaatcaattcactacaaagacttctctatacagtatctcttcctcaccaacaatctccagcacgtggtctcacgtgctcgttcctcaaacctgaagaaccttctcggcgaggattggatcacgagacatttcgctaagatgagacaattcgccggcagctataagcggctagcttggggaccggtggttgctactttacctgagaatcgtacggtggagatgacgccggaggaagtgaaggagcggtttgaaaaattcagcgagagcttcgaaaacgcgtatagtaagcacagtgtctgcgtcgtagctgatccaaatatacgagacgagatcaaagtatcgatatcgagaaagctggtgccgatctatcgcgagttttacaacacgagaggttctgttatcttgggagaaggcgatggcgcgagaaacctgaactcagttgtccgatttacccctgaagatattgaaaactatttgtctgatttgttcagagagaagggtagttcggggaattcgtcagcctcttctccttcctcttgtcggtcaaggcaatccatgtcctaa

SEQ ID NO: 72192 - protein, 627 aa, Arabidopsis thaliana; identical to SEQ ID NO: 71859
  peptide (1)..(627): Ceres Seq. ID no. 4920919

SEQ ID NO: 72193 - protein, 622 aa, Arabidopsis thaliana; identical to SEQ ID NO: 71860
  peptide (1)..(622): Ceres Seq. ID no. 4920920

SEQ ID NO: 72194 - protein, 563 aa, Arabidopsis thaliana
  peptide (1)..(563): Ceres Seq. ID no. 4920921
MFYENKPEAMMFIERVKDLQKTMDVLVSEDPNSERLLRSHKLMQIAMKRLQKEFYQILSMNRAYLDPESVSTRSSLTSARSSYSDFPDYVEDLDTIIELEEVSTNVMTDLKSIAECMIGSGYAKECLSIYKSIRKSIIDEGIYRLEVEKTSTGKVKKMSWEVMELKIRSWLKAVKVSMETLFKGEKILCDHVFESSDAIRESCFSDISRDGALLLFGFPEIINTKTSKKHSPPEKVFRLLDMYTAIAGNWQAIESIFSFDSISVVRSLALKSLISLSESIRSLLVEFESGIQKDSSKVVVPGGGVHPLTISVMDHLSLLADYSNVLVDILAGSPPPDRSLLPESYFNVSESDDSPSSELTIRFAWIILVLLCKIDRKSIHYKDFSIQYLFLTNNLQHVVSRARSSNLKNLLGEDWITRHFAKMRQFAGSYKRLAWGPVVATLPENRTVEMTPEEVKERFEKFSESFENAYSKHSVCVVADPNIRDEIKVSISRKLVPIYREFYNTRGSVILGEGDGARNLNSVVRFTPEDIENYLSDLFREKGSSGNSSASSPSSCRSRQSMS

SEQ ID NO: 72195 - DNA, 852 bp, Arabidopsis thaliana
  misc_feature (1)..(852): Ceres Seq. ID no. 4921051
  misc_feature (1)..(852): Ortholog of  Ceres SEQ ID NO 13596911 as cited in SEQ ID NO 60640
atggcgtcgtcgtctctcatgtatgtctctcctccagagtctatcctgtgggagaaacgttcgaaggcgattcttgataatataaagaattttgaagctgatttcatctgtctacaagaagtagacgagtaccatagttttttcgatagaaacatggaagctcaaggatactctggaattcctattgaaaataaagaaggctatgaatgcgcaatctttttcaagcccaaatttgcagagttcattacataccaaacaaccagaatccaaggatacaccaaatatgaaaacctttgcgtggcgccgagtagtagtaccgtaagtagtgagtctagtgacgttgttaacgctgaagagctttctgtggtaatggtagcgttcaagattttaaaaccatttaatcatgtcgttattattgcaagctctcatttaaaatccgggaaacctgatcgatgggatgatttaaagctagctcaagtcaagactctaatgactgaattagcctcgttcaaggagattatatcagcgctaacaaattgcagtccatcggtgatccttgctggtgacttcaattcgaaaccctacgtgcataaatacataaattcagacaatataccgtctgatattgatctacgaagtgtgtatgaatttacgaaaggagagccaaggttcacaaataatgtgccagggtttgctgaaacactcgattacatgttctacacgcattctgaaattatttctcctgtgaagctcctggattcgccggacgaagtcgatttcttacccaatgaaattcatccgagtgatcatttacccatcggcgttgagtttgagatcaaccgaaacatatag

SEQ ID NO: 72196 - protein, 283 aa, Arabidopsis thaliana; identical to SEQ ID NO: 71596
  peptide (1)..(283): Ceres Seq. ID no. 4921052

SEQ ID NO: 72197 - protein, 277 aa, Arabidopsis thaliana; identical to SEQ ID NO: 71597
  peptide (1)..(277): Ceres Seq. ID no. 4921053

SEQ ID NO: 72198 - protein, 232 aa, Arabidopsis thaliana
  peptide (1)..(232): Ceres Seq. ID no. 4921054
MEAQGYSGIPIENKEGYECAIFFKPKFAEFITYQTTRIQGYTKYENLCVAPSSSTVSSESSDVVNAEELSVVMVAFKILKPFNHVVIIASSHLKSGKPDRWDDLKLAQVKTLMTELASFKEIISALTNCSPSVILAGDFNSKPYVHKYINSDNIPSDIDLRSVYEFTKGEPRFTNNVPGFAETLDYMFYTHSEIISPVKLLDSPDEVDFLPNEIHPSDHLPIGVEFEINRNI

SEQ ID NO: 72199 - DNA, 1200 bp, Arabidopsis thaliana
  misc_feature (1)..(1200): Ceres Seq. ID no. 4922754
  misc_feature (1)..(1200): Ortholog of  Ceres SEQ ID NO 13596090 as cited in SEQ ID NO 68377
  misc_feature (1)..(1200): Ortholog of  Ceres SEQ ID NO 14303557 as cited in SEQ ID NO 68595
atgggagcggtgacgtcatcaatggcggcgaagtttgcgtttttcccgccaaatccgccgtcgtacggcgtagaagtggtggaaggaaagctgaggctgattggtgtagagaacgtgaaggagaatgttgaagtattgaagctgaagacgaagagaggtaatcaggtggttgcggcgtatattaagaatcctacagcttcacttacgcttctttattctcatggtaacgccgcggatcttggtcagatgttcgagcttttctccgagcttagcctccatcttcgtgttaacttaattgggtatgattattcgggttatgggagatcttcagggaagcctagtgagcagaacacgtatagcgatatagaagcagtgtatagatgcttggaagagaagtatggtgtgaaggaacaagatgttatcttatatggacaatctgtaggaagcggcccgactttagaattggcttctcggttacctaacctacgagccgtggttcttcatagcgctattgcttccggacttagagtcatgtaccctgttaaacgaacttactggttcgacatttacaagaatgtcgagaagatatcgtttgtcaaatgtccggttttagtaatacacggaacatcagatgatgttgttaattggtctcatgggaagcaattatttgagctatgtaaagaaaaatatgaaccgctttggatcaaaggagggaaccattgtgatttagagttatatccgcaatacataaagcatctaagaaaatttgtatcggcgattgaaaagtcgccgatacttagaaatggaccggtgccactaacagagaaggcaaggagtagtacggatattagagaacctgcaagaccaagcacagatcagagagataaatcaagaacaagcacggatcaaagagagatgccgaagctgagtacagatatagcgagagcaagcgttgataagagggagagaacgagaagaagcgttgatgggactgagaaaccgagtaattccgcggaacagcaactagtacaaccagagaaaggaaggaatagcattgacaggtacatttctcagagtttctatgatgtgttgatgatcatgttgttgatgatcatgtatgataacaggtttggggagatgataagatcagtaggattttgcaacatagattgtttcaagcctacagcaacagctaagtga

SEQ ID NO: 72200 - protein, 399 aa, Arabidopsis thaliana
  peptide (1)..(399): Ceres Seq. ID no. 4922755
MGAVTSSMAAKFAFFPPNPPSYGVEVVEGKLRLIGVENVKENVEVLKLKTKRGNQVVAAYIKNPTASLTLLYSHGNAADLGQMFELFSELSLHLRVNLIGYDYSGYGRSSGKPSEQNTYSDIEAVYRCLEEKYGVKEQDVILYGQSVGSGPTLELASRLPNLRAVVLHSAIASGLRVMYPVKRTYWFDIYKNVEKISFVKCPVLVIHGTSDDVVNWSHGKQLFELCKEKYEPLWIKGGNHCDLELYPQYIKHLRKFVSAIEKSPILRNGPVPLTEKARSSTDIREPARPSTDQRDKSRTSTDQREMPKLSTDIARASVDKRERTRRSVDGTEKPSNSAEQQLVQPEKGRNSIDRYISQSFYDVLMIMLLMIMYDNRFGEMIRSVGFCNIDCFKPTATAK

SEQ ID NO: 72201 - protein, 392 aa, Arabidopsis thaliana
  peptide (1)..(392): Ceres Seq. ID no. 4922756
MAAKFAFFPPNPPSYGVEVVEGKLRLIGVENVKENVEVLKLKTKRGNQVVAAYIKNPTASLTLLYSHGNAADLGQMFELFSELSLHLRVNLIGYDYSGYGRSSGKPSEQNTYSDIEAVYRCLEEKYGVKEQDVILYGQSVGSGPTLELASRLPNLRAVVLHSAIASGLRVMYPVKRTYWFDIYKNVEKISFVKCPVLVIHGTSDDVVNWSHGKQLFELCKEKYEPLWIKGGNHCDLELYPQYIKHLRKFVSAIEKSPILRNGPVPLTEKARSSTDIREPARPSTDQRDKSRTSTDQREMPKLSTDIARASVDKRERTRRSVDGTEKPSNSAEQQLVQPEKGRNSIDRYISQSFYDVLMIMLLMIMYDNRFGEMIRSVGFCNIDCFKPTATAK

SEQ ID NO: 72202 - protein, 317 aa, Arabidopsis thaliana
  peptide (1)..(317): Ceres Seq. ID no. 4922757
MFELFSELSLHLRVNLIGYDYSGYGRSSGKPSEQNTYSDIEAVYRCLEEKYGVKEQDVILYGQSVGSGPTLELASRLPNLRAVVLHSAIASGLRVMYPVKRTYWFDIYKNVEKISFVKCPVLVIHGTSDDVVNWSHGKQLFELCKEKYEPLWIKGGNHCDLELYPQYIKHLRKFVSAIEKSPILRNGPVPLTEKARSSTDIREPARPSTDQRDKSRTSTDQREMPKLSTDIARASVDKRERTRRSVDGTEKPSNSAEQQLVQPEKGRNSIDRYISQSFYDVLMIMLLMIMYDNRFGEMIRSVGFCNIDCFKPTATAK

SEQ ID NO: 72203 - DNA, 570 bp, Arabidopsis thaliana
  misc_feature (1)..(570): Ceres Seq. ID no. 4923683
  misc_feature (1)..(570): Ortholog of  Ceres SEQ ID NO 14308766 as cited in SEQ ID NO 58752
atgaatgttttatcatgttccatcaacacactaataaaagaagggttatatgagatatttggtgtagaagtaggccaacatttctactggcaaatagggggtttccgggtccatgcccaagttcttagtaattcttgggttgtaattgctatcttattaggttctgcagttctagcgattcacaatccacaaacaattccaactgacggccaaaatttctttgaatttgtgcttgaattcattcgaaacataagtaaaacccagattggacaagaatatggtccatgggttccctttattggaaccctgtttttactatttttgtttctaattggtcaggagcccttttactggaaaattatccagttattacaaggggagttagtagcaccaacgaatgatataaatacgacggttgttttagctttactcacattagtagcctatttttatgcggggcttagcaaaaaacgattagggaatttcagtaaatacattcaaccaaccccaattcttttacacattaatatcttagaagattttacgaaacccctatcacttagtttttaa

SEQ ID NO: 72204 - protein, 189 aa, Arabidopsis thaliana
  peptide (1)..(189): Ceres Seq. ID no. 4923684
MNVLSCSINTLIKEGLYEIFGVEVGQHFYWQIGGFRVHAQVLSNSWVVIAILLGSAVLAIHNPQTIPTDGQNFFEFVLEFIRNISKTQIGQEYGPWVPFIGTLFLLFLFLIGQEPFYWKIIQLLQGELVAPTNDINTTVVLALLTLVAYFYAGLSKKRLGNFSKYIQPTPILLHINILEDFTKPLSLSF

SEQ ID NO: 72205 - DNA, 690 bp, Arabidopsis thaliana
  misc_feature (1)..(690): Ceres Seq. ID no. 4923701
  misc_feature (1)..(690): Ortholog of  Ceres SEQ ID NO 13646499 as cited in SEQ ID NO 20565
atgtatctcagtcgtgctgtttctcctcgaaatgtcccggttttctctaccggatcttttgcccttgatgtagctttgggagttggtggccttcctaaggggcgtcttgtggagatatatggtcctgaagcatcgggaaagacagcacttgctcttcatatgctgagcatgctcttgattcgatcacttgctaaggcaatcggtgtaaatacagaaaatctgcttctatcacagcctgattgtggcaaacaggcccttagtcttgtggatactttgatccaaagtggttcagttgatgttattgtagttgatagtgtaagtaaggtggctgctcttgtacctaaaggagaactcgatggagagatgggtgatgcccatatggctattcaagccagattgatgagtcaagctttgcgtaaatttagccattctttattgttatcgcaaacacttctgatctttataaatcaggtaagagaacgatttggaggtccaacagaagttactagtggtggaaatgctttgaagttttatgcgcctatgcgtttggatattaagcgaattggacttatcaagaaaggcgaagagttcttcagaatgactaaatgcttgtgtttgaatgcttgtgcacacaacgggaagtcaagtctccgtgaagatagtgaagaacaagctcgctccgccatttaa

SEQ ID NO: 72206 - protein, 229 aa, Arabidopsis thaliana
  peptide (1)..(229): Ceres Seq. ID no. 4923702
MYLSRAVSPRNVPVFSTGSFALDVALGVGGLPKGRLVEIYGPEASGKTALALHMLSMLLIRSLAKAIGVNTENLLLSQPDCGKQALSLVDTLIQSGSVDVIVVDSVSKVAALVPKGELDGEMGDAHMAIQARLMSQALRKFSHSLLLSQTLLIFINQVRERFGGPTEVTSGGNALKFYAPMRLDIKRIGLIKKGEEFFRMTKCLCLNACAHNGKSSLREDSEEQARSAI

SEQ ID NO: 72207 - protein, 176 aa, Arabidopsis thaliana
  peptide (1)..(176): Ceres Seq. ID no. 4923703
MLSMLLIRSLAKAIGVNTENLLLSQPDCGKQALSLVDTLIQSGSVDVIVVDSVSKVAALVPKGELDGEMGDAHMAIQARLMSQALRKFSHSLLLSQTLLIFINQVRERFGGPTEVTSGGNALKFYAPMRLDIKRIGLIKKGEEFFRMTKCLCLNACAHNGKSSLREDSEEQARSAI

SEQ ID NO: 72208 - protein, 173 aa, Arabidopsis thaliana
  peptide (1)..(173): Ceres Seq. ID no. 4923704
MLLIRSLAKAIGVNTENLLLSQPDCGKQALSLVDTLIQSGSVDVIVVDSVSKVAALVPKGELDGEMGDAHMAIQARLMSQALRKFSHSLLLSQTLLIFINQVRERFGGPTEVTSGGNALKFYAPMRLDIKRIGLIKKGEEFFRMTKCLCLNACAHNGKSSLREDSEEQARSAI

SEQ ID NO: 72209 - DNA, 1854 bp, Arabidopsis thaliana
  misc_feature (1)..(1854): Ceres Seq. ID no. 4924786
  misc_feature (1)..(1854): Ortholog of  Ceres SEQ ID NO 13658032 as cited in SEQ ID NO 66092
  misc_feature (1)..(1854): Ortholog of  Ceres SEQ ID NO 13660894 as cited in SEQ ID NO 67475
atgttttcgttatcgttaatccaaccgcgtctccggatttcagagattccggtgactcaatcctacaaatctccgacgatatgttacagtagcgattcaagaactaagcgagaggaacagagacacgtgagattacctgggtttcgattagtttctggaaagagagcatctttcgattcgggttttagtggtttcaaaggagagaatgtgaatcaggatgattcgtcttctttcgatagcgaaagagttgattatgctctgttagcggagtggctacagtcttctaatgggatgcgactcattaaaaggatccatgcgatggcgttgaagtgttttgatgatcaagttatctattttgggaacaatttgattagttcttgtgttagacttggtgatttggtttatgcacgtaaagtgttcgacagtatgcctgagaaaaatactgttacttggactgctatgattgatgggtatttgaagtatggtcttgaggatgaggcttttgcactgtttgaggattatgtgaagcatggaatacgttttacgaacgagaggatgtttgtgtgtttgttgaatctgtgtagtaggagagcagagtttgagttagggagacaagttcatggtaatatggtgaaagttggagtggggaatctcattgtggagagttctcttgtttatttttatgcgcaatgcggtgaattgacaagtgcgttacgagcttttgatatgatggaggagaaagatgtgatatcttggactgctgttatatcggcgtgttcgagaaaagggcatggaattaaagctataggcatgtttatcggaatgttgaatcactggtttttgcctaacgagtttacggtgtgcagtattttgaaggcttgtagtgaggagaaagcgttaagattcggaaggcaagtacacagcttggttgttaagaggatgataaagacagatgtttttgtgggaacttcgctgatggacatgtatgctaagtgtggggagatttctgattgcagaaaagtgtttgatggaatgagtaatagaaacacggtcacatggacttcgattatagctgctcatgctcgggaaggttttggtgaggaagctatcagcctcttccggataatgaagaggcggcatttgattgctaacaatttgacagtagtaagcattcttagagcgtgtggatctgttggagctttattgttggggaaggaacttcatgcacagattatcaagaattcgatcgaaaagaatgtctatataggaagtactttggtgtggctgtattgtaaatgcggagaatctcgtgacgctttcaatgttctccagcaattgccatctagagatgtggtttcatggaccgctatgatctctggatgttcgagcttaggacatgaatcggaagcgctagacttcttgaaagagatgattcaagaaggtgtagagccaaacccatttacatactcctcggctttaaaagcttgtgcgaattcagaatctcttcttatcggtagatcaatccattccattgcaaagaagaatcatgctctatcaaatgtctttgtgggaagtgctttgattcacatgtatgcaaaatgtggatttgtctcggaagcttttcgggtttttgacagtatgcctgagaagaacttggtttcatggaaggcgatgataatgggttatgcgaggaatgggttttgcagggaagcattgaagctaatgtatagaatggaggcagagggatttgaagttgatgattatatatttgcaacaattctctctacttgtggagatattgagctcgatgaagctgttgaatcttctgcaacttgttacttggagacatcttga

SEQ ID NO: 72210 - protein, 617 aa, Arabidopsis thaliana
  peptide (1)..(617): Ceres Seq. ID no. 4924787
MFSLSLIQPRLRISEIPVTQSYKSPTICYSSDSRTKREEQRHVRLPGFRLVSGKRASFDSGFSGFKGENVNQDDSSSFDSERVDYALLAEWLQSSNGMRLIKRIHAMALKCFDDQVIYFGNNLISSCVRLGDLVYARKVFDSMPEKNTVTWTAMIDGYLKYGLEDEAFALFEDYVKHGIRFTNERMFVCLLNLCSRRAEFELGRQVHGNMVKVGVGNLIVESSLVYFYAQCGELTSALRAFDMMEEKDVISWTAVISACSRKGHGIKAIGMFIGMLNHWFLPNEFTVCSILKACSEEKALRFGRQVHSLVVKRMIKTDVFVGTSLMDMYAKCGEISDCRKVFDGMSNRNTVTWTSIIAAHAREGFGEEAISLFRIMKRRHLIANNLTVVSILRACGSVGALLLGKELHAQIIKNSIEKNVYIGSTLVWLYCKCGESRDAFNVLQQLPSRDVVSWTAMISGCSSLGHESEALDFLKEMIQEGVEPNPFTYSSALKACANSESLLIGRSIHSIAKKNHALSNVFVGSALIHMYAKCGFVSEAFRVFDSMPEKNLVSWKAMIMGYARNGFCREALKLMYRMEAEGFEVDDYIFATILSTCGDIELDEAVESSATCYLETS

SEQ ID NO: 72211 - protein, 520 aa, Arabidopsis thaliana
  peptide (1)..(520): Ceres Seq. ID no. 4924788
MRLIKRIHAMALKCFDDQVIYFGNNLISSCVRLGDLVYARKVFDSMPEKNTVTWTAMIDGYLKYGLEDEAFALFEDYVKHGIRFTNERMFVCLLNLCSRRAEFELGRQVHGNMVKVGVGNLIVESSLVYFYAQCGELTSALRAFDMMEEKDVISWTAVISACSRKGHGIKAIGMFIGMLNHWFLPNEFTVCSILKACSEEKALRFGRQVHSLVVKRMIKTDVFVGTSLMDMYAKCGEISDCRKVFDGMSNRNTVTWTSIIAAHAREGFGEEAISLFRIMKRRHLIANNLTVVSILRACGSVGALLLGKELHAQIIKNSIEKNVYIGSTLVWLYCKCGESRDAFNVLQQLPSRDVVSWTAMISGCSSLGHESEALDFLKEMIQEGVEPNPFTYSSALKACANSESLLIGRSIHSIAKKNHALSNVFVGSALIHMYAKCGFVSEAFRVFDSMPEKNLVSWKAMIMGYARNGFCREALKLMYRMEAEGFEVDDYIFATILSTCGDIELDEAVESSATCYLETS

SEQ ID NO: 72212 - protein, 511 aa, Arabidopsis thaliana
  peptide (1)..(511): Ceres Seq. ID no. 4924789
MALKCFDDQVIYFGNNLISSCVRLGDLVYARKVFDSMPEKNTVTWTAMIDGYLKYGLEDEAFALFEDYVKHGIRFTNERMFVCLLNLCSRRAEFELGRQVHGNMVKVGVGNLIVESSLVYFYAQCGELTSALRAFDMMEEKDVISWTAVISACSRKGHGIKAIGMFIGMLNHWFLPNEFTVCSILKACSEEKALRFGRQVHSLVVKRMIKTDVFVGTSLMDMYAKCGEISDCRKVFDGMSNRNTVTWTSIIAAHAREGFGEEAISLFRIMKRRHLIANNLTVVSILRACGSVGALLLGKELHAQIIKNSIEKNVYIGSTLVWLYCKCGESRDAFNVLQQLPSRDVVSWTAMISGCSSLGHESEALDFLKEMIQEGVEPNPFTYSSALKACANSESLLIGRSIHSIAKKNHALSNVFVGSALIHMYAKCGFVSEAFRVFDSMPEKNLVSWKAMIMGYARNGFCREALKLMYRMEAEGFEVDDYIFATILSTCGDIELDEAVESSATCYLETS

SEQ ID NO: 72213 - DNA, 1885 bp, Arabidopsis thaliana
  misc_feature (1)..(1885): Ceres Seq. ID no. 4924830
  misc_feature (1)..(1885): Ortholog of  Ceres SEQ ID NO 13597411 as cited in SEQ ID NO 64125
aaaaccaaacccacaaagtctctctctcttgctctctcggtgattcgattttcagaaccgaaactccggcgaaaagattatggcgggacagtcacgaaaatggatgatactggtggcgacgatatggattcaagctttcaccgggacgaatttcgatttctcagcttactcgtcagatttgaaatcggttctagggatttcacaggtgcagctaaactacctcgccgtggcttcggatctcggaaaagtattcggatggtcgtcgggactagcgcttatgtatttcccgctttggacggtgcttttcgcggcggcgtttatgggattcgtcggttatggagttcagtggcttgtcatcactcatttcatctctttgccttatatcatggtgtttctctgttgcttacttgctggtttaagtatctgttggttcaacactgtctgctttgtgctctgcattagtaacttccctgcaaacagatcacttgctctttccctcacagtgagtttcaatggtgtaagcgctgctttatatactcttgcttacaacgcaatcaatccaacttctccagagctatatcttcttttgaacgctcttataccgctcattgtctctttcactgctatcatcccgattcttcgtcaaccgccttttgagcctcttccaccagatggagttcgtcgtgactctctcatgtttctattgctcaacatactcgctgctttaaacggtgtttatctccttctctttggatcaaactcctctgatttaacctctgctcgtctactctttggtggagcaatcctcctcttggtattccctttatgtattcccggtttagtcatcgcccggaattggtataaccgcacaatccacactagtttccgtctagaaggttctggtttcattcttgttgatcctgatgagcttgagttgcataaagggatgcttgcacatgaagcaaaccgtgaaggttaccaattgctgagtgacgatgtggtgcaaaacccggttaagtccgtagctgttgaggaagaggatagtgatgagtcatgttgcaagaaacttatcacaagagatcagcttgaaggtttggggattgaacattctttgtcgctgctcttaaccagatcagatttttggttatactatatcacgtacttctgcggtggaaccattggacttgtgtacagcaacaaccttggacagattgctcaatctttaggacaaagctcaaataccacaactcttgtcacactttattctgctttctcattctttggaagattgctttctgcaacaccagattatatccgagcgaaggtttattttgccagaaccgggtggttagcaatcgcgctattaccaacccccttcgcacttttcttgcttgcatcatcaggaactgcatcagcattacaagctggaacagcgctgatgggtttaagctccgggtttatctttgcagcagcggtttccatcacatcagagctttttggaccaaacagtgttggagttaaccacaatatcttaatcacaaacataccgataggatcattgatctatggattcttggctgcattggtctatgactcacatggtttcaccgggaccaaatcaatgacctcggagtcggtggtgtgtatgggacgagattgttattacttgacctttgtgtggtggggttgcttgtctcttcttgggctaggttcgagtcttgtgttgtttattagaactagacgagcttatcaacggtttgaacaagctcgtataagttcgaacatcaacgactcttagaaatttgcatcaaccccaacggtttgtgtgtatatgtaggatctaaattataacagacggattaatggtattttagtggattttggc

SEQ ID NO: 72214 - protein, 572 aa, Arabidopsis thaliana; identical to SEQ ID NO: 38704
  peptide (1)..(572): Ceres Seq. ID no. 4924831

SEQ ID NO: 72215 - protein, 564 aa, Arabidopsis thaliana; identical to SEQ ID NO: 38705
  peptide (1)..(564): Ceres Seq. ID no. 4924832

SEQ ID NO: 72216 - protein, 506 aa, Arabidopsis thaliana; identical to SEQ ID NO: 38706
  peptide (1)..(506): Ceres Seq. ID no. 4924833

SEQ ID NO: 72217 - DNA, 720 bp, Arabidopsis thaliana
  misc_feature (1)..(720): Ceres Seq. ID no. 4925096
  misc_feature (1)..(720): Ortholog of  Ceres SEQ ID NO 15178801 as cited in SEQ ID NO 0
atgaactcacctcctccttcttctaatgatggcttggcgaagcgaaaaagaggtcgaccgcgcaaagatgaaaactcaactccaaaaccggacatgaatttggtaggtaaggtggttactggtgtaatcgaaggatctttcgacgcaggctatctccttaacgttaaggttaaagacagtgacacccaactcagaggtctcgtgttcatacggggcagagtcactccgatcactccagaaaacgacgtggctcctcttgttaaaatgtacggaagagaagatatcaagaacaaccaaaccgatcattctttccctactgatcaaccaatgcaagatgctgctgtcactactactgacatggatatttctgaatcctctcgagctttggtcgtagttccacaagcgaccaatggccaagcgaaggaagctacgaaggatgaagatggagtcattgaaggacaagctgacactcggttagtggagttttttccaactccaggcacaatgatgatgactgctcaaccaaatcttgtcttggtaccgaaagagacagaacaacagaaaacaactggtgggagtcatggattcgatcttatggaagaggaaccagttcgtcaaggagagaagttgccagaggagctattacatctagagcttggaaacaagacaacattgagtgtagacaacaacatctctacaacagaggcgcctgatctataa

SEQ ID NO: 72218 - protein, 239 aa, Arabidopsis thaliana
  peptide (1)..(239): Ceres Seq. ID no. 4925097
MNSPPPSSNDGLAKRKRGRPRKDENSTPKPDMNLVGKVVTGVIEGSFDAGYLLNVKVKDSDTQLRGLVFIRGRVTPITPENDVAPLVKMYGREDIKNNQTDHSFPTDQPMQDAAVTTTDMDISESSRALVVVPQATNGQAKEATKDEDGVIEGQADTRLVEFFPTPGTMMMTAQPNLVLVPKETEQQKTTGGSHGFDLMEEEPVRQGEKLPEELLHLELGNKTTLSVDNNISTTEAPDL

SEQ ID NO: 72219 - protein, 208 aa, Arabidopsis thaliana
  peptide (1)..(208): Ceres Seq. ID no. 4925098
MNLVGKVVTGVIEGSFDAGYLLNVKVKDSDTQLRGLVFIRGRVTPITPENDVAPLVKMYGREDIKNNQTDHSFPTDQPMQDAAVTTTDMDISESSRALVVVPQATNGQAKEATKDEDGVIEGQADTRLVEFFPTPGTMMMTAQPNLVLVPKETEQQKTTGGSHGFDLMEEEPVRQGEKLPEELLHLELGNKTTLSVDNNISTTEAPDL

SEQ ID NO: 72220 - protein, 151 aa, Arabidopsis thaliana
  peptide (1)..(151): Ceres Seq. ID no. 4925099
MYGREDIKNNQTDHSFPTDQPMQDAAVTTTDMDISESSRALVVVPQATNGQAKEATKDEDGVIEGQADTRLVEFFPTPGTMMMTAQPNLVLVPKETEQQKTTGGSHGFDLMEEEPVRQGEKLPEELLHLELGNKTTLSVDNNISTTEAPDL

SEQ ID NO: 72221 - DNA, 1590 bp, Arabidopsis thaliana
  misc_feature (1)..(1590): Ceres Seq. ID no. 4925263
  misc_feature (1)..(1590): Ortholog of  Ceres SEQ ID NO 13596509 as cited in SEQ ID NO 62004
  misc_feature (1)..(1590): Ortholog of  Ceres SEQ ID NO 13659971 as cited in SEQ ID NO 67565
  misc_feature (1)..(1590): Ortholog of  Ceres SEQ ID NO 13500385 as cited in SEQ ID NO 67583
ataaatttaattttaaaattcgaaactttttttctgcctttcctctttctctctctctatctatcaaacactagacttgaagaaatgcagtgaaattgaaattgagtagaagcagaagagaatatggtggtaaggaaggtgggcaagtatgaattaggtagaacaatcggcgaaggtactttcgctaaagtcaagttcgctcagaatacagagaccggtgagagcgtcgccatgaaaatcgtggatcgtagcacaatcatcaagcgcaagatggtggatcagattaagagagagatctcgattatgaagcttgttcgtcatccttgtgttgttcgtctttatgaggttctagcaagccgtacaaagatttatatcatcctggagtacattactggtggtgaactgtttgataagattgttcgtaatggacgacttagtgagtcagaagctaggaaatactttcaccagcttattgatggagttgattactgtcatagtaaaggtgtttaccacagagatctaaagccggaaaatcttctgttggattctcaaggaaatctcaagatatctgattttggcctcagtgcattacctgaacaaggagttaccatcctaaagacaacatgtggaactcccaattacgttgctcctgaggttctcagtcacaagggttacaatggtgccgttgcagatatttggtcctgtggggtcatcctttatgttcttatggcaggatatcttccatttgatgaaatggatctaccaactttatatagtaagatcgacaaagctgagttctcttgcccctcatattttgccctgggggcaaagtccttgattaatagaattttggatccaaatccagaaactcggattacaattgcagaaatcaggaaagatgagtggtttctaaaggattacactcctgtacaacttatcgattacgaacatgtaaacctggatgatgtatatgctgcttttgatgatccggaggaacaaacatatgcacaggatggaacaagagacacaggtccactaactctaaatgcgtttgacctaattattctatctcagggcctgaacctcgcaactctttttgaccgtggaaaggactccatgaagcaccagacaaggttcatctcacacaagccagcaaacgtggttctctcaagcatggaagttgtgtcacagtctatgggctttaagacacacattcgtaattacaagatgagagtggaaggattatctgcaaataagacatctcatttctccgtcatactagaacaggagacgcagaagaataccttaagttctacaagactttttgtagtaagcttgatgacatcatttggaagccgccagatgcatctatgagaaatcgagtcaccaaggccaagagtaaaagacgttgaatccacgtgcgtggtattcaagcagagctttcacagaagacagttagaaacaatatttaactctctgtgtttcttaagtgctttagtcgagtgaatatgtacaagcttgttgatttggttttaatttatgaatacatagaagattgtactaaacttatacgatatcaagactaaattg

SEQ ID NO: 72222 - protein, 416 aa, Arabidopsis thaliana; identical to SEQ ID NO: 41559
  peptide (1)..(416): Ceres Seq. ID no. 4925264

SEQ ID NO: 72223 - protein, 380 aa, Arabidopsis thaliana; identical to SEQ ID NO: 41560
  peptide (1)..(380): Ceres Seq. ID no. 4925265

SEQ ID NO: 72224 - protein, 367 aa, Arabidopsis thaliana; identical to SEQ ID NO: 41561
  peptide (1)..(367): Ceres Seq. ID no. 4925266

SEQ ID NO: 72225 - DNA, 981 bp, Arabidopsis thaliana
  misc_feature (1)..(981): Ceres Seq. ID no. 4925476
  misc_feature (1)..(981): Ortholog of  Ceres SEQ ID NO 15175496 as cited in SEQ ID NO 56127
  misc_feature (1)..(981): Ortholog of  Ceres SEQ ID NO 13596474 as cited in SEQ ID NO 62169
  misc_feature (1)..(981): Ortholog of  Ceres SEQ ID NO 13596969 as cited in SEQ ID NO 63375
  misc_feature (1)..(981): Ortholog of  Ceres SEQ ID NO 13597519 as cited in SEQ ID NO 64759
  misc_feature (1)..(981): Ortholog of  Ceres SEQ ID NO 13597870 as cited in SEQ ID NO 64982
  misc_feature (1)..(981): Ortholog of  Ceres SEQ ID NO 13656123 as cited in SEQ ID NO 65212
  misc_feature (1)..(981): Ortholog of  Ceres SEQ ID NO 13595926 as cited in SEQ ID NO 67778
atggtttgggcaaatgctaagatgaggctagctttgtctcttgttacggttttcttcggcatctctcttgctaatcttgaagtcggattttactccaatacatgccctcaagccgagtcaatcgttaagagggttgtctcaggggctgctctttccgaccctaacctcccagccatacttctacggctccatttccatgattgctttgttgagggatgtgatggctcgatcctcgtgaacaacggagcaatctctgaaaagaatgcatttggacatgaaggcgttagaggatttgagatagtagaagccgtcaaagccgagcttgaagctgcatgccccggtgttgtctcctgctcagacattgttgccttggctgcacgtgatgccatatctttggcgaatggaccggcgtatgaggtgccaactgggcggagagatggtcgggtttcgaacatgtcattggctaaggacatgccggaggtgagtgactcgattgagatactaaaggctaagttcatgcagaaaggactcaacgccaaagacctcgtgcttctcagtgctgctcacactatcggaacaacggcctgcttcttcatgtccaaacggctctatgatttcttacctggtggccaacctgacccgactatcaatccaacattcctacccgaattaaccactcagtgcccacaaaatggtgacataaacgtccgtttaccaattgaccggttcagcgaacggctattcgacaagcagattctgcaaaacataaaggatggttttgctgtgcttcagaccgacgcaggtctttacgaggatgtaacgaccagacaggtcgtggattcctatcttgggatgctaaatccattctttgggccaacattcgagtctgatttcgttaaggcgatcgtaaagatggggaagattggtgtgaagactggtttcaaaggggagattcgacgggtttgctcggccttcaattga

SEQ ID NO: 72226 - protein, 326 aa, Arabidopsis thaliana; identical to SEQ ID NO: 69630
  peptide (1)..(326): Ceres Seq. ID no. 4925477

SEQ ID NO: 72227 - protein, 319 aa, Arabidopsis thaliana
  peptide (1)..(319): Ceres Seq. ID no. 4925478
MRLALSLVTVFFGISLANLEVGFYSNTCPQAESIVKRVVSGAALSDPNLPAILLRLHFHDCFVEGCDGSILVNNGAISEKNAFGHEGVRGFEIVEAVKAELEAACPGVVSCSDIVALAARDAISLANGPAYEVPTGRRDGRVSNMSLAKDMPEVSDSIEILKAKFMQKGLNAKDLVLLSAAHTIGTTACFFMSKRLYDFLPGGQPDPTINPTFLPELTTQCPQNGDINVRLPIDRFSERLFDKQILQNIKDGFAVLQTDAGLYEDVTTRQVVDSYLGMLNPFFGPTFESDFVKAIVKMGKIGVKTGFKGEIRRVCSAFN

SEQ ID NO: 72228 - protein, 175 aa, Arabidopsis thaliana
  peptide (1)..(175): Ceres Seq. ID no. 4925479
MSLAKDMPEVSDSIEILKAKFMQKGLNAKDLVLLSAAHTIGTTACFFMSKRLYDFLPGGQPDPTINPTFLPELTTQCPQNGDINVRLPIDRFSERLFDKQILQNIKDGFAVLQTDAGLYEDVTTRQVVDSYLGMLNPFFGPTFESDFVKAIVKMGKIGVKTGFKGEIRRVCSAFN

SEQ ID NO: 72229 - DNA, 956 bp, Arabidopsis thaliana
  misc_feature (1)..(956): Ceres Seq. ID no. 4925743
  misc_feature (1)..(956): Ortholog of  Ceres SEQ ID NO 14314174 as cited in SEQ ID NO 54350
  misc_feature (1)..(956): Ortholog of  Ceres SEQ ID NO 15224566 as cited in SEQ ID NO 55626
  misc_feature (1)..(956): Ortholog of  Ceres SEQ ID NO 13502979 as cited in SEQ ID NO 69150
atacaattgatcttcccccatctccaattcagatttggacagagtaacctgtgatcgtgtcggttggggtagaagagatcgaagtgggagcaaaatcatgatgaatcggctattcgggaaacccaagcaggaggctaatgctctccaaactttagacaagcttaacgagacgcttgagatgctagagaaaaaggagaaagtactcttgaagaaagctggtgcagaggttgagaaggcaaaagaatactcccgggctaagaacaaacgagcggctatacagtgtttgaaaaggaagaggttatatgagggacaagtcgaacagcttgggaatttccagctccgtattcatgatcaaatgattatgttagaaggtgcaaaagcaacaaccgaaactgttgatgcattgaggagtggagcttctgcaatgaaggcaatgcagaaagcaacaaatattgatgatgtggataagaccatggacgagatcaatgagcaaaccgagaacatgaaacagatccaagaagcattggcgactccaatgggggcagcggctgacttcgacgaggatgagcttgcagcagagcttgatgaactagaaagtgaagagcttgaatcgcaacttctacagccggcaacaacagctcctccattgccttcagttccagtgcctgcagggcgtcaaccggctcgtcctgttccccagaagcggactgctgaggaagaagaactcgctgcattacaggctgagatggccctctaaggttattcacctctccgagcagagacatgtatgcattgatagacacgaacagacgatgtatataaggatctgaatcagattaattcggagcgaaaaacttttataatccccgtcgttaatgttatctgcaatttgagtgttcttcacataatttatcttttgtaatttttgtatctttttatgacactttttcctttgg

SEQ ID NO: 72230 - protein, 219 aa, Arabidopsis thaliana; identical to SEQ ID NO: 26925
  peptide (1)..(219): Ceres Seq. ID no. 4925744

SEQ ID NO: 72231 - protein, 218 aa, Arabidopsis thaliana; identical to SEQ ID NO: 26926
  peptide (1)..(218): Ceres Seq. ID no. 4925745

SEQ ID NO: 72232 - protein, 192 aa, Arabidopsis thaliana
  peptide (1)..(192): Ceres Seq. ID no. 4925746
MLEKKEKVLLKKAGAEVEKAKEYSRAKNKRAAIQCLKRKRLYEGQVEQLGNFQLRIHDQMIMLEGAKATTETVDALRSGASAMKAMQKATNIDDVDKTMDEINEQTENMKQIQEALATPMGAAADFDEDELAAELDELESEELESQLLQPATTAPPLPSVPVPAGRQPARPVPQKRTAEEEELAALQAEMAL

SEQ ID NO: 72233 - DNA, 2304 bp, Arabidopsis thaliana
  misc_feature (1)..(2304): Ceres Seq. ID no. 4926014
  misc_feature (1)..(2304): Ortholog of  Ceres SEQ ID NO 13660024 as cited in SEQ ID NO 67241
atggagaaaatgaatgtccgttttatgattgtgttgatggtaatgtctctggttctgggtttttcgtcggcagttgatttcagatggaggaaaactgcaggattctcagatagattcaccagagctgtttcttcagtcgtgttcccagttcatggcaacgtttatcctcttgggtactataatgtaaccatcaacataggacaaccaccaagaccttattatcttgatcttgatactggtagtgatctcacttggctccaatgtgatgctccttgtgttcgttgcttggaggcgcctcatccactgtatcagcctagtagtgatcttattccttgcaatgatccactgtgtaaggctttgcatttgaatagtaatcagagatgtgagactccagagcaatgtgactatgaggttgagtatgctgatggaggatcttctctcggtgttcttgttagagatgtcttctctatgaactatacacagggtctccggctcactccccgtcttgctctaggttgtggatacgatcaaatcccaggggcttcgagtcatcatcctctagatggagtattagggcttggtagggggaaagtaagcattctgtcacagcttcatagccaaggttatgtaaagaatgttatcggtcattgcctaagcagtttaggtggaggaattctcttttttggcgacgatctttatgattcttcaagagtctcatggacaccaatgtctcgtgaatactcaaaacactactctcctgcaatgggaggggaacttctattcgggggaagaacaacaggattgaagaatctattaacagtatttgacagtggaagttcttacacatacttcaattccaaggcataccaagccgtaacatatttgctaaagagagaactaagcggaaaaccgttgaaagaagcacgggatgaccacacgctgcctctatgctggcaaggacgtagaccattcatgagcattgaagaagtcaagaagtatttcaagcctctagctcttagcttcaaaacaggctggagatcaaaaactctgtttgagatacccccagaagcttatctaatcatttctatgaaggggaatgtatgtttgggaatcttgaatggcacagaaataggtctccagaacctaaacctcatcggcgatatatcgatgcaagatcagatgataatctacgataacgagaaacaatcaatcgggtggatgccagtggattgcgatgaacttgcttcactaaaagcagctcaagagactcaagtttctcactttctctcttccatggctttctcatactctttaacttctccgtcaccaaattcgactctctcctattccagtacccatcaatttctcaacccgtcttcttcgtttcccgtctcgttatcagtctcatctccgaagaatacccgccatcttcgtctcctcatcacctccgctttgaatccacagacgggacagccgacgaagaaggcctccaccggtagtgataagagtagtacgaacaagaaacgtaagaaaaaggggaaaattgcgaaacctgtggaggattgggaattgagagattcagaagacgcttttgaggaagatgatgatgccgattattcttcttcttcgagttctctagcaacttttaactctcctcctaccatacccaaaccacctgctgggtttgtgattaatgaaactggtagggttcttatggcctctaagaagcgtatcaccactgtgattgatccaacaaacaatagccctttggattgtgtgataagaagagtatttacaagtagtaaaggagaggattgtatgcttctttgccctgtggatacgccagttcagattttgaagagcacaaatattgatggatggtcagctgtcagtgatgaagaggtcgaatctcttcttcctgctgctgcttatgctcttgcaaagatccatatgcatctagtacacagcgggttctgttacactgcaaggggaggcttttgctacacggaagataatgtctttgattttcgcacagatgatggccaagatgttgaaggcttgccaactgaaggggttgagattacgtgtttccatctggatggatcacactatatggtctacacaccttcagatccacttctctttgttgctgctaaggatcaaaatgggctgctgcaaatcgctgatgatgaactcttagacgatccagctgtgatcagcgccatagacgaggaaaccgaattcaatgccttggtggaggaagaggcggctctcctggaatcactgcttggggaaagaatttga

SEQ ID NO: 72234 - protein, 767 aa, Arabidopsis thaliana
  peptide (1)..(767): Ceres Seq. ID no. 4926015
MEKMNVRFMIVLMVMSLVLGFSSAVDFRWRKTAGFSDRFTRAVSSVVFPVHGNVYPLGYYNVTINIGQPPRPYYLDLDTGSDLTWLQCDAPCVRCLEAPHPLYQPSSDLIPCNDPLCKALHLNSNQRCETPEQCDYEVEYADGGSSLGVLVRDVFSMNYTQGLRLTPRLALGCGYDQIPGASSHHPLDGVLGLGRGKVSILSQLHSQGYVKNVIGHCLSSLGGGILFFGDDLYDSSRVSWTPMSREYSKHYSPAMGGELLFGGRTTGLKNLLTVFDSGSSYTYFNSKAYQAVTYLLKRELSGKPLKEARDDHTLPLCWQGRRPFMSIEEVKKYFKPLALSFKTGWRSKTLFEIPPEAYLIISMKGNVCLGILNGTEIGLQNLNLIGDISMQDQMIIYDNEKQSIGWMPVDCDELASLKAAQETQVSHFLSSMAFSYSLTSPSPNSTLSYSSTHQFLNPSSSFPVSLSVSSPKNTRHLRLLITSALNPQTGQPTKKASTGSDKSSTNKKRKKKGKIAKPVEDWELRDSEDAFEEDDDADYSSSSSSLATFNSPPTIPKPPAGFVINETGRVLMASKKRITTVIDPTNNSPLDCVIRRVFTSSKGEDCMLLCPVDTPVQILKSTNIDGWSAVSDEEVESLLPAAAYALAKIHMHLVHSGFCYTARGGFCYTEDNVFDFRTDDGQDVEGLPTEGVEITCFHLDGSHYMVYTPSDPLLFVAAKDQNGLLQIADDELLDDPAVISAIDEETEFNALVEEEAALLESLLGERI

SEQ ID NO: 72235 - protein, 764 aa, Arabidopsis thaliana
  peptide (1)..(764): Ceres Seq. ID no. 4926016
MNVRFMIVLMVMSLVLGFSSAVDFRWRKTAGFSDRFTRAVSSVVFPVHGNVYPLGYYNVTINIGQPPRPYYLDLDTGSDLTWLQCDAPCVRCLEAPHPLYQPSSDLIPCNDPLCKALHLNSNQRCETPEQCDYEVEYADGGSSLGVLVRDVFSMNYTQGLRLTPRLALGCGYDQIPGASSHHPLDGVLGLGRGKVSILSQLHSQGYVKNVIGHCLSSLGGGILFFGDDLYDSSRVSWTPMSREYSKHYSPAMGGELLFGGRTTGLKNLLTVFDSGSSYTYFNSKAYQAVTYLLKRELSGKPLKEARDDHTLPLCWQGRRPFMSIEEVKKYFKPLALSFKTGWRSKTLFEIPPEAYLIISMKGNVCLGILNGTEIGLQNLNLIGDISMQDQMIIYDNEKQSIGWMPVDCDELASLKAAQETQVSHFLSSMAFSYSLTSPSPNSTLSYSSTHQFLNPSSSFPVSLSVSSPKNTRHLRLLITSALNPQTGQPTKKASTGSDKSSTNKKRKKKGKIAKPVEDWELRDSEDAFEEDDDADYSSSSSSLATFNSPPTIPKPPAGFVINETGRVLMASKKRITTVIDPTNNSPLDCVIRRVFTSSKGEDCMLLCPVDTPVQILKSTNIDGWSAVSDEEVESLLPAAAYALAKIHMHLVHSGFCYTARGGFCYTEDNVFDFRTDDGQDVEGLPTEGVEITCFHLDGSHYMVYTPSDPLLFVAAKDQNGLLQIADDELLDDPAVISAIDEETEFNALVEEEAALLESLLGERI

SEQ ID NO: 72236 - protein, 759 aa, Arabidopsis thaliana
  peptide (1)..(759): Ceres Seq. ID no. 4926017
MIVLMVMSLVLGFSSAVDFRWRKTAGFSDRFTRAVSSVVFPVHGNVYPLGYYNVTINIGQPPRPYYLDLDTGSDLTWLQCDAPCVRCLEAPHPLYQPSSDLIPCNDPLCKALHLNSNQRCETPEQCDYEVEYADGGSSLGVLVRDVFSMNYTQGLRLTPRLALGCGYDQIPGASSHHPLDGVLGLGRGKVSILSQLHSQGYVKNVIGHCLSSLGGGILFFGDDLYDSSRVSWTPMSREYSKHYSPAMGGELLFGGRTTGLKNLLTVFDSGSSYTYFNSKAYQAVTYLLKRELSGKPLKEARDDHTLPLCWQGRRPFMSIEEVKKYFKPLALSFKTGWRSKTLFEIPPEAYLIISMKGNVCLGILNGTEIGLQNLNLIGDISMQDQMIIYDNEKQSIGWMPVDCDELASLKAAQETQVSHFLSSMAFSYSLTSPSPNSTLSYSSTHQFLNPSSSFPVSLSVSSPKNTRHLRLLITSALNPQTGQPTKKASTGSDKSSTNKKRKKKGKIAKPVEDWELRDSEDAFEEDDDADYSSSSSSLATFNSPPTIPKPPAGFVINETGRVLMASKKRITTVIDPTNNSPLDCVIRRVFTSSKGEDCMLLCPVDTPVQILKSTNIDGWSAVSDEEVESLLPAAAYALAKIHMHLVHSGFCYTARGGFCYTEDNVFDFRTDDGQDVEGLPTEGVEITCFHLDGSHYMVYTPSDPLLFVAAKDQNGLLQIADDELLDDPAVISAIDEETEFNALVEEEAALLESLLGERI

SEQ ID NO: 72237 - DNA, 1155 bp, Arabidopsis thaliana
  misc_feature (1)..(1155): Ceres Seq. ID no. 4926052
  misc_feature (1)..(1155): Ortholog of  Ceres SEQ ID NO 12562983 as cited in SEQ ID NO 53309
atactctctttttttctcggacaagaaggctacagaaagatatgtcgctgtcgtcttacctcagcccgacgcgccttctagaaggctacctccgccgttgtctcagggcggcaggactgacgtcgcagacgctttccatagactctgaaacaaccatccacttctggggcccaccacctctagaccaccggagcgacgatgacagaccggttatgcttctcctccacggcttcggtccgtcgtccatgtggcagtggcggcgacagatgcaagccttctctccctccgctttcagggtttattctcccgatcttgtcttcttcggcgactctacctcttcctccaccaatcgcaccgaagtcttccaggcggaatgtatggcaaagctaatggcgaaaataggaatagggaagtataatgtggctggaacaagctacggggggtttgttgcgtaccacatggccaaaatgtggccggaaaaagtggagaaagtggtgattgcaagctccggcatcaacatgcgaaagtgtgacggtgaaagtttattgcaaagatccaattgtgagtgcatcgagaaggttatgttaccatccactgcaactgagtttcgcacacttatggctttggcatcttcatggcggttagttcgtatgtttcctgatgctctctggaacgacgtaatcaataatttgtataaaaagaatagaaaagagaagatagaattgttgaagggagtgactttcggccggagcgaaaatttaaacatcgattctctttctcaggaggtcctaattgtatggggagacaaagatcagatatttcctgtgaagatggcttacgaattaaaagagattcttggagacaaaacgaaactagaaatcattgacaacacttcacatgttcctcagattgaatgtgctcaagagttcaacaatattgttttgagatttttgaagggttcttaagagccgtaattttattccatgctacatgattcttcagttttttttaagtgttaaactattggttacgtaattttgcgactttacttgccatgctttctcatttttcatgtaagaactttatccattactgtcattgtagagaactctatttatagcaaaaagcaatactaatatgcaacttaattttcgt

SEQ ID NO: 72238 - protein, 320 aa, Arabidopsis thaliana
  peptide (1)..(320): Ceres Seq. ID no. 4926053
TLFFSRTRRLQKDMSLSSYLSPTRLLEGYLRRCLRAAGLTSQTLSIDSETTIHFWGPPPLDHRSDDDRPVMLLLHGFGPSSMWQWRRQMQAFSPSAFRVYSPDLVFFGDSTSSSTNRTEVFQAECMAKLMAKIGIGKYNVAGTSYGGFVAYHMAKMWPEKVEKVVIASSGINMRKCDGESLLQRSNCECIEKVMLPSTATEFRTLMALASSWRLVRMFPDALWNDVINNLYKKNRKEKIELLKGVTFGRSENLNIDSLSQEVLIVWGDKDQIFPVKMAYELKEILGDKTKLEIIDNTSHVPQIECAQEFNNIVLRFLKGS

SEQ ID NO: 72239 - protein, 307 aa, Arabidopsis thaliana
  peptide (1)..(307): Ceres Seq. ID no. 4926054
MSLSSYLSPTRLLEGYLRRCLRAAGLTSQTLSIDSETTIHFWGPPPLDHRSDDDRPVMLLLHGFGPSSMWQWRRQMQAFSPSAFRVYSPDLVFFGDSTSSSTNRTEVFQAECMAKLMAKIGIGKYNVAGTSYGGFVAYHMAKMWPEKVEKVVIASSGINMRKCDGESLLQRSNCECIEKVMLPSTATEFRTLMALASSWRLVRMFPDALWNDVINNLYKKNRKEKIELLKGVTFGRSENLNIDSLSQEVLIVWGDKDQIFPVKMAYELKEILGDKTKLEIIDNTSHVPQIECAQEFNNIVLRFLKGS

SEQ ID NO: 72240 - protein, 250 aa, Arabidopsis thaliana; identical to SEQ ID NO: 22157
  peptide (1)..(250): Ceres Seq. ID no. 4926055

SEQ ID NO: 72241 - DNA, 1401 bp, Arabidopsis thaliana
  misc_feature (1)..(1401): Ceres Seq. ID no. 4926239
  misc_feature (1)..(1401): Ortholog of  Ceres SEQ ID NO 14304871 as cited in SEQ ID NO 54194
  misc_feature (1)..(1401): Ortholog of  Ceres SEQ ID NO 13597751 as cited in SEQ ID NO 60721
atgacggcggccgaagtagcttctgcgcagaccaagaagctcatgaagtttagtctttctctcttccgtcgtggctttaactcctctaaatgcaaaacggcggcgaagatggctgtggctcgtataaagcttataaggaacaagagattagttgtggtgaagcaaatgaggcgtgacatcgctgttcttcttcaatccggtcaagatgccactgctcgaatcagagttgagcatgtgataagggaacagaacattcaggcagcaaacgaaatcattgagcttttctgtgaacttattgtttctcgtctcactatcatcactaagcaaaagcaatgtcctgtggatcttaaggaaggtattgctagtttgatttttgctgcgcctagatgctctgaaattcctgagcttggagatcttagagacatctttgcgaagaaatatgggaaagattttgtatctgctgctactgatttgcgtcctagctgcggtgttaaccggatgttgattgataagctttcggttagaaatcccggtggagaatacaaactgaaaatcatgaaggaaattgcaaaggaattccaggttgattgggatactacagagacagagcaagaacttctcaaacctcaagaagaaagcatagacgggccacgtaagtttgttagcgcttcaagcttaccagttaatcgtgcagctatcaacgagcctattgatcctaccaaagcagtgccaagatcgactagtagcatgagcatcaacacgcattatcatgacaccgagtcagcagcggaagcagctacagaattagccaaacaggcagttgcagcagcacaagtagcctccttattagctaccagaagagacagcagcaacaaggagttctctgtatcttctgatcattcaacacaccagaaggattcacagtacatggatcatcatcatcatcatccaggttcaagaagacaatcacgagactccgaaacaagttcctattacgcaaaacctggtgcagaaaacagaggaatgggtaggagacacagctacaacaatccgggtattaatgaatctgactacgaggaagagtataccaataccgaagcagaagcaaaagaaacaatgaggaggagacacagctacaaccctcgatcagttcctcctcctgcaacttctgagatcaagtttgatgagtcagactactacgaggaagagacagagccagatgaaccatcacagggtcgtgtttcttctctcccgccaaaccgagcaccgcctcaggctcctcagtccggtgagtccagacaggactcgagcggtcaccaggttcacccaaaactgcctgactatgatattttggctgcacgttttgaagcaatcagacacagtaaagggccattgatctga

SEQ ID NO: 72242 - protein, 466 aa, Arabidopsis thaliana
  peptide (1)..(466): Ceres Seq. ID no. 4926240
MTAAEVASAQTKKLMKFSLSLFRRGFNSSKCKTAAKMAVARIKLIRNKRLVVVKQMRRDIAVLLQSGQDATARIRVEHVIREQNIQAANEIIELFCELIVSRLTIITKQKQCPVDLKEGIASLIFAAPRCSEIPELGDLRDIFAKKYGKDFVSAATDLRPSCGVNRMLIDKLSVRNPGGEYKLKIMKEIAKEFQVDWDTTETEQELLKPQEESIDGPRKFVSASSLPVNRAAINEPIDPTKAVPRSTSSMSINTHYHDTESAAEAATELAKQAVAAAQVASLLATRRDSSNKEFSVSSDHSTHQKDSQYMDHHHHHPGSRRQSRDSETSSYYAKPGAENRGMGRRHSYNNPGINESDYEEEYTNTEAEAKETMRRRHSYNPRSVPPPATSEIKFDESDYYEEETEPDEPSQGRVSSLPPNRAPPQAPQSGESRQDSSGHQVHPKLPDYDILAARFEAIRHSKGPLI

SEQ ID NO: 72243 - protein, 452 aa, Arabidopsis thaliana
  peptide (1)..(452): Ceres Seq. ID no. 4926241
MKFSLSLFRRGFNSSKCKTAAKMAVARIKLIRNKRLVVVKQMRRDIAVLLQSGQDATARIRVEHVIREQNIQAANEIIELFCELIVSRLTIITKQKQCPVDLKEGIASLIFAAPRCSEIPELGDLRDIFAKKYGKDFVSAATDLRPSCGVNRMLIDKLSVRNPGGEYKLKIMKEIAKEFQVDWDTTETEQELLKPQEESIDGPRKFVSASSLPVNRAAINEPIDPTKAVPRSTSSMSINTHYHDTESAAEAATELAKQAVAAAQVASLLATRRDSSNKEFSVSSDHSTHQKDSQYMDHHHHHPGSRRQSRDSETSSYYAKPGAENRGMGRRHSYNNPGINESDYEEEYTNTEAEAKETMRRRHSYNPRSVPPPATSEIKFDESDYYEEETEPDEPSQGRVSSLPPNRAPPQAPQSGESRQDSSGHQVHPKLPDYDILAARFEAIRHSKGPLI

SEQ ID NO: 72244 - protein, 430 aa, Arabidopsis thaliana; identical to SEQ ID NO: 69693
  peptide (1)..(430): Ceres Seq. ID no. 4926242

SEQ ID NO: 72245 - DNA, 1161 bp, Arabidopsis thaliana
  misc_feature (1)..(1161): Ceres Seq. ID no. 4926550
  misc_feature (1)..(1161): Ortholog of  Ceres SEQ ID NO 13594655 as cited in SEQ ID NO 51843
  misc_feature (1)..(1161): Ortholog of  Ceres SEQ ID NO 13637562 as cited in SEQ ID NO 53674
  misc_feature (1)..(1161): Ortholog of  Ceres SEQ ID NO 13595851 as cited in SEQ ID NO 56559
  misc_feature (1)..(1161): Ortholog of  Ceres SEQ ID NO 15173454 as cited in SEQ ID NO 57898
  misc_feature (1)..(1161): Ortholog of  Ceres SEQ ID NO 13598755 as cited in SEQ ID NO 69032
acagaatcagatctttgtatcgtcaatggctccttcttttatgtaaggatctatgttcttatccggaatttagagtctttattgagtttgatcgattttgggattataagtttcgcaaaattcatgttttttacattaagtctattcgatttcagctgtattgggaatttaagtttttctgtggcttgattctattgagacagttttgtagaagatcgtccagctccgcttgatgctacttctgatccaccgtctctcttcgacggaaccacaaggttgtacacaagctacgtttgcccatttgctcaacgagtttggatcactcgaaacttcaagggtttgcaagaaaagattaaacttgttcctttggatcttgggaataggcctgcttggtacaaggagaaagtatatccagagaacaaggtgccagcgcttgagcacaatggaaaaatcattggggagagtctggatttgattaaatatcttgataacacttttgaagggccttctctttaccccgaggatcatgcaaaaagagagtttggcgacgagttgctcaagtatactgatactttcgttaaaactatgtatgtgtcactcaaaggagacccctctaaagaaaccgcacctgtgttagattatctggaaaacgctctgtataagttcgatgacgggccgttcttcctcggtcagttaagcttggttgatatcgcctatatcccgttcattgaaaggttccaaactgtactcaatgaattatttaagtgcgacattactgccgaacgtcccaaactatcagcatggattgaggaaattaacaagagcgatggctatgcacagacgaaaatggatcctaaggagattgtggaggttttcaagaaaaaattcatgtaactgtaagcaagcacgaagcagtaaagtgtatgagaccaaaccaccttgtacgaacaggtggtctttggatatgaagaaataagatgtgtacttgaacctgatgatgcaataagatttgtactttaagcagcaacagcttaatctgtattctagtgttgatcaaattatcaaccattgacattgttaatatattactgtatgatagtaatactatcaaaatctcacacattaagaaccagatgatgcaataaggataaggtgtatagt

SEQ ID NO: 72246 - protein, 102 aa, Arabidopsis thaliana
  peptide (1)..(102): Ceres Seq. ID no. 4926551
MYVSLKGDPSKETAPVLDYLENALYKFDDGPFFLGQLSLVDIAYIPFIERFQTVLNELFKCDITAERPKLSAWIEEINKSDGYAQTKMDPKEIVEVFKKKFM

SEQ ID NO: 72247 - protein, 80 aa, Arabidopsis thaliana
  peptide (1)..(80): Ceres Seq. ID no. 4926552
MLLLIHRLSSTEPQGCTQATFAHLLNEFGSLETSRVCKKRLNLFLWILGIGLLGTRRKYIQRTRCQRLSTMEKSLGRVWI

SEQ ID NO: 72248 - protein, 76 aa, Arabidopsis thaliana; identical to SEQ ID NO: 43135
  peptide (1)..(76): Ceres Seq. ID no. 4926553

SEQ ID NO: 72249 - DNA, 876 bp, Arabidopsis thaliana
  misc_feature (1)..(876): Ceres Seq. ID no. 4926979
  misc_feature (1)..(876): Ortholog of  Ceres SEQ ID NO 13638441 as cited in SEQ ID NO 58066
atgtcaccagcaacatatctagagacatcaaactggttgtttcaagaaaacagaggaaccaaatggacagctgaagaaaacaagaaattcgaaaacgctttagccttttacgacaaagatactcccgacagatggtccagagtcgctgccatgcttcccggtaaaacagtcggagatgtgatcaaacaatacagagagcttgaggaagacgttagcgacatcgaagctggtcttataccaatccctggttacgcctctgattcattcacacttgattggggtggctacgacggagcaagcggtaacaatgggtttaacatgaacggttactacttttccgccgccggaggaaagagaggatccgccgcacgaacggcggagcatgagaggaagaaaggtgttccatggacagaagaagaacacagacaatttctgatgggtttgaagaaatatggaaaaggagattggagaaacatagctcgtaactttgtgaccacaagaacgccaacgcaagtcgcaagtcacgctcaaaagtatttcatacggcaagtcaatggtggcaaagacaaacgccgttcaagcatccatgatatcacaaccgtcaacatccccgactctcctgacgctgcagccgcggataacgcaaccgcaaacgcaccttgctcgccaccttccgtaggaggaaaccagcgggagacatcggagtgggaaggtcaaacactatacgatgaaacagcagctgcgttttataatcaaaacgcgttttcagaaacgctacttggaatgtcttcgacgccctacatggcaaaacttcaggagcagagttttctgaacgcatcgcaattcgaatcgtacaatgcgtatctccaaatgtag

SEQ ID NO: 72250 - protein, 291 aa, Arabidopsis thaliana
  peptide (1)..(291): Ceres Seq. ID no. 4926980
MSPATYLETSNWLFQENRGTKWTAEENKKFENALAFYDKDTPDRWSRVAAMLPGKTVGDVIKQYRELEEDVSDIEAGLIPIPGYASDSFTLDWGGYDGASGNNGFNMNGYYFSAAGGKRGSAARTAEHERKKGVPWTEEEHRQFLMGLKKYGKGDWRNIARNFVTTRTPTQVASHAQKYFIRQVNGGKDKRRSSIHDITTVNIPDSPDAAAADNATANAPCSPPSVGGNQRETSEWEGQTLYDETAAAFYNQNAFSETLLGMSSTPYMAKLQEQSFLNASQFESYNAYLQM

SEQ ID NO: 72251 - protein, 241 aa, Arabidopsis thaliana
  peptide (1)..(241): Ceres Seq. ID no. 4926981
MLPGKTVGDVIKQYRELEEDVSDIEAGLIPIPGYASDSFTLDWGGYDGASGNNGFNMNGYYFSAAGGKRGSAARTAEHERKKGVPWTEEEHRQFLMGLKKYGKGDWRNIARNFVTTRTPTQVASHAQKYFIRQVNGGKDKRRSSIHDITTVNIPDSPDAAAADNATANAPCSPPSVGGNQRETSEWEGQTLYDETAAAFYNQNAFSETLLGMSSTPYMAKLQEQSFLNASQFESYNAYLQM

SEQ ID NO: 72252 - protein, 185 aa, Arabidopsis thaliana
  peptide (1)..(185): Ceres Seq. ID no. 4926982
MNGYYFSAAGGKRGSAARTAEHERKKGVPWTEEEHRQFLMGLKKYGKGDWRNIARNFVTTRTPTQVASHAQKYFIRQVNGGKDKRRSSIHDITTVNIPDSPDAAAADNATANAPCSPPSVGGNQRETSEWEGQTLYDETAAAFYNQNAFSETLLGMSSTPYMAKLQEQSFLNASQFESYNAYLQM

SEQ ID NO: 72253 - DNA, 1164 bp, Arabidopsis thaliana
  misc_feature (1)..(1164): Ceres Seq. ID no. 4927118
  misc_feature (1)..(1164): Ortholog of  Ceres SEQ ID NO 13599231 as cited in SEQ ID NO 984
atgctctctattcgccgccatgccaaaaccgtagcttcctcctgcaccaaccttactcagaaacgaacctacgtcgacgtttacatgaaatggaagagagatccttatttcgacaacatcgaacacatcctccgatcatctcagctcaaatccgtcgtctctcttaagaactgtatcgtccaggaacctaatcgctgcattccgatctctgccatctccaagaagactcgtcaattcgatgtatcaaccaaaatcgctcacttcttaaggaagtttccttcaatctttgaagagttcgttggtccagagtataatctcccatggtttagattgacaccagaagcaacagaactagataggcaagagagagtcgtataccaaacttctgcagatgatttgcgtgataggttgaagaaattgattctgatgagtaaagataatgttttgccactaagtatagttcaaggaatgaaatggtatttaggtttacctgatgattacttgcagtttccagatatgaatttagattcttcgtttaggtttgtggatatggaagatggagttaaaggtttagcagtagattataatggaggagataaggttttgtctgtgttgcagaagaatgcaatgaagaagagaagaggagaagtgagtttagaagagattgagtttcctctgtttccatcaaaaggttgtagattgagagtcaagattgaagattggttaatggagtttcaaaagcttccttatgtatcaccatatgatgattattcatgtttggatccaagtagtgatatagcagagaagagagttgttggttttcttcatgaattgctttgtcttttcgttgagcattctgctgagaggaagaagttgttatgtctcaagaagcattttggattgccgcaaaaggttcataaggcgtttgagagacatccgcagattttctacttgtctatgaagaataaaacttgtacagctattcttagagagccttatagagataaagctagtgttgaaacacatcctgtgttgggggtaaggaagaaatacatccagttgatgaagaattcagagttgattctgaagagtcgaaggaatagtttcgggtttagggacgaaggggttgtagataaagatttggatttggattttgaaggctaa

SEQ ID NO: 72254 - protein, 387 aa, Arabidopsis thaliana
  peptide (1)..(387): Ceres Seq. ID no. 4927119
MLSIRRHAKTVASSCTNLTQKRTYVDVYMKWKRDPYFDNIEHILRSSQLKSVVSLKNCIVQEPNRCIPISAISKKTRQFDVSTKIAHFLRKFPSIFEEFVGPEYNLPWFRLTPEATELDRQERVVYQTSADDLRDRLKKLILMSKDNVLPLSIVQGMKWYLGLPDDYLQFPDMNLDSSFRFVDMEDGVKGLAVDYNGGDKVLSVLQKNAMKKRRGEVSLEEIEFPLFPSKGCRLRVKIEDWLMEFQKLPYVSPYDDYSCLDPSSDIAEKRVVGFLHELLCLFVEHSAERKKLLCLKKHFGLPQKVHKAFERHPQIFYLSMKNKTCTAILREPYRDKASVETHPVLGVRKKYIQLMKNSELILKSRRNSFGFRDEGVVDKDLDLDFEG

SEQ ID NO: 72255 - protein, 359 aa, Arabidopsis thaliana
  peptide (1)..(359): Ceres Seq. ID no. 4927120
MKWKRDPYFDNIEHILRSSQLKSVVSLKNCIVQEPNRCIPISAISKKTRQFDVSTKIAHFLRKFPSIFEEFVGPEYNLPWFRLTPEATELDRQERVVYQTSADDLRDRLKKLILMSKDNVLPLSIVQGMKWYLGLPDDYLQFPDMNLDSSFRFVDMEDGVKGLAVDYNGGDKVLSVLQKNAMKKRRGEVSLEEIEFPLFPSKGCRLRVKIEDWLMEFQKLPYVSPYDDYSCLDPSSDIAEKRVVGFLHELLCLFVEHSAERKKLLCLKKHFGLPQKVHKAFERHPQIFYLSMKNKTCTAILREPYRDKASVETHPVLGVRKKYIQLMKNSELILKSRRNSFGFRDEGVVDKDLDLDFEG

SEQ ID NO: 72256 - protein, 245 aa, Arabidopsis thaliana
  peptide (1)..(245): Ceres Seq. ID no. 4927121
MSKDNVLPLSIVQGMKWYLGLPDDYLQFPDMNLDSSFRFVDMEDGVKGLAVDYNGGDKVLSVLQKNAMKKRRGEVSLEEIEFPLFPSKGCRLRVKIEDWLMEFQKLPYVSPYDDYSCLDPSSDIAEKRVVGFLHELLCLFVEHSAERKKLLCLKKHFGLPQKVHKAFERHPQIFYLSMKNKTCTAILREPYRDKASVETHPVLGVRKKYIQLMKNSELILKSRRNSFGFRDEGVVDKDLDLDFEG

SEQ ID NO: 72257 - DNA, 1681 bp, Arabidopsis thaliana
  misc_feature (1)..(1681): Ceres Seq. ID no. 4927134
  misc_feature (1)..(1681): Ortholog of  Ceres SEQ ID NO 15177285 as cited in SEQ ID NO 52481
  misc_feature (1)..(1681): Ortholog of  Ceres SEQ ID NO 13594068 as cited in SEQ ID NO 58624
aattagattgtttttgttttgtttaacatcagttgcgaatcgagctggattcttgggctcgctttttctttcaatcaaaagtttcgatattagtgaaggataaaattcgctaaaaaaagagaattttttttgttaaaaaaattataaaagctggctttctcaaaatttctccatgtggtcgacgaagaagacgaagaagacgaagaagaaagagaaagtctcttagcaaacatgaccgccaccgaagctaagaatcgcaaaatcaatgtcggagatggagatgacgttgttgatatcgaaatccctgacactgctcatcaaattagcagcgattcatggtttcaggtggcgttcgttttgaccaccggtataaacagcgcgtatgtgttgggatattcaggaacaattatggttcctttaggttggattggtggtgtggttggtcttcttattgctactgcaatctctctttatgcaaacactctaatagctaagcttcatgagtttggtggcagaagacacattcgctatagagaccttgctggattcatttacggtaggaaggcttatcatcttacatggggattgcaatatgttaatcttttcatgattaattgtggattcattatcctagctggttccgccttaaaggctgtttatgtgcttttcagggatgatcataccatgaaactacctcattttatagccattgctggtttgatttgtgcgattttcgctattgggattcctcatttatcggctcttggggtctggcttggagtttcgaccttcctcagtctcatctatattgttgtggcaatcgtgctatcggttagagatggagtaaaaacaccttcaagagattacgagatacaaggatcatcattgagcaaactttttaccatcacaggagcagccgcaaatctggttttcgcattcaacaccgggatgcttccagaaattcaggcaacagtgaggcaaccagttgttaaaaacatgatgaaggctctatactttcaattcacagcgggtgttttaccgatgtacgcagttacattcatcggatattgggcttatggatcctcaacctcgacctatctactaaacagtgttaatggcccactctgggtcaaagcccttgctaacgtctctgctatccttcaatctgttatctctttgcacatatttgcgagtccaacatatgagtacatggacacaaagtatgggatcaaaggaaacccatttgcgataaagaacctgctgtttaggatcatggcgagaggcgggtacatagcggtaagcacgcttatctcagcgctgttgccgttcctcggtgacttcatgagcctaactggtgcagtgagcacattccctctcacattcattctagccaaccacatgtactataaggcaaagaacaataagctgaatgctatgcaaaagctatggcattggcttaacgttgtcttctttagtttgatgtctgttgctgcagccattgcagctgtcagactcatcgccgttgattccaaaaatttccatgtttttgcagatttgtaattcattatattatatagtcaattgtgtatcctttattcttaggcaggtttatttctcctgtaagcttgtattctctctctatttgtcttaccattagagcctaaataaataaatcaagttc

SEQ ID NO: 72258 - protein, 442 aa, Arabidopsis thaliana; identical to SEQ ID NO: 40259
  peptide (1)..(442): Ceres Seq. ID no. 4927135

SEQ ID NO: 72259 - protein, 383 aa, Arabidopsis thaliana; identical to SEQ ID NO: 40260
  peptide (1)..(383): Ceres Seq. ID no. 4927136

SEQ ID NO: 72260 - protein, 317 aa, Arabidopsis thaliana; identical to SEQ ID NO: 24809
  peptide (1)..(317): Ceres Seq. ID no. 4927137

SEQ ID NO: 72261 - DNA, 1551 bp, Arabidopsis thaliana
  misc_feature (1)..(1551): Ceres Seq. ID no. 4927185
  misc_feature (1)..(1551): Ortholog of  Ceres SEQ ID NO 15170752 as cited in SEQ ID NO 52719
acaaaagaaaattgtcaatttcgaaaaatgttgagcacaagctctgatcttcatggccgtcttctccggtgagtgacatctctctctggcctctgtttttttggcctttaagtgcttttttcttgaagaaccctaattttgatttgttttgaggattcagattatcagaaccaatagcagagattcttagacgtacacagtacacaccgcaagagagcagcaaagtatccaccaaagatatactcttgtccttgttaccaaacacttcgtcttctcgtctcgccaatgaagaatcgatcaaaagtctcgcgcttgcttgtgcccttctcgcttcttcacgttcatccactcacgaacttctctcatggattccagaaaacctctctgtcatgggggaatctacattttgggagatttcaagggattgtttcagtgatttttctagcaacagtaatgctgagaagcttgtggaattggtagaggatagtgagaagatcgaaatgttgccgatagttttgccggagttaaaagatggaatcgaaaagagttcacttggtaaaggcagtgatgcagaggatgtttcagctgcaatggctagaacacctgttggttatgctatacttgctgctcaccagctcaggtggtttgttactcaggttaaaaaaccgaatttggtgaaattttgtaacttggtggttccttgtgctttgacagcacttgatcattggtctcctgaagtcaaagggcagggtatgataacctttgttcatcttgctaaaaatgtgagttccggtgatcttggtttgtatggagatgtggttcttgatgcgtgttgccagaatatagcttccgatgatgagatttggatacatgtggtagagttatctgtgcttcttgttactaaaatccacccaaataatcctcgaagcccgtggtatgagaagatcatgaatgagatgctcgggcatttggaacgccaaccaagaaataaggagcgacgtatcacttggctaagatttgttgagccactcttgaactctctagggcttttcttacttgctcattttcgacgtatcttccctcttttctttcagtggatgcattcagacgacgccgaaacagttctgttggttcttgagagactggagacagttgtgaggttgacgtggattagacactcacctgtgttcccaagattggtggatgagcttgtttccttgtacaaagagtcatcgatgcgtaaggatcgcgatgatattagacctcttatcctccgtatcttgatgctactccgccagtgcaaaggtctacggtttgagtcagcgtggagtcaataccaggaggatccaaatctgagtactgttagtcaacatatatggactagttcaagttgatctcaagagcgtatgtttgactaaaacagccatttttttttctaattttcgatattagtttggtctaggcctagtgatgcaagtaattactggcgaatcctcgaatttttgtaagcatttggctcttgactcttcttaagctaatctgatttgatac

SEQ ID NO: 72262 - protein, 334 aa, Arabidopsis thaliana; identical to SEQ ID NO: 72042
  peptide (1)..(334): Ceres Seq. ID no. 4927186

SEQ ID NO: 72263 - protein, 297 aa, Arabidopsis thaliana
  peptide (1)..(297): Ceres Seq. ID no. 4927187
MLPIVLPELKDGIEKSSLGKGSDAEDVSAAMARTPVGYAILAAHQLRWFVTQVKKPNLVKFCNLVVPCALTALDHWSPEVKGQGMITFVHLAKNVSSGDLGLYGDVVLDACCQNIASDDEIWIHVVELSVLLVTKIHPNNPRSPWYEKIMNEMLGHLERQPRNKERRITWLRFVEPLLNSLGLFLLAHFRRIFPLFFQWMHSDDAETVLLVLERLETVVRLTWIRHSPVFPRLVDELVSLYKESSMRKDRDDIRPLILRILMLLRQCKGLRFESAWSQYQEDPNLSTVSQHIWTSSS

SEQ ID NO: 72264 - protein, 267 aa, Arabidopsis thaliana
  peptide (1)..(267): Ceres Seq. ID no. 4927188
MARTPVGYAILAAHQLRWFVTQVKKPNLVKFCNLVVPCALTALDHWSPEVKGQGMITFVHLAKNVSSGDLGLYGDVVLDACCQNIASDDEIWIHVVELSVLLVTKIHPNNPRSPWYEKIMNEMLGHLERQPRNKERRITWLRFVEPLLNSLGLFLLAHFRRIFPLFFQWMHSDDAETVLLVLERLETVVRLTWIRHSPVFPRLVDELVSLYKESSMRKDRDDIRPLILRILMLLRQCKGLRFESAWSQYQEDPNLSTVSQHIWTSSS

SEQ ID NO: 72265 - DNA, 978 bp, Arabidopsis thaliana
  misc_feature (1)..(978): Ceres Seq. ID no. 4927536
  misc_feature (1)..(978): Ortholog of  Ceres SEQ ID NO 13596969 as cited in SEQ ID NO 63375
  misc_feature (1)..(978): Ortholog of  Ceres SEQ ID NO 13597519 as cited in SEQ ID NO 64759
  misc_feature (1)..(978): Ortholog of  Ceres SEQ ID NO 13597870 as cited in SEQ ID NO 64982
  misc_feature (1)..(978): Ortholog of  Ceres SEQ ID NO 13656123 as cited in SEQ ID NO 65212
  misc_feature (1)..(978): Ortholog of  Ceres SEQ ID NO 13595926 as cited in SEQ ID NO 67778
atggtggttggaggcgtcagtctcttcccggagacggcagaagcgatcgtgatgggaccgtcgatgcagaagctgacgtggcattactataaagtttacaacacttgcgagaatgcagagaattttgtgaggcaccaagttgagatattttacaagaacgataaaagtattgctcctaagctccttcgtctcctctactcagactgctttgtttccggatgcgatgcatcagttcttctagaaggtccaaactcagagaaaatggcgccacaaaacagaggacttggaggattcgttctcatagacaaaatcaaaatagtcttggaacagagatgtcctggtgttgtctcttgcgccgacattcttaatcttgcaactcgtgatgctgttcatttggcgggtgcaccatcttatcctgtgttcacaggcaggagagatggtttgacgtctgataagcaaaccgtggacctaccatcgccatccatctcatgggaccaagccatgtcttatttcaaatccagaggcttgaatgttcttgacatggctacacttctaggatcacattcaatggggagaacacattgcagctatgttgttgatcgactctacaattacaacaagaccggtaaaccaagccctactatgaacaagtatttcctatctgaaatggcaaagcaatgtcctccaagaacgaggaaaggccagaccgatccgctcgtgtacctaaacccggactcaggctcaaaccacagcttcacaagctcattttactcaagaattctatcaaacaaatctgtacttgaagtagatcaacaactgctttacaatgatgacaccaagcaaatatctaaggaattctcagagggtttcgaggattttcggaaatcatttgctctttcgatgagcaagatgggagcgataaatgtgttaactaaaacggaaggtgagatacgaaaagattgcaggcatataaactaa

SEQ ID NO: 72266 - protein, 325 aa, Arabidopsis thaliana
  peptide (1)..(325): Ceres Seq. ID no. 4927537
MVVGGVSLFPETAEAIVMGPSMQKLTWHYYKVYNTCENAENFVRHQVEIFYKNDKSIAPKLLRLLYSDCFVSGCDASVLLEGPNSEKMAPQNRGLGGFVLIDKIKIVLEQRCPGVVSCADILNLATRDAVHLAGAPSYPVFTGRRDGLTSDKQTVDLPSPSISWDQAMSYFKSRGLNVLDMATLLGSHSMGRTHCSYVVDRLYNYNKTGKPSPTMNKYFLSEMAKQCPPRTRKGQTDPLVYLNPDSGSNHSFTSSFYSRILSNKSVLEVDQQLLYNDDTKQISKEFSEGFEDFRKSFALSMSKMGAINVLTKTEGEIRKDCRHIN

SEQ ID NO: 72267 - protein, 308 aa, Arabidopsis thaliana
  peptide (1)..(308): Ceres Seq. ID no. 4927538
MGPSMQKLTWHYYKVYNTCENAENFVRHQVEIFYKNDKSIAPKLLRLLYSDCFVSGCDASVLLEGPNSEKMAPQNRGLGGFVLIDKIKIVLEQRCPGVVSCADILNLATRDAVHLAGAPSYPVFTGRRDGLTSDKQTVDLPSPSISWDQAMSYFKSRGLNVLDMATLLGSHSMGRTHCSYVVDRLYNYNKTGKPSPTMNKYFLSEMAKQCPPRTRKGQTDPLVYLNPDSGSNHSFTSSFYSRILSNKSVLEVDQQLLYNDDTKQISKEFSEGFEDFRKSFALSMSKMGAINVLTKTEGEIRKDCRHIN

SEQ ID NO: 72268 - protein, 304 aa, Arabidopsis thaliana
  peptide (1)..(304): Ceres Seq. ID no. 4927539
MQKLTWHYYKVYNTCENAENFVRHQVEIFYKNDKSIAPKLLRLLYSDCFVSGCDASVLLEGPNSEKMAPQNRGLGGFVLIDKIKIVLEQRCPGVVSCADILNLATRDAVHLAGAPSYPVFTGRRDGLTSDKQTVDLPSPSISWDQAMSYFKSRGLNVLDMATLLGSHSMGRTHCSYVVDRLYNYNKTGKPSPTMNKYFLSEMAKQCPPRTRKGQTDPLVYLNPDSGSNHSFTSSFYSRILSNKSVLEVDQQLLYNDDTKQISKEFSEGFEDFRKSFALSMSKMGAINVLTKTEGEIRKDCRHIN

SEQ ID NO: 72269 - DNA, 1689 bp, Arabidopsis thaliana
  misc_feature (1)..(1689): Ceres Seq. ID no. 4927632
  misc_feature (1)..(1689): Ortholog of  Ceres SEQ ID NO 14302255 as cited in SEQ ID NO 65021
atttggctctttatcttgtctttgtctgatcagtagtcactacatttgtttctttcacaatctttcttttttgcttcatattgaactgcaagaccaatccatgaatgcaaatataaaatattgtcttacggttaaccatctctaagtgtttgctagtcatgaattgtgaaattgtttcgcttcaaacatagaattagttgatttggaaatgtagacatgaatgcttatctaaatacaataaactgtgttcttgtttcagttgtgtatcagagatgagaccttgactggtaatttcaatggagcataattaaatgctaatgatacttattttctggttaatgcagggaggttgagagtttgaagaaaccatttacgccacccagggaagtgcatgttcaagtcttgcactccatgccacctcaaaagatcgagatcttcaaatctatggaaaactgggccgaggagaaccttctgattcacctcaaggatgtggagaagtcttggcaaccccaggatttcttgcctgaccctgcatcagatgggtttgaagatcaggtaagagagttaagagagagggctagagagctccctgatgattactttgttgttttggtgggggacatgatcacagaagaagcacttccgacctatcaaactatgttgaacactttggatggagttagggatgaaacaggtgctagtcctacttcatgggctatttggaccagagcttggactgcagaagaaaaccgacatggcgatcttctgaataaatacctttacttgtctggtcgtgttgacatgaggcagatcgaaaagaccattcagtacttgattggatctggaatggatccgcggacagagaataacccctaccttggcttcatctatacgtcattccaagaaagagcgacattcatctctcacggaaacacagcccgccaagccaaagagcacggggacatcaaactagcccaaatatgtggcacaatagctgcagacgagaagcgtcatgaaacagcatacaccaagatagttgaaaagctctttgagattgatcctgatggtactgtcatggcttttgcagacatgatgagaaagaaaatctcaatgcctgctcacttgatgtatgatgggcgcaacgacaacctctttgacaacttctcttccgtggctcagaggctcggtgtttacaccgccaaagactatgcagacattcttgagtttctggttggtaggtggaaaatccaggacttaaccgggctttcaggtgaaggaaacaaagcacaagactatttatgcgggttggctccaaggatcaagagattggatgagagagctcaagcaagagccaagaaaggacccaagattcctttcagttggatacacgacagagaagtgcagctctaaaaggacaaagacaaaaacaaaaacctatcctcccggttcctcatttcatctgtctgctcttaaaattggtgtagattactatggttttctgataatgttggtgggtctagttacaaagttgagatgcagtgatttagtagctttgtttttcccagtcactatatgtttggtctttggtccgttagcacacttgtagtagttaaaacagtttaagtatggtctgtactcagtcttcctcttctctgtggagttttgtttaagttcaggttagttttgttt

SEQ ID NO: 72270 - protein, 332 aa, Arabidopsis thaliana; identical to SEQ ID NO: 43128
  peptide (1)..(332): Ceres Seq. ID no. 4927633

SEQ ID NO: 72271 - protein, 321 aa, Arabidopsis thaliana; identical to SEQ ID NO: 43129
  peptide (1)..(321): Ceres Seq. ID no. 4927634

SEQ ID NO: 72272 - protein, 262 aa, Arabidopsis thaliana
  peptide (1)..(262): Ceres Seq. ID no. 4927635
MITEEALPTYQTMLNTLDGVRDETGASPTSWAIWTRAWTAEENRHGDLLNKYLYLSGRVDMRQIEKTIQYLIGSGMDPRTENNPYLGFIYTSFQERATFISHGNTARQAKEHGDIKLAQICGTIAADEKRHETAYTKIVEKLFEIDPDGTVMAFADMMRKKISMPAHLMYDGRNDNLFDNFSSVAQRLGVYTAKDYADILEFLVGRWKIQDLTGLSGEGNKAQDYLCGLAPRIKRLDERAQARAKKGPKIPFSWIHDREVQL

SEQ ID NO: 72273 - DNA, 921 bp, Arabidopsis thaliana
  misc_feature (1)..(921): Ceres Seq. ID no. 4927666
  misc_feature (1)..(921): Ortholog of  Ceres SEQ ID NO 14310358 as cited in SEQ ID NO 54582
  misc_feature (1)..(921): Ortholog of  Ceres SEQ ID NO 15176085 as cited in SEQ ID NO 69305
atggctgtgttaggcgacggattcgtcgcctccaccaagttcgagatcctcaaagccttcgagtctccgcttcctcttcctgaattcttggcctatcactctgactccatctccgccattatagcccctgtagctgctccggtcacagccgatctgattcgcatcctccctaatcttcgcttggttgttactaccagcgccggcgttgaccatgttgacttagttgagtgtcgtcgtcgaggcatctccgtcgccaacgctggctcaagcttctcggaagatgtcgcagatactgccgtcggtttactcatcgacgtcttccgccgcatctccgccgccaatcggttcgttaagcaacggttttggccactcaaaggcgattatcctctcggttccaagttggggagaaagcgaatcggaatcgtgggactaggaagcattggctcgaaagtagcgacaaggctcgacgcctttggttgccaaatttcatatagctcaagaaacagaaaaccatatgatgttccatatcactattacatggatatagaggagatggcagctaatagtgatgcactcataatctgttgtgaattgaatgagaagacattgcgtttgattaataaagatgttctttctgctctgggaaagcgaggagtgatcgttaacgtggctcgtggggctataatcgatgaggaagaaatggtgagatgtttgagagaaggtgagattggtggtgctggtttggatgtttttgaagatgagcctaatgttccgaaggagctttttgaattggataatgttgttttctctccacatagtgcttttatgacattggaaggtcttgaagaacttgggaaagttgtagtagggaatattgaagctttcttctccaataaacctcttttaactcctgttctttga

SEQ ID NO: 72274 - protein, 306 aa, Arabidopsis thaliana
  peptide (1)..(306): Ceres Seq. ID no. 4927667
MAVLGDGFVASTKFEILKAFESPLPLPEFLAYHSDSISAIIAPVAAPVTADLIRILPNLRLVVTTSAGVDHVDLVECRRRGISVANAGSSFSEDVADTAVGLLIDVFRRISAANRFVKQRFWPLKGDYPLGSKLGRKRIGIVGLGSIGSKVATRLDAFGCQISYSSRNRKPYDVPYHYYMDIEEMAANSDALIICCELNEKTLRLINKDVLSALGKRGVIVNVARGAIIDEEEMVRCLREGEIGGAGLDVFEDEPNVPKELFELDNVVFSPHSAFMTLEGLEELGKVVVGNIEAFFSNKPLLTPVL

SEQ ID NO: 72275 - DNA, 942 bp, Arabidopsis thaliana
  misc_feature (1)..(942): Ceres Seq. ID no. 4927736
  misc_feature (1)..(942): Ortholog of  Ceres SEQ ID NO 14305357 as cited in SEQ ID NO 60046
  misc_feature (1)..(942): Ortholog of  Ceres SEQ ID NO 14313511 as cited in SEQ ID NO 64459
  misc_feature (1)..(942): Ortholog of  Ceres SEQ ID NO 14303006 as cited in SEQ ID NO 67498
  misc_feature (1)..(942): Ortholog of  Ceres SEQ ID NO 13599627 as cited in SEQ ID NO 0
  misc_feature (1)..(942): Ortholog of  Ceres SEQ ID NO 14305069 as cited in SEQ ID NO 0
attgcgaattttaattgatcactctctctctctatctctgttcacacatctctcccaaagtaggtagaagaagatggggacgacgttagatgtatcaagagcagagctagcacttgtggtaatgtatttgaacaaagcagaggcaagagataagttatgcagagctatacagtatggttccaagttcttgagtggtggacaacctggtactgctcaaaatgttgacaaatctactagcttagcaagaaaagtcttccgtcttttcaagtttgtgaatgacttgcatggtcttatcagtcctgtgcctaaaggaactcctcttcctcttgttttacttggaaagtcgaagaacgcacttttatctacattcttgttcctggatcaaattgtctggcttgggagatcaggaatatataagaacaaagaacgagctgagttacttggacgtatatctctcttctgctggatgggatcttctgtctgcacaactttagtcgaggttggtgagatgggaaggctttcttcatcaatgaagaagatcgaaaagggactcaagaatggaaacaagtatcaggatgaggattatcgtgctaagctaaaaaaatcaaacgagaggtcacttgctttgatcaaatcagctatggacattgttgtagcagctggtcttcttcagttagctccaacgaagatcactcctcgtgtcaccggagcttttggattcatcacctccatcatttcttgttaccagttgcttccgacacgccccaagatcaaaacaccctgaagtcaatcgaggaagctggtgttaaggagaaagtcatttcagaaagtttctgttcttcttattattaaggaaattcactgctgttataaaacatcgtataaaatacttatttgcaggaattacggttattataaatttatgcctcagattcttgatac

SEQ ID NO: 72276 - protein, 236 aa, Arabidopsis thaliana; identical to SEQ ID NO: 28883
  peptide (1)..(236): Ceres Seq. ID no. 4927737

SEQ ID NO: 72277 - protein, 220 aa, Arabidopsis thaliana; identical to SEQ ID NO: 28884
  peptide (1)..(220): Ceres Seq. ID no. 4927738

SEQ ID NO: 72278 - DNA, 846 bp, Arabidopsis thaliana
  misc_feature (1)..(846): Ceres Seq. ID no. 4927827
  misc_feature (1)..(846): Ortholog of  Ceres SEQ ID NO 12624019 as cited in SEQ ID NO 61713
atcctgatcgggaaacccaaaacgagtggtcgaatagtttccgactgattcttccgaggcttgaagctcaatagctatggcttctctttcagtctcttcctcttcaaccatcatcgattcaagagctcctccttctcgactagcctccgcctccgcctcttctccgtcgtgcatttcacttcccacacttccgattcagtctcatacccgtgccgctaaagccactgcttactgtcggaagattgtgaggaacgttgtgacgagagctactactgaagttggtgaagctcctgccactactaccgaagctgagactactgagttacctgaaatcgtcaagactgctcaagaagcttgggagaaagtggatgacaagtacgctattggttctcttgcctttgctggtgtagtggctctttggggttctgctggaatgatttcggcaatcgataggcttccattggttcctggtgttcttgaacttgtaggcatcggttacacaggatggttcacttacaagaacctggtcttcaaaccagacagggaggctttgtttgagaaggtcaagagcacatacaaagacatattagggagcagctgaatcaaaggaggaagaagaagaagaagagcctttttgaggccattcatgaattggaatgaaggatatcaaaagaatctaacacaaaggccacgtccttccttcaatctttccttcttgtaactaaataattttcatcctttctctctctctgtctctggtcttttttagctcaaagtatcatccatttatgtcaaagtgttgtaaattcctcaagactatatatgagatgttttgtttcattttcc

SEQ ID NO: 72279 - protein, 174 aa, Arabidopsis thaliana; identical to SEQ ID NO: 48157
  peptide (1)..(174): Ceres Seq. ID no. 4927828

SEQ ID NO: 72280 - DNA, 619 bp, Arabidopsis thaliana
  misc_feature (1)..(619): Ceres Seq. ID no. 4927995
  misc_feature (1)..(619): Ortholog of  Ceres SEQ ID NO 13583505 as cited in SEQ ID NO 62240
actttcgagtatcgagtcgtcgttcttcttcttcctctgagagagagatctgcggaaaacgaaagcgagatttatcaggttcggtgattctttgtggagaagaagctcgcgataagtcaacatgagcaagccaatggaagaggataccaatcagggcaagactgaggaagaggaattcaacaccgggccactctctgttcttatgatgagcgtcaagaataacactcaggttttaatcaattgccggaacaacaggaaacttcttgggcgagtgagggcgtttgacagacactgcaacatggttcttgaaaatgtcagagagatgtggactgaggttccgaaaactgggaaaggcaagaagaaagcacttccggtgaacagagatcggttcataagcaagatgtttctacgtggagactcggtcattatcgtcctcaggaatccaaaatgagaggaagagagacttagagacatgttccttgtttgttgtgctaaaactgataaattcttgtaggtagtagcatcttttaaagttattcgtctcattttcgtttatgtccgaattgacaagatcttttaaagatcttttaaagacatgttccttgtttgttgtttgttc

SEQ ID NO: 72281 - protein, 109 aa, Arabidopsis thaliana; identical to SEQ ID NO: 22047
  peptide (1)..(109): Ceres Seq. ID no. 4927996

SEQ ID NO: 72282 - protein, 105 aa, Arabidopsis thaliana; identical to SEQ ID NO: 22048
  peptide (1)..(105): Ceres Seq. ID no. 4927997

SEQ ID NO: 72283 - protein, 82 aa, Arabidopsis thaliana; identical to SEQ ID NO: 22049
  peptide (1)..(82): Ceres Seq. ID no. 4927998

SEQ ID NO: 72284 - DNA, 1283 bp, Arabidopsis thaliana
  misc_feature (1)..(1283): Ceres Seq. ID no. 4928186
  misc_feature (1)..(1283): Ortholog of  Ceres SEQ ID NO 14307123 as cited in SEQ ID NO 54182
gaaaatggatatgggaccatgcccaaaggtgcactctttgcagcttcggaaagaataccgagaagcaagggcaaaaggtgttgataactacgacagggaattggaagatgccatagacaggcttatcgttgagtgtgataggaagattggtagggcccttaagcgtcttcaagaagaggacgccaaagctgccattgccatttctgtctctgaagtcactcagtcgcctgaaattctcgagttatcggagaaaatcaaagagaagatgaaggaagcagatatccacgatcttgaaggcaaaatggatcttaagattagagctcttgagttagtcgaagagatgaggaccaagagagctgaccaacaggcggtgttgctgttggaagccttcaacaaagatagagcatccttgccacagcccgttccagctcaaccaccatcttccgaattacctccaccggatcctcgcactcaagaaatgataaatgagaaactgaagaaggcagaagatcttggtgaacaaggaatggttgatgaagcccagaaagccctggaagaggctgaagctcttaagaagcttacagttagacgagaacctccagcagattcaacgaagtacaccgctgttgatgtgcgcatcacagaccaaaagttgcgtctatgtgacatatgtggagcattcttgagcgtctatgacagtgatcgccgtttagctgatcattttggggggaagcttcatctaggatacatgctagtccgggacaaattaacagagcttctggatgagaaggccaatatacgcaaggaaagatcaaaggaacggaacagtaaggagagagaatcaagtaaagaccgagagaaagaacaagaaactagtcgtgaacatcgaagagattatgatcgcaggagtagagatcgagataggcaccatgaccgtgatcgtgaacaagacagagactatgatcggtcacactcaagaagcagacgtaggtcacgctcacggtccaggtcaagagatagaccaagggactatgatcgccacaggcgtcacaaccgctactagatcgatcggtcttgctgtctaacagggtttacaagttacaaatggttttaggatctatcaccgaaacttttttctgtctacatgtatgttactcaagtatgttagatgagtttcagaaaatttcacatctttttcttttaccacaaactaaagacttggaagaaacaagatgtggtttatgtttttaccacatctgagaagcgtgtatgcactatcatcg

SEQ ID NO: 72285 - protein, 353 aa, Arabidopsis thaliana
  peptide (1)..(353): Ceres Seq. ID no. 4928187
KMDMGPCPKVHSLQLRKEYREARAKGVDNYDRELEDAIDRLIVECDRKIGRALKRLQEEDAKAAIAISVSEVTQSPEILELSEKIKEKMKEADIHDLEGKMDLKIRALELVEEMRTKRADQQAVLLLEAFNKDRASLPQPVPAQPPSSELPPPDPRTQEMINEKLKKAEDLGEQGMVDEAQKALEEAEALKKLTVRREPPADSTKYTAVDVRITDQKLRLCDICGAFLSVYDSDRRLADHFGGKLHLGYMLVRDKLTELLDEKANIRKERSKERNSKERESSKDREKEQETSREHRRDYDRRSRDRDRHHDRDREQDRDYDRSHSRSRRRSRSRSRSRDRPRDYDRHRRHNRY

SEQ ID NO: 72286 - protein, 352 aa, Arabidopsis thaliana; identical to SEQ ID NO: 25845
  peptide (1)..(352): Ceres Seq. ID no. 4928188

SEQ ID NO: 72287 - protein, 350 aa, Arabidopsis thaliana
  peptide (1)..(350): Ceres Seq. ID no. 4928189
MGPCPKVHSLQLRKEYREARAKGVDNYDRELEDAIDRLIVECDRKIGRALKRLQEEDAKAAIAISVSEVTQSPEILELSEKIKEKMKEADIHDLEGKMDLKIRALELVEEMRTKRADQQAVLLLEAFNKDRASLPQPVPAQPPSSELPPPDPRTQEMINEKLKKAEDLGEQGMVDEAQKALEEAEALKKLTVRREPPADSTKYTAVDVRITDQKLRLCDICGAFLSVYDSDRRLADHFGGKLHLGYMLVRDKLTELLDEKANIRKERSKERNSKERESSKDREKEQETSREHRRDYDRRSRDRDRHHDRDREQDRDYDRSHSRSRRRSRSRSRSRDRPRDYDRHRRHNRY

SEQ ID NO: 72288 - DNA, 1329 bp, Arabidopsis thaliana
  misc_feature (1)..(1329): Ceres Seq. ID no. 4928399
  misc_feature (1)..(1329): Ortholog of  Ceres SEQ ID NO 14311553 as cited in SEQ ID NO 51462
  misc_feature (1)..(1329): Ortholog of  Ceres SEQ ID NO 13599003 as cited in SEQ ID NO 0
atgacacttgctagcgattttggttttccatccgctatatcttcatcttttacaattctagaagagagataccacaataactttcctaacactttgtgtgtttcatcaggacaggaatcgatgaataacaaccccgtcccctgtcaggtgtttcctctggtctctggtggtagttctggtgggaatttgttttcatcttcttccggattctgcaatggtgtctatgtttcatcttcctcccaggcacggccatctgtttctaccgtgccaagagacagaattactgttgctcacgtctctggtgaagggcagaggcaggaatgccctgtggaaacacattccttgcaattgatcaatcaacctcaagaacagaaaattatgacttggtcttcagaccagattcggggcttcttcgattttcctgttccagatccacaagcagcgagcagcagaactatggtttcatccaaggaagtgctttcaaaatgcgaatggccagactgggcggatcagttgatctctgatgatagtcttgaaccaaattggtcggagcttctaggtgatcctaatgtactcaatctatattcaaagatagaaacacagtcttctgatatagcaaggcaagagatcgtctttagaaatcagcatcaggtggatccatcaatggagccgtttaatgccaaaagcccaccagctagttcaatgacatctaagcaaagaatgcgttggacaccagaacttcatgaagcatttgtcgaagctatcaatcagctcggtggtagtgaacgagccacccctaaggctgttttgaagctcatcaatagccctgggttgaccgtttatcatgtcaaaagccatttgcagaaatacagaactgcaaggtataaaccagagctttccaaagatacagaagaacctctagtaaagaatttgaaaaccattgaagatatcaaatctcttgacttgaagacgagcattgaaatcactgaagctctccggttacagatgaaagttcaaaaacaactccacgagcaacttgagatccaaagatcactgcagttacaaatcgaagaacaaggtcggtatcttcagatgatgattgagaaacaacagaagatgcaagagaacaaaaaagactctacttcctcatcatcaatgccagaagctgacccttcagctccatcaccaaacctttcacaacctttcctccataaagcaaccaattcagaaccatcaataactcagaaactgcagaatggttctagcacaatggatcaaagtgaatctacttctgggactagtaatagaaaacgggttagagaagattag

SEQ ID NO: 72289 - protein, 442 aa, Arabidopsis thaliana
  peptide (1)..(442): Ceres Seq. ID no. 4928400
MTLASDFGFPSAISSSFTILEERYHNNFPNTLCVSSGQESMNNNPVPCQVFPLVSGGSSGGNLFSSSSGFCNGVYVSSSSQARPSVSTVPRDRITVAHVSGEGQRQECPVETHSLQLINQPQEQKIMTWSSDQIRGFFDFPVPDPQAASSRTMVSSKEVLSKCEWPDWADQLISDDSLEPNWSELLGDPNVLNLYSKIETQSSDIARQEIVFRNQHQVDPSMEPFNAKSPPASSMTSKQRMRWTPELHEAFVEAINQLGGSERATPKAVLKLINSPGLTVYHVKSHLQKYRTARYKPELSKDTEEPLVKNLKTIEDIKSLDLKTSIEITEALRLQMKVQKQLHEQLEIQRSLQLQIEEQGRYLQMMIEKQQKMQENKKDSTSSSSMPEADPSAPSPNLSQPFLHKATNSEPSITQKLQNGSSTMDQSESTSGTSNRKRVRED

SEQ ID NO: 72290 - protein, 402 aa, Arabidopsis thaliana
  peptide (1)..(402): Ceres Seq. ID no. 4928401
MNNNPVPCQVFPLVSGGSSGGNLFSSSSGFCNGVYVSSSSQARPSVSTVPRDRITVAHVSGEGQRQECPVETHSLQLINQPQEQKIMTWSSDQIRGFFDFPVPDPQAASSRTMVSSKEVLSKCEWPDWADQLISDDSLEPNWSELLGDPNVLNLYSKIETQSSDIARQEIVFRNQHQVDPSMEPFNAKSPPASSMTSKQRMRWTPELHEAFVEAINQLGGSERATPKAVLKLINSPGLTVYHVKSHLQKYRTARYKPELSKDTEEPLVKNLKTIEDIKSLDLKTSIEITEALRLQMKVQKQLHEQLEIQRSLQLQIEEQGRYLQMMIEKQQKMQENKKDSTSSSSMPEADPSAPSPNLSQPFLHKATNSEPSITQKLQNGSSTMDQSESTSGTSNRKRVRED

SEQ ID NO: 72291 - protein, 316 aa, Arabidopsis thaliana
  peptide (1)..(316): Ceres Seq. ID no. 4928402
MTWSSDQIRGFFDFPVPDPQAASSRTMVSSKEVLSKCEWPDWADQLISDDSLEPNWSELLGDPNVLNLYSKIETQSSDIARQEIVFRNQHQVDPSMEPFNAKSPPASSMTSKQRMRWTPELHEAFVEAINQLGGSERATPKAVLKLINSPGLTVYHVKSHLQKYRTARYKPELSKDTEEPLVKNLKTIEDIKSLDLKTSIEITEALRLQMKVQKQLHEQLEIQRSLQLQIEEQGRYLQMMIEKQQKMQENKKDSTSSSSMPEADPSAPSPNLSQPFLHKATNSEPSITQKLQNGSSTMDQSESTSGTSNRKRVRED

SEQ ID NO: 72292 - DNA, 811 bp, Arabidopsis thaliana
  misc_feature (1)..(811): Ceres Seq. ID no. 4928448
  misc_feature (1)..(811): Ortholog of  Ceres SEQ ID NO 13594705 as cited in SEQ ID NO 52034
aaaaagaaaaaaaaacgctcgtcttcttcttcttcttcttcttatattacttcttcctcccacacagacaaattttgtaacgaagacgggatcgcgataagatcacggtgatcgaaaagccctaagaagtattttcaagggaaagggacttaaagatgcatacttttggttacagagcaaatgctctgctcactttcgcagtcacggctcttgctttcatttgcgcaatcgcgtccttctcagacaaattcagcaaccaaaatccttctgctgagatccagatacttaatatcaatcggtttaagaagcaatctcatggtaacgatgaggtcagcttgacactggacatatcagcagacttgcaatcactttttacttggaacaccaaacaggtttttgttttcgtagcagcagagtatgaaaccccaaagaattccctgaatcaggtttctctatgggatgccattattcctgccaaggaacatgccaaattccggattcaagtctcaaacaagtaccgtttcatcgatcagggacagaatcttcggggcaaagacttcaacttgacattacactggcatgtcatgcccaagaccgggaagatgtttgctgacaagatagtcttgcctggttacagtttaccagatgcatacagatgatgaagattgaataaaacatcaaacctagtccaagactttttgtatttcagttttctgaaaagttttagactttcttttattccaaagaaaactaattcaaaagtactattgttctcttagaatcaaacaaaactattctttttagtgatctt

SEQ ID NO: 72293 - protein, 167 aa, Arabidopsis thaliana; identical to SEQ ID NO: 29722
  peptide (1)..(167): Ceres Seq. ID no. 4928449

SEQ ID NO: 72294 - DNA, 639 bp, Arabidopsis thaliana
  misc_feature (1)..(639): Ceres Seq. ID no. 4928465
  misc_feature (1)..(639): Ortholog of  Ceres SEQ ID NO 15171175 as cited in SEQ ID NO 57476
  misc_feature (1)..(639): Ortholog of  Ceres SEQ ID NO 15178436 as cited in SEQ ID NO 57919
  misc_feature (1)..(639): Ortholog of  Ceres SEQ ID NO 13655808 as cited in SEQ ID NO 64901
atggaaacttctagaaactccaccaactcatcactcttccaatggttaggtcttctagaagattctgatcagcctcctgattctacccctcctcgagtcataacccttctcgcttctaccctcgagaagatgattcagaagaacaaaaaaaaattccacacaagacacaacaaggctgatgagatcactatgttccatggctcaaaagcaccatcgttaagcatttatcgttacacagaaagaatccataggtatgctcagtgtagccctgtgtgtttcgttgcagcttttgcctacatccttagatatctacagagaccagaggctaccagtacggctcgtcgtctcacatcactcaacgttcatcgccttctcatcaccagtctcttggtcgcagcaaaattcttggaacgccagtgttataacaacgcatattatgcaaaaatcggaggagtgagcactgaagagatgaataggctggagagaacgttcttggttgatgttgatttcaggctatatattacaacggagactttcgagaaacactgtctcatgttgcagaaagaaacggtgccttgtgattcaagaaaacttagaacagttcttggagagatagcttgtagctgccaagcgatttga

SEQ ID NO: 72295 - protein, 212 aa, Arabidopsis thaliana
  peptide (1)..(212): Ceres Seq. ID no. 4928466
METSRNSTNSSLFQWLGLLEDSDQPPDSTPPRVITLLASTLEKMIQKNKKKFHTRHNKADEITMFHGSKAPSLSIYRYTERIHRYAQCSPVCFVAAFAYILRYLQRPEATSTARRLTSLNVHRLLITSLLVAAKFLERQCYNNAYYAKIGGVSTEEMNRLERTFLVDVDFRLYITTETFEKHCLMLQKETVPCDSRKLRTVLGEIACSCQAI

SEQ ID NO: 72296 - protein, 169 aa, Arabidopsis thaliana
  peptide (1)..(169): Ceres Seq. ID no. 4928467
MIQKNKKKFHTRHNKADEITMFHGSKAPSLSIYRYTERIHRYAQCSPVCFVAAFAYILRYLQRPEATSTARRLTSLNVHRLLITSLLVAAKFLERQCYNNAYYAKIGGVSTEEMNRLERTFLVDVDFRLYITTETFEKHCLMLQKETVPCDSRKLRTVLGEIACSCQAI

SEQ ID NO: 72297 - protein, 149 aa, Arabidopsis thaliana
  peptide (1)..(149): Ceres Seq. ID no. 4928468
MFHGSKAPSLSIYRYTERIHRYAQCSPVCFVAAFAYILRYLQRPEATSTARRLTSLNVHRLLITSLLVAAKFLERQCYNNAYYAKIGGVSTEEMNRLERTFLVDVDFRLYITTETFEKHCLMLQKETVPCDSRKLRTVLGEIACSCQAI

SEQ ID NO: 72298 - DNA, 1407 bp, Arabidopsis thaliana
  misc_feature (1)..(1407): Ceres Seq. ID no. 4928798
  misc_feature (1)..(1407): Ortholog of  Ceres SEQ ID NO 15179007 as cited in SEQ ID NO 1038
  misc_feature (1)..(1407): Ortholog of  Ceres SEQ ID NO 15226449 as cited in SEQ ID NO 58879
  misc_feature (1)..(1407): Ortholog of  Ceres SEQ ID NO 13597146 as cited in SEQ ID NO 63311
atgcggaagttaacggcggttaattcactactgaaacggaacaattatcttcttccgcgccatggctcctcacaaacagcagctcagagaacatcctccgtccgcgagaccgagaccgaaacaaaacttccgaaaatgcccccgttcaattattctccgccgccttacgacggtccatctacggcagagatcatcgcaaagcggcgagagttcctcagccccgctctttttcacttctacaacacacccttaaacattgtggaggcaaagatgcagtatgtgttcgacgagaatggacgtcgatatttagatgcctttggaggaatagcgacggtttcgtgcggccattgccacccggaagtagttaactccgtcgtcaaacagttgaaacttattaaccactccaccatcctttaccttaaccacaccatctccgatttcgctgaagcccttgtctccactcttccgggagatctcaaggtggtgtttttcacgaattcgggtacggaggcgaatgaacttgcgatgatgatggctagactgtatacaggatgtaacgacatcgtttcgcttaggaactcttatcatggaaacgcagctgctactatgggtgccactgctcagtccaactggaaattcaacgtcgttcagagtggagttcatcacgccataaatccagatccttacagaggaatatttggatccgacggtgaaaagtacgcgagtgatgtacacgatcttatccaattcggaacgtccggtcaagtcgccggtttcattggcgaatcaatccagggtgttggaggaatcgtagagcttgctcccggatacttaccggcggcttacgacatcgtgaggaaagccggaggagtttgcatcgccgatgaagtccaatccggttttgctcgtaccggaacccatttctgggggtttcaatcccatggtgttatccctgacatcgtcaccatggccaaggggatcggtaacggtataccacttggagcggttgtgacgacaccggagattgccggcgttttaagccgtcggagttactttaatactttcggcggaaatccaatgtgcacggccgcaggacacgcagtacttagagtccttcacgaagagaagctccaagagaatgctaacctcgttggctcacatcttaaacgtagacttacgctactcaaaaacaaatacgaactcattggagacgtgagagggagaggattgatgctaggagttgagtttgtcaaagaccgcgacttaaaaactcctgcaaaagcagagacccttcatttaatggatcaaatgaaagaaatgggagtgttggtggggaaaggtggattctatgggaatgtcttcagaatcactcctcctctctgcttcaccctctccgacgctggttag

SEQ ID NO: 72299 - protein, 468 aa, Arabidopsis thaliana
  peptide (1)..(468): Ceres Seq. ID no. 4928799
MRKLTAVNSLLKRNNYLLPRHGSSQTAAQRTSSVRETETETKLPKMPPFNYSPPPYDGPSTAEIIAKRREFLSPALFHFYNTPLNIVEAKMQYVFDENGRRYLDAFGGIATVSCGHCHPEVVNSVVKQLKLINHSTILYLNHTISDFAEALVSTLPGDLKVVFFTNSGTEANELAMMMARLYTGCNDIVSLRNSYHGNAAATMGATAQSNWKFNVVQSGVHHAINPDPYRGIFGSDGEKYASDVHDLIQFGTSGQVAGFIGESIQGVGGIVELAPGYLPAAYDIVRKAGGVCIADEVQSGFARTGTHFWGFQSHGVIPDIVTMAKGIGNGIPLGAVVTTPEIAGVLSRRSYFNTFGGNPMCTAAGHAVLRVLHEEKLQENANLVGSHLKRRLTLLKNKYELIGDVRGRGLMLGVEFVKDRDLKTPAKAETLHLMDQMKEMGVLVGKGGFYGNVFRITPPLCFTLSDAG

SEQ ID NO: 72300 - protein, 423 aa, Arabidopsis thaliana
  peptide (1)..(423): Ceres Seq. ID no. 4928800
MPPFNYSPPPYDGPSTAEIIAKRREFLSPALFHFYNTPLNIVEAKMQYVFDENGRRYLDAFGGIATVSCGHCHPEVVNSVVKQLKLINHSTILYLNHTISDFAEALVSTLPGDLKVVFFTNSGTEANELAMMMARLYTGCNDIVSLRNSYHGNAAATMGATAQSNWKFNVVQSGVHHAINPDPYRGIFGSDGEKYASDVHDLIQFGTSGQVAGFIGESIQGVGGIVELAPGYLPAAYDIVRKAGGVCIADEVQSGFARTGTHFWGFQSHGVIPDIVTMAKGIGNGIPLGAVVTTPEIAGVLSRRSYFNTFGGNPMCTAAGHAVLRVLHEEKLQENANLVGSHLKRRLTLLKNKYELIGDVRGRGLMLGVEFVKDRDLKTPAKAETLHLMDQMKEMGVLVGKGGFYGNVFRITPPLCFTLSDAG

SEQ ID NO: 72301 - protein, 378 aa, Arabidopsis thaliana
  peptide (1)..(378): Ceres Seq. ID no. 4928801
MQYVFDENGRRYLDAFGGIATVSCGHCHPEVVNSVVKQLKLINHSTILYLNHTISDFAEALVSTLPGDLKVVFFTNSGTEANELAMMMARLYTGCNDIVSLRNSYHGNAAATMGATAQSNWKFNVVQSGVHHAINPDPYRGIFGSDGEKYASDVHDLIQFGTSGQVAGFIGESIQGVGGIVELAPGYLPAAYDIVRKAGGVCIADEVQSGFARTGTHFWGFQSHGVIPDIVTMAKGIGNGIPLGAVVTTPEIAGVLSRRSYFNTFGGNPMCTAAGHAVLRVLHEEKLQENANLVGSHLKRRLTLLKNKYELIGDVRGRGLMLGVEFVKDRDLKTPAKAETLHLMDQMKEMGVLVGKGGFYGNVFRITPPLCFTLSDAG

SEQ ID NO: 72302 - DNA, 1368 bp, Arabidopsis thaliana
  misc_feature (1)..(1368): Ceres Seq. ID no. 4928956
  misc_feature (1)..(1368): Ortholog of  Ceres SEQ ID NO 13503610 as cited in SEQ ID NO 62416
  misc_feature (1)..(1368): Ortholog of  Ceres SEQ ID NO 13657610 as cited in SEQ ID NO 66165
  misc_feature (1)..(1368): Ortholog of  Ceres SEQ ID NO 13598312 as cited in SEQ ID NO 68448
  misc_feature (1)..(1368): Ortholog of  Ceres SEQ ID NO 13596100 as cited in SEQ ID NO 68573
atggcagatttcaagcttcttttgcttatactcatccttctatctctctttgaacttgatctacttcactttcaccatgacttcttctctccttttccggtcaagatcggtttactcctgatatccatcttcttctatgcctactcaaccacccggtctaaaccggtttacctagtggatttctcatgtcaccaacccacggattcttgcaaaatctcatccgaaacgttcttcaacatggccaaaggcgctcaactctacaccgaagaaacaatccaattcatgacgaggatactaaaccggtccggtttaggagacgatacgtactccccacgttgcatgttaacctctccaccaactccatcaatgtacgaggcgagacatgaatccgaattagtcatcttcggagctcttaactcactatttaagaaaaccggaatcgaaccgagagaagtcggaatcttcatcgtaaactgcagcttgtttaaccctaacccatctctctcgtccatgatcgtaaaccggtacaagcttaaaaccgacgtcaaaacttacaatctctccggaatctccgtggacctcgccacaaatctactaaaggcaaaccctaatacctacgcagttattgttagtacggagaacatgactctaagcatgtatcgaggcaacgaccggtcaatgttagtccctaactgtctattccgagtaggtggcgctgcggttatgctctcaaaccggagtcaagaccgagtccggtctaagtacgaattgactcatattgtaaggactcacaaaggctctagcgataaacactacacttgtgctgaacaaaaagaagatagtaaaggtatcgttggagtcgcactctctaaagaactaacggttgttgctggtgacacgttaaagacgaatctaacagcacttggtccgcttgttttgcctttatctgaaaaactccggtttatcctctttttggtaaagagtaagcttttccggttaaaggttagtccatatgttccggattttaaactatgtttcaagcatttctgtattcacgctggtggtagagcgttacttgacgcggttgaaaaaggtcttggacttagtgagtttgatcttgagccgtctcggatgactttgcaccgctttggaaacacttcaagctcgtcgctgtggtacgagctggcttacgtggaggctaaatgtcgggtcaaacgaggagatagggtttggcagttggcgtttgggtcgggttttaaatgtaatagtattgtgtggagagcattgagaacgattccggctaacgagtcattggtgggtaacccgtggggtgactcggttcataagtatccagttcacgtgacctaa

SEQ ID NO: 72303 - protein, 455 aa, Arabidopsis thaliana; identical to SEQ ID NO: 71855
  peptide (1)..(455): Ceres Seq. ID no. 4928957

SEQ ID NO: 72304 - protein, 376 aa, Arabidopsis thaliana; identical to SEQ ID NO: 71856
  peptide (1)..(376): Ceres Seq. ID no. 4928958

SEQ ID NO: 72305 - protein, 361 aa, Arabidopsis thaliana
  peptide (1)..(361): Ceres Seq. ID no. 4928959
MTRILNRSGLGDDTYSPRCMLTSPPTPSMYEARHESELVIFGALNSLFKKTGIEPREVGIFIVNCSLFNPNPSLSSMIVNRYKLKTDVKTYNLSGISVDLATNLLKANPNTYAVIVSTENMTLSMYRGNDRSMLVPNCLFRVGGAAVMLSNRSQDRVRSKYELTHIVRTHKGSSDKHYTCAEQKEDSKGIVGVALSKELTVVAGDTLKTNLTALGPLVLPLSEKLRFILFLVKSKLFRLKVSPYVPDFKLCFKHFCIHAGGRALLDAVEKGLGLSEFDLEPSRMTLHRFGNTSSSSLWYELAYVEAKCRVKRGDRVWQLAFGSGFKCNSIVWRALRTIPANESLVGNPWGDSVHKYPVHVT

SEQ ID NO: 72306 - DNA, 1310 bp, Arabidopsis thaliana
  misc_feature (1)..(1310): Ceres Seq. ID no. 4929186
  misc_feature (1)..(1310): Ortholog of  Ceres SEQ ID NO 15168500 as cited in SEQ ID NO 57041
cacttttaattaaaacggtgccgtttctctcaggaacctctttcggtcggacgagaaagccaaaaacgtagcaaaacatcgatcctccgagtccgagattcaggaattggtaatggcggctatgtcagcggttctgtctctgggtttaggaacactccgcccttcgcatcgttccttgtcctgtttcgattccctccggcaccaccagacatcttttctccgttgccaccaaagtctcatctctagaaatacgacgaggtctccgctcaacaagattcttcaggcttgccttcaatccagtggattctgcaaatggtgatgctttggtgtcatcatccgatgaaagttctgagattgtatttatgggtaccggaaccagtgaagggattcctcgtgtcagctgcctcactaatcctttgaaaacatgttcggtatgcacaaaagcaacagaaccaggaaacagaaataggagacttaacaccagcattcttgttcggtacattagaccatccggaacaagtaacatcctcattgattgtggcaagttcttctaccatagtgcccttcgatggtttcccaccttcgggctaagaacacttgatgcagttgtaattactcattctcatgctgacgcaattggaggtctctgaaactgacaagtcttgatgatcttcgtgattggacaaacaatgtccaacctcacattccaatttacactgctatacgtgatctcgaggtgatgaagaagacccattattacttggttgatacaagtgtcatcatacccggagctgcagtctcagagttggagtttaaagtcatacacgaggaccagccatttgtggtaaacgatctgaagatcaccccattacctgtatggcatggaagtaactaccgttcccttggtttccgctttggtaatgtctgctacataagcgatgtcagtgacataccggaagaaacctacccgctccttaaagactgtgatctcctaattatggatgctttgaggcctgaccggtcttcagcaacacactttggcctcccaagggcgttagaggaagttcggaaaatcaaaccaaaaagaacccttttcaccggaatgatgcatttgatggaccacgagaaggtgagcgaagaactggagaaacttaggaacacagaaggcctcgatgtccaactgagctacgatggtcttcgtgtaccaatctcaatttaactcggtttattccttttttccctggtataaccggtttataattatatacataaaataaatttccttttttgtaatgacctgttatatgtgc

SEQ ID NO: 72307 - protein, 159 aa, Arabidopsis thaliana
  peptide (1)..(159): Ceres Seq. ID no. 4929187
MKKTHYYLVDTSVIIPGAAVSELEFKVIHEDQPFVVNDLKITPLPVWHGSNYRSLGFRFGNVCYISDVSDIPEETYPLLKDCDLLIMDALRPDRSSATHFGLPRALEEVRKIKPKRTLFTGMMHLMDHEKVSEELEKLRNTEGLDVQLSYDGLRVPISI

SEQ ID NO: 72308 - protein, 95 aa, Arabidopsis thaliana; identical to SEQ ID NO: 39418
  peptide (1)..(95): Ceres Seq. ID no. 4929188

SEQ ID NO: 72309 - DNA, 1887 bp, Arabidopsis thaliana
  misc_feature (1)..(1887): Ceres Seq. ID no. 4929292
  misc_feature (1)..(1887): Ortholog of  Ceres SEQ ID NO 12586556 as cited in SEQ ID NO 64667
  misc_feature (1)..(1887): Ortholog of  Ceres SEQ ID NO 13660894 as cited in SEQ ID NO 67475
atgtttaacttgatgagactaattcatcgatctttctcgtcgtctccaacaaactatgttcttcaaaccattcttccaatctctcaattatgctccaacggtcgtcttcaagaagctttactggagatggcgatgttaggtcccgagatggggttccatggttacgatgctttgttgaatgcgtgtttggacaaaagggctcttagagatggtcaaagagttcatgcccacatgatcaaaacccgttatttacccgccacttacctccgaactcgtctgcttatcttctatggtaaatgtgattgtttagaggatgcacggaaagtgctcgacgaaatgcctgagaagaatgtcgtttcctggactgctatgatctcgcgttattctcaaactgggcattcttctgaggctctcactgtttttgcagagatgatgagatcagatgggaaaccgaatgagttcactttcgctactgttcttacttcttgtatacgtgcttctgggttaggtcttggtaagcaaatccatggactcatagttaagtggaattacgattctcatatttttgttggaagctctcttcttgacatgtatgctaaagctggtcaaattaaagaagctcgtgagattttcgagtgtttgcctgagagagatgttgtctcatgtactgctattattgctggttatgcccaactaggtcttgatgaagaggcgttagagatgtttcatagactgcatagtgaaggaatgagtcccaattatgttacctatgctagtcttttgacagcattatctggacttgctttgctagatcatggcaagcaagctcattgccatgtcttgagacgtgaacttccgttttacgcggtccttcagaattctcttattgatatgtactcaaaatgtgggaatctttcttacgctagaaggctttttgataacatgcctgagaggacagcgatttcatggaatgcgatgcttgtgggatatagtaaacatgggttaggaagagaagttcttgaactttttagattgatgagagatgagaagagagtaaagcctgatgcagttacccttttggctgttttgtctggttgcagccatgggagaatggaagacacagggttgaatatatttgatggcatggtagcgggagaatacgggactaagcctggcactgagcattatggttgcatcgttgatatgcttggccgtgcgggtaggattgatgaggcatttgaattcatcaaaagaatgccatctaaaccaactgctggtgtcttgggttcccttttaggagcatgtagggttcacttatctgtggatattggcgaatctgtaggtcgcagactcattgagattgaaccagagaatgcagggaactatgtcatcctctctaatttgtatgcttcggctggaagatgggcagatgtaaacaatgtaagagctatgatgatgcagaaagctgttacaaaagaaccaggaagaagctggattcaacacgagcaaaccttacattacttccacgccaatgatcgtacccatccaagaagggaagaagtgttagctaaaatgaaagaaatatcgataaaaatgaagcaagctggttatgttcctgatcttagctgtgtgctatatgatgtggatgaagagcagaaggagaaaatgctacttggccacagtgagaaactagccttgacttttggtttgattgctactggtgaagggattccaattagagttttcaagaatctacgtatatgcgttgattgtcataacttcgccaagatcttctcaaaggtttttgaaagagaagtgtcattaagggataaaaacaggtttcatcaaattgtcgatggaatatgttcatgcggagattactggtga

SEQ ID NO: 72310 - protein, 628 aa, Arabidopsis thaliana
  peptide (1)..(628): Ceres Seq. ID no. 4929293
MFNLMRLIHRSFSSSPTNYVLQTILPISQLCSNGRLQEALLEMAMLGPEMGFHGYDALLNACLDKRALRDGQRVHAHMIKTRYLPATYLRTRLLIFYGKCDCLEDARKVLDEMPEKNVVSWTAMISRYSQTGHSSEALTVFAEMMRSDGKPNEFTFATVLTSCIRASGLGLGKQIHGLIVKWNYDSHIFVGSSLLDMYAKAGQIKEAREIFECLPERDVVSCTAIIAGYAQLGLDEEALEMFHRLHSEGMSPNYVTYASLLTALSGLALLDHGKQAHCHVLRRELPFYAVLQNSLIDMYSKCGNLSYARRLFDNMPERTAISWNAMLVGYSKHGLGREVLELFRLMRDEKRVKPDAVTLLAVLSGCSHGRMEDTGLNIFDGMVAGEYGTKPGTEHYGCIVDMLGRAGRIDEAFEFIKRMPSKPTAGVLGSLLGACRVHLSVDIGESVGRRLIEIEPENAGNYVILSNLYASAGRWADVNNVRAMMMQKAVTKEPGRSWIQHEQTLHYFHANDRTHPRREEVLAKMKEISIKMKQAGYVPDLSCVLYDVDEEQKEKMLLGHSEKLALTFGLIATGEGIPIRVFKNLRICVDCHNFAKIFSKVFEREVSLRDKNRFHQIVDGICSCGDYW

SEQ ID NO: 72311 - protein, 624 aa, Arabidopsis thaliana
  peptide (1)..(624): Ceres Seq. ID no. 4929294
MRLIHRSFSSSPTNYVLQTILPISQLCSNGRLQEALLEMAMLGPEMGFHGYDALLNACLDKRALRDGQRVHAHMIKTRYLPATYLRTRLLIFYGKCDCLEDARKVLDEMPEKNVVSWTAMISRYSQTGHSSEALTVFAEMMRSDGKPNEFTFATVLTSCIRASGLGLGKQIHGLIVKWNYDSHIFVGSSLLDMYAKAGQIKEAREIFECLPERDVVSCTAIIAGYAQLGLDEEALEMFHRLHSEGMSPNYVTYASLLTALSGLALLDHGKQAHCHVLRRELPFYAVLQNSLIDMYSKCGNLSYARRLFDNMPERTAISWNAMLVGYSKHGLGREVLELFRLMRDEKRVKPDAVTLLAVLSGCSHGRMEDTGLNIFDGMVAGEYGTKPGTEHYGCIVDMLGRAGRIDEAFEFIKRMPSKPTAGVLGSLLGACRVHLSVDIGESVGRRLIEIEPENAGNYVILSNLYASAGRWADVNNVRAMMMQKAVTKEPGRSWIQHEQTLHYFHANDRTHPRREEVLAKMKEISIKMKQAGYVPDLSCVLYDVDEEQKEKMLLGHSEKLALTFGLIATGEGIPIRVFKNLRICVDCHNFAKIFSKVFEREVSLRDKNRFHQIVDGICSCGDYW

SEQ ID NO: 72312 - protein, 586 aa, Arabidopsis thaliana
  peptide (1)..(586): Ceres Seq. ID no. 4929295
MAMLGPEMGFHGYDALLNACLDKRALRDGQRVHAHMIKTRYLPATYLRTRLLIFYGKCDCLEDARKVLDEMPEKNVVSWTAMISRYSQTGHSSEALTVFAEMMRSDGKPNEFTFATVLTSCIRASGLGLGKQIHGLIVKWNYDSHIFVGSSLLDMYAKAGQIKEAREIFECLPERDVVSCTAIIAGYAQLGLDEEALEMFHRLHSEGMSPNYVTYASLLTALSGLALLDHGKQAHCHVLRRELPFYAVLQNSLIDMYSKCGNLSYARRLFDNMPERTAISWNAMLVGYSKHGLGREVLELFRLMRDEKRVKPDAVTLLAVLSGCSHGRMEDTGLNIFDGMVAGEYGTKPGTEHYGCIVDMLGRAGRIDEAFEFIKRMPSKPTAGVLGSLLGACRVHLSVDIGESVGRRLIEIEPENAGNYVILSNLYASAGRWADVNNVRAMMMQKAVTKEPGRSWIQHEQTLHYFHANDRTHPRREEVLAKMKEISIKMKQAGYVPDLSCVLYDVDEEQKEKMLLGHSEKLALTFGLIATGEGIPIRVFKNLRICVDCHNFAKIFSKVFEREVSLRDKNRFHQIVDGICSCGDYW

SEQ ID NO: 72313 - DNA, 1134 bp, Arabidopsis thaliana
  misc_feature (1)..(1134): Ceres Seq. ID no. 4929400
  misc_feature (1)..(1134): Ortholog of  Ceres SEQ ID NO 13582301 as cited in SEQ ID NO 56509
  misc_feature (1)..(1134): Ortholog of  Ceres SEQ ID NO 13597380 as cited in SEQ ID NO 64054
  misc_feature (1)..(1134): Ortholog of  Ceres SEQ ID NO 12625474 as cited in SEQ ID NO 64169
  misc_feature (1)..(1134): Ortholog of  Ceres SEQ ID NO 13597502 as cited in SEQ ID NO 64681
atggcaagtcctagatttaattccatcatcatcatcttattcatctgcactataagcttatcgatcgtctcgatttcttgcaaagaagatcttaaaacgaaccaagccgccttgtttgcgtttggagattctctgtttgaagccggaaacaataattacttcgactctatctcaagtttccgatcaaatttctggccgtatggtaaaacaacgttcaagtttccaacgggacgggtctctgatggacgaataatgatagattttattgctgaatacgcatggttaccgttgatcccgccaaatctacaacctggttacagtaacagtcaactaacctatggacttaatttcgctactacagccgccggagttttcgccggaacttttcccggatcggtaactaatctctcgaaagatttgggaacacagttaaacaacttcaagaacgtggagaaaacgttgaggtctaatttaggagatgcagaggcgaggagagtaatctcgaaagctgtttatctttttcacataggagcaaatgactatcaatacccattctttgcaaatacctcaacttttagtaacactaccaaagaaagattcatcgatttcgtcatcggtaacacaacgactgtaatcgaggagttgtataaattaggagcaaggaaattcggattcttgagcttgggtccatttggttgtacaccaagcgcattgataataaacagtacaaagataggatcttgtttcgagccagtcacagagctgatcaatctccataaccaagaatttccaaaagtcttgaggcgtctagagcgccggttatccggattcaaatacgctcttcatgactttcacacttctctatcccaaagaatcaacaatccttctcgttacggttttaaggaaggggagatggcatgttgcgggagtgggccgttgaggggaatcaatacatgtggattccgaaatggaccatcgcaaggttacaagctatgcgaaaacgctgatgattacgtcttctttgatccttctcatttgacggaaacggctcatcaacagatcgctgagctgatttggagcggaccacctaatgtcactgcaccttacaatcttaaaacattgttcagactctag

SEQ ID NO: 72314 - protein, 377 aa, Arabidopsis thaliana
  peptide (1)..(377): Ceres Seq. ID no. 4929401
MASPRFNSIIIILFICTISLSIVSISCKEDLKTNQAALFAFGDSLFEAGNNNYFDSISSFRSNFWPYGKTTFKFPTGRVSDGRIMIDFIAEYAWLPLIPPNLQPGYSNSQLTYGLNFATTAAGVFAGTFPGSVTNLSKDLGTQLNNFKNVEKTLRSNLGDAEARRVISKAVYLFHIGANDYQYPFFANTSTFSNTTKERFIDFVIGNTTTVIEELYKLGARKFGFLSLGPFGCTPSALIINSTKIGSCFEPVTELINLHNQEFPKVLRRLERRLSGFKYALHDFHTSLSQRINNPSRYGFKEGEMACCGSGPLRGINTCGFRNGPSQGYKLCENADDYVFFDPSHLTETAHQQIAELIWSGPPNVTAPYNLKTLFRL

SEQ ID NO: 72315 - protein, 293 aa, Arabidopsis thaliana
  peptide (1)..(293): Ceres Seq. ID no. 4929402
MIDFIAEYAWLPLIPPNLQPGYSNSQLTYGLNFATTAAGVFAGTFPGSVTNLSKDLGTQLNNFKNVEKTLRSNLGDAEARRVISKAVYLFHIGANDYQYPFFANTSTFSNTTKERFIDFVIGNTTTVIEELYKLGARKFGFLSLGPFGCTPSALIINSTKIGSCFEPVTELINLHNQEFPKVLRRLERRLSGFKYALHDFHTSLSQRINNPSRYGFKEGEMACCGSGPLRGINTCGFRNGPSQGYKLCENADDYVFFDPSHLTETAHQQIAELIWSGPPNVTAPYNLKTLFRL

SEQ ID NO: 72316 - DNA, 1695 bp, Arabidopsis thaliana
  misc_feature (1)..(1695): Ceres Seq. ID no. 4929461
  misc_feature (1)..(1695): Ortholog of  Ceres SEQ ID NO 14311203 as cited in SEQ ID NO 53639
  misc_feature (1)..(1695): Ortholog of  Ceres SEQ ID NO 15176053 as cited in SEQ ID NO 57792
  misc_feature (1)..(1695): Ortholog of  Ceres SEQ ID NO 14311175 as cited in SEQ ID NO 60223
  misc_feature (1)..(1695): Ortholog of  Ceres SEQ ID NO 15224727 as cited in SEQ ID NO 64990
  misc_feature (1)..(1695): Ortholog of  Ceres SEQ ID NO 14308023 as cited in SEQ ID NO 65865
  misc_feature (1)..(1695): Ortholog of  Ceres SEQ ID NO 14307972 as cited in SEQ ID NO 66436
  misc_feature (1)..(1695): Ortholog of  Ceres SEQ ID NO 15170175 as cited in SEQ ID NO 67138
  misc_feature (1)..(1695): Ortholog of  Ceres SEQ ID NO 12614670 as cited in SEQ ID NO 68565
atcctgagaatggtcacaaattctctacctctctctctctctctctctggtagagaaaatggagatatcagttgcatcggtaacagtttctgtagctgtagttgttgtgtcatggtgggtatggagaactttacagcgggtttggcttaaaccaaagatgcttgagagttacctgagaagacaaggtcttgccggaactccttacacgcctcttgtcggtgatttgaagagaaattttagcatgctggctgaggcaagatccaaacccatcaacctaacagatgatatcacaccacgtatcgtgccttatccgttgcaaatgctcaagactcatgggaggactttctttacatggtttggacccataccaacaatcaccataatggatcctgagcaaatcaaagaagtgttcaacaaagtttatgatttccagaaggcacatacgtttcctctgggcagattaatagcggctggactcgttagttatgatggtgataaatggacaaaacaccgaagaatcatcaacccggctttccaccttgagaagatcaaaaatatggtacctgcgttccaccagagctgcagcgagattgttggcgaatgggacaagttagtgacggataaacagtcatcctgtgaggtggatatttggccttggcttgtgagtatgactgcagatgtgatctcccgtactgcatttggcagcagctacaaagaagggcagaggatatttgagctccaagcggaattagcacagctcatcattcaagcttttcggaaagctattatccctggatatcgttatttccctacaaagggtaatagaaggatgaaagcagcagctagagaaatcaaatttatactgagagggatcgttaacaaaaggcttagggcaagagaagctggggaagcaccaagtgacgatttgctgggtatacttcttgaatcgaatttgggacaaacaaaaggaaatggaatgagtaccgaggaactgatggaggagtgcaagttgttctatttcgctgggcaagagactactacagtacttctggtttggacaatggtgttgttaagccaacaccaagattggcaggctcgtgcaagagaagaagtgaagcaagtttttggcgataaagaacctgatgcagaaggcttgaaccagctcaaagttgtaagtaaaccgaaccaaaaaccttcaagtgacgtgagttcttttgttgcattgaagctgaaaatttgatccctcacagatgacgatgatattatatgaagtccttaggctatatcctccagtagtccagctgacccgagccattcacaaagagatgcagctaggtgacctgacactaccaggcggcgttcagataagtctaccaattctgctaatccaacgcgacagggagctgtggggaaacgatgcaggggagttcaagccagatagattcaaagacggtctctcaaaggcaacaaagaaccaagtctccttctttccttttgcgtggggaccgaggatctgcattggccaaaattttgcactgcttgaggcaaagatggcaatgacactgattctacggaaattctcctttgagctttctccttcttatgttcacgcgccttacacagtcctcactactcacccacagttcggtgctcctcttatcttgcacaagctctaatcgtataaactccttgttc

SEQ ID NO: 72317 - protein, 393 aa, Arabidopsis thaliana
  peptide (1)..(393): Ceres Seq. ID no. 4929462
MEISVASVTVSVAVVVVSWWVWRTLQRVWLKPKMLESYLRRQGLAGTPYTPLVGDLKRNFSMLAEARSKPINLTDDITPRIVPYPLQMLKTHGRTFFTWFGPIPTITIMDPEQIKEVFNKVYDFQKAHTFPLGRLIAAGLVSYDGDKWTKHRRIINPAFHLEKIKNMVPAFHQSCSEIVGEWDKLVTDKQSSCEVDIWPWLVSMTADVISRTAFGSSYKEGQRIFELQAELAQLIIQAFRKAIIPGYRYFPTKGNRRMKAAAREIKFILRGIVNKRLRAREAGEAPSDDLLGILLESNLGQTKGNGMSTEELMEECKLFYFAGQETTTVLLVWTMVLLSQHQDWQARAREEVKQVFGDKEPDAEGLNQLKVVSKPNQKPSSDVSSFVALKLKI

SEQ ID NO: 72318 - protein, 360 aa, Arabidopsis thaliana
  peptide (1)..(360): Ceres Seq. ID no. 4929463
MLESYLRRQGLAGTPYTPLVGDLKRNFSMLAEARSKPINLTDDITPRIVPYPLQMLKTHGRTFFTWFGPIPTITIMDPEQIKEVFNKVYDFQKAHTFPLGRLIAAGLVSYDGDKWTKHRRIINPAFHLEKIKNMVPAFHQSCSEIVGEWDKLVTDKQSSCEVDIWPWLVSMTADVISRTAFGSSYKEGQRIFELQAELAQLIIQAFRKAIIPGYRYFPTKGNRRMKAAAREIKFILRGIVNKRLRAREAGEAPSDDLLGILLESNLGQTKGNGMSTEELMEECKLFYFAGQETTTVLLVWTMVLLSQHQDWQARAREEVKQVFGDKEPDAEGLNQLKVVSKPNQKPSSDVSSFVALKLKI

SEQ ID NO: 72319 - protein, 332 aa, Arabidopsis thaliana
  peptide (1)..(332): Ceres Seq. ID no. 4929464
MLAEARSKPINLTDDITPRIVPYPLQMLKTHGRTFFTWFGPIPTITIMDPEQIKEVFNKVYDFQKAHTFPLGRLIAAGLVSYDGDKWTKHRRIINPAFHLEKIKNMVPAFHQSCSEIVGEWDKLVTDKQSSCEVDIWPWLVSMTADVISRTAFGSSYKEGQRIFELQAELAQLIIQAFRKAIIPGYRYFPTKGNRRMKAAAREIKFILRGIVNKRLRAREAGEAPSDDLLGILLESNLGQTKGNGMSTEELMEECKLFYFAGQETTTVLLVWTMVLLSQHQDWQARAREEVKQVFGDKEPDAEGLNQLKVVSKPNQKPSSDVSSFVALKLKI

SEQ ID NO: 72320 - DNA, 2967 bp, Arabidopsis thaliana
  misc_feature (1)..(2967): Ceres Seq. ID no. 4929535
  misc_feature (1)..(2967): Ortholog of  Ceres SEQ ID NO 14313336 as cited in SEQ ID NO 55501
atgtcgttaaatcgacaacttctattcacttactacttcatcgtctctcttatcctcttctccgatttcgtatcctctgcaacattaccaaaagaagaagtggatgctttacaaagcgtcgcgacggcgttgaagaagagtaattggaatttcagtgtggatccatgtgacgaaaccttgtctgaaggcggatggaggaatcctaacgccgctaagggattcgaagacgccgttacttgtaactgctcctccgtcatctgccacgtcaccaacatagttctcaaggcacaagaccttcaaggatctcttcctacagatctttcaggacttcctttcttgcaagagcttgatctgactagaaactatctcaacggttccattcctcccgaatggggagcctcatcacttctaaacatctcactacttggaaaccggataagtggttcaatcccaaaagaacttggaaaccttacaaccctttctggtcttgtcttggaatacaaccaactctcagggaagatacctccagagctcgggaatctaccaaaccttaaaagactctcgaataacttgagcggggaaatcccaagtacattcgccaaacttactacgttgactgatttacgtattagtgacaaccagttcactggtgctataccagatttcatccagaactggaaaggactagagaaactggttattcaagcaagtggtttagttggaccgattcctagtgccattggtcttctgggaaccttgacagacttgagaatcactgacttgagtggacctgaatctccatttccgccactaagaaacatgacatcgatgaagtatttgattcttaggaactgtaaccttacaggagacttacctgcgtatcttggacagaatagaaaattaaagaatctagatcttagctttaacaaactgagtggaccaatcccagccacatattccggtctttcagatgtagatttcatatactttacaagtaacatgttaaatggacaagtaccaagttggatggtagaccaaggagacacgattgatattacttacaataacttctccaaagataaaaccgaagaatgtcaacaaaaatccgtgaacacgttttcaagcacaagccctttagtggcaaataactccaatgagactaagtatgatgctgacacatgggatacaccgggttactatgatagtaaaaacgggtgggtttctagcaacacgggaaacttcttggatgatgatcggactaacaatggaaaatcaaaatggtcgaattcatcagagcttaagataacaaattctagcatagattttaggctttacacacaagcgcgtctctcggctatctccctcacttaccaggcattgtgtcttggaaaaggaaactatacggttaatcttcatttcgctgaaattatgttcaatgaaaagaacatgtatagcaatttgggaagacgatacttcgacatatacgttcagggtaaacgtgaagtgaaagatttcaatatcgttgatgaagcaaaaggtgtgggaaaagctgttgttaagaaatttcctgtcatggttacaaatgggaaactggaaataagattgcagtgggctgggaaaggaactcaagctattcctgtgagaggtgtctatggtcctctcatatctgctgtatcggtagatccagattttattccaccaaaggaaccgggcactggaactggtggtggaagttctgttggtacagtggttggtagtgtaatcgcttctacggtgtttcttgtgcttttaatcggcggtatattatggtggagaggctgcttaagacccaagagtcagatggaaaaagatttcaagaacttagatttccagatcagttcgttctccttgaggcaaatcaaagttgccacggataactttgatcctgcaaacaagatcggagaaggtggttttggtcctgtacacaagggaataatgactgatggaactgtaatcgcggtgaagcagctatcggcaaaatcaaaacaagggaatcgagaattcttaaacgagattgctatgatttcggctctgcagcatccacatttggttaaactatatggatgttgcgttgaaggtgatcagctcctgctagtttacgagtacttggagaacaacagtctcgcgcgagctcttttcggacctcaagagactcagataccactaaattggccaatgaggcagaagatttgtgttggaatagcgagaggattagcttatctccacgaggaatcaagactcaagatcgtacacagagacatcaaagccactaatgtcttgctggataaggaactaaacccaaagatttcagattttgggcttgctaagcttgatgaagaagaaaacacacacatcagcacacgagtcgctggaacatatggatacatggctccagaatacgccatgagaggccatttgacagataaagccgacgtctacagttttggcgttgtggccctagaaatcgttcacggaaagagcaacacgagctcacgatctaaagctgataccttctaccttcttgactgggtgcacgttttaagggaacaaaacactctacttgaagtagtagatccaaggctaggaacagattacaacaaacaagaagcattgatgatgattcagatagggatgctctgtaccagtccagctccaggggatagaccttcgatgtcgacggtggtgagtatgctcgaaggccattcaacggtgaatgttgagaaacttcttgaagcttcggtcaacaatgaaaaggacgaagagagtgtgagagcgatgaaaaggcattacgccacgataggtgaggaggagataacgaacacgacaactaccgatggacctttcacgtcgtcttctacgtcaaccgccaacgccaacgatctttaccctgttaagctcgactctgcctattggaacactagaacttaa

SEQ ID NO: 72321 - protein, 988 aa, Arabidopsis thaliana
  peptide (1)..(988): Ceres Seq. ID no. 4929536
MSLNRQLLFTYYFIVSLILFSDFVSSATLPKEEVDALQSVATALKKSNWNFSVDPCDETLSEGGWRNPNAAKGFEDAVTCNCSSVICHVTNIVLKAQDLQGSLPTDLSGLPFLQELDLTRNYLNGSIPPEWGASSLLNISLLGNRISGSIPKELGNLTTLSGLVLEYNQLSGKIPPELGNLPNLKRLSNNLSGEIPSTFAKLTTLTDLRISDNQFTGAIPDFIQNWKGLEKLVIQASGLVGPIPSAIGLLGTLTDLRITDLSGPESPFPPLRNMTSMKYLILRNCNLTGDLPAYLGQNRKLKNLDLSFNKLSGPIPATYSGLSDVDFIYFTSNMLNGQVPSWMVDQGDTIDITYNNFSKDKTEECQQKSVNTFSSTSPLVANNSNETKYDADTWDTPGYYDSKNGWVSSNTGNFLDDDRTNNGKSKWSNSSELKITNSSIDFRLYTQARLSAISLTYQALCLGKGNYTVNLHFAEIMFNEKNMYSNLGRRYFDIYVQGKREVKDFNIVDEAKGVGKAVVKKFPVMVTNGKLEIRLQWAGKGTQAIPVRGVYGPLISAVSVDPDFIPPKEPGTGTGGGSSVGTVVGSVIASTVFLVLLIGGILWWRGCLRPKSQMEKDFKNLDFQISSFSLRQIKVATDNFDPANKIGEGGFGPVHKGIMTDGTVIAVKQLSAKSKQGNREFLNEIAMISALQHPHLVKLYGCCVEGDQLLLVYEYLENNSLARALFGPQETQIPLNWPMRQKICVGIARGLAYLHEESRLKIVHRDIKATNVLLDKELNPKISDFGLAKLDEEENTHISTRVAGTYGYMAPEYAMRGHLTDKADVYSFGVVALEIVHGKSNTSSRSKADTFYLLDWVHVLREQNTLLEVVDPRLGTDYNKQEALMMIQIGMLCTSPAPGDRPSMSTVVSMLEGHSTVNVEKLLEASVNNEKDEESVRAMKRHYATIGEEEITNTTTTDGPFTSSSTSTANANDLYPVKLDSAYWNTRT

SEQ ID NO: 72322 - protein, 715 aa, Arabidopsis thaliana
  peptide (1)..(715): Ceres Seq. ID no. 4929537
MTSMKYLILRNCNLTGDLPAYLGQNRKLKNLDLSFNKLSGPIPATYSGLSDVDFIYFTSNMLNGQVPSWMVDQGDTIDITYNNFSKDKTEECQQKSVNTFSSTSPLVANNSNETKYDADTWDTPGYYDSKNGWVSSNTGNFLDDDRTNNGKSKWSNSSELKITNSSIDFRLYTQARLSAISLTYQALCLGKGNYTVNLHFAEIMFNEKNMYSNLGRRYFDIYVQGKREVKDFNIVDEAKGVGKAVVKKFPVMVTNGKLEIRLQWAGKGTQAIPVRGVYGPLISAVSVDPDFIPPKEPGTGTGGGSSVGTVVGSVIASTVFLVLLIGGILWWRGCLRPKSQMEKDFKNLDFQISSFSLRQIKVATDNFDPANKIGEGGFGPVHKGIMTDGTVIAVKQLSAKSKQGNREFLNEIAMISALQHPHLVKLYGCCVEGDQLLLVYEYLENNSLARALFGPQETQIPLNWPMRQKICVGIARGLAYLHEESRLKIVHRDIKATNVLLDKELNPKISDFGLAKLDEEENTHISTRVAGTYGYMAPEYAMRGHLTDKADVYSFGVVALEIVHGKSNTSSRSKADTFYLLDWVHVLREQNTLLEVVDPRLGTDYNKQEALMMIQIGMLCTSPAPGDRPSMSTVVSMLEGHSTVNVEKLLEASVNNEKDEESVRAMKRHYATIGEEEITNTTTTDGPFTSSSTSTANANDLYPVKLDSAYWNTRT

SEQ ID NO: 72323 - protein, 712 aa, Arabidopsis thaliana
  peptide (1)..(712): Ceres Seq. ID no. 4929538
MKYLILRNCNLTGDLPAYLGQNRKLKNLDLSFNKLSGPIPATYSGLSDVDFIYFTSNMLNGQVPSWMVDQGDTIDITYNNFSKDKTEECQQKSVNTFSSTSPLVANNSNETKYDADTWDTPGYYDSKNGWVSSNTGNFLDDDRTNNGKSKWSNSSELKITNSSIDFRLYTQARLSAISLTYQALCLGKGNYTVNLHFAEIMFNEKNMYSNLGRRYFDIYVQGKREVKDFNIVDEAKGVGKAVVKKFPVMVTNGKLEIRLQWAGKGTQAIPVRGVYGPLISAVSVDPDFIPPKEPGTGTGGGSSVGTVVGSVIASTVFLVLLIGGILWWRGCLRPKSQMEKDFKNLDFQISSFSLRQIKVATDNFDPANKIGEGGFGPVHKGIMTDGTVIAVKQLSAKSKQGNREFLNEIAMISALQHPHLVKLYGCCVEGDQLLLVYEYLENNSLARALFGPQETQIPLNWPMRQKICVGIARGLAYLHEESRLKIVHRDIKATNVLLDKELNPKISDFGLAKLDEEENTHISTRVAGTYGYMAPEYAMRGHLTDKADVYSFGVVALEIVHGKSNTSSRSKADTFYLLDWVHVLREQNTLLEVVDPRLGTDYNKQEALMMIQIGMLCTSPAPGDRPSMSTVVSMLEGHSTVNVEKLLEASVNNEKDEESVRAMKRHYATIGEEEITNTTTTDGPFTSSSTSTANANDLYPVKLDSAYWNTRT

SEQ ID NO: 72324 - DNA, 2562 bp, Arabidopsis thaliana
  misc_feature (1)..(2562): Ceres Seq. ID no. 4929543
  misc_feature (1)..(2562): Ortholog of  Ceres SEQ ID NO 13593911 as cited in SEQ ID NO 52935
atggcggctgtcgattcaactgatcggcgggacttcatagtgaacatcaacggccaagagagtggagccgtcggtgctacagggtcaagcagcaatgctgagggaggtaatatttggaaagagtcaagctatgacttttgggatggtgaaaagggtaagaatgataagaaaggagacgacgaagacgaagacggcggcagtttccatttcaggcagcggggagagcggaggcattcgtcagctgagttatctgatccgccgtcgaagctaattggtcagtttcttcacaagcagagagcttcaggagatgagatctctttagatgttgagcttaacatggcagagctacagagcaacacgccgccacgtcctgcaactgctagcaacacgccgcgacgtggcttaacgacgatttctgaatcttcttctccggttaagactaaagttaaagcagacgcagtaagacggaggcagaacagaacatcgctaggtggaagtagcgacgaggaaggtcgaaacagagacgaagcagaggttttgaagtgtggttcgaagaaaccgatgttgagtaggaacaagaccaaatcaagattgcaggatcctccaacaccgacacatccagcgattgacaagacagagatgaagtctggtcggagatccgggatttttaaatctgggtttcttgggaaaagccctaaagcgggtactccgggtcggaatgggtttgaggaagaagaagaggaggatccgtttctagacgaggatttaccggaggaattcaaaagggacaaacttagcttctgggttttccttgaatggataagtctagttctgatagtcacaagtttggtctgtagcttaaccatacataacttgcaacgcaagacatggtggaagctggatttgtggaaatgggaagtgactgttttggtgttgatatgtgggagattagtctcgagttggatagtgagaatcattgtcttcttggtcgagaaaaacttcacttggaggaaaagggttttgtatttcgtctacggagtgagaaaatctgttcaaaactgcttgtggttagggctagtgttgctcgcgtggcatttcttgttcgataagaaagtcgaaagagagactcggagcactgctcttcggtatgtgacgagagtgttggtatgtttgcttgtggctcttatcatttggttggttaaaacaattctggttaaagttttggcttcatcgttccacatgagcacttactttgatcggattcaggagtcgttgttcactcaatacgtgattgaaactctctccggtcctcctttgatggagattcagagaatggaggaagaagagcaacaagtagcagaagatgttaagagcttagagaaattagccggagctaagctgcctccagctctaaaagcgaccgtcaagagttttatgaaagtcgggaaaagtccgggactgaatcggattggttctaagagaggagaagatggcgaagggattaggattgatcagttgaagagaatgaacacaaagaatgtgtctgcttggaacatgaagagattgatgaatataatactaaaaggcgctatttctactttggatcaaaatatgcaggacactactcaggaggatgaggacgctacgcatataagaagcgagtacgaagctaaatgcgcagctaggaagatttttcacaacgtcaccgagccaggttctaggtacatatatttggaagacttcttgcgttttctatgtgaagaggaggctgaaagagccatggctctctttgaaggagcttcagagagcgataagatcagcaagtcttgcctcaagaattgggtggttaaggcgtttagagaaaggagagctctggctttgaccttaaacgatacaaaaacagcagtggacagacttcaccgtataatcaacgtgctccttctagtagcctttgtatttggaaactcctgcaaaaccatcttcgaagccatcattttcctttttgttatgcacccatttgatgtcggtgaccgatgtgaaatcgacggtgttcagttggtagtggaggagatgaacatattgacgactgttttcttgcgatatgataatcaaaagatcatatatccgaatagtgtcctcggcacaaaacctatagctaactattaccgaagtcccgatatgggagacgcggttgaattctgtgttcatatagcaactcctcctgaaaagatcactgccattaaacagagaatactaagttacgtagacaacaagaaggattattggtatcctgcacctatgattgtgttcctaagcatggatgacttgaatagtgtgaagatagcggtgtggttgacacatagaatgaatcatcaagacatgggagagaggtatataagaagaggtctattactagaggaagtgggaaaaacttgtagagagctagatatcgagtatcgcttatatcctcttaacattaatgttcgaagtctccctcctacggctaatccaacttcttcagaccgcattcctccttcatggatgcaacaacgcggtccttga

SEQ ID NO: 72325 - protein, 853 aa, Arabidopsis thaliana
  peptide (1)..(853): Ceres Seq. ID no. 4929544
MAAVDSTDRRDFIVNINGQESGAVGATGSSSNAEGGNIWKESSYDFWDGEKGKNDKKGDDEDEDGGSFHFRQRGERRHSSAELSDPPSKLIGQFLHKQRASGDEISLDVELNMAELQSNTPPRPATASNTPRRGLTTISESSSPVKTKVKADAVRRRQNRTSLGGSSDEEGRNRDEAEVLKCGSKKPMLSRNKTKSRLQDPPTPTHPAIDKTEMKSGRRSGIFKSGFLGKSPKAGTPGRNGFEEEEEEDPFLDEDLPEEFKRDKLSFWVFLEWISLVLIVTSLVCSLTIHNLQRKTWWKLDLWKWEVTVLVLICGRLVSSWIVRIIVFLVEKNFTWRKRVLYFVYGVRKSVQNCLWLGLVLLAWHFLFDKKVERETRSTALRYVTRVLVCLLVALIIWLVKTILVKVLASSFHMSTYFDRIQESLFTQYVIETLSGPPLMEIQRMEEEEQQVAEDVKSLEKLAGAKLPPALKATVKSFMKVGKSPGLNRIGSKRGEDGEGIRIDQLKRMNTKNVSAWNMKRLMNIILKGAISTLDQNMQDTTQEDEDATHIRSEYEAKCAARKIFHNVTEPGSRYIYLEDFLRFLCEEEAERAMALFEGASESDKISKSCLKNWVVKAFRERRALALTLNDTKTAVDRLHRIINVLLLVAFVFGNSCKTIFEAIIFLFVMHPFDVGDRCEIDGVQLVVEEMNILTTVFLRYDNQKIIYPNSVLGTKPIANYYRSPDMGDAVEFCVHIATPPEKITAIKQRILSYVDNKKDYWYPAPMIVFLSMDDLNSVKIAVWLTHRMNHQDMGERYIRRGLLLEEVGKTCRELDIEYRLYPLNINVRSLPPTANPTSSDRIPPSWMQQRGP

SEQ ID NO: 72326 - protein, 741 aa, Arabidopsis thaliana
  peptide (1)..(741): Ceres Seq. ID no. 4929545
MAELQSNTPPRPATASNTPRRGLTTISESSSPVKTKVKADAVRRRQNRTSLGGSSDEEGRNRDEAEVLKCGSKKPMLSRNKTKSRLQDPPTPTHPAIDKTEMKSGRRSGIFKSGFLGKSPKAGTPGRNGFEEEEEEDPFLDEDLPEEFKRDKLSFWVFLEWISLVLIVTSLVCSLTIHNLQRKTWWKLDLWKWEVTVLVLICGRLVSSWIVRIIVFLVEKNFTWRKRVLYFVYGVRKSVQNCLWLGLVLLAWHFLFDKKVERETRSTALRYVTRVLVCLLVALIIWLVKTILVKVLASSFHMSTYFDRIQESLFTQYVIETLSGPPLMEIQRMEEEEQQVAEDVKSLEKLAGAKLPPALKATVKSFMKVGKSPGLNRIGSKRGEDGEGIRIDQLKRMNTKNVSAWNMKRLMNIILKGAISTLDQNMQDTTQEDEDATHIRSEYEAKCAARKIFHNVTEPGSRYIYLEDFLRFLCEEEAERAMALFEGASESDKISKSCLKNWVVKAFRERRALALTLNDTKTAVDRLHRIINVLLLVAFVFGNSCKTIFEAIIFLFVMHPFDVGDRCEIDGVQLVVEEMNILTTVFLRYDNQKIIYPNSVLGTKPIANYYRSPDMGDAVEFCVHIATPPEKITAIKQRILSYVDNKKDYWYPAPMIVFLSMDDLNSVKIAVWLTHRMNHQDMGERYIRRGLLLEEVGKTCRELDIEYRLYPLNINVRSLPPTANPTSSDRIPPSWMQQRGP

SEQ ID NO: 72327 - protein, 666 aa, Arabidopsis thaliana
  peptide (1)..(666): Ceres Seq. ID no. 4929546
MLSRNKTKSRLQDPPTPTHPAIDKTEMKSGRRSGIFKSGFLGKSPKAGTPGRNGFEEEEEEDPFLDEDLPEEFKRDKLSFWVFLEWISLVLIVTSLVCSLTIHNLQRKTWWKLDLWKWEVTVLVLICGRLVSSWIVRIIVFLVEKNFTWRKRVLYFVYGVRKSVQNCLWLGLVLLAWHFLFDKKVERETRSTALRYVTRVLVCLLVALIIWLVKTILVKVLASSFHMSTYFDRIQESLFTQYVIETLSGPPLMEIQRMEEEEQQVAEDVKSLEKLAGAKLPPALKATVKSFMKVGKSPGLNRIGSKRGEDGEGIRIDQLKRMNTKNVSAWNMKRLMNIILKGAISTLDQNMQDTTQEDEDATHIRSEYEAKCAARKIFHNVTEPGSRYIYLEDFLRFLCEEEAERAMALFEGASESDKISKSCLKNWVVKAFRERRALALTLNDTKTAVDRLHRIINVLLLVAFVFGNSCKTIFEAIIFLFVMHPFDVGDRCEIDGVQLVVEEMNILTTVFLRYDNQKIIYPNSVLGTKPIANYYRSPDMGDAVEFCVHIATPPEKITAIKQRILSYVDNKKDYWYPAPMIVFLSMDDLNSVKIAVWLTHRMNHQDMGERYIRRGLLLEEVGKTCRELDIEYRLYPLNINVRSLPPTANPTSSDRIPPSWMQQRGP

SEQ ID NO: 72328 - DNA, 777 bp, Arabidopsis thaliana
  misc_feature (1)..(777): Ceres Seq. ID no. 4929798
  misc_feature (1)..(777): Ortholog of  Ceres SEQ ID NO 15225465 as cited in SEQ ID NO 53147
atggagaatttaaatcataagtgggatcgttgttcctcttctcatcaaactcctctttctttcaaaggcaatcagaagcagattggacaaggtcagagagaagtgttcacacattttgtgtcacttccattagccatataccctgacttgacgaaaaatatcgaggcttttcagaattctgtattgggaaacaatgataaggatccattgaagtttcagagtactttagctgaaatgggaatagaaaaatcgatctttgtaactcccaaaactttccatttgactgtggttatgttaaagttagagaacaatgaatctgtggttaaagctcagaatatccttcagcagagtattttttctaatgtgaggcaagctttgaaaaacagacctgtcttcataagactcagaggattggaatgtatgagtggatctttagacaaaactcgcgttctctatgctcctgttgaagaagttggtcgtgagggccgcctgctaaatgcttgtcatgttatcattgatgcatttgagaatgttggatttgctggtaaagatgcaaagtcacgcttgaagctacacgccacgttgatgaatgcaagctacagaaaagataaaagcaaaaagatggatacttttgatgctcgagagatacacaaagagtttgagaacaaggattggggaacatatctaatcagagaagctcacatctcacaacgttataagtatgaccccaatggctacttccattgctgcgcttcactaccttttccacataagtga

SEQ ID NO: 72329 - protein, 258 aa, Arabidopsis thaliana
  peptide (1)..(258): Ceres Seq. ID no. 4929799
MENLNHKWDRCSSSHQTPLSFKGNQKQIGQGQREVFTHFVSLPLAIYPDLTKNIEAFQNSVLGNNDKDPLKFQSTLAEMGIEKSIFVTPKTFHLTVVMLKLENNESVVKAQNILQQSIFSNVRQALKNRPVFIRLRGLECMSGSLDKTRVLYAPVEEVGREGRLLNACHVIIDAFENVGFAGKDAKSRLKLHATLMNASYRKDKSKKMDTFDAREIHKEFENKDWGTYLIREAHISQRYKYDPNGYFHCCASLPFPHK

SEQ ID NO: 72330 - protein, 180 aa, Arabidopsis thaliana
  peptide (1)..(180): Ceres Seq. ID no. 4929800
MGIEKSIFVTPKTFHLTVVMLKLENNESVVKAQNILQQSIFSNVRQALKNRPVFIRLRGLECMSGSLDKTRVLYAPVEEVGREGRLLNACHVIIDAFENVGFAGKDAKSRLKLHATLMNASYRKDKSKKMDTFDAREIHKEFENKDWGTYLIREAHISQRYKYDPNGYFHCCASLPFPHK

SEQ ID NO: 72331 - protein, 161 aa, Arabidopsis thaliana
  peptide (1)..(161): Ceres Seq. ID no. 4929801
MLKLENNESVVKAQNILQQSIFSNVRQALKNRPVFIRLRGLECMSGSLDKTRVLYAPVEEVGREGRLLNACHVIIDAFENVGFAGKDAKSRLKLHATLMNASYRKDKSKKMDTFDAREIHKEFENKDWGTYLIREAHISQRYKYDPNGYFHCCASLPFPHK

SEQ ID NO: 72332 - DNA, 549 bp, Arabidopsis thaliana
  misc_feature (1)..(549): Ceres Seq. ID no. 4929928
  misc_feature (1)..(549): Ortholog of  Ceres SEQ ID NO 12608620 as cited in SEQ ID NO 60192
atgagctcgtcgttatggacatattacggaatagtgacacctggtgaatacttggtttctactgtcaatggctttggtgctcttgctgaatccatctacgttctcattttcctcttctttgtccccaaatccagattcttgaaaacagttgttgtggttctagctttgaacgtgtgtttcccagttatcgcgattgcgggaacaagaactctgtttggagatgcaaactcgcgttctagttcaatgggtttcatatgtgctactctcaacattatcatgtatggttctcctctttcagctattaaaacggttgtgacgacgagaagtgtgcagtttatgccattttggttgtcatttttcctctttctgaacggcgcgatttggggtgtctacgctttactcctacacgatatgtttctactagtgccaaatggaatgggattctttcttgggataatgcaactcctaatttatgcctattacagaaatgccgaaccaattgtagaagatgaagaaggcctcataccaaatcaacctctcctcgcttaa

SEQ ID NO: 72333 - protein, 182 aa, Arabidopsis thaliana
  peptide (1)..(182): Ceres Seq. ID no. 4929929
MSSSLWTYYGIVTPGEYLVSTVNGFGALAESIYVLIFLFFVPKSRFLKTVVVVLALNVCFPVIAIAGTRTLFGDANSRSSSMGFICATLNIIMYGSPLSAIKTVVTTRSVQFMPFWLSFFLFLNGAIWGVYALLLHDMFLLVPNGMGFFLGIMQLLIYAYYRNAEPIVEDEEGLIPNQPLLA

SEQ ID NO: 72334 - protein, 101 aa, Arabidopsis thaliana
  peptide (1)..(101): Ceres Seq. ID no. 4929930
MGFICATLNIIMYGSPLSAIKTVVTTRSVQFMPFWLSFFLFLNGAIWGVYALLLHDMFLLVPNGMGFFLGIMQLLIYAYYRNAEPIVEDEEGLIPNQPLLA

SEQ ID NO: 72335 - DNA, 1039 bp, Arabidopsis thaliana
  misc_feature (1)..(1039): Ceres Seq. ID no. 4930032
  misc_feature (1)..(1039): Ortholog of  Ceres SEQ ID NO 12578688 as cited in SEQ ID NO 27
gttaaaataaaataaaataaaaataaaaggaagaagaagaagaagaaaggattcgtcttccttcttccacaccctttctgacacctcatctcccctcccaccttctccgtcccgttccgtttctccatcagatcctcgattccgatccaacagttcgaattcagtttccgattctgatctgatcgaaccaatactcactgagatttgatcggcgattatggagtctatatctccggtatcgaatcagcttcttcagccgacgacgacgagctctaattccgatcgctctcgtcgtaagcgtaagaagaaatcatcgccatcatcggttgagaaatctccatctccgtcaatatcgttggagaaatggagatcggagaagcagcaacagatctactcaacgaagctagttcatgctttaagagagctacgaatcagccaacaaccatcttcatcatcatcttcttcgattccacgtggaggtagagccgtacgtgaagtcgccgatagagctttagcagttgcggcgagaggtaaaacgttatggagtcgagcgatactttcaaaagctgtaaaactcaaattcaggaaacacaaacgccagagaatctctaatccgacgacgacgacgttaaccaccgggagtatcaggtcaaagaaacagagagcgacggttttgaggcttaaggctaaaggtttgccagctgtacagaggaaagtgaaagtactgagccggttagttcccggttgccgtaaacaatcattaccggtggttttagaagaaaccactgattatatagctgcgatggagatgcagattcgtactatgactgcgattctctccgccgttagttcttctcctccgccgccaacgccaggtcacgaagggggacaaacacacatgcttggttagttggccaaactgtccttttatttttttccaattttaaaaaccaaaaaaaaaactgtttttttttatcatattattattcttctcactgtattgtttgttgtttgaatattttactattcaactttattt

SEQ ID NO: 72336 - protein, 230 aa, Arabidopsis thaliana; identical to SEQ ID NO: 39916
  peptide (1)..(230): Ceres Seq. ID no. 4930033

SEQ ID NO: 72337 - DNA, 1665 bp, Arabidopsis thaliana
  misc_feature (1)..(1665): Ceres Seq. ID no. 4930507
  misc_feature (1)..(1665): Ortholog of  Ceres SEQ ID NO 13654605 as cited in SEQ ID NO 68732
atgttggccgcgacgcctgctcatggactcaggtacgtggtggtgcccacacgctcatggcttcataggtttcgatgctgctcgtcttctctcgctcctctctccccttctgaattctcgggcggtaataaagcccagaagaagctcaacgacgagaacaacaccaacgtaagcaatgagaaaacggcgccgtattatccgaaacgaggagaaacagtggagcttgtgtgcgagagtttaggattcaaaggcaaaggaatctgtaaagttgatggaactggctacgtcgttatgtgtgaccgagctcttcccggcgaacgttttcttggccgtgtcactcgccgcaaaggcagctatgctgaagtgacaaaaatgaagacaatatctccacataaggacttagtagaagctccatgtgagtatgcatcttactgtggtggttgcaaaactcagaatctctcttatgaagctcagcttagagctaaagaagagcaagttcatgagcttatcagacatgttggaaggttttctgataacaatcctggccttgagattgtcttgaagcctattgttgcttgcgatattcaattccattatcggaataagatggagttttcatttggtccacaaagatggcttccgattgaaatgttaaacgagagacaagatggtcctaagaactttgcattggggctccatgcacctggattttttgataaggttttaaatgttgataagtgcttattacagagcgagccaggaaacttggttcttgctgctgtccaagattgctggagagatcctgaattaagtctttcaccatatgattgtcgttcacatgttgggtttcttaaacatttgatgctgagaactggaaggaatgtggagactggttcactagaacttatggtcaattttgtgacatcgtcttataagccagagctgttgaaacccctggttgataggatttcatcaattcctcaagtggtaagcattatgaataatgtaaattcttcggtaggaaacacatccgttggcgaaaaggaatatactctttatgggaaggatacaatcacagaggtcttaagagggcttacatttcaaatttcagccaactctttctttcagactaacactcatcaggctgaagttttatataagcttattgaggaatctgctggacttaaaggagatggctcagaagtcgtgctcgatcttttctgtggaactggtaccataggccttacacttgccagaagggcgaaacacgtgtatggttatgaagtagtaccacaagcaataacagatgcacacaagaatgcccaaataaacggcatagagaatgcaacattcatccaaggggatctaaacaaaataggagaagattttgggaacaatttccctaagcctgatatcgttatttctgatcccaatcgacctggtatgcacatgaagttgatcaagtttctgctaaagcttaaatctccacggatcatttatgtttcctgtaatcctgcaacctgcgccagggatctcgattacctctgtcacggcgtggaggagaagaatctaaaaggttgctacaaactgatgagtgttcagccagtggatatgttccctcacactcctcacatcgaatgtgtctgcttgttagagcttgcttga

SEQ ID NO: 72338 - protein, 554 aa, Arabidopsis thaliana
  peptide (1)..(554): Ceres Seq. ID no. 4930508
MLAATPAHGLRYVVVPTRSWLHRFRCCSSSLAPLSPSEFSGGNKAQKKLNDENNTNVSNEKTAPYYPKRGETVELVCESLGFKGKGICKVDGTGYVVMCDRALPGERFLGRVTRRKGSYAEVTKMKTISPHKDLVEAPCEYASYCGGCKTQNLSYEAQLRAKEEQVHELIRHVGRFSDNNPGLEIVLKPIVACDIQFHYRNKMEFSFGPQRWLPIEMLNERQDGPKNFALGLHAPGFFDKVLNVDKCLLQSEPGNLVLAAVQDCWRDPELSLSPYDCRSHVGFLKHLMLRTGRNVETGSLELMVNFVTSSYKPELLKPLVDRISSIPQVVSIMNNVNSSVGNTSVGEKEYTLYGKDTITEVLRGLTFQISANSFFQTNTHQAEVLYKLIEESAGLKGDGSEVVLDLFCGTGTIGLTLARRAKHVYGYEVVPQAITDAHKNAQINGIENATFIQGDLNKIGEDFGNNFPKPDIVISDPNRPGMHMKLIKFLLKLKSPRIIYVSCNPATCARDLDYLCHGVEEKNLKGCYKLMSVQPVDMFPHTPHIECVCLLELA

SEQ ID NO: 72339 - protein, 457 aa, Arabidopsis thaliana
  peptide (1)..(457): Ceres Seq. ID no. 4930509
MCDRALPGERFLGRVTRRKGSYAEVTKMKTISPHKDLVEAPCEYASYCGGCKTQNLSYEAQLRAKEEQVHELIRHVGRFSDNNPGLEIVLKPIVACDIQFHYRNKMEFSFGPQRWLPIEMLNERQDGPKNFALGLHAPGFFDKVLNVDKCLLQSEPGNLVLAAVQDCWRDPELSLSPYDCRSHVGFLKHLMLRTGRNVETGSLELMVNFVTSSYKPELLKPLVDRISSIPQVVSIMNNVNSSVGNTSVGEKEYTLYGKDTITEVLRGLTFQISANSFFQTNTHQAEVLYKLIEESAGLKGDGSEVVLDLFCGTGTIGLTLARRAKHVYGYEVVPQAITDAHKNAQINGIENATFIQGDLNKIGEDFGNNFPKPDIVISDPNRPGMHMKLIKFLLKLKSPRIIYVSCNPATCARDLDYLCHGVEEKNLKGCYKLMSVQPVDMFPHTPHIECVCLLELA

SEQ ID NO: 72340 - protein, 430 aa, Arabidopsis thaliana
  peptide (1)..(430): Ceres Seq. ID no. 4930510
MKTISPHKDLVEAPCEYASYCGGCKTQNLSYEAQLRAKEEQVHELIRHVGRFSDNNPGLEIVLKPIVACDIQFHYRNKMEFSFGPQRWLPIEMLNERQDGPKNFALGLHAPGFFDKVLNVDKCLLQSEPGNLVLAAVQDCWRDPELSLSPYDCRSHVGFLKHLMLRTGRNVETGSLELMVNFVTSSYKPELLKPLVDRISSIPQVVSIMNNVNSSVGNTSVGEKEYTLYGKDTITEVLRGLTFQISANSFFQTNTHQAEVLYKLIEESAGLKGDGSEVVLDLFCGTGTIGLTLARRAKHVYGYEVVPQAITDAHKNAQINGIENATFIQGDLNKIGEDFGNNFPKPDIVISDPNRPGMHMKLIKFLLKLKSPRIIYVSCNPATCARDLDYLCHGVEEKNLKGCYKLMSVQPVDMFPHTPHIECVCLLELA

SEQ ID NO: 72341 - DNA, 1584 bp, Arabidopsis thaliana
  misc_feature (1)..(1584): Ceres Seq. ID no. 4930547
  misc_feature (1)..(1584): Ortholog of  Ceres SEQ ID NO 13596244 as cited in SEQ ID NO 69307
accaaaatcagattagagtttcagagacatctctcgaatacgatcatcagacaagacttaacctccatttgcacgtcttcctgctcacgacagacaaatcatgaacgaatccgacagctgaacgaattgcgtgtctgagaagatccaaatcctaattttctaccttttttttttgggaactaaggttagaatttggagcttctcgtacgtttttgcttgcctacgtttccggacaaaaccctatttgcatataaacagaacaggttctgttcatcaagacactgaagcctgatggggatggaggaagggattaaagataatgctgcatcagctcccaattcaagacctacaaaccaacttaaagctcttttaccgatgcgggtgcttcaagttttcttgttgttctttgttttggttcttggaatctcagtcattagtatgcacatgatcaagtacttaaagattcaaactttagctccatcgacattgatctctacttatgatgagagaattacgttagagagccttatcaagcctccattgaatggttggcattccatgaatgacagtgagcttctttggcgtgcttcgatggagcctcggatacttgactatccatttaaaagagttcctaaaatggcattcatgtttctcaccaaaggacctttgccatttgctccactttgggaaaggtttttcaaagggcatgagggcttttactcaatctatgttcatactttgccaaattatagatcagatttcccaagctcatctgtgttttacagaagacagatcccaagtcagcatgtagcttggggagagatgagtatgtgtgatgctgaaaggaggcttttggctaacgcgttgctcgatatctctaacgaatggtttgttttactatctgaagcgtgtattcctcttcgcggtttcaactttgtctaccgttatgtctctagatcaagatatagtttcatgggttctgttgacgaggacgggccttacgggagaggcagatatagctatgcaatgggaccagaagtaagtctaaacgagtggagaaaagggtctcagtggtttgaaataaacagagcacttgctgttgatattgttgaagacatggtttactataacaaattcaaagagttttgtagacctccttgttatgtagatgaacattacttcccaacaatgctctctattggatatccggattttctcgctaatcggacattgacttggacagattggtcaaggggtggtgctcatccagctacttttggcaaggctgatataacagagaagttcatcaagaagctgtcaagaggtaaagcttgcttctacaatgatcagccatctcaagtttgttatctttttgcaagaaagtttgctccaagcgcattgaagcctttacttaaacttgcaccaaaggttcttgggttctaattaatggatctcttgtcttctttttgttcttggtttttgttctgaaatgttcttgaacttgagtgtagcttcgtatagcatggacacaactctgatccttattgtctccttccacattgataatatagatacttcaatggc

SEQ ID NO: 72342 - protein, 383 aa, Arabidopsis thaliana; identical to SEQ ID NO: 35988
  peptide (1)..(383): Ceres Seq. ID no. 4930548

SEQ ID NO: 72343 - protein, 381 aa, Arabidopsis thaliana; identical to SEQ ID NO: 35989
  peptide (1)..(381): Ceres Seq. ID no. 4930549

SEQ ID NO: 72344 - protein, 355 aa, Arabidopsis thaliana; identical to SEQ ID NO: 35990
  peptide (1)..(355): Ceres Seq. ID no. 4930550

SEQ ID NO: 72345 - DNA, 2886 bp, Arabidopsis thaliana
  misc_feature (1)..(2886): Ceres Seq. ID no. 4930559
  misc_feature (1)..(2886): Ortholog of  Ceres SEQ ID NO 14307510 as cited in SEQ ID NO 54687
atgcctcgtgctgttggaaaaaggactcctagaattcctatctcatacacccttgagaaggatactagggaaagatatttatcacctgttaagagaggtttaaatcagaagggggatgatactgatgatgatatggaacatgagatagcattagcattggctgaggcttcacaacgaggtggctctacaaagaactcccacacaccaaatagaaaagcaaagatgtacccccctgataaaaagggtgaaagaatgcgtgccgatattgacttggcgattgccaagcttcatgccactgatatggaagatgtccgctgtgaaccaagcttaggaagcactgaagctgataatgcggattattctggaggtagaaatgacttgacacatggagaaggttctagtgccgtggaaaagcagcaaaaaggaagaacatactataggaggagagtaggcattaaagaagaagatgcaaaagaagcctgcagtggtacagatgaagcaccaagcttaggcgctcccgatgagaaatttgaacaagaaagggaagggaaggctttgaaattcacatataaagtttcaaggagaaaaaatgaagacacagcatgtgatgctctccatacgctggcagatctatcgctgatgatgcctgaaactgccactgatactgagtcatcagttcaagctgaggaaaagaaagctggagaagcttatgtttcagattttaaagggactgatccggcatccatgtctaaaagtagttctcttagaaactccaaacagagaagatacggcagcaatgacctttgtaaccctgaactcgagagaaaaagtccaagtagttctttaatccaaaagagacggcagaaagcattaccagctaaagttcttaaagatgagcttgctgcaagctcacaagtcatagagccttgtaatagcaagggaataggtgaggaatataagcctgttgggagaggtaaacggtccgcaagtattcgaaactcacatgaaaagaaatctgccaaatctcatgatcatacttcgtcaagtaacaacatagtagaagaagatgagtcagctccatcaaatgcagtcattaaaaaacaagttaacttgccaactaaagttaggagcagaagaaagatagtaactgagaaacctctaactattgatgacgggaaaatttctgagactatagtgagtgaactttctgatactcagactttattcccaaatgataaagaaaccgcagagaagttttcgcattgcatttctagtttccgagcacggagatggtgtatttttgagtggttctacagtgcaattgactatccatggtttgccagacaagagtttgttgagtatttggatcatgtagggttgggtcatgttcctagattaactcgcgttgaatggggtgtcataaggagttctcttgggaaaccaaggcgattttctgaacagtttttgaaggaggaaaaagaaaagctatacctatacagggactctgtaagaaaacattatgatgaactaaacacgggcatgagggaaggacttccaatggatttggcccggcctctaaatgtttcacagagagtcatttgcctgcatccaaagtcaagagagattcatgacggcaatgtcctaactgttgatcactgtaggtaccggattcagtttgacaaccctgaattaggggtagaatttgttaaggatactgaatgcatgccactgaatcctctagaaaacatgccagcatcgctggcaaggcactatgctttctcaaattatcacattcagaatcccattgaggagaaaatgcatgaacgggcaaaggaaagcatgctggaaggatatcccaaactttcgtgtgagacaggccatctcttgtcctctccaaattataacattagcaattcactaaagcaggaaaaggtagatatctcaagttcaaatccacaagctcaagacggagttgatgaggctcttgctttacaattgtttaattctcagccctcaagtattggacaaatccaggcaagagaagctgatgtccaagctctttctgaactaacgcgtgcgcttgacaagaaggagctagttttgagggagctaaaatgcatgaacgacgaggttgtggaaagtcagaaagatggacataataatgccctaaaggattctgaatcttttaagaaacaatatgcagcagttctctttcagctaagcgaaatcaatgagcaggtttcattggcacttcttggcttgaggcaacgaaatacttaccaggagaatgtaccatattcatcaataagacgcatgagtaaatcaggggaacctgatggtcagttgacatacgaagacaataatgcatcagacactaatggattccatgtgtctgagatcgtcgaaagttctagaataaaagcacggaaaatggtatacagagctgtacaggcattggagttactgagaaaagacgaaaataataatgtaaatatggaagaagccattgattttgtaaataatcagctctcaatagatcaaacagaaggatcatcagtccagcaaacacaaggtggccaggatcagcgtcttccctctacaccaaatccacctagctcaactcctgccaatgattcccacctaaaccaacccgatcaaaatgacctgcaagtcccgtccgatcttgtgtcccgatgtatcgctacattgcttatgattcagaaatgtacagagaggcaattcccaccaagtgaagtagcccaggttctagactcggcagtggcgagtttacagccttgctgctcgcagaaccttccgatctatacagagattcagaagtgcatgggaatcataagaaaccagattctagccctcgtaccctcctaa

SEQ ID NO: 72346 - protein, 961 aa, Arabidopsis thaliana
  peptide (1)..(961): Ceres Seq. ID no. 4930560
MPRAVGKRTPRIPISYTLEKDTRERYLSPVKRGLNQKGDDTDDDMEHEIALALAEASQRGGSTKNSHTPNRKAKMYPPDKKGERMRADIDLAIAKLHATDMEDVRCEPSLGSTEADNADYSGGRNDLTHGEGSSAVEKQQKGRTYYRRRVGIKEEDAKEACSGTDEAPSLGAPDEKFEQEREGKALKFTYKVSRRKNEDTACDALHTLADLSLMMPETATDTESSVQAEEKKAGEAYVSDFKGTDPASMSKSSSLRNSKQRRYGSNDLCNPELERKSPSSSLIQKRRQKALPAKVLKDELAASSQVIEPCNSKGIGEEYKPVGRGKRSASIRNSHEKKSAKSHDHTSSSNNIVEEDESAPSNAVIKKQVNLPTKVRSRRKIVTEKPLTIDDGKISETIVSELSDTQTLFPNDKETAEKFSHCISSFRARRWCIFEWFYSAIDYPWFARQEFVEYLDHVGLGHVPRLTRVEWGVIRSSLGKPRRFSEQFLKEEKEKLYLYRDSVRKHYDELNTGMREGLPMDLARPLNVSQRVICLHPKSREIHDGNVLTVDHCRYRIQFDNPELGVEFVKDTECMPLNPLENMPASLARHYAFSNYHIQNPIEEKMHERAKESMLEGYPKLSCETGHLLSSPNYNISNSLKQEKVDISSSNPQAQDGVDEALALQLFNSQPSSIGQIQAREADVQALSELTRALDKKELVLRELKCMNDEVVESQKDGHNNALKDSESFKKQYAAVLFQLSEINEQVSLALLGLRQRNTYQENVPYSSIRRMSKSGEPDGQLTYEDNNASDTNGFHVSEIVESSRIKARKMVYRAVQALELLRKDENNNVNMEEAIDFVNNQLSIDQTEGSSVQQTQGGQDQRLPSTPNPPSSTPANDSHLNQPDQNDLQVPSDLVSRCIATLLMIQKCTERQFPPSEVAQVLDSAVASLQPCCSQNLPIYTEIQKCMGIIRNQILALVPS

SEQ ID NO: 72347 - protein, 917 aa, Arabidopsis thaliana
  peptide (1)..(917): Ceres Seq. ID no. 4930561
MEHEIALALAEASQRGGSTKNSHTPNRKAKMYPPDKKGERMRADIDLAIAKLHATDMEDVRCEPSLGSTEADNADYSGGRNDLTHGEGSSAVEKQQKGRTYYRRRVGIKEEDAKEACSGTDEAPSLGAPDEKFEQEREGKALKFTYKVSRRKNEDTACDALHTLADLSLMMPETATDTESSVQAEEKKAGEAYVSDFKGTDPASMSKSSSLRNSKQRRYGSNDLCNPELERKSPSSSLIQKRRQKALPAKVLKDELAASSQVIEPCNSKGIGEEYKPVGRGKRSASIRNSHEKKSAKSHDHTSSSNNIVEEDESAPSNAVIKKQVNLPTKVRSRRKIVTEKPLTIDDGKISETIVSELSDTQTLFPNDKETAEKFSHCISSFRARRWCIFEWFYSAIDYPWFARQEFVEYLDHVGLGHVPRLTRVEWGVIRSSLGKPRRFSEQFLKEEKEKLYLYRDSVRKHYDELNTGMREGLPMDLARPLNVSQRVICLHPKSREIHDGNVLTVDHCRYRIQFDNPELGVEFVKDTECMPLNPLENMPASLARHYAFSNYHIQNPIEEKMHERAKESMLEGYPKLSCETGHLLSSPNYNISNSLKQEKVDISSSNPQAQDGVDEALALQLFNSQPSSIGQIQAREADVQALSELTRALDKKELVLRELKCMNDEVVESQKDGHNNALKDSESFKKQYAAVLFQLSEINEQVSLALLGLRQRNTYQENVPYSSIRRMSKSGEPDGQLTYEDNNASDTNGFHVSEIVESSRIKARKMVYRAVQALELLRKDENNNVNMEEAIDFVNNQLSIDQTEGSSVQQTQGGQDQRLPSTPNPPSSTPANDSHLNQPDQNDLQVPSDLVSRCIATLLMIQKCTERQFPPSEVAQVLDSAVASLQPCCSQNLPIYTEIQKCMGIIRNQILALVPS

SEQ ID NO: 72348 - protein, 887 aa, Arabidopsis thaliana
  peptide (1)..(887): Ceres Seq. ID no. 4930562
MYPPDKKGERMRADIDLAIAKLHATDMEDVRCEPSLGSTEADNADYSGGRNDLTHGEGSSAVEKQQKGRTYYRRRVGIKEEDAKEACSGTDEAPSLGAPDEKFEQEREGKALKFTYKVSRRKNEDTACDALHTLADLSLMMPETATDTESSVQAEEKKAGEAYVSDFKGTDPASMSKSSSLRNSKQRRYGSNDLCNPELERKSPSSSLIQKRRQKALPAKVLKDELAASSQVIEPCNSKGIGEEYKPVGRGKRSASIRNSHEKKSAKSHDHTSSSNNIVEEDESAPSNAVIKKQVNLPTKVRSRRKIVTEKPLTIDDGKISETIVSELSDTQTLFPNDKETAEKFSHCISSFRARRWCIFEWFYSAIDYPWFARQEFVEYLDHVGLGHVPRLTRVEWGVIRSSLGKPRRFSEQFLKEEKEKLYLYRDSVRKHYDELNTGMREGLPMDLARPLNVSQRVICLHPKSREIHDGNVLTVDHCRYRIQFDNPELGVEFVKDTECMPLNPLENMPASLARHYAFSNYHIQNPIEEKMHERAKESMLEGYPKLSCETGHLLSSPNYNISNSLKQEKVDISSSNPQAQDGVDEALALQLFNSQPSSIGQIQAREADVQALSELTRALDKKELVLRELKCMNDEVVESQKDGHNNALKDSESFKKQYAAVLFQLSEINEQVSLALLGLRQRNTYQENVPYSSIRRMSKSGEPDGQLTYEDNNASDTNGFHVSEIVESSRIKARKMVYRAVQALELLRKDENNNVNMEEAIDFVNNQLSIDQTEGSSVQQTQGGQDQRLPSTPNPPSSTPANDSHLNQPDQNDLQVPSDLVSRCIATLLMIQKCTERQFPPSEVAQVLDSAVASLQPCCSQNLPIYTEIQKCMGIIRNQILALVPS

SEQ ID NO: 72349 - DNA, 2643 bp, Arabidopsis thaliana
  misc_feature (1)..(2643): Ceres Seq. ID no. 4930583
  misc_feature (1)..(2643): Ortholog of  Ceres SEQ ID NO 15226720 as cited in SEQ ID NO 58707
  misc_feature (1)..(2643): Ortholog of  Ceres SEQ ID NO 13654989 as cited in SEQ ID NO 63117
  misc_feature (1)..(2643): Ortholog of  Ceres SEQ ID NO 13584744 as cited in SEQ ID NO 69137
atggagtaccatcctcaagcaattaggttatgtgcgttgatcttcatctctttctatgctcttttacacctcgttgaagcacaagaccaaaaaggattcattagtttggattgcgggtcattgccaaatgagcctccttacaacgatccttcaaccggattaacatactcgacggacgatggtttcgtgcagagtggcaaaactggaagaatccagaaagcgttcgagtcgatcttcagtaaaccgtctttgaagcttagatacttcccggacggattccgaaactgctataccttgaatgtcacgcaagacacaaactatctgatcaaagctgtatttgtgtatggtaactacgatggtcttaacaatcccccgagtttcgatctttaccttggtccgaatctatgggtaacggttgatatgaatggacggaccaatggtactatccaggagattatccacaagaccatatctaagtctctccaggtctgtcttgttaagacaggaacaagctcacctatgattaatacgttagagctacgaccacttaaaaacaatacttacaatactcagagtggctctctgaagtatttcttccgatattatttcagcggttcaggccaaaacatacggtaccctgatgatgtcaatgatcgtaaatggtatccattctttgatgcaaaagagtggacagagttaacaaccaatctgaatataaacagttctaatggttatgcaccaccagaagttgtgatggcgtcagcctcaacgcctataagtacttttggaacatggaacttctcatggttattgccatcttccacaacccaattttatgtgtacatgcattttgccgagattcaaactctacggtccctcgatacccgagaattcaaagtgacgttgaatggaaaacttgcttatgaacgctacagccctaaaacgttagccaccgaaaccattttctattcgacaccacaacaatgtgaagatgggacatgcctcttggagttgacgaaaacacctaagtctactcttcctcctctcatgaacgctcttgaggttttcaccgtgatcgattttccacagatggaaacaaatccagatgatgttgctgctatcaagagtatccaaagcacttatggattaagtaaaatcagctggcaaggagatccatgcgttcctaaacagtttttgtgggagggtttaaactgcaataatctagataactccacgccgcctattgtcacttccttaaacttatcgtcaagtcatttaacggggatcatcgcgcaaggcattcagaatctgacacacctacaagaactagacttgtcaaataacaatttgacgggaggaatacccgaatttcttgctgacataaaatcactcttagtaataaatttaagtgggaacaattttaatggctctattcctcaaatccttttacagaagaaaggactaaagctaattcttgaaggaaacgccaatctgatttgtccggatggattatgtgtaaacaaagctggcaatggtggtgccaagaaaatgaatgttgtaataccgattgttgcatcagttgcgtttgtggttgttcttggatctgcattggcgttcttttttattttcaaaaagaaaaagacatcaaacagtcaagagtcggcaataatgactaagaacagaagatttacatattcggaggttgtaacaatgacaaataactttgaaagagttcttggtaaaggaggatttggaatggtttatcatggaactgtaaataatactgaacaagtagccgttaaaatgctttcacactcatcttctcaaggatataaagaattcaaagcagaggtggaacttcttctcagagttcaccacaaaaatttggttggcctcgttggatattgtgatgaaggagaaaacttggctcttatctacgagtacatggctaacggagacttgagagaacatatgtcaggaaagcgaggtggatctattctaaattgggaaactagactaaaaatagttgtcgagtctgcccaaggtttggaatacttgcataatggatgcaaaccaccaatggttcatagggatgttaaaaccacaaatatattgttgaatgaacacctccatgctaagctagctgattttgggctttcgagatcttttccaattgaaggagaaactcatgtgtcaacagttgttgctggaactcctggataccttgatccagaatattaccgaacaaattggttgaacgagaaaagtgatgtttatagctttggaattgtactattagagatcatcacaaaccaacttgtgatcaatcaaagtcgtgaaaaaccacatatagcagaatgggtggggttaatgcttacaaaaggagacattcaaaacattatggatccaaaactttatggtgattatgactctggttctgtctggagagcagttgaactagcaatgtcatgtctaaatccttcttcagctagaagaccaacaatgtctcaagttgttatcgaattaaacgaatgtttgtcatatgaaaacgcaagaggaggaacgagtcaaaacatgaactcagagagttcaatagaagtcagcatgaactttgatattggagctacccctgatgctcgttag

SEQ ID NO: 72350 - protein, 880 aa, Arabidopsis thaliana
  peptide (1)..(880): Ceres Seq. ID no. 4930584
MEYHPQAIRLCALIFISFYALLHLVEAQDQKGFISLDCGSLPNEPPYNDPSTGLTYSTDDGFVQSGKTGRIQKAFESIFSKPSLKLRYFPDGFRNCYTLNVTQDTNYLIKAVFVYGNYDGLNNPPSFDLYLGPNLWVTVDMNGRTNGTIQEIIHKTISKSLQVCLVKTGTSSPMINTLELRPLKNNTYNTQSGSLKYFFRYYFSGSGQNIRYPDDVNDRKWYPFFDAKEWTELTTNLNINSSNGYAPPEVVMASASTPISTFGTWNFSWLLPSSTTQFYVYMHFAEIQTLRSLDTREFKVTLNGKLAYERYSPKTLATETIFYSTPQQCEDGTCLLELTKTPKSTLPPLMNALEVFTVIDFPQMETNPDDVAAIKSIQSTYGLSKISWQGDPCVPKQFLWEGLNCNNLDNSTPPIVTSLNLSSSHLTGIIAQGIQNLTHLQELDLSNNNLTGGIPEFLADIKSLLVINLSGNNFNGSIPQILLQKKGLKLILEGNANLICPDGLCVNKAGNGGAKKMNVVIPIVASVAFVVVLGSALAFFFIFKKKKTSNSQESAIMTKNRRFTYSEVVTMTNNFERVLGKGGFGMVYHGTVNNTEQVAVKMLSHSSSQGYKEFKAEVELLLRVHHKNLVGLVGYCDEGENLALIYEYMANGDLREHMSGKRGGSILNWETRLKIVVESAQGLEYLHNGCKPPMVHRDVKTTNILLNEHLHAKLADFGLSRSFPIEGETHVSTVVAGTPGYLDPEYYRTNWLNEKSDVYSFGIVLLEIITNQLVINQSREKPHIAEWVGLMLTKGDIQNIMDPKLYGDYDSGSVWRAVELAMSCLNPSSARRPTMSQVVIELNECLSYENARGGTSQNMNSESSIEVSMNFDIGATPDAR

SEQ ID NO: 72351 - protein, 740 aa, Arabidopsis thaliana
  peptide (1)..(740): Ceres Seq. ID no. 4930585
MNGRTNGTIQEIIHKTISKSLQVCLVKTGTSSPMINTLELRPLKNNTYNTQSGSLKYFFRYYFSGSGQNIRYPDDVNDRKWYPFFDAKEWTELTTNLNINSSNGYAPPEVVMASASTPISTFGTWNFSWLLPSSTTQFYVYMHFAEIQTLRSLDTREFKVTLNGKLAYERYSPKTLATETIFYSTPQQCEDGTCLLELTKTPKSTLPPLMNALEVFTVIDFPQMETNPDDVAAIKSIQSTYGLSKISWQGDPCVPKQFLWEGLNCNNLDNSTPPIVTSLNLSSSHLTGIIAQGIQNLTHLQELDLSNNNLTGGIPEFLADIKSLLVINLSGNNFNGSIPQILLQKKGLKLILEGNANLICPDGLCVNKAGNGGAKKMNVVIPIVASVAFVVVLGSALAFFFIFKKKKTSNSQESAIMTKNRRFTYSEVVTMTNNFERVLGKGGFGMVYHGTVNNTEQVAVKMLSHSSSQGYKEFKAEVELLLRVHHKNLVGLVGYCDEGENLALIYEYMANGDLREHMSGKRGGSILNWETRLKIVVESAQGLEYLHNGCKPPMVHRDVKTTNILLNEHLHAKLADFGLSRSFPIEGETHVSTVVAGTPGYLDPEYYRTNWLNEKSDVYSFGIVLLEIITNQLVINQSREKPHIAEWVGLMLTKGDIQNIMDPKLYGDYDSGSVWRAVELAMSCLNPSSARRPTMSQVVIELNECLSYENARGGTSQNMNSESSIEVSMNFDIGATPDAR

SEQ ID NO: 72352 - protein, 707 aa, Arabidopsis thaliana
  peptide (1)..(707): Ceres Seq. ID no. 4930586
MINTLELRPLKNNTYNTQSGSLKYFFRYYFSGSGQNIRYPDDVNDRKWYPFFDAKEWTELTTNLNINSSNGYAPPEVVMASASTPISTFGTWNFSWLLPSSTTQFYVYMHFAEIQTLRSLDTREFKVTLNGKLAYERYSPKTLATETIFYSTPQQCEDGTCLLELTKTPKSTLPPLMNALEVFTVIDFPQMETNPDDVAAIKSIQSTYGLSKISWQGDPCVPKQFLWEGLNCNNLDNSTPPIVTSLNLSSSHLTGIIAQGIQNLTHLQELDLSNNNLTGGIPEFLADIKSLLVINLSGNNFNGSIPQILLQKKGLKLILEGNANLICPDGLCVNKAGNGGAKKMNVVIPIVASVAFVVVLGSALAFFFIFKKKKTSNSQESAIMTKNRRFTYSEVVTMTNNFERVLGKGGFGMVYHGTVNNTEQVAVKMLSHSSSQGYKEFKAEVELLLRVHHKNLVGLVGYCDEGENLALIYEYMANGDLREHMSGKRGGSILNWETRLKIVVESAQGLEYLHNGCKPPMVHRDVKTTNILLNEHLHAKLADFGLSRSFPIEGETHVSTVVAGTPGYLDPEYYRTNWLNEKSDVYSFGIVLLEIITNQLVINQSREKPHIAEWVGLMLTKGDIQNIMDPKLYGDYDSGSVWRAVELAMSCLNPSSARRPTMSQVVIELNECLSYENARGGTSQNMNSESSIEVSMNFDIGATPDAR

SEQ ID NO: 72353 - DNA, 1132 bp, Arabidopsis thaliana
  misc_feature (1)..(1132): Ceres Seq. ID no. 4930668
  misc_feature (1)..(1132): Ortholog of  Ceres SEQ ID NO 15178924 as cited in SEQ ID NO 1050
  misc_feature (1)..(1132): Ortholog of  Ceres SEQ ID NO 13661768 as cited in SEQ ID NO 61427
  misc_feature (1)..(1132): Ortholog of  Ceres SEQ ID NO 15179176 as cited in SEQ ID NO 0
aatcgaattttattgtgtggccagaaactgacaacttccagcattgtactattaccattttttttatagaaaaagatgaacttcactttagagcaataacaatccctcgagtctcccctatataaagattccaactctttaacgattcatctattgaaaaaacacacacaccaaaaatatcagatatctcaaacaatgtcttcagtttttggatctgtccatatcttggccatgatagccatacaactcctccttatacacagtgtttcgtctctgaaccttacaaatgcgtatctgcaccacaaatgcagcaacactcaaggaaaatataagcaggggagtgcgttcgagaaaaatctcaacttagtcctcagtaccatcacctcgattggaaattttcgtgacggtttccgctacaccgaagaaggtgaggatcccaataacgtctttgtcatgttccagtgtcgcggcgactcctactggtccaagtgccccccttgcattagcaccgctgtctctgggcttcgtaggagatgtccaagaaataagggagcaataatatggtatgaccaatgtcttttaaagatatcttcagtcgcctccttcaataagatagattatgagaacgatttctatttgtccaacccaaaaaacatgagtgatcgggagttgttcaacaaggagacgtcggctctcctggagaagctggcaaataaagcctccgatagaaacaacttggatggtaaacaattggtgttgtacgcagcaggggagaagagaattgggacaaagaaggtgtctgcaatggtgcagtgtacgaaagacttaatatttacaaagtgctttgagtgtttggaagggattttgaggaagtttccagagtgttgtgacggtaaacaaggagggagagttttgggtacgagctgtaactttaggtatgagttatatccttttcttagaaactaacaacaacagtacaatgagagctccatattaaatgaaagggttctagagataaacagtcttataatatacactgtgttgcattttagtacgtgaacttaattgagcgaataaatgtactttcctctttgggatttttgtttttttttgtgaacttgagttattgaga

SEQ ID NO: 72354 - protein, 256 aa, Arabidopsis thaliana
  peptide (1)..(256): Ceres Seq. ID no. 4930669
MSSVFGSVHILAMIAIQLLLIHSVSSLNLTNAYLHHKCSNTQGKYKQGSAFEKNLNLVLSTITSIGNFRDGFRYTEEGEDPNNVFVMFQCRGDSYWSKCPPCISTAVSGLRRRCPRNKGAIIWYDQCLLKISSVASFNKIDYENDFYLSNPKNMSDRELFNKETSALLEKLANKASDRNNLDGKQLVLYAAGEKRIGTKKVSAMVQCTKDLIFTKCFECLEGILRKFPECCDGKQGGRVLGTSCNFRYELYPFLRN

SEQ ID NO: 72355 - protein, 244 aa, Arabidopsis thaliana
  peptide (1)..(244): Ceres Seq. ID no. 4930670
MIAIQLLLIHSVSSLNLTNAYLHHKCSNTQGKYKQGSAFEKNLNLVLSTITSIGNFRDGFRYTEEGEDPNNVFVMFQCRGDSYWSKCPPCISTAVSGLRRRCPRNKGAIIWYDQCLLKISSVASFNKIDYENDFYLSNPKNMSDRELFNKETSALLEKLANKASDRNNLDGKQLVLYAAGEKRIGTKKVSAMVQCTKDLIFTKCFECLEGILRKFPECCDGKQGGRVLGTSCNFRYELYPFLRN

SEQ ID NO: 72356 - protein, 170 aa, Arabidopsis thaliana
  peptide (1)..(170): Ceres Seq. ID no. 4930671
MFQCRGDSYWSKCPPCISTAVSGLRRRCPRNKGAIIWYDQCLLKISSVASFNKIDYENDFYLSNPKNMSDRELFNKETSALLEKLANKASDRNNLDGKQLVLYAAGEKRIGTKKVSAMVQCTKDLIFTKCFECLEGILRKFPECCDGKQGGRVLGTSCNFRYELYPFLRN

SEQ ID NO: 72357 - DNA, 585 bp, Arabidopsis thaliana
  misc_feature (1)..(585): Ceres Seq. ID no. 4930731
  misc_feature (1)..(585): Ortholog of  Ceres SEQ ID NO 13661768 as cited in SEQ ID NO 61427
atgagtatcttaaccacaaatgcttcgtcagtgaagggaaatataagcatggtgataagtacgagaataacctcaacgttctcaacaagaatgtcctttcttatgatcttactagcggttttctacacgtttctcatggcgagggtcctgattccgtcaccatcatattacaatgtcgtggcgactccttcgggtcgaattgccgctcttgctataccaccgccatcgacggggaagattgatttcaaaaacactttctcaatgcacaacccaaacaacgtgagcagtgaaccaggatcgtttgacaagatgacaagggatttcctctacaagctggtgcagaaagcctcttatccaaccgtggtcgaacaccagtctacatattatgctgcgggggagaaaaaactcgggaaaaggaagctgtatgcaatgatgcagtgtgcatcggacatattgcaatgtaaggtttgtttggaatggtgtatcagagagcttcccaagtgttgtgatggtaaacaaggagggagaattttgggtatgagttgtaatcttaggtatgagctatacccttttcttcggcgttaa

SEQ ID NO: 72358 - protein, 194 aa, Arabidopsis thaliana
  peptide (1)..(194): Ceres Seq. ID no. 4930732
MSILTTNASSVKGNISMVISTRITSTFSTRMSFLMILLAVFYTFLMARVLIPSPSYYNVVATPSGRIAALAIPPPSTGKIDFKNTFSMHNPNNVSSEPGSFDKMTRDFLYKLVQKASYPTVVEHQSTYYAAGEKKLGKRKLYAMMQCASDILQCKVCLEWCIRELPKCCDGKQGGRILGMSCNLRYELYPFLRR

SEQ ID NO: 72359 - protein, 178 aa, Arabidopsis thaliana
  peptide (1)..(178): Ceres Seq. ID no. 4930733
MVISTRITSTFSTRMSFLMILLAVFYTFLMARVLIPSPSYYNVVATPSGRIAALAIPPPSTGKIDFKNTFSMHNPNNVSSEPGSFDKMTRDFLYKLVQKASYPTVVEHQSTYYAAGEKKLGKRKLYAMMQCASDILQCKVCLEWCIRELPKCCDGKQGGRILGMSCNLRYELYPFLRR

SEQ ID NO: 72360 - protein, 164 aa, Arabidopsis thaliana
  peptide (1)..(164): Ceres Seq. ID no. 4930734
MSFLMILLAVFYTFLMARVLIPSPSYYNVVATPSGRIAALAIPPPSTGKIDFKNTFSMHNPNNVSSEPGSFDKMTRDFLYKLVQKASYPTVVEHQSTYYAAGEKKLGKRKLYAMMQCASDILQCKVCLEWCIRELPKCCDGKQGGRILGMSCNLRYELYPFLRR

SEQ ID NO: 72361 - DNA, 672 bp, Arabidopsis thaliana
  misc_feature (1)..(672): Ceres Seq. ID no. 4930739
  misc_feature (1)..(672): Ortholog of  Ceres SEQ ID NO 13661768 as cited in SEQ ID NO 61427
atgcgtatttgcaccacaaatgcctcactcgtcaagggaaatataagccgagaagcccgtacgaggaaaaccttaattatctcatcgatcatatctctaagtatcattttcgggacggtttcagacacagcgcatggtgaggctccgaattccggcaactttgtattccaatgccgtggagactcctacgggtctatatgcggttcttgctatgccaccgctgtggccgggcttcgtaagagatgtcagagatacaaaggagcaataatatggtatgatcaatgttttctcaaagtaagtacgatcaactcccctccaacgaagatggattacgagaatactttttctatgcacaacccaaacaacatcaacggggatactcagttgttcaaccaaaagatgaagaatttcctctatgagctagcgctgaaagcggataaacccaaagcggacggtaccggtttgctatattacgcggcagggacgaagaggctcgggaagaataaactgtatgcaatggtgcagtgtactttagacatatttcattgtaaggtttgtttggaatggagtattaaggagctttcaaagtgttgtgaaggtaaacaaggagcgagagttttgggaacgagttgtaatgttaggtatgagttatacccttttattaggacctaa

SEQ ID NO: 72362 - protein, 223 aa, Arabidopsis thaliana
  peptide (1)..(223): Ceres Seq. ID no. 4930740
MRICTTNASLVKGNISREARTRKTLIISSIISLSIIFGTVSDTAHGEAPNSGNFVFQCRGDSYGSICGSCYATAVAGLRKRCQRYKGAIIWYDQCFLKVSTINSPPTKMDYENTFSMHNPNNINGDTQLFNQKMKNFLYELALKADKPKADGTGLLYYAAGTKRLGKNKLYAMVQCTLDIFHCKVCLEWSIKELSKCCEGKQGARVLGTSCNVRYELYPFIRT

SEQ ID NO: 72363 - protein, 115 aa, Arabidopsis thaliana
  peptide (1)..(115): Ceres Seq. ID no. 4930741
MDYENTFSMHNPNNINGDTQLFNQKMKNFLYELALKADKPKADGTGLLYYAAGTKRLGKNKLYAMVQCTLDIFHCKVCLEWSIKELSKCCEGKQGARVLGTSCNVRYELYPFIRT

SEQ ID NO: 72364 - DNA, 903 bp, Arabidopsis thaliana
  misc_feature (1)..(903): Ceres Seq. ID no. 4930762
  misc_feature (1)..(903): Ortholog of  Ceres SEQ ID NO 15178924 as cited in SEQ ID NO 1050
  misc_feature (1)..(903): Ortholog of  Ceres SEQ ID NO 13661768 as cited in SEQ ID NO 61427
atgctaaaaatttattttaaaacaccccacttggaaacacaaataaataaaaataaattcaaaacaatgtattcttcatcatctgtatcaaaacgcttcgttctagtccctattgtggtcgtggtgaccacacaactcctcctggtacgtaacgtttcttcactaaaccttaccaattcgtatcttcaccacaaatgcgtagtcaatcaagggaaatacaagccaggaagcaagtacgagaaatccctcgatgatatcatccaaagcttttcgaataaagataaagattcgtatggttttcgtaccggttacagcatgaaggcctacggtaaagaacctgatatggtctccatcacctaccagtgccgtatcgactctcgtgggcccaagtgccagtcctgcgttgtcacggccggttatgagcttcttcgtaagagatgtccgagatataaagaggcaataatatggtacgaccaatgtcttgtggagttttcttcgttagatacttctgggcagatcaattacgacgacaacttctgtatgcctagcgcgaagaacctgatcggcaattcaatctctcttgaagaaaggttgcatctcctcaacaatcttacaaagatagccgtcacgaaaatagataaaaacatagaaggtataaaaaaaccagtactgtatgcggcgggggagaagagactcgggacgaaaagtctatacggaatggtgcaatgttcggctgacttatctgttcagggttgtaatgagtgtatgttatattatatagtgcattttcaagagtgctgggaaagtaaacaaggagtaagagttttgagtagaagctgtaactttaggtatgagctttacccttttattagccccaagggttcttactataccaagttctaa

SEQ ID NO: 72365 - protein, 300 aa, Arabidopsis thaliana
  peptide (1)..(300): Ceres Seq. ID no. 4930763
MLKIYFKTPHLETQINKNKFKTMYSSSSVSKRFVLVPIVVVVTTQLLLVRNVSSLNLTNSYLHHKCVVNQGKYKPGSKYEKSLDDIIQSFSNKDKDSYGFRTGYSMKAYGKEPDMVSITYQCRIDSRGPKCQSCVVTAGYELLRKRCPRYKEAIIWYDQCLVEFSSLDTSGQINYDDNFCMPSAKNLIGNSISLEERLHLLNNLTKIAVTKIDKNIEGIKKPVLYAAGEKRLGTKSLYGMVQCSADLSVQGCNECMLYYIVHFQECWESKQGVRVLSRSCNFRYELYPFISPKGSYYTKF

SEQ ID NO: 72366 - protein, 278 aa, Arabidopsis thaliana; identical to SEQ ID NO: 70179
  peptide (1)..(278): Ceres Seq. ID no. 4930764

SEQ ID NO: 72367 - protein, 195 aa, Arabidopsis thaliana; identical to SEQ ID NO: 70180
  peptide (1)..(195): Ceres Seq. ID no. 4930765

SEQ ID NO: 72368 - DNA, 1530 bp, Arabidopsis thaliana
  misc_feature (1)..(1530): Ceres Seq. ID no. 4930930
  misc_feature (1)..(1530): Ortholog of  Ceres SEQ ID NO 13654989 as cited in SEQ ID NO 63117
  misc_feature (1)..(1530): Ortholog of  Ceres SEQ ID NO 13655640 as cited in SEQ ID NO 63844
  misc_feature (1)..(1530): Ortholog of  Ceres SEQ ID NO 13584744 as cited in SEQ ID NO 69137
atggcgcgtagtaatagatgtgtaccccaaaatagttccattgtccaaattccgatagaagaagtattcaaaactcaactcaagtctcggtggcagcagatcacaatgtcatctgcttcttctccaccgccgccgcaggttttcgtcccagagccacttttttccgaacccccgcctcctcccaaagcacccgttaacgtttccctatctccaccgcctcctccgcggtctccctccacatccactccacctaggttgggaaatcgaaaccctccacctccagcgagtccctctggccaggaacctacaactccaactatgaccccaggcttttctctatcaccgccgtctccctcaagattatcaacgggagctgtggtcgggatctccataggaggaggagtttttgtgttgactttgatttttttcctttgtaagaagaaacgaccaagagacgataaagcacttccggctcccataggcatccatcaaagcactttcacttacggggagctagctagagccaccaataaattctctgaggccaatttgttaggagagggtggatttggattcgtatacaaaggtatattgaataatggaaatgaagttgcagttaaacagttgaaagtagggagtgctcagggtgagaaagagtttcaggctgaggttaatattattagccaaattcaccataggaatttggtttcccttgtcggttattgcatcgctggtgctcaaagattgcttgtctatgagtttgttcccaacaacactctcgagtttcacctccatgggaaaggacggcctacgatggaatggagtttaagattaaagattgctgtcagttcttccaaaggattgtcttatcttcatgaaaattgcaatcctaaaatcatccaccgtgatatcaaggcggcaaacatattgattgatttcaaatttgaagcaaaggttgctgattttggtctcgccaagattgctttggatacaaacactcatgtatctacacgtgttatgggaacctttgggtatttggctccggaatatgctgcaagtggaaagcttactgaaaagtctgatgtttactcattcggcgttgtacttttggagctaataacgggacgtcgccctgttgatgcaaacaatgtctatgcggatgacagcttggttgattgggcacgaccattgcttgtacaagcacttgaagaaagtaactttgaaggtttggctgatataaagctgaataatgagtatgatagagaagagatggctcgcatggttgcttgtgctgcagcttgtgtccgctatacagctcgccgaagacctcgcatggaccaggttgtgcgtgtgctagaaggaaacatatcgccgtcagatctgaatcaagggataacacccggtcacagcaatactgtatccgtccggctggacgctcgagcagtgagggtcaagccacacggggaaatggattcgagatggggaagatttaaaagaactgctcaacgttatggtggagattctctttaa

SEQ ID NO: 72369 - protein, 509 aa, Arabidopsis thaliana
  peptide (1)..(509): Ceres Seq. ID no. 4930931
MARSNRCVPQNSSIVQIPIEEVFKTQLKSRWQQITMSSASSPPPPQVFVPEPLFSEPPPPPKAPVNVSLSPPPPPRSPSTSTPPRLGNRNPPPPASPSGQEPTTPTMTPGFSLSPPSPSRLSTGAVVGISIGGGVFVLTLIFFLCKKKRPRDDKALPAPIGIHQSTFTYGELARATNKFSEANLLGEGGFGFVYKGILNNGNEVAVKQLKVGSAQGEKEFQAEVNIISQIHHRNLVSLVGYCIAGAQRLLVYEFVPNNTLEFHLHGKGRPTMEWSLRLKIAVSSSKGLSYLHENCNPKIIHRDIKAANILIDFKFEAKVADFGLAKIALDTNTHVSTRVMGTFGYLAPEYAASGKLTEKSDVYSFGVVLLELITGRRPVDANNVYADDSLVDWARPLLVQALEESNFEGLADIKLNNEYDREEMARMVACAAACVRYTARRRPRMDQVVRVLEGNISPSDLNQGITPGHSNTVSVRLDARAVRVKPHGEMDSRWGRFKRTAQRYGGDSL

SEQ ID NO: 72370 - protein, 474 aa, Arabidopsis thaliana
  peptide (1)..(474): Ceres Seq. ID no. 4930932
MSSASSPPPPQVFVPEPLFSEPPPPPKAPVNVSLSPPPPPRSPSTSTPPRLGNRNPPPPASPSGQEPTTPTMTPGFSLSPPSPSRLSTGAVVGISIGGGVFVLTLIFFLCKKKRPRDDKALPAPIGIHQSTFTYGELARATNKFSEANLLGEGGFGFVYKGILNNGNEVAVKQLKVGSAQGEKEFQAEVNIISQIHHRNLVSLVGYCIAGAQRLLVYEFVPNNTLEFHLHGKGRPTMEWSLRLKIAVSSSKGLSYLHENCNPKIIHRDIKAANILIDFKFEAKVADFGLAKIALDTNTHVSTRVMGTFGYLAPEYAASGKLTEKSDVYSFGVVLLELITGRRPVDANNVYADDSLVDWARPLLVQALEESNFEGLADIKLNNEYDREEMARMVACAAACVRYTARRRPRMDQVVRVLEGNISPSDLNQGITPGHSNTVSVRLDARAVRVKPHGEMDSRWGRFKRTAQRYGGDSL

SEQ ID NO: 72371 - protein, 403 aa, Arabidopsis thaliana
  peptide (1)..(403): Ceres Seq. ID no. 4930933
MTPGFSLSPPSPSRLSTGAVVGISIGGGVFVLTLIFFLCKKKRPRDDKALPAPIGIHQSTFTYGELARATNKFSEANLLGEGGFGFVYKGILNNGNEVAVKQLKVGSAQGEKEFQAEVNIISQIHHRNLVSLVGYCIAGAQRLLVYEFVPNNTLEFHLHGKGRPTMEWSLRLKIAVSSSKGLSYLHENCNPKIIHRDIKAANILIDFKFEAKVADFGLAKIALDTNTHVSTRVMGTFGYLAPEYAASGKLTEKSDVYSFGVVLLELITGRRPVDANNVYADDSLVDWARPLLVQALEESNFEGLADIKLNNEYDREEMARMVACAAACVRYTARRRPRMDQVVRVLEGNISPSDLNQGITPGHSNTVSVRLDARAVRVKPHGEMDSRWGRFKRTAQRYGGDSL

SEQ ID NO: 72372 - DNA, 2085 bp, Arabidopsis thaliana
  misc_feature (1)..(2085): Ceres Seq. ID no. 4930944
  misc_feature (1)..(2085): Ortholog of  Ceres SEQ ID NO 13654989 as cited in SEQ ID NO 63117
  misc_feature (1)..(2085): Ortholog of  Ceres SEQ ID NO 13655640 as cited in SEQ ID NO 63844
  misc_feature (1)..(2085): Ortholog of  Ceres SEQ ID NO 13657138 as cited in SEQ ID NO 65923
  misc_feature (1)..(2085): Ortholog of  Ceres SEQ ID NO 13584744 as cited in SEQ ID NO 69137
atgtcatcggcgccgcctcccggtggtactccgtcacctcctccacagcctctcccaattcctcctccgcctcagcctctgcccgttactcctccacctccacctactgcccttcctcccgcccttccccctccacctccgcctactgcccttccacccgcccttcctcctccacctccacctaccaccgttcctcctatacctccctctacgccttctcccccacctcccttgaccccttctcctctgcctccatctcccacaactccttcacctcccttgacgccttctcccacaactccttcacctcccttgactccttctcctccacctgccatcactccttcacctcctttgacaccatctcctctgcctccgtctcccaccaccccttcacctccgcctccatctccaagcattccttcacctcccttgacgccttcccctccaccgtcttctcccttgaggccttcttctcctccaccgccctctcccgccactccttcaactccgccaagatctccgccacctccctcaacacccactcctcctcctcgggtaggcagtctgagccctccacctccagcgagtccctctggcgggagatctcctagtactccatctaccactccaggctcttctccaccggcacaatcttccaaagaattatcaaagggagctatggtcgggatcgccataggaggaggatttgtgcttcttgtggcattggctttgatatttttcctttgtaagaagaaacgacgaagagacaatgaagcaccccctgctcccatagtgccaccaccgaagtctccctcctctgcaccaccacgtccaccgcatttcatgagcagcggcagcagcggagactacgactcaaactactcggatcaatcagttcttcctccaccatcaccagggcttgcattaggcttaggcatatatcaaggcactttcaattacgaggagctatctagagccaccaatggattctctgaggccaatttgttaggacaaggcggtttcggatacgtgttcaaaggtatgttacgtaatgggaaagaagttgctgtgaaacaattgaaagaagggagttctcaaggagaaagagagtttcaagcagaggttgggatcattagccgagtacatcatagacatttggttgctcttgtcggttattgcatcgccgatgctcaaagattgcttgtctatgagtttgttcccaacaacactctcgagtttcacctccatggaaagggacggcctacgatggaatggagttcaagattgaagattgctgttggttctgccaaaggattgtcttatcttcatgaaaattgcaatcctaaaattattcaccgtgatatcaaggcgtcaaacatattgatagatttcaaatttgaagcaaaggttgctgattttggtcttgccaagattgcttctgatacaaatactcatgtatctacacgtgtgatgggaacttttgggtatttggctccggaatatgcttcaagcggaaaactcacggaaaagtctgacgttttctcatttggcgttgtacttctggagctaataactggacgtcgccctattgatgtaaacaatgtccatgcagataacagcttggttgattgggcacgacctttgcttaaccaagtatctgaattaggaaactttgaggttgtggttgataaaaaactgaataatgagtatgacaaagaagagatggctcgcatggttgcttgtgccgcagcttgtgttcggtccacagctccacgtagacctcgcatggatcaggttgcacgtgtgctagaaggaaacatatcaccatcagatctaaaccaaggaatcacaccgggacacagcaatgtgtatggctcatctggaggaagcacagattatgactcgagccaagacaatgaaggcatgaacaagtttaggaaagtgggacttgagactcaagatttatatagtaacccaattagtgaatatgatttgtacccgtcctggtcgagcactgacggtcagaccacacagggaaaggcgaccggcaatattaaaagacccggtcaaggttatggttaa

SEQ ID NO: 72373 - protein, 694 aa, Arabidopsis thaliana
  peptide (1)..(694): Ceres Seq. ID no. 4930945
MSSAPPPGGTPSPPPQPLPIPPPPQPLPVTPPPPPTALPPALPPPPPPTALPPALPPPPPPTTVPPIPPSTPSPPPPLTPSPLPPSPTTPSPPLTPSPTTPSPPLTPSPPPAITPSPPLTPSPLPPSPTTPSPPPPSPSIPSPPLTPSPPPSSPLRPSSPPPPSPATPSTPPRSPPPPSTPTPPPRVGSLSPPPPASPSGGRSPSTPSTTPGSSPPAQSSKELSKGAMVGIAIGGGFVLLVALALIFFLCKKKRRRDNEAPPAPIVPPPKSPSSAPPRPPHFMSSGSSGDYDSNYSDQSVLPPPSPGLALGLGIYQGTFNYEELSRATNGFSEANLLGQGGFGYVFKGMLRNGKEVAVKQLKEGSSQGEREFQAEVGIISRVHHRHLVALVGYCIADAQRLLVYEFVPNNTLEFHLHGKGRPTMEWSSRLKIAVGSAKGLSYLHENCNPKIIHRDIKASNILIDFKFEAKVADFGLAKIASDTNTHVSTRVMGTFGYLAPEYASSGKLTEKSDVFSFGVVLLELITGRRPIDVNNVHADNSLVDWARPLLNQVSELGNFEVVVDKKLNNEYDKEEMARMVACAAACVRSTAPRRPRMDQVARVLEGNISPSDLNQGITPGHSNVYGSSGGSTDYDSSQDNEGMNKFRKVGLETQDLYSNPISEYDLYPSWSSTDGQTTQGKATGNIKRPGQGYG

SEQ ID NO: 72374 - protein, 467 aa, Arabidopsis thaliana
  peptide (1)..(467): Ceres Seq. ID no. 4930946
MVGIAIGGGFVLLVALALIFFLCKKKRRRDNEAPPAPIVPPPKSPSSAPPRPPHFMSSGSSGDYDSNYSDQSVLPPPSPGLALGLGIYQGTFNYEELSRATNGFSEANLLGQGGFGYVFKGMLRNGKEVAVKQLKEGSSQGEREFQAEVGIISRVHHRHLVALVGYCIADAQRLLVYEFVPNNTLEFHLHGKGRPTMEWSSRLKIAVGSAKGLSYLHENCNPKIIHRDIKASNILIDFKFEAKVADFGLAKIASDTNTHVSTRVMGTFGYLAPEYASSGKLTEKSDVFSFGVVLLELITGRRPIDVNNVHADNSLVDWARPLLNQVSELGNFEVVVDKKLNNEYDKEEMARMVACAAACVRSTAPRRPRMDQVARVLEGNISPSDLNQGITPGHSNVYGSSGGSTDYDSSQDNEGMNKFRKVGLETQDLYSNPISEYDLYPSWSSTDGQTTQGKATGNIKRPGQGYG

SEQ ID NO: 72375 - protein, 412 aa, Arabidopsis thaliana
  peptide (1)..(412): Ceres Seq. ID no. 4930947
MSSGSSGDYDSNYSDQSVLPPPSPGLALGLGIYQGTFNYEELSRATNGFSEANLLGQGGFGYVFKGMLRNGKEVAVKQLKEGSSQGEREFQAEVGIISRVHHRHLVALVGYCIADAQRLLVYEFVPNNTLEFHLHGKGRPTMEWSSRLKIAVGSAKGLSYLHENCNPKIIHRDIKASNILIDFKFEAKVADFGLAKIASDTNTHVSTRVMGTFGYLAPEYASSGKLTEKSDVFSFGVVLLELITGRRPIDVNNVHADNSLVDWARPLLNQVSELGNFEVVVDKKLNNEYDKEEMARMVACAAACVRSTAPRRPRMDQVARVLEGNISPSDLNQGITPGHSNVYGSSGGSTDYDSSQDNEGMNKFRKVGLETQDLYSNPISEYDLYPSWSSTDGQTTQGKATGNIKRPGQGYG

SEQ ID NO: 72376 - DNA, 1140 bp, Arabidopsis thaliana
  misc_feature (1)..(1140): Ceres Seq. ID no. 4931036
  misc_feature (1)..(1140): Ortholog of  Ceres SEQ ID NO 13654989 as cited in SEQ ID NO 63117
  misc_feature (1)..(1140): Ortholog of  Ceres SEQ ID NO 13584744 as cited in SEQ ID NO 69137
atgaaggttcttcgatgcctgctccttataagcaaccaaactcacctagtaagctctcgtcaatattcttggaaatgtgcacagagaacaacaggagaagtggtggctaagaacgcaaacggaccatcaaacaatatgggggcacgtattttcacgttccgtgagctagccaccgcgacaaagaattttagacaagagtgcctcattggtgaaggtgggttcgggagggtttacaaaggaaagcttgaaaatccagctcaggtcgtggcagtgaaacaacttgataggaatggattacaaggacaaagagagttcttggtcgaggtcttaatgcttagtcttctacatcataggaatcttgtgaatcttatcggttattgcgctgatggagaccaaagacttcttgtttacgagtatatgcctcttggatctctagaagatcatctcctcgatcttgaaccgggacaaaaaccactagactggaacactcgtattaagattgctttaggagcagcaaaaggaattgagtatctccatgatgaggctgatcctccagtgatttaccgagatcttaaatcgtcaaatatattacttgacccagaatacgttgcgaaattatcggatttcggtttagcaaagctaggtcctgttggagacacactacatgtgtcttcccgagttatgggaacttatggttattgtgctcctgaatatcaaagaactggctatctaacaaataaatcagatgtctacagctttggagttgtgttgttggaacttatatccggaagacgagtcatcgacacaatgagacctagtcatgaacaaaatctcgttacttgggcactaccgatttttagagatccgactagatattggcagctagctgatccattgcttcgaggcgactatccggaaaagagtttgaaccaagctatagctgtagcggcaatgtgcctgcatgaagaaccaacggttagaccactaatgagtgacgttattacagccttgagctttcttggtgcatcctcaaattcctccaataccggctctaaccatttgcaacaaaatcgatccaacaaatatcaggatgcagttcagtgggactcaagtcctagatatgctaattcgcaaatgtag

SEQ ID NO: 72377 - protein, 379 aa, Arabidopsis thaliana
  peptide (1)..(379): Ceres Seq. ID no. 4931037
MKVLRCLLLISNQTHLVSSRQYSWKCAQRTTGEVVAKNANGPSNNMGARIFTFRELATATKNFRQECLIGEGGFGRVYKGKLENPAQVVAVKQLDRNGLQGQREFLVEVLMLSLLHHRNLVNLIGYCADGDQRLLVYEYMPLGSLEDHLLDLEPGQKPLDWNTRIKIALGAAKGIEYLHDEADPPVIYRDLKSSNILLDPEYVAKLSDFGLAKLGPVGDTLHVSSRVMGTYGYCAPEYQRTGYLTNKSDVYSFGVVLLELISGRRVIDTMRPSHEQNLVTWALPIFRDPTRYWQLADPLLRGDYPEKSLNQAIAVAAMCLHEEPTVRPLMSDVITALSFLGASSNSSNTGSNHLQQNRSNKYQDAVQWDSSPRYANSQM

SEQ ID NO: 72378 - protein, 334 aa, Arabidopsis thaliana; identical to SEQ ID NO: 71413
  peptide (1)..(334): Ceres Seq. ID no. 4931038

SEQ ID NO: 72379 - protein, 269 aa, Arabidopsis thaliana
  peptide (1)..(269): Ceres Seq. ID no. 4931039
MLSLLHHRNLVNLIGYCADGDQRLLVYEYMPLGSLEDHLLDLEPGQKPLDWNTRIKIALGAAKGIEYLHDEADPPVIYRDLKSSNILLDPEYVAKLSDFGLAKLGPVGDTLHVSSRVMGTYGYCAPEYQRTGYLTNKSDVYSFGVVLLELISGRRVIDTMRPSHEQNLVTWALPIFRDPTRYWQLADPLLRGDYPEKSLNQAIAVAAMCLHEEPTVRPLMSDVITALSFLGASSNSSNTGSNHLQQNRSNKYQDAVQWDSSPRYANSQM

SEQ ID NO: 72380 - DNA, 1518 bp, Arabidopsis thaliana
  misc_feature (1)..(1518): Ceres Seq. ID no. 4931215
  misc_feature (1)..(1518): Ortholog of  Ceres SEQ ID NO 13663419 as cited in SEQ ID NO 66561
atgggtcggttagtagaagctatcattgcttcgatattattgtctttgtgttttacaataacaaagtcagctccaaaatctgctctcattaccaatcttcctggtttcaacggcacttttccatctaaacactatgccgggtatgtggcaatagataaacatcgtaataagaatctatggtattactttgtggaatctgagagaaatgcttcggtagatccagttgtgctttggcttaatggtggtccaggttgctctagcatggatggatttgtctacgagcacggtccattcaatttcgaaccaaaaaagaagaactcacatcttttgcatctcaatccttatagttggtccaaggtgtccaacatcatataccttgactctccagttggtgtgggattctcttactcaaatgacaacgccgattatacaactgatgatacaaaaaccgcgtctgatactcacacattccttctcgagtggtttaaaatgtttccggagtttcagtcaaatccgttctttatatcaggagaatcatatgctggtatctatgtgccaactcttgcggccgaggttgtcaaaggtcacaagaatgtgacaaagccggttatcaacttcaagggatatttggtgggtaatggtgttaccgatgaggtgtttgatggtaatgctcttgttcccttcactcatggcatgggactcatctctgatgaactctatgaggaaactaaattagtgtgcaacggaacatactataccggcggccagtcaggagtgagtaaagaatgtgctggcaaacttaaaacagtgtcagatactgtgaacttattgaacttatataacattctagaaccgtgctaccacggaacatctctatccgccttagatatcgagtttctgcctaagagtctccttactctaggcaaaacagaaaagccaatggcggtgagaaagagaatgtttggtcgtgcatggcctctaggtgccgttgtgcgtccaggcattgtacctagttggtctcaactcctcgctggctttggtgttccttgcattgacgatacagttgcgaccaaatggctaaacgatccagctgtaaggaaagcggttcatgctaaagaggtctctattcaattcatcatatttctctcaatcagtatttcgattggaaattgggagttatgttcaagcaacctcgaatataggcacgacaccggtagcatgatcgaataccatagaaacctcactcttagtggctttcgagctctcattttcagtggagatcatgatatgtgtgtaccatatactggctctgaagcatggactaaggcaatgggatacaaagtggttgatgaatggaggccatggatgtcaaataaccaagtcgccgggtttacacaagggtatgccaataatctcacatttctaaccatcaagggtgcaggacataccgttccagaatacaaaccgcgtgaatctttggacttctatagtcgtttcctagcaggagaaaagatatag

SEQ ID NO: 72381 - protein, 505 aa, Arabidopsis thaliana
  peptide (1)..(505): Ceres Seq. ID no. 4931216
MGRLVEAIIASILLSLCFTITKSAPKSALITNLPGFNGTFPSKHYAGYVAIDKHRNKNLWYYFVESERNASVDPVVLWLNGGPGCSSMDGFVYEHGPFNFEPKKKNSHLLHLNPYSWSKVSNIIYLDSPVGVGFSYSNDNADYTTDDTKTASDTHTFLLEWFKMFPEFQSNPFFISGESYAGIYVPTLAAEVVKGHKNVTKPVINFKGYLVGNGVTDEVFDGNALVPFTHGMGLISDELYEETKLVCNGTYYTGGQSGVSKECAGKLKTVSDTVNLLNLYNILEPCYHGTSLSALDIEFLPKSLLTLGKTEKPMAVRKRMFGRAWPLGAVVRPGIVPSWSQLLAGFGVPCIDDTVATKWLNDPAVRKAVHAKEVSIQFIIFLSISISIGNWELCSSNLEYRHDTGSMIEYHRNLTLSGFRALIFSGDHDMCVPYTGSEAWTKAMGYKVVDEWRPWMSNNQVAGFTQGYANNLTFLTIKGAGHTVPEYKPRESLDFYSRFLAGEKI

SEQ ID NO: 72382 - protein, 418 aa, Arabidopsis thaliana
  peptide (1)..(418): Ceres Seq. ID no. 4931217
MDGFVYEHGPFNFEPKKKNSHLLHLNPYSWSKVSNIIYLDSPVGVGFSYSNDNADYTTDDTKTASDTHTFLLEWFKMFPEFQSNPFFISGESYAGIYVPTLAAEVVKGHKNVTKPVINFKGYLVGNGVTDEVFDGNALVPFTHGMGLISDELYEETKLVCNGTYYTGGQSGVSKECAGKLKTVSDTVNLLNLYNILEPCYHGTSLSALDIEFLPKSLLTLGKTEKPMAVRKRMFGRAWPLGAVVRPGIVPSWSQLLAGFGVPCIDDTVATKWLNDPAVRKAVHAKEVSIQFIIFLSISISIGNWELCSSNLEYRHDTGSMIEYHRNLTLSGFRALIFSGDHDMCVPYTGSEAWTKAMGYKVVDEWRPWMSNNQVAGFTQGYANNLTFLTIKGAGHTVPEYKPRESLDFYSRFLAGEKI

SEQ ID NO: 72383 - protein, 342 aa, Arabidopsis thaliana
  peptide (1)..(342): Ceres Seq. ID no. 4931218
MFPEFQSNPFFISGESYAGIYVPTLAAEVVKGHKNVTKPVINFKGYLVGNGVTDEVFDGNALVPFTHGMGLISDELYEETKLVCNGTYYTGGQSGVSKECAGKLKTVSDTVNLLNLYNILEPCYHGTSLSALDIEFLPKSLLTLGKTEKPMAVRKRMFGRAWPLGAVVRPGIVPSWSQLLAGFGVPCIDDTVATKWLNDPAVRKAVHAKEVSIQFIIFLSISISIGNWELCSSNLEYRHDTGSMIEYHRNLTLSGFRALIFSGDHDMCVPYTGSEAWTKAMGYKVVDEWRPWMSNNQVAGFTQGYANNLTFLTIKGAGHTVPEYKPRESLDFYSRFLAGEKI

SEQ ID NO: 72384 - DNA, 1503 bp, Arabidopsis thaliana
  misc_feature (1)..(1503): Ceres Seq. ID no. 4931385
  misc_feature (1)..(1503): Ortholog of  Ceres SEQ ID NO 15170151 as cited in SEQ ID NO 53069
  misc_feature (1)..(1503): Ortholog of  Ceres SEQ ID NO 13594209 as cited in SEQ ID NO 59089
  misc_feature (1)..(1503): Ortholog of  Ceres SEQ ID NO 14308041 as cited in SEQ ID NO 62601
  misc_feature (1)..(1503): Ortholog of  Ceres SEQ ID NO 14303546 as cited in SEQ ID NO 64893
  misc_feature (1)..(1503): Ortholog of  Ceres SEQ ID NO 15176091 as cited in SEQ ID NO 65733
  misc_feature (1)..(1503): Ortholog of  Ceres SEQ ID NO 14308007 as cited in SEQ ID NO 65760
  misc_feature (1)..(1503): Ortholog of  Ceres SEQ ID NO 15170163 as cited in SEQ ID NO 66262
  misc_feature (1)..(1503): Ortholog of  Ceres SEQ ID NO 13502874 as cited in SEQ ID NO 66298
  misc_feature (1)..(1503): Ortholog of  Ceres SEQ ID NO 12614124 as cited in SEQ ID NO 68392
atggctactatttggtttctcccacttctctttctctcttgtcttcttcttgccgctttaagactcaagaagcggcggcaacatcaacggaaaccaccgtctccaccgggctttccgatcatcggaaacttgcatcagcttggggagctaccacatcaatctctatggagtctctccaaaaaatatggtcctgtaatgcttttgaagtttggaagtatcccaacggttgttgtctcttcttctgaaacagcaaagcaagctctgaaaatccatgacctcaattgttgtagccgtccaagcttagcaggaccaagagcgctctcttacaactacttggacatagttttctctccttttaatgattactggaaagaattgaggaggatgtgtgtgcaagagcttttcagtcctaaacaagttcatttgattcaacccatcagggaagaggaagtcaagaaactgatgaattcattctcggaatcagctgctcagaaaactccggttaacttgagcgagaagttagcttctttaactgttggcgtgatatgcaaggcagcatttggtgtgagtttccaaggaactgtgcttaatagtgacaacttcgacaagttaatccatgatgcatttttgttcttggggagcttctctgcctcggattattttccaaatgtcggctggatcatcgactggctcacggggttacaagggcagagagagagaagtgtgagaggtcttgacgcattctatgaacaaatgtttgatctacataaacaggggaacaaagaaggagttgaggattttgtggacttgctcttgaagttggagaaagaagaaactgttcttggatatggcaagctcacaagaaaccatatcaaagcagtcttaatgaatgttcttcttggaggcattggaacttcggctataacaatgacatgggcaatgacagaacttatgagaaacccgcgagtaatgaagaaagttcaatccgaaatcagaaatcaaattgggggcaagtcaatgatctgcttggatgacatagaccaactccattacctgaaaatggtgatcaatgaaacatggaggctacatcctccagcaccacttctagttccaagagaagtaatgtctgaatttgaaatcaacggctacacgattccagccaagacaagactttatgtgaatgtatggggtatcgggcgtgatccagatacttggaaagatccagaggagtttcttccagagagatttgttaacagtaacattgatgcaaaaggacaaaactttgagctgttaccatttggaagtggtaggagaatgtgtcctgccatgtacatggggacaacaatggtggagtttggtctagccaatctcttgtaccattttgactggaaattaccagaaggcatggtggtcgaagacattgacatggaagaatctcctggactcaatgccagcaagaaaaatgagcttgtacttgttcctaggaagtatttaaatctgtaa

SEQ ID NO: 72385 - protein, 500 aa, Arabidopsis thaliana
  peptide (1)..(500): Ceres Seq. ID no. 4931386
MATIWFLPLLFLSCLLLAALRLKKRRQHQRKPPSPPGFPIIGNLHQLGELPHQSLWSLSKKYGPVMLLKFGSIPTVVVSSSETAKQALKIHDLNCCSRPSLAGPRALSYNYLDIVFSPFNDYWKELRRMCVQELFSPKQVHLIQPIREEEVKKLMNSFSESAAQKTPVNLSEKLASLTVGVICKAAFGVSFQGTVLNSDNFDKLIHDAFLFLGSFSASDYFPNVGWIIDWLTGLQGQRERSVRGLDAFYEQMFDLHKQGNKEGVEDFVDLLLKLEKEETVLGYGKLTRNHIKAVLMNVLLGGIGTSAITMTWAMTELMRNPRVMKKVQSEIRNQIGGKSMICLDDIDQLHYLKMVINETWRLHPPAPLLVPREVMSEFEINGYTIPAKTRLYVNVWGIGRDPDTWKDPEEFLPERFVNSNIDAKGQNFELLPFGSGRRMCPAMYMGTTMVEFGLANLLYHFDWKLPEGMVVEDIDMEESPGLNASKKNELVLVPRKYLNL

SEQ ID NO: 72386 - protein, 435 aa, Arabidopsis thaliana
  peptide (1)..(435): Ceres Seq. ID no. 4931387
MLLKFGSIPTVVVSSSETAKQALKIHDLNCCSRPSLAGPRALSYNYLDIVFSPFNDYWKELRRMCVQELFSPKQVHLIQPIREEEVKKLMNSFSESAAQKTPVNLSEKLASLTVGVICKAAFGVSFQGTVLNSDNFDKLIHDAFLFLGSFSASDYFPNVGWIIDWLTGLQGQRERSVRGLDAFYEQMFDLHKQGNKEGVEDFVDLLLKLEKEETVLGYGKLTRNHIKAVLMNVLLGGIGTSAITMTWAMTELMRNPRVMKKVQSEIRNQIGGKSMICLDDIDQLHYLKMVINETWRLHPPAPLLVPREVMSEFEINGYTIPAKTRLYVNVWGIGRDPDTWKDPEEFLPERFVNSNIDAKGQNFELLPFGSGRRMCPAMYMGTTMVEFGLANLLYHFDWKLPEGMVVEDIDMEESPGLNASKKNELVLVPRKYLNL

SEQ ID NO: 72387 - protein, 372 aa, Arabidopsis thaliana; identical to SEQ ID NO: 71353
  peptide (1)..(372): Ceres Seq. ID no. 4931388

SEQ ID NO: 72388 - DNA, 1503 bp, Arabidopsis thaliana
  misc_feature (1)..(1503): Ceres Seq. ID no. 4931393
  misc_feature (1)..(1503): Ortholog of  Ceres SEQ ID NO 13594209 as cited in SEQ ID NO 59089
  misc_feature (1)..(1503): Ortholog of  Ceres SEQ ID NO 14313084 as cited in SEQ ID NO 59183
  misc_feature (1)..(1503): Ortholog of  Ceres SEQ ID NO 14308041 as cited in SEQ ID NO 62601
  misc_feature (1)..(1503): Ortholog of  Ceres SEQ ID NO 14303546 as cited in SEQ ID NO 64893
  misc_feature (1)..(1503): Ortholog of  Ceres SEQ ID NO 14308007 as cited in SEQ ID NO 65760
  misc_feature (1)..(1503): Ortholog of  Ceres SEQ ID NO 15170163 as cited in SEQ ID NO 66262
  misc_feature (1)..(1503): Ortholog of  Ceres SEQ ID NO 13502874 as cited in SEQ ID NO 66298
  misc_feature (1)..(1503): Ortholog of  Ceres SEQ ID NO 12614124 as cited in SEQ ID NO 68392
atgacaaacatttggcttctgtcacttatcttcgtcatttgtattcttgtagccgtgttcaaccacaagaatcggaggaattatcaacggacaccaccgtctcctcctggctgtcctatcatcggaaacttgcatcaactcggagaattaccacatcaatctctatggaaactctccaaaaagtatggccctgtgatgcttttaaagcttggaagagtaccaacagtcatagtttcttcctctgaaacagcaaaacaagctttgaaaatccatgacctccattgttgtagtcgtccaggctttgcaggggcaagagagctctcttacaactatctagacattgctttttctccttatgatgattattggaaagaagtaaggaagctcgctgttcaagaacttttcagtagtaaacaagttcactctatacaaccgataaaggacgaggaggtcaagaaactgatcgattcaatctccgaatcagctgctcagaagactccgatcaacttgaacaagacattgctggctttaactgttagtgtggtctgcaggacagcgtttagtgtgaattttgagggaactgtgctcaacagtgaacgattcaataacatagtccgtgaggcgctcgagatgttgggaagcttttctgcctcagatttcattccgtatgtcggaaggatcatcgacttgttgacgggtttgcaaggacggcgagagagaagcatgagagatctcgatgctttctatgaacaaatgtttgatctgcataaacagaaaaaggaagaaggtagtgaagactttgtggacttgctgttgaggttggagaaagaagaagctgttcttggaaatgacaagctcactagaaaccatatcaaagcgatattgatggatgttcttctagcaggaatggatacttctgcaataaccatgacatgggcaatggcagaactcgcaaagaatccacgagtgatgaaaaaagttcaatccgaaatcagaagtcaaatcaagaacaaagaaagaatcagctttgatgacactgataagcttgagtacctcaaaatggttatcaaagaaacatggaggttacatcctacaacacctcttctaatcccaagggaagcaatgtctgaatttgagatcaacggctacacgattccagttaagacacggcttcacgtgaatgtatgggctattggtcgtgatcccgatacctggaaagaccctgaagtgtttctcccggagaggtttacggataataatattgatgcaaaaggacagcattttgagctgttaccgtttggaggcggccggagaatgtgtcctgcagtttatatggggacaacaatggtcgagtttggtttggctaatcttttgtatcattttgattggaagttaccagaaggcatgaaggttgacgatattgacatggaagaagctcccggactcactgtcaacaagaaaaacgagcttatacttgtgccaacgaagtttctagatccttaa

SEQ ID NO: 72389 - protein, 500 aa, Arabidopsis thaliana
  peptide (1)..(500): Ceres Seq. ID no. 4931394
MTNIWLLSLIFVICILVAVFNHKNRRNYQRTPPSPPGCPIIGNLHQLGELPHQSLWKLSKKYGPVMLLKLGRVPTVIVSSSETAKQALKIHDLHCCSRPGFAGARELSYNYLDIAFSPYDDYWKEVRKLAVQELFSSKQVHSIQPIKDEEVKKLIDSISESAAQKTPINLNKTLLALTVSVVCRTAFSVNFEGTVLNSERFNNIVREALEMLGSFSASDFIPYVGRIIDLLTGLQGRRERSMRDLDAFYEQMFDLHKQKKEEGSEDFVDLLLRLEKEEAVLGNDKLTRNHIKAILMDVLLAGMDTSAITMTWAMAELAKNPRVMKKVQSEIRSQIKNKERISFDDTDKLEYLKMVIKETWRLHPTTPLLIPREAMSEFEINGYTIPVKTRLHVNVWAIGRDPDTWKDPEVFLPERFTDNNIDAKGQHFELLPFGGGRRMCPAVYMGTTMVEFGLANLLYHFDWKLPEGMKVDDIDMEEAPGLTVNKKNELILVPTKFLDP

SEQ ID NO: 72390 - protein, 435 aa, Arabidopsis thaliana
  peptide (1)..(435): Ceres Seq. ID no. 4931395
MLLKLGRVPTVIVSSSETAKQALKIHDLHCCSRPGFAGARELSYNYLDIAFSPYDDYWKEVRKLAVQELFSSKQVHSIQPIKDEEVKKLIDSISESAAQKTPINLNKTLLALTVSVVCRTAFSVNFEGTVLNSERFNNIVREALEMLGSFSASDFIPYVGRIIDLLTGLQGRRERSMRDLDAFYEQMFDLHKQKKEEGSEDFVDLLLRLEKEEAVLGNDKLTRNHIKAILMDVLLAGMDTSAITMTWAMAELAKNPRVMKKVQSEIRSQIKNKERISFDDTDKLEYLKMVIKETWRLHPTTPLLIPREAMSEFEINGYTIPVKTRLHVNVWAIGRDPDTWKDPEVFLPERFTDNNIDAKGQHFELLPFGGGRRMCPAVYMGTTMVEFGLANLLYHFDWKLPEGMKVDDIDMEEAPGLTVNKKNELILVPTKFLDP

SEQ ID NO: 72391 - protein, 290 aa, Arabidopsis thaliana
  peptide (1)..(290): Ceres Seq. ID no. 4931396
MLGSFSASDFIPYVGRIIDLLTGLQGRRERSMRDLDAFYEQMFDLHKQKKEEGSEDFVDLLLRLEKEEAVLGNDKLTRNHIKAILMDVLLAGMDTSAITMTWAMAELAKNPRVMKKVQSEIRSQIKNKERISFDDTDKLEYLKMVIKETWRLHPTTPLLIPREAMSEFEINGYTIPVKTRLHVNVWAIGRDPDTWKDPEVFLPERFTDNNIDAKGQHFELLPFGGGRRMCPAVYMGTTMVEFGLANLLYHFDWKLPEGMKVDDIDMEEAPGLTVNKKNELILVPTKFLDP

SEQ ID NO: 72392 - DNA, 2103 bp, Arabidopsis thaliana
  misc_feature (1)..(2103): Ceres Seq. ID no. 4931483
  misc_feature (1)..(2103): Ortholog of  Ceres SEQ ID NO 12586556 as cited in SEQ ID NO 64667
  misc_feature (1)..(2103): Ortholog of  Ceres SEQ ID NO 13660894 as cited in SEQ ID NO 67475
atggcagtgaccggagtttcttctgcttttggccgtcttttcaaacaagataaaacccacaagcgtgttatcggcaccggaaccaaacttacagtgacccgtcagattcttgagcatctcgaaggcggtaatgtctcgaaagccgtctctgttctctttgcttctccagagccagttagttattggctatacgagcgtcttttccgttcttgttcctcgaaagctcttgttgtgcaagcccgtaaagtccaatctcacttagtaactttctctccgttgcctccgattttcctcttgaacagagccattgaggcttatggtaaatgtgggtgtgttgatgatgcacgagagctgttcgaggaaatgcctgaacgagatggtgggtcttggaacgctgtgattactgcttgtgcgcaaaacggtgtctctgatgaggtgtttcgtatgtttcgtagaatgaatagagatggcgtacgagctacggagacttcttttgctggtgttttaaagtcatgtggtttaatcttggacttgagattattgaggcagctgcattgtgctgtggtgaagtatgggtattcggggaatgtagatttggagacttcgattgttgatgtttatgggaagtgtcgggtgatgagtgatgcgagaagagtgtttgatgagattgtaaaccctagtgatgtatcttggaatgtgattgtgcggcggtatcttgagatggggtttaatgatgaggcagtggtgatgtttttcaagatgctggagttgaatgttcgacctttgaatcacacggtttctagtgtaatgttagcttgttcgagatccttggcccttgaggtgggaaaggtaatccatgccattgctgtgaaacttagtgttgtggcagatacagttgtttctacttctgtatttgatatgtatgtaaaatgtgacagattggagagtgctcgcagagtatttgaccaaactagatctaaagatttgaaatcttggacttcggcgatgtcgggatatgcaatgagtggtttaactagagaggcaagggagctctttgatttgatgcctgaacggaatatagtctcatggaacgcaatgttgggcggatatgtacatgcccatgaatgggatgaggcactggattttctcactttgatgcgccaggagattgaaaatattgataatgtcactcttgtgtggatcctaaatgtctgctctggtatatcagatgttcaaatggggaagcaagctcatggttttatctaccgacatggatatgatacgaatgtaattgtagccaatgcacttcttgatatgtatggaaaatgcgggaccttgcagagtgccaatatttggttccgccaaatgagtgaactaagggatgaggtttcatggaatgctttattgactggtgtagctcgagttggcaggagtgaacaagccttatctttctttgaagggatgcaagtggaggccaaaccaagcaaatacacactggcaacgctcttagcaggttgtgcgaacattcctgctttaaatttaggcaaagcaatccacggattcctgatcagagatggctataaaattgatgttgttatacggggtgcaatggttgacatgtattccaaatgccgatgtttcgactatgctatcgaagtattcaaagaggcagctacacgggacttgattctatggaactctattatccgtggatgttgtcgtaatggaagaagcaaggaggtctttgagttgttcatgcttttggaaaatgaaggagttaagcctgaccatgtcacctttttgggaatcttacaagcttgcatacgtgaaggtcatgtcgaactcggttttcagtatttcagttctatgagcaccaaatatcatatatcaccacaggttgagcattatgattgtatgattgaactctactgcaagtatggatgcttgcatcagcttgaagaatttctcctcttgatgccttttgatccacctatgcaaatgttgacaaggataaatgatgcttgccaaagataccgctggtcaaagttaggagcatgggctgctaaacggcttatgaatgatcattaccttcagccaccatga

SEQ ID NO: 72393 - protein, 700 aa, Arabidopsis thaliana
  peptide (1)..(700): Ceres Seq. ID no. 4931484
MAVTGVSSAFGRLFKQDKTHKRVIGTGTKLTVTRQILEHLEGGNVSKAVSVLFASPEPVSYWLYERLFRSCSSKALVVQARKVQSHLVTFSPLPPIFLLNRAIEAYGKCGCVDDARELFEEMPERDGGSWNAVITACAQNGVSDEVFRMFRRMNRDGVRATETSFAGVLKSCGLILDLRLLRQLHCAVVKYGYSGNVDLETSIVDVYGKCRVMSDARRVFDEIVNPSDVSWNVIVRRYLEMGFNDEAVVMFFKMLELNVRPLNHTVSSVMLACSRSLALEVGKVIHAIAVKLSVVADTVVSTSVFDMYVKCDRLESARRVFDQTRSKDLKSWTSAMSGYAMSGLTREARELFDLMPERNIVSWNAMLGGYVHAHEWDEALDFLTLMRQEIENIDNVTLVWILNVCSGISDVQMGKQAHGFIYRHGYDTNVIVANALLDMYGKCGTLQSANIWFRQMSELRDEVSWNALLTGVARVGRSEQALSFFEGMQVEAKPSKYTLATLLAGCANIPALNLGKAIHGFLIRDGYKIDVVIRGAMVDMYSKCRCFDYAIEVFKEAATRDLILWNSIIRGCCRNGRSKEVFELFMLLENEGVKPDHVTFLGILQACIREGHVELGFQYFSSMSTKYHISPQVEHYDCMIELYCKYGCLHQLEEFLLLMPFDPPMQMLTRINDACQRYRWSKLGAWAAKRLMNDHYLQPP

SEQ ID NO: 72394 - protein, 579 aa, Arabidopsis thaliana
  peptide (1)..(579): Ceres Seq. ID no. 4931485
MPERDGGSWNAVITACAQNGVSDEVFRMFRRMNRDGVRATETSFAGVLKSCGLILDLRLLRQLHCAVVKYGYSGNVDLETSIVDVYGKCRVMSDARRVFDEIVNPSDVSWNVIVRRYLEMGFNDEAVVMFFKMLELNVRPLNHTVSSVMLACSRSLALEVGKVIHAIAVKLSVVADTVVSTSVFDMYVKCDRLESARRVFDQTRSKDLKSWTSAMSGYAMSGLTREARELFDLMPERNIVSWNAMLGGYVHAHEWDEALDFLTLMRQEIENIDNVTLVWILNVCSGISDVQMGKQAHGFIYRHGYDTNVIVANALLDMYGKCGTLQSANIWFRQMSELRDEVSWNALLTGVARVGRSEQALSFFEGMQVEAKPSKYTLATLLAGCANIPALNLGKAIHGFLIRDGYKIDVVIRGAMVDMYSKCRCFDYAIEVFKEAATRDLILWNSIIRGCCRNGRSKEVFELFMLLENEGVKPDHVTFLGILQACIREGHVELGFQYFSSMSTKYHISPQVEHYDCMIELYCKYGCLHQLEEFLLLMPFDPPMQMLTRINDACQRYRWSKLGAWAAKRLMNDHYLQPP

SEQ ID NO: 72395 - protein, 552 aa, Arabidopsis thaliana
  peptide (1)..(552): Ceres Seq. ID no. 4931486
MFRRMNRDGVRATETSFAGVLKSCGLILDLRLLRQLHCAVVKYGYSGNVDLETSIVDVYGKCRVMSDARRVFDEIVNPSDVSWNVIVRRYLEMGFNDEAVVMFFKMLELNVRPLNHTVSSVMLACSRSLALEVGKVIHAIAVKLSVVADTVVSTSVFDMYVKCDRLESARRVFDQTRSKDLKSWTSAMSGYAMSGLTREARELFDLMPERNIVSWNAMLGGYVHAHEWDEALDFLTLMRQEIENIDNVTLVWILNVCSGISDVQMGKQAHGFIYRHGYDTNVIVANALLDMYGKCGTLQSANIWFRQMSELRDEVSWNALLTGVARVGRSEQALSFFEGMQVEAKPSKYTLATLLAGCANIPALNLGKAIHGFLIRDGYKIDVVIRGAMVDMYSKCRCFDYAIEVFKEAATRDLILWNSIIRGCCRNGRSKEVFELFMLLENEGVKPDHVTFLGILQACIREGHVELGFQYFSSMSTKYHISPQVEHYDCMIELYCKYGCLHQLEEFLLLMPFDPPMQMLTRINDACQRYRWSKLGAWAAKRLMNDHYLQPP

SEQ ID NO: 72396 - DNA, 1107 bp, Arabidopsis thaliana
  misc_feature (1)..(1107): Ceres Seq. ID no. 4931487
  misc_feature (1)..(1107): Ortholog of  Ceres SEQ ID NO 14315279 as cited in SEQ ID NO 52534
atggatcacgatctcgacaaattccctttactctcttacgtccttcatcaacatgactccaatctccacgcgccgccgtctatggccgcgcaagaaactctccttccttcttttcctcttctctccaatccagaaatcatgtctatgttgactcaatccatccccacaacgatcacacagacgcttttcgtcttcaactctctcggctctcgacctgatcccttagcggtttcctctgctcgattcaagatcgctcaaattatggattcgctctcgccggaggaagcagcgaaggagtcggagatttatgccggggttgtgcggttggatgaagtgcacgatagttacgagaagaagttgaaggatacagaggaggagctttctagggtttattctacggaggtggaatcgatgttgagaagcggtgaagaagtgaacgagaaggttcttgcggtgctcaaggaggcggaatccggcggaaccgttgagaggattgatctctccagccaagaacttaagcttatccctgaagctttttggaaagtagttggcttagtatacttgaatctctctggcaatgacttgacgtttataccggatgcaatctcgaaactcaagaagctagaagagctcgatgtatcttcaaattctttggaatctcttcctgactctatagggatgttgcttaaccttagaatccttaatgtgaatgcgaacaatctaaccgcactccctgagagcatcgcgcattgcagcaacaaccaaatccaagctataccagactcattttataggctgaggaagctagagaaactgaacttggaccaaaacccgcttgagatcccatctcaagaagtggctactcaaggagctgaagttgttagagagtttatgaggaagagatggggtgatatcatggcagagcagcaacagaggattggcgttgaggctgagcgacatggagatgaaaacgggtgggtctattggggaacctccatggttactaatcttgtttctggagtgacccataccattggatttggaggagcaactagcgatggtggagataagaaaccgggagactcgtacttttatcaccaaatctga

SEQ ID NO: 72397 - protein, 368 aa, Arabidopsis thaliana
  peptide (1)..(368): Ceres Seq. ID no. 4931488
MDHDLDKFPLLSYVLHQHDSNLHAPPSMAAQETLLPSFPLLSNPEIMSMLTQSIPTTITQTLFVFNSLGSRPDPLAVSSARFKIAQIMDSLSPEEAAKESEIYAGVVRLDEVHDSYEKKLKDTEEELSRVYSTEVESMLRSGEEVNEKVLAVLKEAESGGTVERIDLSSQELKLIPEAFWKVVGLVYLNLSGNDLTFIPDAISKLKKLEELDVSSNSLESLPDSIGMLLNLRILNVNANNLTALPESIAHCSNNQIQAIPDSFYRLRKLEKLNLDQNPLEIPSQEVATQGAEVVREFMRKRWGDIMAEQQQRIGVEAERHGDENGWVYWGTSMVTNLVSGVTHTIGFGGATSDGGDKKPGDSYFYHQI

SEQ ID NO: 72398 - protein, 341 aa, Arabidopsis thaliana
  peptide (1)..(341): Ceres Seq. ID no. 4931489
MAAQETLLPSFPLLSNPEIMSMLTQSIPTTITQTLFVFNSLGSRPDPLAVSSARFKIAQIMDSLSPEEAAKESEIYAGVVRLDEVHDSYEKKLKDTEEELSRVYSTEVESMLRSGEEVNEKVLAVLKEAESGGTVERIDLSSQELKLIPEAFWKVVGLVYLNLSGNDLTFIPDAISKLKKLEELDVSSNSLESLPDSIGMLLNLRILNVNANNLTALPESIAHCSNNQIQAIPDSFYRLRKLEKLNLDQNPLEIPSQEVATQGAEVVREFMRKRWGDIMAEQQQRIGVEAERHGDENGWVYWGTSMVTNLVSGVTHTIGFGGATSDGGDKKPGDSYFYHQI

SEQ ID NO: 72399 - protein, 322 aa, Arabidopsis thaliana
  peptide (1)..(322): Ceres Seq. ID no. 4931490
MSMLTQSIPTTITQTLFVFNSLGSRPDPLAVSSARFKIAQIMDSLSPEEAAKESEIYAGVVRLDEVHDSYEKKLKDTEEELSRVYSTEVESMLRSGEEVNEKVLAVLKEAESGGTVERIDLSSQELKLIPEAFWKVVGLVYLNLSGNDLTFIPDAISKLKKLEELDVSSNSLESLPDSIGMLLNLRILNVNANNLTALPESIAHCSNNQIQAIPDSFYRLRKLEKLNLDQNPLEIPSQEVATQGAEVVREFMRKRWGDIMAEQQQRIGVEAERHGDENGWVYWGTSMVTNLVSGVTHTIGFGGATSDGGDKKPGDSYFYHQI

SEQ ID NO: 72400 - DNA, 2799 bp, Arabidopsis thaliana
  misc_feature (1)..(2799): Ceres Seq. ID no. 4931839
  misc_feature (1)..(2799): Ortholog of  Ceres SEQ ID NO 13600310 as cited in SEQ ID NO 5086
atgggacctccgagaactccgttaagtaagatagataagtccaatccttatactccatgtggttccaaagttacagaggagaagattcttgtcactgttcggatgagaccattaaattggagggaacatgccaaatatgatctcattgcttgggaatgtcccgatgatgagactatcgtctttaagaatccgaatcctgacaaggctccaacaaaatattcatttgataaagtttttgagccaacttgtgcaactcaagaggtgtatgaaggtggttctagggacgttgcactatctgcattagcaggaacaaatgcaactatttttgcttatggtcagactagtagtggcaagacgtttacaatgaggggggttactgaaagtgttgttaaagatatatacgaacatataagaaaaactcaagaaaggagctttgtcttgaaagtatctgctttggagatttataacgagaccgtggttgaccttttaaatcgtgatactgggccccttagactgttagatgatccagagaaaggaaccattgtggaaaatctggtggaggaagtggtagaaagcaggcaacatttacagcatttaattagcatttgtgaagatcaaaggcaagtaggtgaaactgctttaaacgacaaaagttcaagatcgcatcagattattcggctgaccatccatagcagtctcagggaaatagcaggctgtgtgcagtctttcatggcaactctgaatcttgttgatcttgctggaagcgaacgtgcttttcaaacaaacgcagatggtctaagattgaaggaaggaagccacattaaccgtagtttattgacacttactacagtgatcagaaaactgagttctggaagaaaaagggatcacgtgccgtatagagactcaaagctgacaagaattttgcaaaattcacttggcgggaatgctagaacagcaattatatgtacgattagtccggcactgagtcatgttgaacagacaaaaaagacactttcttttgccatgagtgcgaaggaagtcaccaattgcgctaaagtaaacatggttgtctcagaaaaaaagctgctgaaacatctgcagcaaaaagtagctaaactcgagtcagagttaagaagcccggagcccagttcatccacctgcttaaagtctctgttaattgagaaagagatgaaaatccaacagatggaatccgaaatgaaagagctaaagcgtcagagagacattgcacagtctgaacttgatctagaaagaaaagcaaaggagcggaagggatcaagtgagtgtgaacctttttctcaagtggcaaggtgtctctcataccatacaaaggaggaatccattccaagcaaatctgttccgtcaagccgcagaacagctcgtgataggagaaaggataatgtgaggcagtctttaacttcggcggatccaacagcgctagtccaagaaattcgtttgcttgaaaaacatcaaaagaagttgggtgaagaagcaaaccaagcactggatctaattcacaaagaagtgacatcccataaactgggtgatcaacaagctgcagaaaaagttgcgaaaatgctgtcagaaatcagggacatgcagaagagcaaccttttaactgaggaaattgtagttggtgataaagccaacctgaaggaagaaataaatcggttgaattctcaagaaattgcagctttggagaagaagctagagtgtgttcagaacactattgacatgcttgtctcgtcttttcagacagatgaacagactccagatttcaggacccaggtgaaaaagaagagacttcttcccttcggcttaagtaatagtcctaacctacagcatatgatccggggaccatgttcacctctttctgggactgaaaataaggatcctgagagcaatgttgtgtctgctaattcagccccagtgtcttttggagctactccaccaaagagggatgataaccgatgtcgtacacagtcaagggaaggaacgcctgtatcacgacaagcaaattcagtcgatattaagagaatgaatcgaatgtataagaatgctgccgaagagaatatacgtaatatcaaatcttatgttactggattgaaagaacgtgtggcgaagcttcaataccagaagcagctgcttgtttgccaggcaaacgagacaggcgctgcttcggagtacgatgcaaccgatgaatctcagatggattggccattgtgttttgaagagcagagaaagcaaatcataatgttatggcatctgtgccacatttcaatcattcacagaacacaattctacatgttattcaaaggagacccagctgatcaaatctacatggaggttgagctccgcaggctgacatggctcgaacagcacttggctgagcttgggaatgcgagtcctgcattgcttggtgatgaaccagcaagctacgtagcatcgagtataagagctttgaagcaggagagagagtatttggcgaaacgggtaaacacaaagctaggagcagaggaaagagagatgctatacctgaaatgggatgtcccgccggtgggaaaacagaggagacaacagttcatcaacaaactctggacagatcctcacaacatgcaacacgtgagagagagtgcggagatcgtggctaagcttgtcggattctgtgactcgggagagaccataaggaaagaaatgtttgagctcaactttgcatctccttcagataagaagacttggatgatgggttggaacttcatatccaacttgttgcatctctag

SEQ ID NO: 72401 - protein, 932 aa, Arabidopsis thaliana
  peptide (1)..(932): Ceres Seq. ID no. 4931840
MGPPRTPLSKIDKSNPYTPCGSKVTEEKILVTVRMRPLNWREHAKYDLIAWECPDDETIVFKNPNPDKAPTKYSFDKVFEPTCATQEVYEGGSRDVALSALAGTNATIFAYGQTSSGKTFTMRGVTESVVKDIYEHIRKTQERSFVLKVSALEIYNETVVDLLNRDTGPLRLLDDPEKGTIVENLVEEVVESRQHLQHLISICEDQRQVGETALNDKSSRSHQIIRLTIHSSLREIAGCVQSFMATLNLVDLAGSERAFQTNADGLRLKEGSHINRSLLTLTTVIRKLSSGRKRDHVPYRDSKLTRILQNSLGGNARTAIICTISPALSHVEQTKKTLSFAMSAKEVTNCAKVNMVVSEKKLLKHLQQKVAKLESELRSPEPSSSTCLKSLLIEKEMKIQQMESEMKELKRQRDIAQSELDLERKAKERKGSSECEPFSQVARCLSYHTKEESIPSKSVPSSRRTARDRRKDNVRQSLTSADPTALVQEIRLLEKHQKKLGEEANQALDLIHKEVTSHKLGDQQAAEKVAKMLSEIRDMQKSNLLTEEIVVGDKANLKEEINRLNSQEIAALEKKLECVQNTIDMLVSSFQTDEQTPDFRTQVKKKRLLPFGLSNSPNLQHMIRGPCSPLSGTENKDPESNVVSANSAPVSFGATPPKRDDNRCRTQSREGTPVSRQANSVDIKRMNRMYKNAAEENIRNIKSYVTGLKERVAKLQYQKQLLVCQANETGAASEYDATDESQMDWPLCFEEQRKQIIMLWHLCHISIIHRTQFYMLFKGDPADQIYMEVELRRLTWLEQHLAELGNASPALLGDEPASYVASSIRALKQEREYLAKRVNTKLGAEEREMLYLKWDVPPVGKQRRQQFINKLWTDPHNMQHVRESAEIVAKLVGFCDSGETIRKEMFELNFASPSDKKTWMMGWNFISNLLHL

SEQ ID NO: 72402 - protein, 898 aa, Arabidopsis thaliana
  peptide (1)..(898): Ceres Seq. ID no. 4931841
MRPLNWREHAKYDLIAWECPDDETIVFKNPNPDKAPTKYSFDKVFEPTCATQEVYEGGSRDVALSALAGTNATIFAYGQTSSGKTFTMRGVTESVVKDIYEHIRKTQERSFVLKVSALEIYNETVVDLLNRDTGPLRLLDDPEKGTIVENLVEEVVESRQHLQHLISICEDQRQVGETALNDKSSRSHQIIRLTIHSSLREIAGCVQSFMATLNLVDLAGSERAFQTNADGLRLKEGSHINRSLLTLTTVIRKLSSGRKRDHVPYRDSKLTRILQNSLGGNARTAIICTISPALSHVEQTKKTLSFAMSAKEVTNCAKVNMVVSEKKLLKHLQQKVAKLESELRSPEPSSSTCLKSLLIEKEMKIQQMESEMKELKRQRDIAQSELDLERKAKERKGSSECEPFSQVARCLSYHTKEESIPSKSVPSSRRTARDRRKDNVRQSLTSADPTALVQEIRLLEKHQKKLGEEANQALDLIHKEVTSHKLGDQQAAEKVAKMLSEIRDMQKSNLLTEEIVVGDKANLKEEINRLNSQEIAALEKKLECVQNTIDMLVSSFQTDEQTPDFRTQVKKKRLLPFGLSNSPNLQHMIRGPCSPLSGTENKDPESNVVSANSAPVSFGATPPKRDDNRCRTQSREGTPVSRQANSVDIKRMNRMYKNAAEENIRNIKSYVTGLKERVAKLQYQKQLLVCQANETGAASEYDATDESQMDWPLCFEEQRKQIIMLWHLCHISIIHRTQFYMLFKGDPADQIYMEVELRRLTWLEQHLAELGNASPALLGDEPASYVASSIRALKQEREYLAKRVNTKLGAEEREMLYLKWDVPPVGKQRRQQFINKLWTDPHNMQHVRESAEIVAKLVGFCDSGETIRKEMFELNFASPSDKKTWMMGWNFISNLLHL

SEQ ID NO: 72403 - protein, 811 aa, Arabidopsis thaliana
  peptide (1)..(811): Ceres Seq. ID no. 4931842
MRGVTESVVKDIYEHIRKTQERSFVLKVSALEIYNETVVDLLNRDTGPLRLLDDPEKGTIVENLVEEVVESRQHLQHLISICEDQRQVGETALNDKSSRSHQIIRLTIHSSLREIAGCVQSFMATLNLVDLAGSERAFQTNADGLRLKEGSHINRSLLTLTTVIRKLSSGRKRDHVPYRDSKLTRILQNSLGGNARTAIICTISPALSHVEQTKKTLSFAMSAKEVTNCAKVNMVVSEKKLLKHLQQKVAKLESELRSPEPSSSTCLKSLLIEKEMKIQQMESEMKELKRQRDIAQSELDLERKAKERKGSSECEPFSQVARCLSYHTKEESIPSKSVPSSRRTARDRRKDNVRQSLTSADPTALVQEIRLLEKHQKKLGEEANQALDLIHKEVTSHKLGDQQAAEKVAKMLSEIRDMQKSNLLTEEIVVGDKANLKEEINRLNSQEIAALEKKLECVQNTIDMLVSSFQTDEQTPDFRTQVKKKRLLPFGLSNSPNLQHMIRGPCSPLSGTENKDPESNVVSANSAPVSFGATPPKRDDNRCRTQSREGTPVSRQANSVDIKRMNRMYKNAAEENIRNIKSYVTGLKERVAKLQYQKQLLVCQANETGAASEYDATDESQMDWPLCFEEQRKQIIMLWHLCHISIIHRTQFYMLFKGDPADQIYMEVELRRLTWLEQHLAELGNASPALLGDEPASYVASSIRALKQEREYLAKRVNTKLGAEEREMLYLKWDVPPVGKQRRQQFINKLWTDPHNMQHVRESAEIVAKLVGFCDSGETIRKEMFELNFASPSDKKTWMMGWNFISNLLHL

SEQ ID NO: 72404 - DNA, 1260 bp, Arabidopsis thaliana
  misc_feature (1)..(1260): Ceres Seq. ID no. 4932130
  misc_feature (1)..(1260): Ortholog of  Ceres SEQ ID NO 13596021 as cited in SEQ ID NO 62020
atgctgaatgtttttttttgggttgcaggggatgtggggagtgtctattttggtccgaatcacccgatgaaacctcacaggctttgtatgacccatcatcttatccttgcatatggcctgcatagcaagatggaagtttatcgtccacacaaagcatatcctatcgagatggctcagttccattctcctgactatgtagagttcctgcaacgaattaatccagaaaaccagaacttgttccccaatgaaatggctagatataatctgggagaggattgtcctgtctttgaagatttgtttgaattttgtcaactttacgccggcggaaccatagatgctgcacgcaggttaaacaacaaactctgtgacattgctataaattgggcgggcgggttgcaccatgccaaaaaatgtgatgcatctgggttttgctacatcaacgatctcgtgctaggaattcttgagttgttaaaacaccatccccgtgttctatacatagatatagatgttcatcatggtgatggggttgaagaagcgttttacttcactgacagagtaatgactgttagctttcataagtttggggataagttctttccagggacaggcgatgttaaggaaataggagaaagagaagggaaattttacgccattaatgtgccgctgaaggatggtatcgatgacagtagtttcaaccgtcttttcaggactgttgttgagatatatcaaccgggtgcaattgttcttcaatgcggggcagattcactagccagggatcgactaggatgctttaatctctctattgatggacatgctgaatgtgttaaattcgtgaagaagttcaatcttcccttactggttacaggaggtggaggatacacaaaggagaatgtagctcgttgttggaccgttgagactggcattcttttggacacagaacttcctaatgagattcctgaaaacgactacataaagtattttgcgccggatttttctttgaagataccgggtggtcacattgagaatcttaataccaaatcgtacatcagttccatcaaagtgcagattttggagaatttgcgatacattcaacacgctccaagcgtacaaatgcaggaggttccaccggatttctacataccggattttgatgaagacgaacaaaacccggatgtacgtgcggatcagcgttcacgggataagcagatccagagggatgatgaatatttcgatggagacaacgataacgatgcgtcataa

SEQ ID NO: 72405 - protein, 419 aa, Arabidopsis thaliana
  peptide (1)..(419): Ceres Seq. ID no. 4932131
MLNVFFWVAGDVGSVYFGPNHPMKPHRLCMTHHLILAYGLHSKMEVYRPHKAYPIEMAQFHSPDYVEFLQRINPENQNLFPNEMARYNLGEDCPVFEDLFEFCQLYAGGTIDAARRLNNKLCDIAINWAGGLHHAKKCDASGFCYINDLVLGILELLKHHPRVLYIDIDVHHGDGVEEAFYFTDRVMTVSFHKFGDKFFPGTGDVKEIGEREGKFYAINVPLKDGIDDSSFNRLFRTVVEIYQPGAIVLQCGADSLARDRLGCFNLSIDGHAECVKFVKKFNLPLLVTGGGGYTKENVARCWTVETGILLDTELPNEIPENDYIKYFAPDFSLKIPGGHIENLNTKSYISSIKVQILENLRYIQHAPSVQMQEVPPDFYIPDFDEDEQNPDVRADQRSRDKQIQRDDEYFDGDNDNDAS

SEQ ID NO: 72406 - protein, 397 aa, Arabidopsis thaliana
  peptide (1)..(397): Ceres Seq. ID no. 4932132
MKPHRLCMTHHLILAYGLHSKMEVYRPHKAYPIEMAQFHSPDYVEFLQRINPENQNLFPNEMARYNLGEDCPVFEDLFEFCQLYAGGTIDAARRLNNKLCDIAINWAGGLHHAKKCDASGFCYINDLVLGILELLKHHPRVLYIDIDVHHGDGVEEAFYFTDRVMTVSFHKFGDKFFPGTGDVKEIGEREGKFYAINVPLKDGIDDSSFNRLFRTVVEIYQPGAIVLQCGADSLARDRLGCFNLSIDGHAECVKFVKKFNLPLLVTGGGGYTKENVARCWTVETGILLDTELPNEIPENDYIKYFAPDFSLKIPGGHIENLNTKSYISSIKVQILENLRYIQHAPSVQMQEVPPDFYIPDFDEDEQNPDVRADQRSRDKQIQRDDEYFDGDNDNDAS

SEQ ID NO: 72407 - protein, 390 aa, Arabidopsis thaliana
  peptide (1)..(390): Ceres Seq. ID no. 4932133
MTHHLILAYGLHSKMEVYRPHKAYPIEMAQFHSPDYVEFLQRINPENQNLFPNEMARYNLGEDCPVFEDLFEFCQLYAGGTIDAARRLNNKLCDIAINWAGGLHHAKKCDASGFCYINDLVLGILELLKHHPRVLYIDIDVHHGDGVEEAFYFTDRVMTVSFHKFGDKFFPGTGDVKEIGEREGKFYAINVPLKDGIDDSSFNRLFRTVVEIYQPGAIVLQCGADSLARDRLGCFNLSIDGHAECVKFVKKFNLPLLVTGGGGYTKENVARCWTVETGILLDTELPNEIPENDYIKYFAPDFSLKIPGGHIENLNTKSYISSIKVQILENLRYIQHAPSVQMQEVPPDFYIPDFDEDEQNPDVRADQRSRDKQIQRDDEYFDGDNDNDAS

SEQ ID NO: 72408 - DNA, 1122 bp, Arabidopsis thaliana
  misc_feature (1)..(1122): Ceres Seq. ID no. 4932564
  misc_feature (1)..(1122): Ortholog of  Ceres SEQ ID NO 14308615 as cited in SEQ ID NO 58538
  misc_feature (1)..(1122): Ortholog of  Ceres SEQ ID NO 13585342 as cited in SEQ ID NO 63601
atggctggagaagaaatagagagggagaagaaatctgcagcatctgcaagaactcacaccagaaacaacactcaacaaagttcttcttctggttatctgaaaacgcttctcctggtaacgttcgtcggagttttagcatgggtttatcaaacaatccaaccaccacccgccaaaatcgtcggctctcccggtggacccaccgtgacatcaccgaggatcaaactgagagacggaagacatctggcttacacagaattcggaatccctagagacgaagccaagttcaagatcataaacatccacggcttcgattcttgtatgcgagactcgcatttcgccaatttcttatcgccggctcttgtggaggaattgaggatatacattgtgtcttttgatcgtcctggttatggagagagtgatcctaacctgaatgggtcaccaagaagcatagcattggatatagaagagcttgctgatgggttaggactaggacctcagttctatctctttggttactccatgggtggtgaaattacatgggcatgccttaactacattcctcacaggttagcaggagctgcccttgtagctccagcgattaactattggtggagaaacttaccgggagatttaacaagagaagctttctctcttatgcatcctgcagatcaatggtcacttcgagtagctcattatgctccttggcttacatattggtggaacactcagaaatggttcccaatctccaatgtgattgccggtaatcccattattttctcacgtcaggacatggagatcttgtcgaagctcggattcgtcaatccaaatcgggcatacataagacaacaaggtgaatatgtaagcttacaccgagatttgaatgtcgcattttcaagctgggagtttgatccgttagaccttcaagatccgttcccgaacaacaatggctcagttcacgtatggaatggcgatgaggataagtttgtgccagtaaagcttcaacggtatgtcgcgtcaaagctgccatggattcgttaccatgaaatatctggatcaggacattttgtaccatttgtggaaggtatgactgataagatcatcaagtcacttttgaagatgtaa

SEQ ID NO: 72409 - protein, 373 aa, Arabidopsis thaliana
  peptide (1)..(373): Ceres Seq. ID no. 4932565
MAGEEIEREKKSAASARTHTRNNTQQSSSSGYLKTLLLVTFVGVLAWVYQTIQPPPAKIVGSPGGPTVTSPRIKLRDGRHLAYTEFGIPRDEAKFKIINIHGFDSCMRDSHFANFLSPALVEELRIYIVSFDRPGYGESDPNLNGSPRSIALDIEELADGLGLGPQFYLFGYSMGGEITWACLNYIPHRLAGAALVAPAINYWWRNLPGDLTREAFSLMHPADQWSLRVAHYAPWLTYWWNTQKWFPISNVIAGNPIIFSRQDMEILSKLGFVNPNRAYIRQQGEYVSLHRDLNVAFSSWEFDPLDLQDPFPNNNGSVHVWNGDEDKFVPVKLQRYVASKLPWIRYHEISGSGHFVPFVEGMTDKIIKSLLKM

SEQ ID NO: 72410 - protein, 267 aa, Arabidopsis thaliana
  peptide (1)..(267): Ceres Seq. ID no. 4932566
MRDSHFANFLSPALVEELRIYIVSFDRPGYGESDPNLNGSPRSIALDIEELADGLGLGPQFYLFGYSMGGEITWACLNYIPHRLAGAALVAPAINYWWRNLPGDLTREAFSLMHPADQWSLRVAHYAPWLTYWWNTQKWFPISNVIAGNPIIFSRQDMEILSKLGFVNPNRAYIRQQGEYVSLHRDLNVAFSSWEFDPLDLQDPFPNNNGSVHVWNGDEDKFVPVKLQRYVASKLPWIRYHEISGSGHFVPFVEGMTDKIIKSLLKM

SEQ ID NO: 72411 - protein, 200 aa, Arabidopsis thaliana
  peptide (1)..(200): Ceres Seq. ID no. 4932567
MGGEITWACLNYIPHRLAGAALVAPAINYWWRNLPGDLTREAFSLMHPADQWSLRVAHYAPWLTYWWNTQKWFPISNVIAGNPIIFSRQDMEILSKLGFVNPNRAYIRQQGEYVSLHRDLNVAFSSWEFDPLDLQDPFPNNNGSVHVWNGDEDKFVPVKLQRYVASKLPWIRYHEISGSGHFVPFVEGMTDKIIKSLLKM

SEQ ID NO: 72412 - DNA, 1389 bp, Arabidopsis thaliana
  misc_feature (1)..(1389): Ceres Seq. ID no. 4932610
  misc_feature (1)..(1389): Ortholog of  Ceres SEQ ID NO 13655463 as cited in SEQ ID NO 69035
  misc_feature (1)..(1389): Ortholog of  Ceres SEQ ID NO 15180063 as cited in SEQ ID NO 0
atgaagaactcagtaaacccgacaataaacggtgtaacgggtcaagaatgtaacccggttccgaattctacacaaactatatgtttcactagtgatgctgagtttgtggatccggatccgggtcattcgtttgaagctgttgagcaacaagtattcgggtctgggccgggtcagatcccgtccatgatgggtttcgttgagcaagcgctttccatgccgggaaatttgtcggagactgtaatgaaaggctttaggcctgaagctgttccggtttatgctgagctggttaaggaattcgctgtgttcgaccggtggttttcttcaattcccggtccgactcaaccaaaccggttatttgtctattcggctacctcacatggttccactagccatgtcaagaaacaactcgctcaagggtatccacagaagacgatatttgattcgcttcatagcaacgacatcgacttcggaatatactttcagaatattccgaccacattattctaccgtaatctccgacagctaaagtacattttcaatttgcatcaatacgatttgaaattcaagaaagacgcggccaaaggaaagttaccgagcttaaccgtaatcgaaccgaggtatttcgatctcaaaggtttaccggctaacgatgatcacccgtcgcatgacgtggctaacggtcaaaagctggttaaagaagtgtacgaggcacttaggtcgagtccacagtggaacgagacgctcctagttataacctatgatgagcatggtgggttctatgatcacgtcaagactccttatgtcggtataccaaatcccgatgggaatactggaccggctcctggtttctttaaattcgaccggttaggtgttcgtgttcctaccattatggtttcgccttggattcaaaaaggaaccgtcgtaagtgaagcaaaaggaccaacagagagctcagagtacgagcattcatcaataccagcgacaatcaagaaactcttcaatctctcttccaatttcttaacacatagagatgcatgggctgctactttcgaagacgttgtatctcacttaaccactcctcgaaccgattgtcccatgactctacctgaagttgcacctatgagagccactgagcctaaagaagacgctgctctttctgagtttcaaggtgaagtggttcagcttgcagcggttctcaatggtgatcacttcctcagtagcttcccggaagaaattggaaagaagatgactgtgaaacaagctcatgagtatgtcaaaggagctacttctcggttcattagagctagtaaagaggcaatgaagcttggtgccgataaatctgctattgtcgatatgcgatcttcgctcactacacggccacacaactga

SEQ ID NO: 72413 - protein, 462 aa, Arabidopsis thaliana; identical to SEQ ID NO: 70257
  peptide (1)..(462): Ceres Seq. ID no. 4932611

SEQ ID NO: 72414 - protein, 401 aa, Arabidopsis thaliana; identical to SEQ ID NO: 70258
  peptide (1)..(401): Ceres Seq. ID no. 4932612

SEQ ID NO: 72415 - protein, 400 aa, Arabidopsis thaliana
  peptide (1)..(400): Ceres Seq. ID no. 4932613
MGFVEQALSMPGNLSETVMKGFRPEAVPVYAELVKEFAVFDRWFSSIPGPTQPNRLFVYSATSHGSTSHVKKQLAQGYPQKTIFDSLHSNDIDFGIYFQNIPTTLFYRNLRQLKYIFNLHQYDLKFKKDAAKGKLPSLTVIEPRYFDLKGLPANDDHPSHDVANGQKLVKEVYEALRSSPQWNETLLVITYDEHGGFYDHVKTPYVGIPNPDGNTGPAPGFFKFDRLGVRVPTIMVSPWIQKGTVVSEAKGPTESSEYEHSSIPATIKKLFNLSSNFLTHRDAWAATFEDVVSHLTTPRTDCPMTLPEVAPMRATEPKEDAALSEFQGEVVQLAAVLNGDHFLSSFPEEIGKKMTVKQAHEYVKGATSRFIRASKEAMKLGADKSAIVDMRSSLTTRPHN

SEQ ID NO: 72416 - DNA, 3555 bp, Arabidopsis thaliana
  misc_feature (1)..(3555): Ceres Seq. ID no. 4932870
  misc_feature (1)..(3555): Ortholog of  Ceres SEQ ID NO 13657677 as cited in SEQ ID NO 66119
  misc_feature (1)..(3555): Ortholog of  Ceres SEQ ID NO 14301550 as cited in SEQ ID NO 66519
atgcgtagattctctaccattgttgatcttctcatcagcaaaaaaccatcttctcaagcaaattctagaattgatctcatttgtaaaaggttccatatttcaagagttctcaataacgatttcgtagaatcaacagagagaaagaatggggttggtttagtttgtccagagaagcatgaagatgaattcgccggtgaagtcgagaagatttacagaattttgcggaatcaccattctagagttccaaaattggagcttgctcttaacgaatcaggtattgatctgcgacccgggttgatcatacgagtgttgagtcgttgtggcgatgctgggaatctaggttatagattctttctgtgggcaacgaagcaacctggttattttcatagctatgaagtgtgtaaatcaatggtgatgattcttagtaaaatgcgacaatttggagctgtttggggtttaattgaagagatgaggaagacgaatccggagttgattgagccggagttgttcgttgtattgatgcggaggtttgcttctgctaacatggtgaagaaagcagttgaggtgctcgacgaaatgcctaagtatgggttagagcctgacgagtatgtttttggttgtttgttagatgctttgtgtaagaacggtagtgttaaggaggcttcaaaggtttttgaggatatgagagagaagtttcctccgaatttgcggtattttacttcgttgttgtatggttggtgtagggaagggaagttgatggaagctaaagaagttttggttcagatgaaggaagctgggcttgagcctgacattgtggttttcactaacttacttagtggatatgctcatgctgggaaaatggcggatgcgtatgatcttatgaatgatatgagaaagagagggtttgagccgaatgtgaattgttacacggttttgatccaggcgttgtgtaggacggagaagagaatggatgaggcgatgcgggtttttgttgagatggagaggtatggatgtgaggctgatattgtgacttataccgcgttgataagtgggttttgtaaatggggaatgattgataaaggttatagtgttttagatgatatgagaaagaaaggagtcatgccgtcgcaagtaacatatatgcagataatggtggctcatgagaagaaagaacaatttgaagagtgtttggagttgattgagaagatgaagcgaagaggttgtcatcctgatcttctcatttacaatgtagtgataagattggcttgtaagttaggggaagtgaaagaagctgttcggttatggaacgaaatggaagctaatgggctaagccctggagttgatacgtttgttattatgatcaacggatttacaagccaaggtttcctaatcgaagcctgtaatcacttcaaagaaatggtaagccgaggaatattctctgcgcctcaatatggaacgctgaagtcattgcttaataaccttgttagagatgataagctcgaaatggcgaaagatgtatggagttgcatatccaacaaaacctcttcctgtgagctgaatgtatcagcttggacaatatggatccatgctttgtacgcaaaaggtcacgtgaaggaagcgtgttcgtattgtcttgatatgatggagatggatttgatgccgcaacctaatacttatgcgaaacttatgaaaggattgaataaactgtataataggacgatcgctgcagagattacagagaaggtggtgaagatggcaagtgagagagagatgagttttaagatgtataagaagaaaggtgaggaggatttgattgagaaagctaaacctaaagggaataaagaaggaaagaagaaagggacagatcatcaaaggtataagggaagagtgtctcttgctcggaaccgtcttaggtcggaaacgccatcatcttttcttgctcgagaccgtcttaggtcaaaaacgccatcatcgtctccattttcttcgaagcggcatacgcctaagacaagcgaaatagaagaagagtcgactccaaaagattcagttttgttaaaccctaaagatccttcaagcgcacctaagctcttccttgtacagcctcgtttagcaccgccaaagtatctacaagcgaagctgaacgaagcgctttgtctcgcgaattcgcttgaagagcaacgatatgggtactttgaatctgatttctttgacaaggaattgccttctcatgttgttgttcaaaaccctgtccgtagatcgtctaaacctcgcgaagaagttgatgctgttttcgtaaacgccattttgaccgctatccaacaacggaatttagagcgaatatgggcaaaacctgtcttagaccgtgtgggtcttataatcgaaatatttaatgctcatgcgcatacaaaggaagcaaaactacaggctgagttagctgctttgatgtacaataagagcagactggttcgagtgcgtggtactgatggacgccatacttttgggcagtttggagaagctgaagttgtcagtgcccgagggagagcaggaagcaagggaaccggtggcggttttgtaggtggtgcaggagaaactgagcttcagcttcaacgccgaagaatatcagaccggaggattcgcttgttatcccaaattaaagaagcccagcgaacacggctattgcagcgtgctggacgtaagaaaagagtggggttagagggtgagagttcaggaaccattgctgttgttggttacacaaatgctggaaaatcgactctgataagtgcactaacaaagactgctctctactgcaatgagcgattgtttgccacattagatcctacactcaagagtgcccatcttccttctggaaactttgtgcttcttagtgacactgtcggattcatatcagatctgcctatacagctggtgaaagcttttcaatcgactctggaagaagttgttgaagctgatctacttctgcatgtagttgattcaacagctccaaatatcgaggagcatcgttcaacagtgcttcatgtcctaaatcaaattggagtacctgaagagaagcttcaaaatatgattgaagtctggaataagattgattatgaagaagacgaagtggaggaagagaaatatctagatgatggcgaaggagtaggagaagaagacgaagacgaagctgatttaaaagctgaagaaactgttgatgcatctgaagcaacagtagatgaagaccaaatccaaaacggagacggtgacgacgctgatgggtggctattgtctgaagatgaaaatgctgacgaccctgagttctggaaagttccggaagttgctaaagtagatgctgcaaataagaaaggaccagatgttagagtttctgcattaaccggagttggtttgaaggagttgctgtatcttattgatgacaaaatgaaagagaagaagctcaagtctccgactatagtcgaaaggagtgagcttcataagcgtaaatggaggccacctcgtaacgatgatgaagaggagagattaatcccgttagatcaacgttga

SEQ ID NO: 72417 - protein, 1184 aa, Arabidopsis thaliana
  peptide (1)..(1184): Ceres Seq. ID no. 4932871
MRRFSTIVDLLISKKPSSQANSRIDLICKRFHISRVLNNDFVESTERKNGVGLVCPEKHEDEFAGEVEKIYRILRNHHSRVPKLELALNESGIDLRPGLIIRVLSRCGDAGNLGYRFFLWATKQPGYFHSYEVCKSMVMILSKMRQFGAVWGLIEEMRKTNPELIEPELFVVLMRRFASANMVKKAVEVLDEMPKYGLEPDEYVFGCLLDALCKNGSVKEASKVFEDMREKFPPNLRYFTSLLYGWCREGKLMEAKEVLVQMKEAGLEPDIVVFTNLLSGYAHAGKMADAYDLMNDMRKRGFEPNVNCYTVLIQALCRTEKRMDEAMRVFVEMERYGCEADIVTYTALISGFCKWGMIDKGYSVLDDMRKKGVMPSQVTYMQIMVAHEKKEQFEECLELIEKMKRRGCHPDLLIYNVVIRLACKLGEVKEAVRLWNEMEANGLSPGVDTFVIMINGFTSQGFLIEACNHFKEMVSRGIFSAPQYGTLKSLLNNLVRDDKLEMAKDVWSCISNKTSSCELNVSAWTIWIHALYAKGHVKEACSYCLDMMEMDLMPQPNTYAKLMKGLNKLYNRTIAAEITEKVVKMASEREMSFKMYKKKGEEDLIEKAKPKGNKEGKKKGTDHQRYKGRVSLARNRLRSETPSSFLARDRLRSKTPSSSPFSSKRHTPKTSEIEEESTPKDSVLLNPKDPSSAPKLFLVQPRLAPPKYLQAKLNEALCLANSLEEQRYGYFESDFFDKELPSHVVVQNPVRRSSKPREEVDAVFVNAILTAIQQRNLERIWAKPVLDRVGLIIEIFNAHAHTKEAKLQAELAALMYNKSRLVRVRGTDGRHTFGQFGEAEVVSARGRAGSKGTGGGFVGGAGETELQLQRRRISDRRIRLLSQIKEAQRTRLLQRAGRKKRVGLEGESSGTIAVVGYTNAGKSTLISALTKTALYCNERLFATLDPTLKSAHLPSGNFVLLSDTVGFISDLPIQLVKAFQSTLEEVVEADLLLHVVDSTAPNIEEHRSTVLHVLNQIGVPEEKLQNMIEVWNKIDYEEDEVEEEKYLDDGEGVGEEDEDEADLKAEETVDASEATVDEDQIQNGDGDDADGWLLSEDENADDPEFWKVPEVAKVDAANKKGPDVRVSALTGVGLKELLYLIDDKMKEKKLKSPTIVERSELHKRKWRPPRNDDEEERLIPLDQR

SEQ ID NO: 72418 - protein, 1048 aa, Arabidopsis thaliana
  peptide (1)..(1048): Ceres Seq. ID no. 4932872
MVMILSKMRQFGAVWGLIEEMRKTNPELIEPELFVVLMRRFASANMVKKAVEVLDEMPKYGLEPDEYVFGCLLDALCKNGSVKEASKVFEDMREKFPPNLRYFTSLLYGWCREGKLMEAKEVLVQMKEAGLEPDIVVFTNLLSGYAHAGKMADAYDLMNDMRKRGFEPNVNCYTVLIQALCRTEKRMDEAMRVFVEMERYGCEADIVTYTALISGFCKWGMIDKGYSVLDDMRKKGVMPSQVTYMQIMVAHEKKEQFEECLELIEKMKRRGCHPDLLIYNVVIRLACKLGEVKEAVRLWNEMEANGLSPGVDTFVIMINGFTSQGFLIEACNHFKEMVSRGIFSAPQYGTLKSLLNNLVRDDKLEMAKDVWSCISNKTSSCELNVSAWTIWIHALYAKGHVKEACSYCLDMMEMDLMPQPNTYAKLMKGLNKLYNRTIAAEITEKVVKMASEREMSFKMYKKKGEEDLIEKAKPKGNKEGKKKGTDHQRYKGRVSLARNRLRSETPSSFLARDRLRSKTPSSSPFSSKRHTPKTSEIEEESTPKDSVLLNPKDPSSAPKLFLVQPRLAPPKYLQAKLNEALCLANSLEEQRYGYFESDFFDKELPSHVVVQNPVRRSSKPREEVDAVFVNAILTAIQQRNLERIWAKPVLDRVGLIIEIFNAHAHTKEAKLQAELAALMYNKSRLVRVRGTDGRHTFGQFGEAEVVSARGRAGSKGTGGGFVGGAGETELQLQRRRISDRRIRLLSQIKEAQRTRLLQRAGRKKRVGLEGESSGTIAVVGYTNAGKSTLISALTKTALYCNERLFATLDPTLKSAHLPSGNFVLLSDTVGFISDLPIQLVKAFQSTLEEVVEADLLLHVVDSTAPNIEEHRSTVLHVLNQIGVPEEKLQNMIEVWNKIDYEEDEVEEEKYLDDGEGVGEEDEDEADLKAEETVDASEATVDEDQIQNGDGDDADGWLLSEDENADDPEFWKVPEVAKVDAANKKGPDVRVSALTGVGLKELLYLIDDKMKEKKLKSPTIVERSELHKRKWRPPRNDDEEERLIPLDQR

SEQ ID NO: 72419 - protein, 1046 aa, Arabidopsis thaliana
  peptide (1)..(1046): Ceres Seq. ID no. 4932873
MILSKMRQFGAVWGLIEEMRKTNPELIEPELFVVLMRRFASANMVKKAVEVLDEMPKYGLEPDEYVFGCLLDALCKNGSVKEASKVFEDMREKFPPNLRYFTSLLYGWCREGKLMEAKEVLVQMKEAGLEPDIVVFTNLLSGYAHAGKMADAYDLMNDMRKRGFEPNVNCYTVLIQALCRTEKRMDEAMRVFVEMERYGCEADIVTYTALISGFCKWGMIDKGYSVLDDMRKKGVMPSQVTYMQIMVAHEKKEQFEECLELIEKMKRRGCHPDLLIYNVVIRLACKLGEVKEAVRLWNEMEANGLSPGVDTFVIMINGFTSQGFLIEACNHFKEMVSRGIFSAPQYGTLKSLLNNLVRDDKLEMAKDVWSCISNKTSSCELNVSAWTIWIHALYAKGHVKEACSYCLDMMEMDLMPQPNTYAKLMKGLNKLYNRTIAAEITEKVVKMASEREMSFKMYKKKGEEDLIEKAKPKGNKEGKKKGTDHQRYKGRVSLARNRLRSETPSSFLARDRLRSKTPSSSPFSSKRHTPKTSEIEEESTPKDSVLLNPKDPSSAPKLFLVQPRLAPPKYLQAKLNEALCLANSLEEQRYGYFESDFFDKELPSHVVVQNPVRRSSKPREEVDAVFVNAILTAIQQRNLERIWAKPVLDRVGLIIEIFNAHAHTKEAKLQAELAALMYNKSRLVRVRGTDGRHTFGQFGEAEVVSARGRAGSKGTGGGFVGGAGETELQLQRRRISDRRIRLLSQIKEAQRTRLLQRAGRKKRVGLEGESSGTIAVVGYTNAGKSTLISALTKTALYCNERLFATLDPTLKSAHLPSGNFVLLSDTVGFISDLPIQLVKAFQSTLEEVVEADLLLHVVDSTAPNIEEHRSTVLHVLNQIGVPEEKLQNMIEVWNKIDYEEDEVEEEKYLDDGEGVGEEDEDEADLKAEETVDASEATVDEDQIQNGDGDDADGWLLSEDENADDPEFWKVPEVAKVDAANKKGPDVRVSALTGVGLKELLYLIDDKMKEKKLKSPTIVERSELHKRKWRPPRNDDEEERLIPLDQR

SEQ ID NO: 72420 - DNA, 1956 bp, Arabidopsis thaliana
  misc_feature (1)..(1956): Ceres Seq. ID no. 4932983
  misc_feature (1)..(1956): Ortholog of  Ceres SEQ ID NO 15175269 as cited in SEQ ID NO 63840
  misc_feature (1)..(1956): Ortholog of  Ceres SEQ ID NO 15176141 as cited in SEQ ID NO 0
atggcggttttgtgggtcgaacaatctccttgtagtaacaacggctataagaataagatttggtgcgcggagattgctcttgaaaaacaagaaagttgtgaaatttggggagaagttgagtggtttggtcatgtgcttacagttccttcaacattcattgtccgaagctcaaatttcattgtcgtgattctcttcctcaacctcgtcactttcttctcccttgtctcctccaatgaacttgtctttgctgtgggtgaaactggttcactacaagtgactccaagaacagaggtgatatattcacctggtctgaaacgaggtataacatcgatatgtgagagattacatatccatggattacaaagaagacttgagcacattgatagatatgcacattcactaaagttgactcttttgagtaataatgcttccaacagtatcgacgtttgcttccacaggaattcgtcgcgtgcaattggaatgtgtcctgataatcagtggaagagagtgtccaaagggttaccttgggttgggataatgtcaccttttgactataagattcttgatataagaacatttggtggctcatctaatgtcagcaccgtggagttggttgctaaacaagagtttttcatataccggattgtgtttttaatcatggggatagtgttactgagtttggcttctagacttagcaaatcagttgcgttttactatatcggtgcaatgtctattgggattgtcattcttgtaactcttatcattaatcaggggataaagcgtctaccaactagagggaagagtcgttttcagttatttttctactcgtctatgattggtgtgggaggttactttcttcaatacatacgcggtttagttcaagatttgctaatgcagatagaaatcagtgaagatttgtacatccctctggcgattcttttggttgtgtttgtatttatgttgggagcgtggtcaggattttggactgtcaagaaatttgttgtgacaaaagatggttctgttgacattagtacatcaatctttgtctcttggtccatccgagcttttgctgtggctctgatccttcagagctctttagatccattacttgctggaggagcgttgataactggaattctcatctcattgattctaaagagtattagcagaaagctgttagctcaaagaatatatgagcaagatgatgaaactgagagttgtagccccggcttgatccatgctacctcgtttgcttctcctcttcctagaggttccaacaagaagttgaggacagtaccattatctgagtcagatatctttccttcttcattccacaaaacaccagaagggagaaggaagctaacgaaggaagagttgcaaaaattcactaaagagagcacggaaaatgcattgaaggaattggtttcttcacctgaagaaggttcctctggttctgaaaagcaagcagctaggggaacttctgaaccagtcggagagtgtacgaagaaaaagaagcaaagagttcgttataaagaaagaaataaaccctcagataagagcataacagagaagaagaagaagatgtcttatcaagacccacaacatcccgttagtgctcctcctcctcaagggtatcctcctaaggaaggatatccaccagcagggtatcctccaccagcaggttatcctccaccacaatatcctcaagcgggatatcctccagcaggttatcctccaccgcagcaaggatacggtcaaggatatccagcacaaggctatcctccaccgcaatatcctcaaggtcatccaccacaatatccttatcaaggtcctccaccaccgcattatggtcaggctccaccgaaaaataagaaagataagaaggattcaggaggcttcatggaaggatgtttggctatgctctgctgttgcgttctcttggaagcttgcttttga

SEQ ID NO: 72421 - protein, 651 aa, Arabidopsis thaliana
  peptide (1)..(651): Ceres Seq. ID no. 4932984
MAVLWVEQSPCSNNGYKNKIWCAEIALEKQESCEIWGEVEWFGHVLTVPSTFIVRSSNFIVVILFLNLVTFFSLVSSNELVFAVGETGSLQVTPRTEVIYSPGLKRGITSICERLHIHGLQRRLEHIDRYAHSLKLTLLSNNASNSIDVCFHRNSSRAIGMCPDNQWKRVSKGLPWVGIMSPFDYKILDIRTFGGSSNVSTVELVAKQEFFIYRIVFLIMGIVLLSLASRLSKSVAFYYIGAMSIGIVILVTLIINQGIKRLPTRGKSRFQLFFYSSMIGVGGYFLQYIRGLVQDLLMQIEISEDLYIPLAILLVVFVFMLGAWSGFWTVKKFVVTKDGSVDISTSIFVSWSIRAFAVALILQSSLDPLLAGGALITGILISLILKSISRKLLAQRIYEQDDETESCSPGLIHATSFASPLPRGSNKKLRTVPLSESDIFPSSFHKTPEGRRKLTKEELQKFTKESTENALKELVSSPEEGSSGSEKQAARGTSEPVGECTKKKKQRVRYKERNKPSDKSITEKKKKMSYQDPQHPVSAPPPQGYPPKEGYPPAGYPPPAGYPPPQYPQAGYPPAGYPPPQQGYGQGYPAQGYPPPQYPQGHPPQYPYQGPPPPHYGQAPPKNKKDKKDSGGFMEGCLAMLCCCVLLEACF

SEQ ID NO: 72422 - protein, 491 aa, Arabidopsis thaliana
  peptide (1)..(491): Ceres Seq. ID no. 4932985
MCPDNQWKRVSKGLPWVGIMSPFDYKILDIRTFGGSSNVSTVELVAKQEFFIYRIVFLIMGIVLLSLASRLSKSVAFYYIGAMSIGIVILVTLIINQGIKRLPTRGKSRFQLFFYSSMIGVGGYFLQYIRGLVQDLLMQIEISEDLYIPLAILLVVFVFMLGAWSGFWTVKKFVVTKDGSVDISTSIFVSWSIRAFAVALILQSSLDPLLAGGALITGILISLILKSISRKLLAQRIYEQDDETESCSPGLIHATSFASPLPRGSNKKLRTVPLSESDIFPSSFHKTPEGRRKLTKEELQKFTKESTENALKELVSSPEEGSSGSEKQAARGTSEPVGECTKKKKQRVRYKERNKPSDKSITEKKKKMSYQDPQHPVSAPPPQGYPPKEGYPPAGYPPPAGYPPPQYPQAGYPPAGYPPPQQGYGQGYPAQGYPPPQYPQGHPPQYPYQGPPPPHYGQAPPKNKKDKKDSGGFMEGCLAMLCCCVLLEACF

SEQ ID NO: 72423 - protein, 472 aa, Arabidopsis thaliana
  peptide (1)..(472): Ceres Seq. ID no. 4932986
MSPFDYKILDIRTFGGSSNVSTVELVAKQEFFIYRIVFLIMGIVLLSLASRLSKSVAFYYIGAMSIGIVILVTLIINQGIKRLPTRGKSRFQLFFYSSMIGVGGYFLQYIRGLVQDLLMQIEISEDLYIPLAILLVVFVFMLGAWSGFWTVKKFVVTKDGSVDISTSIFVSWSIRAFAVALILQSSLDPLLAGGALITGILISLILKSISRKLLAQRIYEQDDETESCSPGLIHATSFASPLPRGSNKKLRTVPLSESDIFPSSFHKTPEGRRKLTKEELQKFTKESTENALKELVSSPEEGSSGSEKQAARGTSEPVGECTKKKKQRVRYKERNKPSDKSITEKKKKMSYQDPQHPVSAPPPQGYPPKEGYPPAGYPPPAGYPPPQYPQAGYPPAGYPPPQQGYGQGYPAQGYPPPQYPQGHPPQYPYQGPPPPHYGQAPPKNKKDKKDSGGFMEGCLAMLCCCVLLEACF

SEQ ID NO: 72424 - DNA, 1227 bp, Arabidopsis thaliana
  misc_feature (1)..(1227): Ceres Seq. ID no. 4933133
  misc_feature (1)..(1227): Ortholog of  Ceres SEQ ID NO 12472626 as cited in SEQ ID NO 118
  misc_feature (1)..(1227): Ortholog of  Ceres SEQ ID NO 13594646 as cited in SEQ ID NO 52196
  misc_feature (1)..(1227): Ortholog of  Ceres SEQ ID NO 15178852 as cited in SEQ ID NO 0
atggctctccgagaagacgacgacgatgttaacatcggagaaaaagtagtcgacgtagaatcggagcttcagaagtaccggatcaattcgatcgaatcaacggttgtgattcgtcagttaccgacacaaggcattgccttcaagctctggatacctgcaacaactctcgtcacgcttttagataactaccgtcgtgacccaaacattagtcctctcaatcgcaccttctcgagttttcaatccgacggttcagattcttcttctccgattaacatcgtcgagctcggatctggaacgggaatcgtcggtatcgcagcggctgcgacactaggtgctaatgtcacggtgacggatctcccaaacgtaatcgagaatctcaaattcaacgccgacgcaaacgctcaagtcgtggctaagttcggtgggaaagtccacgtggcgtctcttcgttggggcgaaatcgatgacgtggaaagtttgggtcaaaacgttgacttgattctagcgtctgacgtggtttatcacgttcatctttatgaacctctcctcaaaacgctgcgttttctgctcttagaaggatcatccgagagagtgtttcttatggctcacctcaagagatggaagaaagaatcgatttttttcaagaaagctcggagattcttcgatgttgatgttatacattgtgatgatcctcaagaaggtgctagaatcggagttgtacttcgaacccgtgaccttgtaagcagagcacttctgattaaaatacagagaacgaagactgaggaaagagagaagaaaatgactctgggactgataaacgcgaatccagtggtgcaagctaagaaggaagggcttgttcgtagagaagatcaatatagagatgatgatataagagatccagaacacccttatactttggagcagctaagggttgtctctgaagaatctgttactgtcgatgacaagctcgatcgcatcctgataacgtttacaccgacgattcagcattgtagtatggcaaatataattggtctgtgtctgagagctaagcttaaagaatgtttgcaacttcattacaaggttgatatcagagtgtctccgggttctcacgctgatgaagtttcagttaacaaacaactgaatgataaagaaagagtggtggctgcattggagaatcctaatctccgtcagctcgtggatgagtgtatctactccgatgagatatga

SEQ ID NO: 72425 - protein, 408 aa, Arabidopsis thaliana
  peptide (1)..(408): Ceres Seq. ID no. 4933134
MALREDDDDVNIGEKVVDVESELQKYRINSIESTVVIRQLPTQGIAFKLWIPATTLVTLLDNYRRDPNISPLNRTFSSFQSDGSDSSSPINIVELGSGTGIVGIAAAATLGANVTVTDLPNVIENLKFNADANAQVVAKFGGKVHVASLRWGEIDDVESLGQNVDLILASDVVYHVHLYEPLLKTLRFLLLEGSSERVFLMAHLKRWKKESIFFKKARRFFDVDVIHCDDPQEGARIGVVLRTRDLVSRALLIKIQRTKTEEREKKMTLGLINANPVVQAKKEGLVRREDQYRDDDIRDPEHPYTLEQLRVVSEESVTVDDKLDRILITFTPTIQHCSMANIIGLCLRAKLKECLQLHYKVDIRVSPGSHADEVSVNKQLNDKERVVAALENPNLRQLVDECIYSDEI

SEQ ID NO: 72426 - protein, 208 aa, Arabidopsis thaliana
  peptide (1)..(208): Ceres Seq. ID no. 4933135
MAHLKRWKKESIFFKKARRFFDVDVIHCDDPQEGARIGVVLRTRDLVSRALLIKIQRTKTEEREKKMTLGLINANPVVQAKKEGLVRREDQYRDDDIRDPEHPYTLEQLRVVSEESVTVDDKLDRILITFTPTIQHCSMANIIGLCLRAKLKECLQLHYKVDIRVSPGSHADEVSVNKQLNDKERVVAALENPNLRQLVDECIYSDEI

SEQ ID NO: 72427 - DNA, 1449 bp, Arabidopsis thaliana
  misc_feature (1)..(1449): Ceres Seq. ID no. 4933244
  misc_feature (1)..(1449): Ortholog of  Ceres SEQ ID NO 15178873 as cited in SEQ ID NO 1103
  misc_feature (1)..(1449): Ortholog of  Ceres SEQ ID NO 15173557 as cited in SEQ ID NO 60031
  misc_feature (1)..(1449): Ortholog of  Ceres SEQ ID NO 13661430 as cited in SEQ ID NO 61258
  misc_feature (1)..(1449): Ortholog of  Ceres SEQ ID NO 13590940 as cited in SEQ ID NO 68653
  misc_feature (1)..(1449): Ortholog of  Ceres SEQ ID NO 15180040 as cited in SEQ ID NO 0
atatttttgtgattagaaattaggatcttacagaaatctttcaaaaaaaaattcataacagttccattttttttggtaagattcataaaaaaattcaagttaaatgcattttataaaaatgtaggaaaaactttcatcaaaaatcgttgagaagaacatacagtatatcttatccactctcttcctcatccacgcggcaaaggcacaaacctctttagaaaaatgtcgtcagcttattgttcctccgccgtggctgtatccgccgcagccaccgcttcctccgccgctacctttaatccattactctcctcccactccaattcccaactcttctatcgctttacaccaaaatccttcaaactcgttgccaattgccctaatccactaatcctccactcaaatatccgccgccaccgcttcttctgcgccgccgaaaccgaagctagttccgccgatgatgaaatccaggcatcagtagaagaagaagaagaggtagaagaagaaggagatgaaggtgaagaagaagtagaggaagaaaaacagacgacgcaagcgagtggtgaagaagggaggctttacgttgggaatttaccttacacaatcacttcttctgagctctctcagatttttggagaagctggaactgtcgtcgatgttcagattgtttatgataaagttactgatagaagcagaggatttggatttgtaacaatgggaagcattgaagaagctaaagaagcgatgcagatgtttaacagctctcaaattggtggtagaacggtgaaagtgaacttcccggaggtgccgagaggcggtgagaacgaagtaatgagaaccaaaatccgtgataataaccggagttatgttgatagtcctcataaggtatatgcaggaaaccttggttggaatctaacctcacaaggtttaaaggatgcatttggtgatcaacctggtgtgcttggtgctaaagttatctatgaaagaaatactgggaggtctagggggtttggtttcatctcgttcgagtcagcggaaaatgttcagtctgctttggctacaatgaatggcgtggaagttgaaggacgagcgctgaggctaaatttggcttcagagagagagaaacccactgtgtctcctccttccgtagaagaaggagaaaccgaggaggccagtctagagagtaacgaggtgctttcgaatgttagtgcatgaagcagcaaaagcacaatagattccggataagtttcagactgatctgctcgaggtgccaaaaatgaaaattttgttgtctttataaatgtgttgttttgttctagtgaggctgaagaagaagacaatatatgagatagaaaacaagagattgtttgtaatttttattgagaatgtttttaatccataaatggtgtaatgtaacaacatatcttgattccagtaaactgcaaatttctg

SEQ ID NO: 72428 - protein, 329 aa, Arabidopsis thaliana; identical to SEQ ID NO: 29498
  peptide (1)..(329): Ceres Seq. ID no. 4933245

SEQ ID NO: 72429 - protein, 166 aa, Arabidopsis thaliana; identical to SEQ ID NO: 29499
  peptide (1)..(166): Ceres Seq. ID no. 4933246

SEQ ID NO: 72430 - DNA, 678 bp, Arabidopsis thaliana
  misc_feature (1)..(678): Ceres Seq. ID no. 4933296
  misc_feature (1)..(678): Ortholog of  Ceres SEQ ID NO 15170857 as cited in SEQ ID NO 54658
atgatgtgctgtataaatgcacctttcaagtttatgaggggatcaaaagaccaacaacaagggcaatctcgtcctcaggaagcttcttcacagtcgccatggtactcgccttctttagttagctcgccaagctcatcccggcctcaaagttcaggtcagatttcagcacaagtatcaccgggtgaagcagctggcattatcgtcttcttgaaagacaaaagcgtggatgaactcaggaagcttctctctgacaaagatgcgtatcagcaatttctgctctctcttgaccaggtcaaagtccagaataatatcaaagatgagctccgtagagaaacattgcagctagctagagacaacttggagaaggagccacagataatggagctcagaaaccaatgcagaattatccgtacaactgagctcgcaactgcgcaagaaaagcttaatgagcttgagaggcaaaaagaagagatcctcaaattctactcccctggttctcttcttcataaacttcaagaggctatgaatcaggtggatgaagaatccgaagccctgcaagaaaagttcctagagaaggagattgatacagcagcatttgtgcagaaatacaagaagcttcgtactacctatcatcgacgagcattgatccatcttgccgctaaaacgtcaaacatttga

SEQ ID NO: 72431 - protein, 225 aa, Arabidopsis thaliana
  peptide (1)..(225): Ceres Seq. ID no. 4933297
MMCCINAPFKFMRGSKDQQQGQSRPQEASSQSPWYSPSLVSSPSSSRPQSSGQISAQVSPGEAAGIIVFLKDKSVDELRKLLSDKDAYQQFLLSLDQVKVQNNIKDELRRETLQLARDNLEKEPQIMELRNQCRIIRTTELATAQEKLNELERQKEEILKFYSPGSLLHKLQEAMNQVDEESEALQEKFLEKEIDTAAFVQKYKKLRTTYHRRALIHLAAKTSNI

SEQ ID NO: 72432 - protein, 224 aa, Arabidopsis thaliana
  peptide (1)..(224): Ceres Seq. ID no. 4933298
MCCINAPFKFMRGSKDQQQGQSRPQEASSQSPWYSPSLVSSPSSSRPQSSGQISAQVSPGEAAGIIVFLKDKSVDELRKLLSDKDAYQQFLLSLDQVKVQNNIKDELRRETLQLARDNLEKEPQIMELRNQCRIIRTTELATAQEKLNELERQKEEILKFYSPGSLLHKLQEAMNQVDEESEALQEKFLEKEIDTAAFVQKYKKLRTTYHRRALIHLAAKTSNI

SEQ ID NO: 72433 - protein, 214 aa, Arabidopsis thaliana
  peptide (1)..(214): Ceres Seq. ID no. 4933299
MRGSKDQQQGQSRPQEASSQSPWYSPSLVSSPSSSRPQSSGQISAQVSPGEAAGIIVFLKDKSVDELRKLLSDKDAYQQFLLSLDQVKVQNNIKDELRRETLQLARDNLEKEPQIMELRNQCRIIRTTELATAQEKLNELERQKEEILKFYSPGSLLHKLQEAMNQVDEESEALQEKFLEKEIDTAAFVQKYKKLRTTYHRRALIHLAAKTSNI

SEQ ID NO: 72434 - DNA, 654 bp, Arabidopsis thaliana
  misc_feature (1)..(654): Ceres Seq. ID no. 4933353
  misc_feature (1)..(654): Ortholog of  Ceres SEQ ID NO 15170857 as cited in SEQ ID NO 54658
atgttcaatttctggggatcaaaagaccaacaacaagggcaatctcgtcctcaggaagcttcttcacagtcgccatggtactcgccttctttagttagctcgccaagctcatcccggcctcaaagttcaggtcagatttcagcacaagtatcaccgggtgaagcagctggcattatcgtcttcttgaaagacaaaagcgtggatgaactcaggaagcttctctctgacaaagatgcgtatcagcaatttctgctctctcttgaccaggtcaaagtccagaataatatcaaagatgagctccgtagagaaacattgcagctagctagagacaacttggagaaggagccacagataatggagctcagaaaccaatgcagaattatccgtacaactgagctcgcaactgcgcaagaaaagcttaatgagcttgagaggcaaaaagaagagatcctcaaattctactcccctggttctcttcttcataaacttcaagaggctatgaatcaggtggatgaagaatccgaagccctgcaagaaaagttcctagagaaggagattgatacagcagcatttgtgcagaaatacaagaagcttcgtactacctatcatcgacgagcattgatccatcttgccgctaaaacgtcaaacatttga

SEQ ID NO: 72435 - protein, 217 aa, Arabidopsis thaliana
  peptide (1)..(217): Ceres Seq. ID no. 4933354
MFNFWGSKDQQQGQSRPQEASSQSPWYSPSLVSSPSSSRPQSSGQISAQVSPGEAAGIIVFLKDKSVDELRKLLSDKDAYQQFLLSLDQVKVQNNIKDELRRETLQLARDNLEKEPQIMELRNQCRIIRTTELATAQEKLNELERQKEEILKFYSPGSLLHKLQEAMNQVDEESEALQEKFLEKEIDTAAFVQKYKKLRTTYHRRALIHLAAKTSNI

SEQ ID NO: 72436 - DNA, 948 bp, Arabidopsis thaliana
  misc_feature (1)..(948): Ceres Seq. ID no. 4933359
  misc_feature (1)..(948): Ortholog of  Ceres SEQ ID NO 14314092 as cited in SEQ ID NO 62788
  misc_feature (1)..(948): Ortholog of  Ceres SEQ ID NO 13655302 as cited in SEQ ID NO 63307
  misc_feature (1)..(948): Ortholog of  Ceres SEQ ID NO 13597380 as cited in SEQ ID NO 64054
  misc_feature (1)..(948): Ortholog of  Ceres SEQ ID NO 12625474 as cited in SEQ ID NO 64169
  misc_feature (1)..(948): Ortholog of  Ceres SEQ ID NO 13597502 as cited in SEQ ID NO 64681
atgagagtttcggggtttagagttcttctcttggtttcttgtttcttctgcaaatccaaaggagctgttgttcctgcactcatcatgtttggcgactccattgttgacgttggcaacaacaataacttactcagcattgtcaaatccaactttcttccttacggtagagacttcatcgaccaaagacccaccggaagattctgcaacggaaaactcgctgtagatttctcagccgagtaccttggtttctcttcatacccacctgcattcctaagccgggaagcaagcaacgagaatatcctgatcggtgccaactttgcatcagcttcttcaggatactatgatgccacatctgttccatttggctcgatctccttaacacgacagctgagctattacagggcgtatcaaaatagagtaacgagaatgatcgggagggggaacgcgcgcatactgttctctagaggtatccacattttgagtgcgggatctagcgactttcttcagaattattacatcaatcctctactcaacatcctaaatacacctgatcagttcgctgacattctcctgagatccttctcagaattcatccagaatctgtatgaactaggagcaaggagaatcggagtgatatcgctaccgccgatgggttgcctgcctgcagctatcactcttttcggtgcaggaaacaaaagttgtgttgagagactgaacaatgatgctatcatgttcaatactaaacttgagaacacaacccggttactgatgaatagacactcaggcctcagactcgtcgcctttaatgtctaccaacctttcctggacatcatcaccaacccaactgacaatggatatgtgttttgggatggatttcatcccacagaggctgtaaacgagctgttggctggtcaactactgggtcaagggatttctctaatcaattga

SEQ ID NO: 72437 - protein, 315 aa, Arabidopsis thaliana
  peptide (1)..(315): Ceres Seq. ID no. 4933360
MRVSGFRVLLLVSCFFCKSKGAVVPALIMFGDSIVDVGNNNNLLSIVKSNFLPYGRDFIDQRPTGRFCNGKLAVDFSAEYLGFSSYPPAFLSREASNENILIGANFASASSGYYDATSVPFGSISLTRQLSYYRAYQNRVTRMIGRGNARILFSRGIHILSAGSSDFLQNYYINPLLNILNTPDQFADILLRSFSEFIQNLYELGARRIGVISLPPMGCLPAAITLFGAGNKSCVERLNNDAIMFNTKLENTTRLLMNRHSGLRLVAFNVYQPFLDIITNPTDNGYVFWDGFHPTEAVNELLAGQLLGQGISLIN

SEQ ID NO: 72438 - protein, 287 aa, Arabidopsis thaliana
  peptide (1)..(287): Ceres Seq. ID no. 4933361
MFGDSIVDVGNNNNLLSIVKSNFLPYGRDFIDQRPTGRFCNGKLAVDFSAEYLGFSSYPPAFLSREASNENILIGANFASASSGYYDATSVPFGSISLTRQLSYYRAYQNRVTRMIGRGNARILFSRGIHILSAGSSDFLQNYYINPLLNILNTPDQFADILLRSFSEFIQNLYELGARRIGVISLPPMGCLPAAITLFGAGNKSCVERLNNDAIMFNTKLENTTRLLMNRHSGLRLVAFNVYQPFLDIITNPTDNGYVFWDGFHPTEAVNELLAGQLLGQGISLIN

SEQ ID NO: 72439 - protein, 173 aa, Arabidopsis thaliana
  peptide (1)..(173): Ceres Seq. ID no. 4933362
MIGRGNARILFSRGIHILSAGSSDFLQNYYINPLLNILNTPDQFADILLRSFSEFIQNLYELGARRIGVISLPPMGCLPAAITLFGAGNKSCVERLNNDAIMFNTKLENTTRLLMNRHSGLRLVAFNVYQPFLDIITNPTDNGYVFWDGFHPTEAVNELLAGQLLGQGISLIN

SEQ ID NO: 72440 - DNA, 1179 bp, Arabidopsis thaliana
  misc_feature (1)..(1179): Ceres Seq. ID no. 4933703
  misc_feature (1)..(1179): Ortholog of  Ceres SEQ ID NO 13654989 as cited in SEQ ID NO 63117
  misc_feature (1)..(1179): Ortholog of  Ceres SEQ ID NO 13655640 as cited in SEQ ID NO 63844
  misc_feature (1)..(1179): Ortholog of  Ceres SEQ ID NO 13584744 as cited in SEQ ID NO 69137
atggcttttaagaaaaggaatgaaatttgcaagaatcttcttcctagcagtagtggtctcgatgatcttcatctctcgagctgtaaatcttcatcatcagctacagctcataagacagaaggagaaatccttagctcaacgaccgtcaaaagctttagctttaatgaacttaaactcgctactagaaacttcagatcggactctgttgttggagaaggtggctttggttgtgtctttagaggttggcttgatgagactactcttactcctaccaaatctagctctggtcttgttattgctgttaaacgacttaaccctgatggttttcaaggtcaccgagaatggctgacagagattaactatttggggcagttaagtcacccgaatttggttaaattgattggttattgcttggaagatgaacaacggcttcttgtgtatgagtttatgcacaagggtagtcttgagaatcatctgtttgcaaatggaaataaggattttaagccgctatcttggattctacggattaaggttgcacttgatgcagctaaaggtcttgcatttcttcatagtgatcccgtcaaagtcatttacagagacatcaaggcgtcaaacatcttactggactcggacttcaacgcaaagctttcagactttggtttagcgagagacggtccaatgggagaacaaagttatgttagtacaagggtcatgggtacttttgggtacgcagctcctgagtatgtctcaacaggccacttaaatgctagaagcgacgtatacagtttcggggttgttctgctagaactactatgtggaaggcaagcactagaccataaccgcccggccaaggagcaaaaccttgtggattgggctcgaccatacctcacaagcaggcgaaaggttctactaattgtggacactcggcttaactcacagtacaaacccgaaggagcagtgagactggcaagcattgctgtgcaatgcctatcattcgaacccaaatcacgtccgaccatggaccaagtggttcgagccttggtacagctgcaagacagcgtggttaaaccggccaatgttgacccgcttaaggttaaggataccaagaaacttgtgggattgaaaacagaagacaagtaccagagaaacggtttaaacaaaaaaaccgttggattgtag

SEQ ID NO: 72441 - protein, 392 aa, Arabidopsis thaliana
  peptide (1)..(392): Ceres Seq. ID no. 4933704
MAFKKRNEICKNLLPSSSGLDDLHLSSCKSSSSATAHKTEGEILSSTTVKSFSFNELKLATRNFRSDSVVGEGGFGCVFRGWLDETTLTPTKSSSGLVIAVKRLNPDGFQGHREWLTEINYLGQLSHPNLVKLIGYCLEDEQRLLVYEFMHKGSLENHLFANGNKDFKPLSWILRIKVALDAAKGLAFLHSDPVKVIYRDIKASNILLDSDFNAKLSDFGLARDGPMGEQSYVSTRVMGTFGYAAPEYVSTGHLNARSDVYSFGVVLLELLCGRQALDHNRPAKEQNLVDWARPYLTSRRKVLLIVDTRLNSQYKPEGAVRLASIAVQCLSFEPKSRPTMDQVVRALVQLQDSVVKPANVDPLKVKDTKKLVGLKTEDKYQRNGLNKKTVGL

SEQ ID NO: 72442 - protein, 243 aa, Arabidopsis thaliana
  peptide (1)..(243): Ceres Seq. ID no. 4933705
MHKGSLENHLFANGNKDFKPLSWILRIKVALDAAKGLAFLHSDPVKVIYRDIKASNILLDSDFNAKLSDFGLARDGPMGEQSYVSTRVMGTFGYAAPEYVSTGHLNARSDVYSFGVVLLELLCGRQALDHNRPAKEQNLVDWARPYLTSRRKVLLIVDTRLNSQYKPEGAVRLASIAVQCLSFEPKSRPTMDQVVRALVQLQDSVVKPANVDPLKVKDTKKLVGLKTEDKYQRNGLNKKTVGL

SEQ ID NO: 72443 - DNA, 2412 bp, Arabidopsis thaliana
  misc_feature (1)..(2412): Ceres Seq. ID no. 4933882
  misc_feature (1)..(2412): Ortholog of  Ceres SEQ ID NO 12586556 as cited in SEQ ID NO 64667
  misc_feature (1)..(2412): Ortholog of  Ceres SEQ ID NO 13660894 as cited in SEQ ID NO 67475
atgattgttttgggtataaaacccgataattatgcgttccctgctttgctaaaggctgtagcagatcttcaggacatggaactggggaaacagattcatgcccatgtgtataaatttgggtacggtgtggattccgtgactgtggctaatacccttgtgaatttgtatagaaagtgtggagatttcggagctgtctataaggtgttcgatagaatatctgagagaaaccaagtctcttggaattctttaatttcttctttgtgtagttttgagaagtgggaaatggcgttagaggcatttcggtgtatgttggatgaaaatgtggaacctagttcgtttaccttggtgagtgtggttactgcttgttcgaatttgcctatgcctgagggattaatgatgggtaagcaggttcacgcctatggtttgagaaagggtgaattgaattcgtttataatcaacacattggtggctatgtatggtaaactgggaaaattagcatcttctaaagtcttacttggttcttttggaggccgtgacttggtcacatggaacactgtgttgagctcgttatgtcagaacgagcagttgcttgaagcattggaatatttgcgtgaaatggtgcttgaaggtgttgaaccagatgagttcactatttcaagtgttcttcctgcttgttcacacttggagatgcttcgcacagggaaagaattgcatgcttatgctttgaaaaatggctctttggatgagaattcctttgttggtagtgctttggttgacatgtattgcaattgcaagcaagtgttgagtggtcgtcgagtatttgatggaatgtttgatagaaagattggtctgtggaatgctatgatcgctgggtattcccagaatgagcatgacaaggaagcgttgttgcttttcattggaatggaagaaagtgctgggcttctggctaactctaccacaatggcaggtgttgttcctgcttgtgtccgttctggtgcgttctctagaaaggaagctatccatggatttgttgtgaagagaggtttagatagagacaggtttgtgcagaatacactgatggatatgtattctaggctgggaaagatcgatatcgccatgcggatattcggtaaaatggaagatagagatttagttacgtggaacacgatgattacgggttatgtattctcagaacaccatgaggacgcacttctcctgctacacaagatgcaaaaccttgaaagaaaagtgagcaagggggctagccgagttagtcttaaacctaattccatcactctgatgacaatccttcccagttgtgctgcactatcagcattagcaaaaggaaaagaaattcatgcttatgccatcaagaacaatttggcaactgatgtggctgtcggaagcgctttagttgacatgtacgcaaaatgcgggtgcctacagatgtcgagaaaagtgtttgatcagattccacaaaaaaatgttattacttggaatgtgattataatggcttacgggatgcatggaaacggtcaagaagccatagatctgctaagaatgatgatggttcagggagtaaaaccaaacgaggttacattcatctcagtatttgcagcttgtagccactcaggcatggtggatgaaggattaaggatattctatgttatgaaacccgactacggggttgaaccaagctcagatcattatgcttgtgttgtagatttgcttggaagggctggtagaattaaagaagcatatcaactcatgaatatgatgcctcgtgatttcaacaaagctggagcatggagtagcctccttggtgccagtcggattcacaataacctagaaattggagaaattgctgctcaaaatctcattcaactggaaccaaatgtagctagtcactatgtgttacttgccaatatttattcatcagcaggcctctgggataaagcaacagaggtaagaagaaatatgaaagagcaaggcgtgagaaaagaacctggatgtagctggattgagcatggcgatgaagtacataaatttgtagccggtgactcatctcacccgcaaagcgaaaagctcagtggatatctcgagacattgtgggagagaatgagaaaagaaggatatgtacctgacacatcttgtgtactccacaatgtagaggaagatgaaaaagagattctgctttgtggacacagtgagaagctagcaattgcgtttgggatacttaacacatcacccggtacaattattagggtggctaaaaacctcagggtttgtaatgattgtcatcttgcaaccaagtttatctcaaagattgttgatagagaaatcatcttgagagatgttaggaggtttcatcgtttcaagaatggaacttgctcctgtggagactattggtga

SEQ ID NO: 72444 - protein, 803 aa, Arabidopsis thaliana
  peptide (1)..(803): Ceres Seq. ID no. 4933883
MIVLGIKPDNYAFPALLKAVADLQDMELGKQIHAHVYKFGYGVDSVTVANTLVNLYRKCGDFGAVYKVFDRISERNQVSWNSLISSLCSFEKWEMALEAFRCMLDENVEPSSFTLVSVVTACSNLPMPEGLMMGKQVHAYGLRKGELNSFIINTLVAMYGKLGKLASSKVLLGSFGGRDLVTWNTVLSSLCQNEQLLEALEYLREMVLEGVEPDEFTISSVLPACSHLEMLRTGKELHAYALKNGSLDENSFVGSALVDMYCNCKQVLSGRRVFDGMFDRKIGLWNAMIAGYSQNEHDKEALLLFIGMEESAGLLANSTTMAGVVPACVRSGAFSRKEAIHGFVVKRGLDRDRFVQNTLMDMYSRLGKIDIAMRIFGKMEDRDLVTWNTMITGYVFSEHHEDALLLLHKMQNLERKVSKGASRVSLKPNSITLMTILPSCAALSALAKGKEIHAYAIKNNLATDVAVGSALVDMYAKCGCLQMSRKVFDQIPQKNVITWNVIIMAYGMHGNGQEAIDLLRMMMVQGVKPNEVTFISVFAACSHSGMVDEGLRIFYVMKPDYGVEPSSDHYACVVDLLGRAGRIKEAYQLMNMMPRDFNKAGAWSSLLGASRIHNNLEIGEIAAQNLIQLEPNVASHYVLLANIYSSAGLWDKATEVRRNMKEQGVRKEPGCSWIEHGDEVHKFVAGDSSHPQSEKLSGYLETLWERMRKEGYVPDTSCVLHNVEEDEKEILLCGHSEKLAIAFGILNTSPGTIIRVAKNLRVCNDCHLATKFISKIVDREIILRDVRRFHRFKNGTCSCGDYW

SEQ ID NO: 72445 - protein, 778 aa, Arabidopsis thaliana
  peptide (1)..(778): Ceres Seq. ID no. 4933884
MELGKQIHAHVYKFGYGVDSVTVANTLVNLYRKCGDFGAVYKVFDRISERNQVSWNSLISSLCSFEKWEMALEAFRCMLDENVEPSSFTLVSVVTACSNLPMPEGLMMGKQVHAYGLRKGELNSFIINTLVAMYGKLGKLASSKVLLGSFGGRDLVTWNTVLSSLCQNEQLLEALEYLREMVLEGVEPDEFTISSVLPACSHLEMLRTGKELHAYALKNGSLDENSFVGSALVDMYCNCKQVLSGRRVFDGMFDRKIGLWNAMIAGYSQNEHDKEALLLFIGMEESAGLLANSTTMAGVVPACVRSGAFSRKEAIHGFVVKRGLDRDRFVQNTLMDMYSRLGKIDIAMRIFGKMEDRDLVTWNTMITGYVFSEHHEDALLLLHKMQNLERKVSKGASRVSLKPNSITLMTILPSCAALSALAKGKEIHAYAIKNNLATDVAVGSALVDMYAKCGCLQMSRKVFDQIPQKNVITWNVIIMAYGMHGNGQEAIDLLRMMMVQGVKPNEVTFISVFAACSHSGMVDEGLRIFYVMKPDYGVEPSSDHYACVVDLLGRAGRIKEAYQLMNMMPRDFNKAGAWSSLLGASRIHNNLEIGEIAAQNLIQLEPNVASHYVLLANIYSSAGLWDKATEVRRNMKEQGVRKEPGCSWIEHGDEVHKFVAGDSSHPQSEKLSGYLETLWERMRKEGYVPDTSCVLHNVEEDEKEILLCGHSEKLAIAFGILNTSPGTIIRVAKNLRVCNDCHLATKFISKIVDREIILRDVRRFHRFKNGTCSCGDYW

SEQ ID NO: 72446 - protein, 709 aa, Arabidopsis thaliana
  peptide (1)..(709): Ceres Seq. ID no. 4933885
MALEAFRCMLDENVEPSSFTLVSVVTACSNLPMPEGLMMGKQVHAYGLRKGELNSFIINTLVAMYGKLGKLASSKVLLGSFGGRDLVTWNTVLSSLCQNEQLLEALEYLREMVLEGVEPDEFTISSVLPACSHLEMLRTGKELHAYALKNGSLDENSFVGSALVDMYCNCKQVLSGRRVFDGMFDRKIGLWNAMIAGYSQNEHDKEALLLFIGMEESAGLLANSTTMAGVVPACVRSGAFSRKEAIHGFVVKRGLDRDRFVQNTLMDMYSRLGKIDIAMRIFGKMEDRDLVTWNTMITGYVFSEHHEDALLLLHKMQNLERKVSKGASRVSLKPNSITLMTILPSCAALSALAKGKEIHAYAIKNNLATDVAVGSALVDMYAKCGCLQMSRKVFDQIPQKNVITWNVIIMAYGMHGNGQEAIDLLRMMMVQGVKPNEVTFISVFAACSHSGMVDEGLRIFYVMKPDYGVEPSSDHYACVVDLLGRAGRIKEAYQLMNMMPRDFNKAGAWSSLLGASRIHNNLEIGEIAAQNLIQLEPNVASHYVLLANIYSSAGLWDKATEVRRNMKEQGVRKEPGCSWIEHGDEVHKFVAGDSSHPQSEKLSGYLETLWERMRKEGYVPDTSCVLHNVEEDEKEILLCGHSEKLAIAFGILNTSPGTIIRVAKNLRVCNDCHLATKFISKIVDREIILRDVRRFHRFKNGTCSCGDYW

SEQ ID NO: 72447 - DNA, 837 bp, Arabidopsis thaliana
  misc_feature (1)..(837): Ceres Seq. ID no. 4933894
  misc_feature (1)..(837): Ortholog of  Ceres SEQ ID NO 15171279 as cited in SEQ ID NO 51378
  misc_feature (1)..(837): Ortholog of  Ceres SEQ ID NO 13596816 as cited in SEQ ID NO 62287
atgcggctgtacgatcccaaccaggagactctcaacgctctccgcggctccaatatcgagctcgtgctcgatgttccaaaccctgatctccagcgtctcgcctccagccaagcggaagccgacacatgggtccgcaacaacgtccgcaactatgcaaacgtcacatttcgctacatctctgtcgggaacgaggtacagccctcagaccaagctgcgagctttgtcctccccgcgatgcagaacatagagagagcagtttcaagcctcgggatcaaggtctcgacggctatagacaccagaggcatttccgggtttccgccgtcaagtgggacgttcacaccggagtttaggagctttatcgcaccggtgataagtttcttgtcaagcaagcaatctcctctgctcgtgaataattacccttacttcagctacacgggaaacatgcgagacatccggttagactacactctgttcaccgcaccgtcaactgtagtcaatgacggacaaaaccaatatcgaaacctattccacgcaatcttagacactgtttacgcatcattagagaaagctggaggtggttcgttggagatcgtggtgtccgagagtggttggccgacagcgggaggagcagcgacgggtgtggataatgcgagaacttatgtgaacaatttgatacaaactgtgaaaaatggatctccgaggagaccagggagagctacagagacttatatatttgctatgttcgatgagaattcgaagcagggtcccgagactgagaagttttggggactgtttcttccaaatctacagcctaagtatgttgtcaatttcaactaa

SEQ ID NO: 72448 - protein, 278 aa, Arabidopsis thaliana
  peptide (1)..(278): Ceres Seq. ID no. 4933895
MRLYDPNQETLNALRGSNIELVLDVPNPDLQRLASSQAEADTWVRNNVRNYANVTFRYISVGNEVQPSDQAASFVLPAMQNIERAVSSLGIKVSTAIDTRGISGFPPSSGTFTPEFRSFIAPVISFLSSKQSPLLVNNYPYFSYTGNMRDIRLDYTLFTAPSTVVNDGQNQYRNLFHAILDTVYASLEKAGGGSLEIVVSESGWPTAGGAATGVDNARTYVNNLIQTVKNGSPRRPGRATETYIFAMFDENSKQGPETEKFWGLFLPNLQPKYVVNFN

SEQ ID NO: 72449 - protein, 200 aa, Arabidopsis thaliana
  peptide (1)..(200): Ceres Seq. ID no. 4933896
MQNIERAVSSLGIKVSTAIDTRGISGFPPSSGTFTPEFRSFIAPVISFLSSKQSPLLVNNYPYFSYTGNMRDIRLDYTLFTAPSTVVNDGQNQYRNLFHAILDTVYASLEKAGGGSLEIVVSESGWPTAGGAATGVDNARTYVNNLIQTVKNGSPRRPGRATETYIFAMFDENSKQGPETEKFWGLFLPNLQPKYVVNFN

SEQ ID NO: 72450 - DNA, 1605 bp, Arabidopsis thaliana
  misc_feature (1)..(1605): Ceres Seq. ID no. 4934348
  misc_feature (1)..(1605): Ortholog of  Ceres SEQ ID NO 13600220 as cited in SEQ ID NO 0
atgtactcgaagaaaaactcgttcggccgatcagatttcccagagggtttccttttcggtacagcttcatcggcttaccaatatgaaggagccagaaacgaagctcctcgaggagagagtgtttgggacacatttgttcgcaaatatccagagagaaattgctactctaatgcggaccaagcaatcgagttctataaccattacaaggacgatatccagagaatgaaggatattaacatggatgctttcagattctctatctcttggcctaggatttttcctcttggaaagaaaagcaaaggagtgaacaaagaaggaatacaattctataacgatctcatcgatgaactcctcgctaacggaataacacctctcgccactttatttcactgggatactcctcaagcacttgaagatgaatacagtggatttttaagcgaagaagctgttgatgacttcaaggattttgcggccttatgttttgaggagtttggcgaccgtgtaaaattgtgggtcacactaaacgaaccatgggtgtacagtattggtggctatgacacgggaagaaaagcccccggacgtgcctccaaatacatgaacgaagcagccgtggcaggagaatctggtctcgaggtttacactgttagtcacaatctacttctggctcacgccgaagctgttgaggtcttcaggaacaatcccaaatgtaaagatggcaagatcggtatcgctcattgtcccgtatggttcgagccttatgactcgaactgccctaaagacatagaagcatgcgaacgagctatggagtttatgtttggatggcacatggatcctacggtgtatggagattaccctgcagtcatgaaaaaatcgatcggaaaaagattaccatcatttaccgcagcacaatccaagaagcttagaggatcttttgatttcgttggggtgaattattacagtgctttctacgtcaaaaatattgatgaagtgaatcatgacaagcccaattggagatcagacgcacgcatcgaatggagaaaagaaaacaacgcagggcaaacattaggtgtaagaggtggttcggaatgggactttctatatccacaaggccttagaaagtttctaaattatgccaagaataaatatgaaagcccgaaatttatgattaccgaaaacggacactgtgatatagattatgagaaaaagcctaaactttctaacttgatggatctccaaaggacagagtaccacaagaaacatctccaaagcatccaacaagccatccaggaggatggggttgtagttgaaggatactttgcgtggtcattactagacaattgtgaatggaacgccggttatggagttcgatatggactattctacgtcgattataacaatggactaaaacgtttcccgaaaatgtcggcgatgtggttcaaagaattcttgaagagagaagaagaaattgaagattcagaagaagaagagtacgtgttgaagtcaacaatgaacaagaagagattcttattagcaactggttcatcagcttcatgctttattcctaagatgtctgaatcttctaaagccctcgaactattattctag

SEQ ID NO: 72451 - protein, 534 aa, Arabidopsis thaliana; identical to SEQ ID NO: 70855
  peptide (1)..(534): Ceres Seq. ID no. 4934349

SEQ ID NO: 72452 - protein, 460 aa, Arabidopsis thaliana; identical to SEQ ID NO: 70856
  peptide (1)..(460): Ceres Seq. ID no. 4934350

SEQ ID NO: 72453 - protein, 455 aa, Arabidopsis thaliana
  peptide (1)..(455): Ceres Seq. ID no. 4934351
MDAFRFSISWPRIFPLGKKSKGVNKEGIQFYNDLIDELLANGITPLATLFHWDTPQALEDEYSGFLSEEAVDDFKDFAALCFEEFGDRVKLWVTLNEPWVYSIGGYDTGRKAPGRASKYMNEAAVAGESGLEVYTVSHNLLLAHAEAVEVFRNNPKCKDGKIGIAHCPVWFEPYDSNCPKDIEACERAMEFMFGWHMDPTVYGDYPAVMKKSIGKRLPSFTAAQSKKLRGSFDFVGVNYYSAFYVKNIDEVNHDKPNWRSDARIEWRKENNAGQTLGVRGGSEWDFLYPQGLRKFLNYAKNKYESPKFMITENGHCDIDYEKKPKLSNLMDLQRTEYHKKHLQSIQQAIQEDGVVVEGYFAWSLLDNCEWNAGYGVRYGLFYVDYNNGLKRFPKMSAMWFKEFLKREEEIEDSEEEEYVLKSTMNKKRFLLATGSSASCFIPKMSESSKALELLF

SEQ ID NO: 72454 - DNA, 1302 bp, Arabidopsis thaliana
  misc_feature (1)..(1302): Ceres Seq. ID no. 4934356
  misc_feature (1)..(1302): Ortholog of  Ceres SEQ ID NO 15168908 as cited in SEQ ID NO 20765
atggtaatgcaggacttgaagtcgcagatgcaagagatcattccagaacaacaggaccgtttgaagaaactgaaatcagaacaaggaaaggttccagtggggaacatcaccgttgatatggtacttggtggaatgagagggatgactggattactctgggaaacctcattgcttgatgcagatgagggaatacggtttagaggcatgtcgattcctgaatgtcagaaaatattaccttcagctgagtctggagaagagcccttgcctgagagtcttctgtggcttctattaactggaaaggtgccaactaaagagcaagctaatgctttgtcaacagagttggctcatcgtgcggctgtgccagctatagatgctttgccttcaacagctcatccaatgactcaatttgctagtggtgttatggcccttcaggttcaaagtgagtttcaaaaggcgtatgagcagggtgatatttctaagtcaaagtactgggaaccaaccttcgaagatgccctaaacttgattgctcgtgttcctgttgtagcttcatacgtttatcggaggatgtacaaggatggtagcatcattccattagatgattctttggattatggtgcaaatttttcacacatgctgggatttgatagtcctcagatgaaagagctcatgaggctttatgtcactatccacagtgatcatgaaggtggaaatgttagtgctcacgctggtcacctggttgggagtgcactttcagatccatatctttcatttgctgctgcattgaatggtttagctgggccactccatggtttggctaatcaggaagttttgctgtggatcaaattagttgttgaggaatgtggagaaagtatatcaaaggaacagctaaaagattatgtctggaaaacgttaaacagtggcaaggttgttccaggatatggccatggtgttttgcgtaaaacggatccaagatatatatgccaaagagagtttgccttgaagcatctacctgatgatcctctttttcagctggtctcaaaactttatgaagtggtgcctcctattctaaccgagctgggaaaggtcaagaacccgtggcctaacgttgatgctcatagcggagtgcttctgaactactatggtctaaccgaagcaagatactacacggtgctttttggcgtctcaagaagtcttggaatctgctcgcagctgatatgggacagggcacttggactgccacttgagagaccaaagagtgtaaacatggactggctcgataacttcacgcgcttgaaccgctaa

SEQ ID NO: 72455 - protein, 433 aa, Arabidopsis thaliana
  peptide (1)..(433): Ceres Seq. ID no. 4934357
MVMQDLKSQMQEIIPEQQDRLKKLKSEQGKVPVGNITVDMVLGGMRGMTGLLWETSLLDADEGIRFRGMSIPECQKILPSAESGEEPLPESLLWLLLTGKVPTKEQANALSTELAHRAAVPAIDALPSTAHPMTQFASGVMALQVQSEFQKAYEQGDISKSKYWEPTFEDALNLIARVPVVASYVYRRMYKDGSIIPLDDSLDYGANFSHMLGFDSPQMKELMRLYVTIHSDHEGGNVSAHAGHLVGSALSDPYLSFAAALNGLAGPLHGLANQEVLLWIKLVVEECGESISKEQLKDYVWKTLNSGKVVPGYGHGVLRKTDPRYICQREFALKHLPDDPLFQLVSKLYEVVPPILTELGKVKNPWPNVDAHSGVLLNYYGLTEARYYTVLFGVSRSLGICSQLIWDRALGLPLERPKSVNMDWLDNFTRLNR

SEQ ID NO: 72456 - protein, 431 aa, Arabidopsis thaliana
  peptide (1)..(431): Ceres Seq. ID no. 4934358
MQDLKSQMQEIIPEQQDRLKKLKSEQGKVPVGNITVDMVLGGMRGMTGLLWETSLLDADEGIRFRGMSIPECQKILPSAESGEEPLPESLLWLLLTGKVPTKEQANALSTELAHRAAVPAIDALPSTAHPMTQFASGVMALQVQSEFQKAYEQGDISKSKYWEPTFEDALNLIARVPVVASYVYRRMYKDGSIIPLDDSLDYGANFSHMLGFDSPQMKELMRLYVTIHSDHEGGNVSAHAGHLVGSALSDPYLSFAAALNGLAGPLHGLANQEVLLWIKLVVEECGESISKEQLKDYVWKTLNSGKVVPGYGHGVLRKTDPRYICQREFALKHLPDDPLFQLVSKLYEVVPPILTELGKVKNPWPNVDAHSGVLLNYYGLTEARYYTVLFGVSRSLGICSQLIWDRALGLPLERPKSVNMDWLDNFTRLNR

SEQ ID NO: 72457 - protein, 424 aa, Arabidopsis thaliana
  peptide (1)..(424): Ceres Seq. ID no. 4934359
MQEIIPEQQDRLKKLKSEQGKVPVGNITVDMVLGGMRGMTGLLWETSLLDADEGIRFRGMSIPECQKILPSAESGEEPLPESLLWLLLTGKVPTKEQANALSTELAHRAAVPAIDALPSTAHPMTQFASGVMALQVQSEFQKAYEQGDISKSKYWEPTFEDALNLIARVPVVASYVYRRMYKDGSIIPLDDSLDYGANFSHMLGFDSPQMKELMRLYVTIHSDHEGGNVSAHAGHLVGSALSDPYLSFAAALNGLAGPLHGLANQEVLLWIKLVVEECGESISKEQLKDYVWKTLNSGKVVPGYGHGVLRKTDPRYICQREFALKHLPDDPLFQLVSKLYEVVPPILTELGKVKNPWPNVDAHSGVLLNYYGLTEARYYTVLFGVSRSLGICSQLIWDRALGLPLERPKSVNMDWLDNFTRLNR

SEQ ID NO: 72458 - DNA, 1884 bp, Arabidopsis thaliana
  misc_feature (1)..(1884): Ceres Seq. ID no. 4934675
  misc_feature (1)..(1884): Ortholog of  Ceres SEQ ID NO 13590691 as cited in SEQ ID NO 66290
atggagagtttgattgcgcttgtgaacaagattcagagagcctgtacggctctgggagatcacggcgagggaagctccctcccaactctctgggactcattgcctgcaattgccgtcgtcggtggtcagagttctggaaagtcttcagtgctagagagtgttgttggaaaagattttctacctcgtggagctgggattgttacacgcagacctcttgtcctgcagcttcatagaattgatgaagggaaagagtatgcagagtttatgcatcttccaaagaagaagttcacagattttggtattgtttgggaggagtttatgctccttagttttcctgtgactgcttgcactgctgtgaggcaggagatctcggatgagacagatcgtgaaactggtcgcagcagcaaagtaatatccacagtcccaattcatctcagtatcttctctcctaatgttgtgaatttgacacttgtcgatcttcctgggctaacaaaggtagctgttgatggccagcctgaaagcattgttcaagacatcgagaacatggtcagatcgtttattgagaagcccaactgcatcatacttgctatttcccctgcaaatcaggatcttgcaacatctgatgccattaagatctctcgtgaagttgatcccaaaggagacaggacttttggagttttaacaaaaattgatctcatggaccaaggcactaatgctgttgatatacttgaaggaaggggatacaaattaaggtatccttgggttggtgttgtaaaccggtctcaagctgacattaataaaagtgttgatatgattgctgctcgtcggcgtgaacgtgattacttccagactagcccagagtacagacatttaactgaaagaatgggttcagagtatttaggaaagatgctctctaagcatttggaagttgttatcaagtctagaatcccgggacttcagtctcttatcacaaagacaatttccgagttagagacagagctaagccgtcttgggaagcctgtagcagctgatgctggtggaaaactttatatgatcatggaaatttgccgtgcctttgatcaaacttttaaagaacacctggatggcacgcgttcaggtggtgaaaagataaattctgtgttcgacaatcaattcccagctgccattaaaagactgcaattcgacaaacatctctccatggacaatgtacggaaactgatcactgaagcagatggatatcaacctcatctcatagctcctgaacaaggttatcgccggctcatagaatcatgcttagtctccattagaggccctgctgaagcagctgttgatgcggttcattccattctcaaggatcttatccacaaatccatgggcgaaacatctgaactgaagcaatatccaacactcagagtagaagtatcaggtgcagccgtggattcattggatcgaatgagagacgaaagcaggaaagcaactctgttactagtggacatggagtctggttacttaacggtcgagttcttcaggaaactcccgcaagattctgaaaaaggtgggaatccgacacattcgatattcgacagatacaacgatgcttatctccgaagaatcggctcaaatgtgttgtcatatgtgaacatggtctgcgctggcttgagaaactccataccgaaatccattgtttactgtcaagtccgtgaagcaaaacgaagccttctagacatcttcttcaccgaacttggccagaaagagatgagcaaattgtcgaaattgttggatgaggatcctgcggttcagcagcgaaggacttcgattgcgaagaggctggaattgtatagaagtgctcaaacggatattgaagcagttgcttggtccaagtag

SEQ ID NO: 72459 - protein, 627 aa, Arabidopsis thaliana
  peptide (1)..(627): Ceres Seq. ID no. 4934676
MESLIALVNKIQRACTALGDHGEGSSLPTLWDSLPAIAVVGGQSSGKSSVLESVVGKDFLPRGAGIVTRRPLVLQLHRIDEGKEYAEFMHLPKKKFTDFGIVWEEFMLLSFPVTACTAVRQEISDETDRETGRSSKVISTVPIHLSIFSPNVVNLTLVDLPGLTKVAVDGQPESIVQDIENMVRSFIEKPNCIILAISPANQDLATSDAIKISREVDPKGDRTFGVLTKIDLMDQGTNAVDILEGRGYKLRYPWVGVVNRSQADINKSVDMIAARRRERDYFQTSPEYRHLTERMGSEYLGKMLSKHLEVVIKSRIPGLQSLITKTISELETELSRLGKPVAADAGGKLYMIMEICRAFDQTFKEHLDGTRSGGEKINSVFDNQFPAAIKRLQFDKHLSMDNVRKLITEADGYQPHLIAPEQGYRRLIESCLVSIRGPAEAAVDAVHSILKDLIHKSMGETSELKQYPTLRVEVSGAAVDSLDRMRDESRKATLLLVDMESGYLTVEFFRKLPQDSEKGGNPTHSIFDRYNDAYLRRIGSNVLSYVNMVCAGLRNSIPKSIVYCQVREAKRSLLDIFFTELGQKEMSKLSKLLDEDPAVQQRRTSIAKRLELYRSAQTDIEAVAWSK

SEQ ID NO: 72460 - protein, 539 aa, Arabidopsis thaliana
  peptide (1)..(539): Ceres Seq. ID no. 4934677
MHLPKKKFTDFGIVWEEFMLLSFPVTACTAVRQEISDETDRETGRSSKVISTVPIHLSIFSPNVVNLTLVDLPGLTKVAVDGQPESIVQDIENMVRSFIEKPNCIILAISPANQDLATSDAIKISREVDPKGDRTFGVLTKIDLMDQGTNAVDILEGRGYKLRYPWVGVVNRSQADINKSVDMIAARRRERDYFQTSPEYRHLTERMGSEYLGKMLSKHLEVVIKSRIPGLQSLITKTISELETELSRLGKPVAADAGGKLYMIMEICRAFDQTFKEHLDGTRSGGEKINSVFDNQFPAAIKRLQFDKHLSMDNVRKLITEADGYQPHLIAPEQGYRRLIESCLVSIRGPAEAAVDAVHSILKDLIHKSMGETSELKQYPTLRVEVSGAAVDSLDRMRDESRKATLLLVDMESGYLTVEFFRKLPQDSEKGGNPTHSIFDRYNDAYLRRIGSNVLSYVNMVCAGLRNSIPKSIVYCQVREAKRSLLDIFFTELGQKEMSKLSKLLDEDPAVQQRRTSIAKRLELYRSAQTDIEAVAWSK

SEQ ID NO: 72461 - protein, 521 aa, Arabidopsis thaliana
  peptide (1)..(521): Ceres Seq. ID no. 4934678
MLLSFPVTACTAVRQEISDETDRETGRSSKVISTVPIHLSIFSPNVVNLTLVDLPGLTKVAVDGQPESIVQDIENMVRSFIEKPNCIILAISPANQDLATSDAIKISREVDPKGDRTFGVLTKIDLMDQGTNAVDILEGRGYKLRYPWVGVVNRSQADINKSVDMIAARRRERDYFQTSPEYRHLTERMGSEYLGKMLSKHLEVVIKSRIPGLQSLITKTISELETELSRLGKPVAADAGGKLYMIMEICRAFDQTFKEHLDGTRSGGEKINSVFDNQFPAAIKRLQFDKHLSMDNVRKLITEADGYQPHLIAPEQGYRRLIESCLVSIRGPAEAAVDAVHSILKDLIHKSMGETSELKQYPTLRVEVSGAAVDSLDRMRDESRKATLLLVDMESGYLTVEFFRKLPQDSEKGGNPTHSIFDRYNDAYLRRIGSNVLSYVNMVCAGLRNSIPKSIVYCQVREAKRSLLDIFFTELGQKEMSKLSKLLDEDPAVQQRRTSIAKRLELYRSAQTDIEAVAWSK

SEQ ID NO: 72462 - DNA, 1458 bp, Arabidopsis thaliana
  misc_feature (1)..(1458): Ceres Seq. ID no. 4935487
  misc_feature (1)..(1458): Ortholog of  Ceres SEQ ID NO 13574398 as cited in SEQ ID NO 0
atggagaatttgccaaatcacgaagaaaacgacgatgtgggctatcatcagtcacctggtcccatcgatccaaatgatcattcagcatctgaaactccggtttactcaacaatgagcacagattcttttgcttatcatcgaacatgttctgaaacctctggaggaggcttttcagaccaaatagatgaaaccagcagtttctgcactgaggcttctcctagtgattggcctgtcttaaccgaatccaacaactctgcgagctcaaattttccaactgtcttcgacttgaaacataatcagattgagactgatgagcaccttgcggtccaagaaatttcagagccagagctggagacgatgaaggaaagattctcgaagcttctgcttggggaagatatgtcaggaagcggcaaaggcgtttgcaccgcagtgacaatctcaaacgctataaccaatctttatgctactgtttttggacagaatctaagattagaaccattggagatagagcagaagacgacgtggaagagagaaatgaattgccttctctctgtgtgtgactatattttcgagtttatcccaaagtcacagaatctaagcaatggagccactgttgaggtcatggagagtagaccaagagcagatatctacatcaatctgcctgcactcagaaaactagattccatgcttatggaggcattggatagttttcaaaagacagagttttggtatgcagaagaaggaagcttgtcgatgaagtcaacgcgttccgcaactggatcattcaggaaagtgattgtgcagaggaaagaagagaaatggtggttaccgattcctctggttccattacaaggtttatcagagaaggcaaggaaacaacttaagagcaagcgagagagcactaatcaaatccataaagctgctatggccatcaatagcagcatactcggtgaaatggatattcctgattcttacatggcaactcttccaaagagcggaaaagcgagcacaggagatgcaatctatcgacacatgacgagttcagggcggttttcaccagaaaaacttctagatcgtctcaagattgtatcagaacatgaagcgcttcagctggcagatagagtagaagcttcaatgtacacatggagacgcaaagcttgtcttaacaattccaagtcttcatggaatatggtgaaagatttaatgtcaattacagagagaagtgacaagaactatgttttggctgagagagcagagtctttgctcttctgtttgaaacaacggtacccagaattgtctcagacatcgttagatatttgcaagattcattgcaacaaggatgttggaaaagctgtgttagagagttattcaagagttcttgaaggtttagcttttaacatagttgcttggattgatgatgttctttatgtagacaaaacaatgagaggagaagaatga

SEQ ID NO: 72463 - protein, 485 aa, Arabidopsis thaliana
  peptide (1)..(485): Ceres Seq. ID no. 4935488
MENLPNHEENDDVGYHQSPGPIDPNDHSASETPVYSTMSTDSFAYHRTCSETSGGGFSDQIDETSSFCTEASPSDWPVLTESNNSASSNFPTVFDLKHNQIETDEHLAVQEISEPELETMKERFSKLLLGEDMSGSGKGVCTAVTISNAITNLYATVFGQNLRLEPLEIEQKTTWKREMNCLLSVCDYIFEFIPKSQNLSNGATVEVMESRPRADIYINLPALRKLDSMLMEALDSFQKTEFWYAEEGSLSMKSTRSATGSFRKVIVQRKEEKWWLPIPLVPLQGLSEKARKQLKSKRESTNQIHKAAMAINSSILGEMDIPDSYMATLPKSGKASTGDAIYRHMTSSGRFSPEKLLDRLKIVSEHEALQLADRVEASMYTWRRKACLNNSKSSWNMVKDLMSITERSDKNYVLAERAESLLFCLKQRYPELSQTSLDICKIHCNKDVGKAVLESYSRVLEGLAFNIVAWIDDVLYVDKTMRGEE

SEQ ID NO: 72464 - protein, 448 aa, Arabidopsis thaliana
  peptide (1)..(448): Ceres Seq. ID no. 4935489
MSTDSFAYHRTCSETSGGGFSDQIDETSSFCTEASPSDWPVLTESNNSASSNFPTVFDLKHNQIETDEHLAVQEISEPELETMKERFSKLLLGEDMSGSGKGVCTAVTISNAITNLYATVFGQNLRLEPLEIEQKTTWKREMNCLLSVCDYIFEFIPKSQNLSNGATVEVMESRPRADIYINLPALRKLDSMLMEALDSFQKTEFWYAEEGSLSMKSTRSATGSFRKVIVQRKEEKWWLPIPLVPLQGLSEKARKQLKSKRESTNQIHKAAMAINSSILGEMDIPDSYMATLPKSGKASTGDAIYRHMTSSGRFSPEKLLDRLKIVSEHEALQLADRVEASMYTWRRKACLNNSKSSWNMVKDLMSITERSDKNYVLAERAESLLFCLKQRYPELSQTSLDICKIHCNKDVGKAVLESYSRVLEGLAFNIVAWIDDVLYVDKTMRGEE

SEQ ID NO: 72465 - protein, 366 aa, Arabidopsis thaliana
  peptide (1)..(366): Ceres Seq. ID no. 4935490
MKERFSKLLLGEDMSGSGKGVCTAVTISNAITNLYATVFGQNLRLEPLEIEQKTTWKREMNCLLSVCDYIFEFIPKSQNLSNGATVEVMESRPRADIYINLPALRKLDSMLMEALDSFQKTEFWYAEEGSLSMKSTRSATGSFRKVIVQRKEEKWWLPIPLVPLQGLSEKARKQLKSKRESTNQIHKAAMAINSSILGEMDIPDSYMATLPKSGKASTGDAIYRHMTSSGRFSPEKLLDRLKIVSEHEALQLADRVEASMYTWRRKACLNNSKSSWNMVKDLMSITERSDKNYVLAERAESLLFCLKQRYPELSQTSLDICKIHCNKDVGKAVLESYSRVLEGLAFNIVAWIDDVLYVDKTMRGEE

SEQ ID NO: 72466 - DNA, 1437 bp, Arabidopsis thaliana
  misc_feature (1)..(1437): Ceres Seq. ID no. 4935519
  misc_feature (1)..(1437): Ortholog of  Ceres SEQ ID NO 13504578 as cited in SEQ ID NO 59850
atgtcgaggctaatcttcttaattctcgccattctcttctctcttcaattcgttttctaccctttaaatttcatctcctcttcttctcaacctctgatcaaattctctgtttcacccgtcgtatccggatccgggtcggttcatgaaccggaccaaaccgaactcaagcacgtcgttttcggaatcgccgcctctgcgaaattctggaaacaccgtaaagactacgtgaagctctggtggaaaccaaacggtgaaatgaacggcgtcgtttggttagaccaacacattaaccaaaacgacaacgtttcgaaaacattacctccgatcagaatctcctccgacacgtctaggtttcagtacagatacccaaagggtctccgatcggcgatcagaatcacgagaatcgtctcggagacggtgaggctgttgaacggaacagagttggagaaaaacgtgaggtggattgtgatgggagacgacgacactgtgtttttcccggagaatcttgtcaaggttttgagaaagtacgatcacaatcagttttattacatcggaagctcgtcggagagtcatatacagaatctcaagttctcttacgggatggcttatggaggaggagggttcgcgattagctatccgttggctaaagcattagagaaaatgcaagatcgttgtattcagagatattcggaattgtacggctccgatgatcggattcatgcttgtatgtcggaactcggtgttcctttgactaaggaagttggcttccatcagattgatttatacgggaaacttctgggcctattatcggcccatccactggctcctctagtatcgatccaccatttagacttagtggatccagtattcccaaacatgggccgagtcaacgccatgagacgtttcatggtccccgcaaaactcgactcaccgagcctcgcgcagcaatcaatctgctacgacgcggaccaccgatggaccgtgtctgtctcgtggggatacacagtccagatcatacgtggcgtgttgtcagctagagagatggtgatccccacgcgcacgttcatcgattggtacaaacaggcagacgaaagaagctatgcttttaacacgcgtcctatcgccaaaagcgcgtgtcagcgtccgcgagtgtattacctgtccaacgcgcttcctgacttggctttgcgtagaactgctagtgaatacgtgagatggtacgacatgtgggagcctgaatgtgactgggatatgtcggatccttcggaatttgaacgggtcattgtttataagaaacccgacccggatagatggaataaacatagggctccgagaagagattgttgtagagtattgcccacgacgaagaatgggactatggtaatcgatgtaggagcttgtaaagatgatgaatttgctgaattccttgtcaaatag

SEQ ID NO: 72467 - protein, 478 aa, Arabidopsis thaliana
  peptide (1)..(478): Ceres Seq. ID no. 4935520
MSRLIFLILAILFSLQFVFYPLNFISSSSQPLIKFSVSPVVSGSGSVHEPDQTELKHVVFGIAASAKFWKHRKDYVKLWWKPNGEMNGVVWLDQHINQNDNVSKTLPPIRISSDTSRFQYRYPKGLRSAIRITRIVSETVRLLNGTELEKNVRWIVMGDDDTVFFPENLVKVLRKYDHNQFYYIGSSSESHIQNLKFSYGMAYGGGGFAISYPLAKALEKMQDRCIQRYSELYGSDDRIHACMSELGVPLTKEVGFHQIDLYGKLLGLLSAHPLAPLVSIHHLDLVDPVFPNMGRVNAMRRFMVPAKLDSPSLAQQSICYDADHRWTVSVSWGYTVQIIRGVLSAREMVIPTRTFIDWYKQADERSYAFNTRPIAKSACQRPRVYYLSNALPDLALRRTASEYVRWYDMWEPECDWDMSDPSEFERVIVYKKPDPDRWNKHRAPRRDCCRVLPTTKNGTMVIDVGACKDDEFAEFLVK

SEQ ID NO: 72468 - protein, 393 aa, Arabidopsis thaliana
  peptide (1)..(393): Ceres Seq. ID no. 4935521
MNGVVWLDQHINQNDNVSKTLPPIRISSDTSRFQYRYPKGLRSAIRITRIVSETVRLLNGTELEKNVRWIVMGDDDTVFFPENLVKVLRKYDHNQFYYIGSSSESHIQNLKFSYGMAYGGGGFAISYPLAKALEKMQDRCIQRYSELYGSDDRIHACMSELGVPLTKEVGFHQIDLYGKLLGLLSAHPLAPLVSIHHLDLVDPVFPNMGRVNAMRRFMVPAKLDSPSLAQQSICYDADHRWTVSVSWGYTVQIIRGVLSAREMVIPTRTFIDWYKQADERSYAFNTRPIAKSACQRPRVYYLSNALPDLALRRTASEYVRWYDMWEPECDWDMSDPSEFERVIVYKKPDPDRWNKHRAPRRDCCRVLPTTKNGTMVIDVGACKDDEFAEFLVK

SEQ ID NO: 72469 - protein, 322 aa, Arabidopsis thaliana
  peptide (1)..(322): Ceres Seq. ID no. 4935522
MGDDDTVFFPENLVKVLRKYDHNQFYYIGSSSESHIQNLKFSYGMAYGGGGFAISYPLAKALEKMQDRCIQRYSELYGSDDRIHACMSELGVPLTKEVGFHQIDLYGKLLGLLSAHPLAPLVSIHHLDLVDPVFPNMGRVNAMRRFMVPAKLDSPSLAQQSICYDADHRWTVSVSWGYTVQIIRGVLSAREMVIPTRTFIDWYKQADERSYAFNTRPIAKSACQRPRVYYLSNALPDLALRRTASEYVRWYDMWEPECDWDMSDPSEFERVIVYKKPDPDRWNKHRAPRRDCCRVLPTTKNGTMVIDVGACKDDEFAEFLVK

SEQ ID NO: 72470 - DNA, 1461 bp, Arabidopsis thaliana
  misc_feature (1)..(1461): Ceres Seq. ID no. 4935571
  misc_feature (1)..(1461): Ortholog of  Ceres SEQ ID NO 13574398 as cited in SEQ ID NO 0
atggagaatttgccaaatcacgaagaaaacgacgatgtgggctatcatcagtcacctggtcccatcgatccaaatgatcattcagcatctgaaactccggtttactcaacaatgagcacagattcttttgcttatcatcgaacatgttctgaaacctctggaggaggcttttcagaccaaatagatgaaaccagcagtttctgcactgaggcttctcctagtgattggcctgtcttaaccgaatccaacaactctgcgagctcaaattttccaactgtcttcgacttgaaacataatcagattgagactgatgagcaccttgcggtccaagaaatttcagagccagcagagctggagacgatgaaggaaagattctcgaagcttctgcttggggaagatatgtcaggaagcggcaaaggcgtttgcaccgcagtgacaatctcaaacgctataaccaatctttatgctactgtttttggacagaatctaagattagaaccattggagatagagcagaagacgacgtggaagagagaaatgaattgccttctctctgtgtgtgactatattttcgagtttatcccaaagtcacagaatctaagcaatggagccactgttgaggtcatggagagtagaccaagagcagatatctacatcaatctgcctgcactcagaaaactagattccatgcttatggaggcattggatagttttcaaaagacagagttttggtatgcagaagaaggaagcttgtcgatgaagtcaacgcgttccgcaactggatcattcaggaaagtgattgtgcagaggaaagaagagaaatggtggttaccgattcctctggttccattacaaggtttatcagagaaggcaaggaaacaacttaagagcaagcgagagagcactaatcaaatccataaagctgctatggccatcaatagcagcatactcggtgaaatggatattcctgattcttacatggcaactcttccaaagagcggaaaagcgagcacaggagatgcaatctatcgacacatgacgagttcagggcggttttcaccagaaaaacttctagatcgtctcaagattgtatcagaacatgaagcgcttcagctggcagatagagtagaagcttcaatgtacacatggagacgcaaagcttgtcttaacaattccaagtcttcatggaatatggtgaaagatttaatgtcaattacagagagaagtgacaagaactatgttttggctgagagagcagagtctttgctcttctgtttgaaacaacggtacccagaattgtctcagacatcgttagatatttgcaagattcattgcaacaaggatgttggaaaagctgtgttagagagttattcaagagttcttgaaggtttagcttttaacatagttgcttggattgatgatgttctttatgtagacaaaacaatgagaggagaagaatga

SEQ ID NO: 72471 - protein, 486 aa, Arabidopsis thaliana
  peptide (1)..(486): Ceres Seq. ID no. 4935572
MENLPNHEENDDVGYHQSPGPIDPNDHSASETPVYSTMSTDSFAYHRTCSETSGGGFSDQIDETSSFCTEASPSDWPVLTESNNSASSNFPTVFDLKHNQIETDEHLAVQEISEPAELETMKERFSKLLLGEDMSGSGKGVCTAVTISNAITNLYATVFGQNLRLEPLEIEQKTTWKREMNCLLSVCDYIFEFIPKSQNLSNGATVEVMESRPRADIYINLPALRKLDSMLMEALDSFQKTEFWYAEEGSLSMKSTRSATGSFRKVIVQRKEEKWWLPIPLVPLQGLSEKARKQLKSKRESTNQIHKAAMAINSSILGEMDIPDSYMATLPKSGKASTGDAIYRHMTSSGRFSPEKLLDRLKIVSEHEALQLADRVEASMYTWRRKACLNNSKSSWNMVKDLMSITERSDKNYVLAERAESLLFCLKQRYPELSQTSLDICKIHCNKDVGKAVLESYSRVLEGLAFNIVAWIDDVLYVDKTMRGEE

SEQ ID NO: 72472 - protein, 449 aa, Arabidopsis thaliana
  peptide (1)..(449): Ceres Seq. ID no. 4935573
MSTDSFAYHRTCSETSGGGFSDQIDETSSFCTEASPSDWPVLTESNNSASSNFPTVFDLKHNQIETDEHLAVQEISEPAELETMKERFSKLLLGEDMSGSGKGVCTAVTISNAITNLYATVFGQNLRLEPLEIEQKTTWKREMNCLLSVCDYIFEFIPKSQNLSNGATVEVMESRPRADIYINLPALRKLDSMLMEALDSFQKTEFWYAEEGSLSMKSTRSATGSFRKVIVQRKEEKWWLPIPLVPLQGLSEKARKQLKSKRESTNQIHKAAMAINSSILGEMDIPDSYMATLPKSGKASTGDAIYRHMTSSGRFSPEKLLDRLKIVSEHEALQLADRVEASMYTWRRKACLNNSKSSWNMVKDLMSITERSDKNYVLAERAESLLFCLKQRYPELSQTSLDICKIHCNKDVGKAVLESYSRVLEGLAFNIVAWIDDVLYVDKTMRGEE

SEQ ID NO: 72473 - protein, 366 aa, Arabidopsis thaliana; identical to SEQ ID NO: 72465
  peptide (1)..(366): Ceres Seq. ID no. 4935574

SEQ ID NO: 72474 - DNA, 1140 bp, Arabidopsis thaliana
  misc_feature (1)..(1140): Ceres Seq. ID no. 4935674
  misc_feature (1)..(1140): Ortholog of  Ceres SEQ ID NO 15171708 as cited in SEQ ID NO 60063
atgtacccgccacctccctcaagcatctacgctcctccgatgctggtgaattgctccggttgccggacgcctctccagctcccatccggcgcccgatctattcgctgcgctctctgccaggctgttactcatatcgccgaccctcgcaccgcccctcctccgcaaccttcctccgccccttctccgcctccccaaatccacgcgcctcccggtcagctgcctcacccccatggcaggaagagggccgtgatctgtggcatctcgtatcgtttctctcgccacgagctcaaaggctgcatcaacgacgccaagtgcatgcgtcaccttctcatcaacaaattcaaattctccccagattcaattctcatgcttaccgaggaagaaactgatccatatcgtatcccgaccaagcaaaacatgaggatggcattgtattggctcgtacagggatgcacagcaggcgactcacttgtcttccactactctggtcatggttcgcgtcaaagaaactacaacggtgatgaagttgatggctatgatgaaacactctgtcctctggattttgaaactcaggggatgattgtagacgatgagatcaacgcaaccattgtacgccctcttccacatggtgtcaagctccattcaattatcgatgcttgccatagtggtaccgttctggatttacccttcctatgcagaatgaacagagctgggcagtatgtgtgggaggatcatcggcctaggtcaggtttgtggaaaggaactgctggtggagaagccatttcaattagtggatgtgatgatgatcagacttcggccgacacatcattggttcctcctctcatgattaaaacacatacacaggcgctgtcgaagatcacgtctacgggtgctatgactttctgttttattcaagcaattgaacgcagcgcacaaggcacaacctatggaagccttctgaattctatgcgcaccacaataaggaatacagggaatgatggtggtggtagtggtggagttgtgacgactgtgctgagcatgcttctgacagggggaagtgcgattgggggattaagacaggagcctcaactgactgcttgccaaacattcgatgtctatgcaaagcctttcactctctag

SEQ ID NO: 72475 - protein, 379 aa, Arabidopsis thaliana
  peptide (1)..(379): Ceres Seq. ID no. 4935675
MYPPPPSSIYAPPMLVNCSGCRTPLQLPSGARSIRCALCQAVTHIADPRTAPPPQPSSAPSPPPQIHAPPGQLPHPHGRKRAVICGISYRFSRHELKGCINDAKCMRHLLINKFKFSPDSILMLTEEETDPYRIPTKQNMRMALYWLVQGCTAGDSLVFHYSGHGSRQRNYNGDEVDGYDETLCPLDFETQGMIVDDEINATIVRPLPHGVKLHSIIDACHSGTVLDLPFLCRMNRAGQYVWEDHRPRSGLWKGTAGGEAISISGCDDDQTSADTSLVPPLMIKTHTQALSKITSTGAMTFCFIQAIERSAQGTTYGSLLNSMRTTIRNTGNDGGGSGGVVTTVLSMLLTGGSAIGGLRQEPQLTACQTFDVYAKPFTL

SEQ ID NO: 72476 - protein, 366 aa, Arabidopsis thaliana
  peptide (1)..(366): Ceres Seq. ID no. 4935676
MLVNCSGCRTPLQLPSGARSIRCALCQAVTHIADPRTAPPPQPSSAPSPPPQIHAPPGQLPHPHGRKRAVICGISYRFSRHELKGCINDAKCMRHLLINKFKFSPDSILMLTEEETDPYRIPTKQNMRMALYWLVQGCTAGDSLVFHYSGHGSRQRNYNGDEVDGYDETLCPLDFETQGMIVDDEINATIVRPLPHGVKLHSIIDACHSGTVLDLPFLCRMNRAGQYVWEDHRPRSGLWKGTAGGEAISISGCDDDQTSADTSLVPPLMIKTHTQALSKITSTGAMTFCFIQAIERSAQGTTYGSLLNSMRTTIRNTGNDGGGSGGVVTTVLSMLLTGGSAIGGLRQEPQLTACQTFDVYAKPFTL

SEQ ID NO: 72477 - protein, 274 aa, Arabidopsis thaliana
  peptide (1)..(274): Ceres Seq. ID no. 4935677
MRHLLINKFKFSPDSILMLTEEETDPYRIPTKQNMRMALYWLVQGCTAGDSLVFHYSGHGSRQRNYNGDEVDGYDETLCPLDFETQGMIVDDEINATIVRPLPHGVKLHSIIDACHSGTVLDLPFLCRMNRAGQYVWEDHRPRSGLWKGTAGGEAISISGCDDDQTSADTSLVPPLMIKTHTQALSKITSTGAMTFCFIQAIERSAQGTTYGSLLNSMRTTIRNTGNDGGGSGGVVTTVLSMLLTGGSAIGGLRQEPQLTACQTFDVYAKPFTL

SEQ ID NO: 72478 - DNA, 1671 bp, Arabidopsis thaliana
  misc_feature (1)..(1671): Ceres Seq. ID no. 4935684
  misc_feature (1)..(1671): Ortholog of  Ceres SEQ ID NO 15170524 as cited in SEQ ID NO 55695
atgggccaagaaagtgagagcccaaaagaggccgatcgttcgtttttgactcaatggccgttgacgttgacatcgtacgccgcacccaacgaccgccaaacagcaaacaacaacactttcccctttctctctctaaacatggcgatgctttctactgcttccgtttcggggagcgtcgaccttcctcgaggaaccatgaaggttgactcgtctgcgtctccggaggtcgtatccgatctcccaccatcttccccaaagggctcacctgatcgccatgacccttccacttcttctccgagccccagtcgtggtggtgacaatcagtctgaagtcatatccaagagtgaagagtatcggcaattgtttcggcttccagctgacgaaggtcatatgtacctcttcatccattatatctgcttttactccaacatctttggttatgagaccaagaaaattatcccatttgctgaaatatcttgtgttaaacgagccaagactgctggtatttttcctaatgccattgagattttagctggagggaagaagtacttttttgcatcgtttctttcccgcgatgaagctttcaagcttatccatgatggatggttggaatatggtagtgctgtcaaatcagaaggcgagattctggtgaccgaaccgcaggtaagcgatggagttgttaaaagggcacgcagttccatggatttggccaatgaactagatattccagtaagggatgaaactcttcatctttccagcagttccagtcttcctgtcattagtcagaatggcgttccaccttcatccgttcagcggcacgctgaaccagatgtagatgttgtggcggccaatactttcaactggaagcctgaagatacagatgcacctaaattgtcatctgactttacaaagattccagtagaagagttctttagattgtttttttcagatggtgctgtcagttttgttgaatctttccataaaaattgtggagacaaaggtgcaaagtttggtggctgccaggagtcacagaaatttcggatgtacagaaatagccatctggttattgaaacatcacaggagatcagcgatgtgccttatgcagattattttacggtagagggagtctgggacttgaaaagagattgcagagactcggtagaaggttgtatattggatgtttatgtcaatgtggccttctctaaaagaacagtgtggaaagggaataagttgattgaggatggtgaaccgctagcagcaagggaagaaagagtatctgaatgtgacgaggaggggaaggtggaaatggtgggcgaaggggtagttaaaaaaagcttaaaggaagcatgggtgaatctgacttcatttgtgaagaggcaaagcgggacaaggcaggttatagtattagcgtttgcagtaatcttactgatgcaggtgacgatagtggtgctactgaaaaaaggaggaggggggcaagtggagtatcatgagaggtacgacgagtacagtgtaaacggggagactttggggtggttagagaagagaatgcatttcctgagggaagagatgatgatggttgaggatcgtttgcagaggatgcgacaagaccatgccgccttgaaggctcagttccaccatttggaacgcctcctccgccgcaacaaacagtaa

SEQ ID NO: 72479 - protein, 556 aa, Arabidopsis thaliana
  peptide (1)..(556): Ceres Seq. ID no. 4935685
MGQESESPKEADRSFLTQWPLTLTSYAAPNDRQTANNNTFPFLSLNMAMLSTASVSGSVDLPRGTMKVDSSASPEVVSDLPPSSPKGSPDRHDPSTSSPSPSRGGDNQSEVISKSEEYRQLFRLPADEGHMYLFIHYICFYSNIFGYETKKIIPFAEISCVKRAKTAGIFPNAIEILAGGKKYFFASFLSRDEAFKLIHDGWLEYGSAVKSEGEILVTEPQVSDGVVKRARSSMDLANELDIPVRDETLHLSSSSSLPVISQNGVPPSSVQRHAEPDVDVVAANTFNWKPEDTDAPKLSSDFTKIPVEEFFRLFFSDGAVSFVESFHKNCGDKGAKFGGCQESQKFRMYRNSHLVIETSQEISDVPYADYFTVEGVWDLKRDCRDSVEGCILDVYVNVAFSKRTVWKGNKLIEDGEPLAAREERVSECDEEGKVEMVGEGVVKKSLKEAWVNLTSFVKRQSGTRQVIVLAFAVILLMQVTIVVLLKKGGGGQVEYHERYDEYSVNGETLGWLEKRMHFLREEMMMVEDRLQRMRQDHAALKAQFHHLERLLRRNKQ

SEQ ID NO: 72480 - protein, 510 aa, Arabidopsis thaliana
  peptide (1)..(510): Ceres Seq. ID no. 4935686
MAMLSTASVSGSVDLPRGTMKVDSSASPEVVSDLPPSSPKGSPDRHDPSTSSPSPSRGGDNQSEVISKSEEYRQLFRLPADEGHMYLFIHYICFYSNIFGYETKKIIPFAEISCVKRAKTAGIFPNAIEILAGGKKYFFASFLSRDEAFKLIHDGWLEYGSAVKSEGEILVTEPQVSDGVVKRARSSMDLANELDIPVRDETLHLSSSSSLPVISQNGVPPSSVQRHAEPDVDVVAANTFNWKPEDTDAPKLSSDFTKIPVEEFFRLFFSDGAVSFVESFHKNCGDKGAKFGGCQESQKFRMYRNSHLVIETSQEISDVPYADYFTVEGVWDLKRDCRDSVEGCILDVYVNVAFSKRTVWKGNKLIEDGEPLAAREERVSECDEEGKVEMVGEGVVKKSLKEAWVNLTSFVKRQSGTRQVIVLAFAVILLMQVTIVVLLKKGGGGQVEYHERYDEYSVNGETLGWLEKRMHFLREEMMMVEDRLQRMRQDHAALKAQFHHLERLLRRNKQ

SEQ ID NO: 72481 - protein, 508 aa, Arabidopsis thaliana
  peptide (1)..(508): Ceres Seq. ID no. 4935687
MLSTASVSGSVDLPRGTMKVDSSASPEVVSDLPPSSPKGSPDRHDPSTSSPSPSRGGDNQSEVISKSEEYRQLFRLPADEGHMYLFIHYICFYSNIFGYETKKIIPFAEISCVKRAKTAGIFPNAIEILAGGKKYFFASFLSRDEAFKLIHDGWLEYGSAVKSEGEILVTEPQVSDGVVKRARSSMDLANELDIPVRDETLHLSSSSSLPVISQNGVPPSSVQRHAEPDVDVVAANTFNWKPEDTDAPKLSSDFTKIPVEEFFRLFFSDGAVSFVESFHKNCGDKGAKFGGCQESQKFRMYRNSHLVIETSQEISDVPYADYFTVEGVWDLKRDCRDSVEGCILDVYVNVAFSKRTVWKGNKLIEDGEPLAAREERVSECDEEGKVEMVGEGVVKKSLKEAWVNLTSFVKRQSGTRQVIVLAFAVILLMQVTIVVLLKKGGGGQVEYHERYDEYSVNGETLGWLEKRMHFLREEMMMVEDRLQRMRQDHAALKAQFHHLERLLRRNKQ

SEQ ID NO: 72482 - DNA, 6681 bp, Arabidopsis thaliana
  misc_feature (1)..(6681): Ceres Seq. ID no. 4935696
  misc_feature (1)..(6681): Ortholog of  Ceres SEQ ID NO 15180181 as cited in SEQ ID NO 0
atgactccctccaaggtcgccggtcatacccggttcttgctccacagctttcatgattccgatgtcgactccatcgccctccagctttctcagtttgttgattttggagtcgagactagtattccagttctcaagacctgcctggattgcttcaccgcccggagaagccatcctaattcgttgcagcttgagaaagttgtatccttgctctttaaacatgtgctcaagttgtcaaaccttgccaccctgcttcctcacgccctcaatgattttgagctcactcaagaatccgtggatgatttgactactactttgaatttttcaatctctgagaatattggctttgctctcgccctgaccgattttgaaagattagatgcaaagaccactggacggaacttactgttggctcagattgagcaactctgtgccaatactggccagattctttcatctgagctaatccattctgttctttcgtttctccgcaaatctgaggatctttccatgcatttggattccttcttacagtttttgtcttctgctcaacctagagatgacttctcttttgctctaacacctatgcttgctcaacaagttcatgaagctcctgttttcaggagcatggattttcacactgattctgctgataacgaccttgatgctatcttagctgaaatcgataaggaagtcagcgttggagatctcatgggagaattaggttgtggattcactgctgatgcccaacaatgcaaagaaatcttgtctagttttgctccactaggagaggctactatctcaagaattgttggcaatgtttctcggacctgtgctgatcttgaagataatcaaaccaccttttcaacgtttactgtagcccttggttcctgcattccaactgaacttcccacgccaaggtcgtggaatgttgatattctagttgacacaatcaagcagcttgctcctggcataagctggaggaaagtaattgagaatctcgatcatgacggatttgacatccctaatatggagtctttctcattttttatgcggatctataaagctgcttgcaaggagccatttcctcttgatgctgtatgtggttctgtctggaaaaatatggatggtcaattatcctttcttaagcacgcaatatctgctccaccagaagtattcacctttatgcattctccaaggaagctgattctctctgttgtcttagaatcagttccagtctcatccagtatcagattggcagtccttgcctcattgagaggtcttttggacattgagaactggttgcctaactgcttgtatatgtataaggatctctttgctgaggagtgcctcaaatttgtcaaaaatgtgcattttagcgaatcagacgatttcagggccaaaatttttcatccttctgatccattatcagatcttcatttggaagcaacaacttcccttttaaaagttttgaaagctcatgataatgcgattacttcatctcaactggtcgaggagattgaaaaagtcaatgcagctattttggattgtaatcctaagctgcagaatggtgaggctaaagattcatcagctcccaatgcatatggagatgatgttgaggcagaggcaaacgcatattttcatcaaatgttttctagtcatttgagtgttgacgcaatggttcaaatgctttcccgatacaaggaatctttggttccaagggaaaaattaatttttgaatgcatgattgctaatctgtttgaagaatatcggtttttccccaagtatcctgagagacagctgaaaatagcctccatactctttggttctgttataaaacaccagcttataagttcgctcactctggggatggccctgcgtctagtgttggattctttgcgtaaacctgcagattcaaaaatgtttctgtttggaagcaaagctctggaacagtttgtgaatcgtctggttgaattgcctcaatactgtaaccatattttgcaaatatctcatctgcgtagtactcacccggagttagtcactgttattgaacaagcactttcaaggatatcatctggtaatttagaatcagatgcctctgtttcacaccctggtccctcacaatctttccctggaaatggcgagttgagtggttctggaattggccaacctgcattacagctttcttctcccctacagcttcaacagaaaaatgaagtgccaagtgtgccatctaacgaggcaaagccacttctgccatcgttatcaactacttccgttgatgtttctgtcaatcctaagaatcctggcattccaacttcttcatcaacctcaactggttttgttcgtccagctcgtgcaaccacttcaacaaggtttggctcggctttgaacatagaaaccttggttgcagcagcagaaagaagggaaaacgcaatcgaggctccaccttcagatgttcaggacaaagtttcgttcataatcaataatatctctacaacaaacattgaatctaaagggaaagagtttgctgaaattttgccccaacagtattatccttggtttgcacagtacatggttatgaaaagagcgatgtgtttaatacctgatagagcgagcatcgagccgaattttcatgatctgtacctgaagttcttggacaaagttgattccaagctgctgtttaaggagatacttcaaaatacttacgaaaattgcaaggttcttttgggctcagagctcataaagtcgagttctgaagagcgttctcttcttaaaaatttaggcagttggcttggaaggttgaccattggaaggaattatgttttaagggcgcgagaaatagatccaaaatccttgattgtggaggcctatgaaaaagggttgatgatagcagtcattccgttcacttcaaaggttctggagccatgccaaaacagtattgcttatcaacctcccaatccttggacgatggctatactagggttgcttgctgagatctattcaatgccaaacctaaaaatgaatctgaagtttgacatagaggttttattcaagaaccttggtgttgaaatgaaggaagtagtgccaacttcccttctaaaggatcggaagagagaaatagatggcaatcctgattttagtaacaaagatcctggagtaacacagatatctcagccacagatgattccagagcctaaaacaatttctcctcttaaacaaattgacctacctcttgatgttgcaaattcgcctaatacagatgttccctcgaagttattatcacagtatgtagccccacaacgtgtttatactaatactttgatggatgaggagaaagtagcaactcttggcttgccagaacagctcccgtcacctcaaggactgttccagtcaactccatcgccattgttttctattagtcagcagctgtcagcagcacttcccaatattggaaatcatgttgttatcaatcagaaattaagcgcatttggtatgcactttccatttcaaagagtggtaccacttgccatggacagagctatcaaggagattgtgtctggtattgttcagcgaagtgtttgtattgcatgccaaacaacaaaggagcttgtgctaaaggattacgccctggaacccgatgagtcacgtatttataatgcagctcacttgatggttgcgagtttagctgggagtttggctcatgtgacttgcaaggaacccctgcgcacttcaatatccggtcatctacggaattcgcttcagggtctgaatatttcaaatgatgctcttgaacaaattgtgcaacttgtcaccaatgacaacctggatttgggttgtgctgctattgaacaggctgctacagaaaaggcaatacaaacaattgatgcggacattgctcaacaattgttgttacggagaaagcatagagatggtgctggatcctcctttttcgatccaaacattctatcacagaattccgtcagttttatacccgaatccctccgtccaaaacctggacacctctccctgtctcagcagagagtttatgaggactttgttcaacatccttggcaaaagcagtcgacccaaacttcacacggtttatctgctgcatcaagctcatctggtgatgttgcgcttggtagtggttatggtccagtatcaggaaaagttgcttctgaatttttgtctaatgctggaaacgctcggatggacatggtctcccggccatcagatatttctgtggatggttttgaatcttctccagtctcacttttgagctcacaagtcgatccagctggtgactcatccagtcttcaatttactaagtcactaccaacctctgaattgaatctggctgaatcctctgacgctgctacgaaagaaactggaacatcactgcagacattgacttcagctgctaccatggaacgacttggtgctagtaatattacacagccttcactgtccacgagagatgcactggataaatgtcaaattgttactcagaaggccgtaatttctgaagttcctgaaatcatcctcagatgtataagcagagatgaagccgcttttgctgtcgctcaaaaagctttcaaggctctttacgagaatgcatcaagtaaccttcacgtcagtgctaacctagcaatacttgttgctatccgtgatgtttgcaagcgtgttgttaaagagctcactagttgggtgatttattcagaggaggatcggaagctcaacaaagatattactattggtcttatccagcgtgagttgcttagcctagcggagtacaatgtccacatggcgaagcatcttgatggagggagaaacaagaccgcaactgactttgctatttctctactccaatccttggtcactgaggagtcgagtgtcatttcagagctccacagtcttgttgatgcgctggcaaagcttgcctcaaaatccggatcttctgagtcattgcaacagctaattgacatcatacgaaatccagttactaacacagctggcctctctgatagttcaaccggaaatgataacaacgataggcaaaaggatgagaaggttgcgtgcaacaccactaacacagaagagagtaccagcttggattatgtggaatcagatcctgcgggtttccagaatcgggtgtccacgctatttaaaaactggtatcaaatctgcgaacttcctggtgcaaatgaaaccgcatgttcacaatatgtcctgcatttgcaccagactggattacttaagggagatgatacaacagagagttttttccgaattcttctggaactttctgttgctcattgtatatcttctgaagatattaattccggtgctgtgcaatctcctcagcaacctcagagtccatcattccttatcattgatatgtatgcaaagcttgttttttcaatattgaagatcatggctgacacagtgagatttattcaaaaggacgcagaagataaaaagacatcactcaattctaaaccatatttccgattgttcatcaactggctactggacttgtgttccctggatcctgggacggatggtgcaaactttcaggttctcacagcttttgccaacgccttccacgcattgcagcctcttaagattcctgctttcagttttgcatggctagaacttgtcagccacagaagcttcatgcccaaactacttacagtaaatggccagaagggttggccatatgttcagcgcctgctggtggacttgcttcagtttcttgagccatttttaagaaatgctgaactcggaggaccggttcatttcctatacaaagggacattgagagtattactggttctgcttcatgatttcccagagttcctatgtgattatcattttactttctgtgatgtgattccttcaagttgcatacaaatgcggaatattatcctcagttcttttccacggaacatgaggcttcctgatccttctaccccaaatttaaagattgatttgttacctgagatagtagaagctccctgtatcctttctgaggttgatgctgcgctaaaggcaaagcaaatgaagaatgacgtggatgagtatcttacgtcgaggcagcaaaattcaactttcctaagtgagttgaagacaaagttacttctatcgtccagcgaggctagttcagctggaacccgttacagtgtaccattgatcaactcgcttgtgctatatactggaatgcaggctattcagcagcttcaggccggtgagacacaggctcaaaatgttgtggccttgcagatgttcaagtatttaagtatggaacttgatacggaagggcggtatctgttccttaatgcaatcgccaatcagcttcgataccccaacaaccacactcattacttttctttcatcatgctctatctattcttcgaatctgatcaggagatcatacaggagcaaataactagagtgctgttggaacggctaattgtgaacaggccacatccatggggacttctaatcacattcattgagctaataaagaacccaagatatagcttctggaaacaagccttcatcagatgtgcgcctgagattgagaagctgtttgaatcggtagccagatcctgtggtggcctgaagcctgtcgacgagggaatggtttcgggaggttgggtctcagacaattctcactag

SEQ ID NO: 72483 - protein, 2226 aa, Arabidopsis thaliana
  peptide (1)..(2226): Ceres Seq. ID no. 4935697
MTPSKVAGHTRFLLHSFHDSDVDSIALQLSQFVDFGVETSIPVLKTCLDCFTARRSHPNSLQLEKVVSLLFKHVLKLSNLATLLPHALNDFELTQESVDDLTTTLNFSISENIGFALALTDFERLDAKTTGRNLLLAQIEQLCANTGQILSSELIHSVLSFLRKSEDLSMHLDSFLQFLSSAQPRDDFSFALTPMLAQQVHEAPVFRSMDFHTDSADNDLDAILAEIDKEVSVGDLMGELGCGFTADAQQCKEILSSFAPLGEATISRIVGNVSRTCADLEDNQTTFSTFTVALGSCIPTELPTPRSWNVDILVDTIKQLAPGISWRKVIENLDHDGFDIPNMESFSFFMRIYKAACKEPFPLDAVCGSVWKNMDGQLSFLKHAISAPPEVFTFMHSPRKLILSVVLESVPVSSSIRLAVLASLRGLLDIENWLPNCLYMYKDLFAEECLKFVKNVHFSESDDFRAKIFHPSDPLSDLHLEATTSLLKVLKAHDNAITSSQLVEEIEKVNAAILDCNPKLQNGEAKDSSAPNAYGDDVEAEANAYFHQMFSSHLSVDAMVQMLSRYKESLVPREKLIFECMIANLFEEYRFFPKYPERQLKIASILFGSVIKHQLISSLTLGMALRLVLDSLRKPADSKMFLFGSKALEQFVNRLVELPQYCNHILQISHLRSTHPELVTVIEQALSRISSGNLESDASVSHPGPSQSFPGNGELSGSGIGQPALQLSSPLQLQQKNEVPSVPSNEAKPLLPSLSTTSVDVSVNPKNPGIPTSSSTSTGFVRPARATTSTRFGSALNIETLVAAAERRENAIEAPPSDVQDKVSFIINNISTTNIESKGKEFAEILPQQYYPWFAQYMVMKRAMCLIPDRASIEPNFHDLYLKFLDKVDSKLLFKEILQNTYENCKVLLGSELIKSSSEERSLLKNLGSWLGRLTIGRNYVLRAREIDPKSLIVEAYEKGLMIAVIPFTSKVLEPCQNSIAYQPPNPWTMAILGLLAEIYSMPNLKMNLKFDIEVLFKNLGVEMKEVVPTSLLKDRKREIDGNPDFSNKDPGVTQISQPQMIPEPKTISPLKQIDLPLDVANSPNTDVPSKLLSQYVAPQRVYTNTLMDEEKVATLGLPEQLPSPQGLFQSTPSPLFSISQQLSAALPNIGNHVVINQKLSAFGMHFPFQRVVPLAMDRAIKEIVSGIVQRSVCIACQTTKELVLKDYALEPDESRIYNAAHLMVASLAGSLAHVTCKEPLRTSISGHLRNSLQGLNISNDALEQIVQLVTNDNLDLGCAAIEQAATEKAIQTIDADIAQQLLLRRKHRDGAGSSFFDPNILSQNSVSFIPESLRPKPGHLSLSQQRVYEDFVQHPWQKQSTQTSHGLSAASSSSGDVALGSGYGPVSGKVASEFLSNAGNARMDMVSRPSDISVDGFESSPVSLLSSQVDPAGDSSSLQFTKSLPTSELNLAESSDAATKETGTSLQTLTSAATMERLGASNITQPSLSTRDALDKCQIVTQKAVISEVPEIILRCISRDEAAFAVAQKAFKALYENASSNLHVSANLAILVAIRDVCKRVVKELTSWVIYSEEDRKLNKDITIGLIQRELLSLAEYNVHMAKHLDGGRNKTATDFAISLLQSLVTEESSVISELHSLVDALAKLASKSGSSESLQQLIDIIRNPVTNTAGLSDSSTGNDNNDRQKDEKVACNTTNTEESTSLDYVESDPAGFQNRVSTLFKNWYQICELPGANETACSQYVLHLHQTGLLKGDDTTESFFRILLELSVAHCISSEDINSGAVQSPQQPQSPSFLIIDMYAKLVFSILKIMADTVRFIQKDAEDKKTSLNSKPYFRLFINWLLDLCSLDPGTDGANFQVLTAFANAFHALQPLKIPAFSFAWLELVSHRSFMPKLLTVNGQKGWPYVQRLLVDLLQFLEPFLRNAELGGPVHFLYKGTLRVLLVLLHDFPEFLCDYHFTFCDVIPSSCIQMRNIILSSFPRNMRLPDPSTPNLKIDLLPEIVEAPCILSEVDAALKAKQMKNDVDEYLTSRQQNSTFLSELKTKLLLSSSEASSAGTRYSVPLINSLVLYTGMQAIQQLQAGETQAQNVVALQMFKYLSMELDTEGRYLFLNAIANQLRYPNNHTHYFSFIMLYLFFESDQEIIQEQITRVLLERLIVNRPHPWGLLITFIELIKNPRYSFWKQAFIRCAPEIEKLFESVARSCGGLKPVDEGMVSGGWVSDNSH

SEQ ID NO: 72484 - protein, 2057 aa, Arabidopsis thaliana
  peptide (1)..(2057): Ceres Seq. ID no. 4935698
MHLDSFLQFLSSAQPRDDFSFALTPMLAQQVHEAPVFRSMDFHTDSADNDLDAILAEIDKEVSVGDLMGELGCGFTADAQQCKEILSSFAPLGEATISRIVGNVSRTCADLEDNQTTFSTFTVALGSCIPTELPTPRSWNVDILVDTIKQLAPGISWRKVIENLDHDGFDIPNMESFSFFMRIYKAACKEPFPLDAVCGSVWKNMDGQLSFLKHAISAPPEVFTFMHSPRKLILSVVLESVPVSSSIRLAVLASLRGLLDIENWLPNCLYMYKDLFAEECLKFVKNVHFSESDDFRAKIFHPSDPLSDLHLEATTSLLKVLKAHDNAITSSQLVEEIEKVNAAILDCNPKLQNGEAKDSSAPNAYGDDVEAEANAYFHQMFSSHLSVDAMVQMLSRYKESLVPREKLIFECMIANLFEEYRFFPKYPERQLKIASILFGSVIKHQLISSLTLGMALRLVLDSLRKPADSKMFLFGSKALEQFVNRLVELPQYCNHILQISHLRSTHPELVTVIEQALSRISSGNLESDASVSHPGPSQSFPGNGELSGSGIGQPALQLSSPLQLQQKNEVPSVPSNEAKPLLPSLSTTSVDVSVNPKNPGIPTSSSTSTGFVRPARATTSTRFGSALNIETLVAAAERRENAIEAPPSDVQDKVSFIINNISTTNIESKGKEFAEILPQQYYPWFAQYMVMKRAMCLIPDRASIEPNFHDLYLKFLDKVDSKLLFKEILQNTYENCKVLLGSELIKSSSEERSLLKNLGSWLGRLTIGRNYVLRAREIDPKSLIVEAYEKGLMIAVIPFTSKVLEPCQNSIAYQPPNPWTMAILGLLAEIYSMPNLKMNLKFDIEVLFKNLGVEMKEVVPTSLLKDRKREIDGNPDFSNKDPGVTQISQPQMIPEPKTISPLKQIDLPLDVANSPNTDVPSKLLSQYVAPQRVYTNTLMDEEKVATLGLPEQLPSPQGLFQSTPSPLFSISQQLSAALPNIGNHVVINQKLSAFGMHFPFQRVVPLAMDRAIKEIVSGIVQRSVCIACQTTKELVLKDYALEPDESRIYNAAHLMVASLAGSLAHVTCKEPLRTSISGHLRNSLQGLNISNDALEQIVQLVTNDNLDLGCAAIEQAATEKAIQTIDADIAQQLLLRRKHRDGAGSSFFDPNILSQNSVSFIPESLRPKPGHLSLSQQRVYEDFVQHPWQKQSTQTSHGLSAASSSSGDVALGSGYGPVSGKVASEFLSNAGNARMDMVSRPSDISVDGFESSPVSLLSSQVDPAGDSSSLQFTKSLPTSELNLAESSDAATKETGTSLQTLTSAATMERLGASNITQPSLSTRDALDKCQIVTQKAVISEVPEIILRCISRDEAAFAVAQKAFKALYENASSNLHVSANLAILVAIRDVCKRVVKELTSWVIYSEEDRKLNKDITIGLIQRELLSLAEYNVHMAKHLDGGRNKTATDFAISLLQSLVTEESSVISELHSLVDALAKLASKSGSSESLQQLIDIIRNPVTNTAGLSDSSTGNDNNDRQKDEKVACNTTNTEESTSLDYVESDPAGFQNRVSTLFKNWYQICELPGANETACSQYVLHLHQTGLLKGDDTTESFFRILLELSVAHCISSEDINSGAVQSPQQPQSPSFLIIDMYAKLVFSILKIMADTVRFIQKDAEDKKTSLNSKPYFRLFINWLLDLCSLDPGTDGANFQVLTAFANAFHALQPLKIPAFSFAWLELVSHRSFMPKLLTVNGQKGWPYVQRLLVDLLQFLEPFLRNAELGGPVHFLYKGTLRVLLVLLHDFPEFLCDYHFTFCDVIPSSCIQMRNIILSSFPRNMRLPDPSTPNLKIDLLPEIVEAPCILSEVDAALKAKQMKNDVDEYLTSRQQNSTFLSELKTKLLLSSSEASSAGTRYSVPLINSLVLYTGMQAIQQLQAGETQAQNVVALQMFKYLSMELDTEGRYLFLNAIANQLRYPNNHTHYFSFIMLYLFFESDQEIIQEQITRVLLERLIVNRPHPWGLLITFIELIKNPRYSFWKQAFIRCAPEIEKLFESVARSCGGLKPVDEGMVSGGWVSDNSH

SEQ ID NO: 72485 - protein, 2032 aa, Arabidopsis thaliana
  peptide (1)..(2032): Ceres Seq. ID no. 4935699
MLAQQVHEAPVFRSMDFHTDSADNDLDAILAEIDKEVSVGDLMGELGCGFTADAQQCKEILSSFAPLGEATISRIVGNVSRTCADLEDNQTTFSTFTVALGSCIPTELPTPRSWNVDILVDTIKQLAPGISWRKVIENLDHDGFDIPNMESFSFFMRIYKAACKEPFPLDAVCGSVWKNMDGQLSFLKHAISAPPEVFTFMHSPRKLILSVVLESVPVSSSIRLAVLASLRGLLDIENWLPNCLYMYKDLFAEECLKFVKNVHFSESDDFRAKIFHPSDPLSDLHLEATTSLLKVLKAHDNAITSSQLVEEIEKVNAAILDCNPKLQNGEAKDSSAPNAYGDDVEAEANAYFHQMFSSHLSVDAMVQMLSRYKESLVPREKLIFECMIANLFEEYRFFPKYPERQLKIASILFGSVIKHQLISSLTLGMALRLVLDSLRKPADSKMFLFGSKALEQFVNRLVELPQYCNHILQISHLRSTHPELVTVIEQALSRISSGNLESDASVSHPGPSQSFPGNGELSGSGIGQPALQLSSPLQLQQKNEVPSVPSNEAKPLLPSLSTTSVDVSVNPKNPGIPTSSSTSTGFVRPARATTSTRFGSALNIETLVAAAERRENAIEAPPSDVQDKVSFIINNISTTNIESKGKEFAEILPQQYYPWFAQYMVMKRAMCLIPDRASIEPNFHDLYLKFLDKVDSKLLFKEILQNTYENCKVLLGSELIKSSSEERSLLKNLGSWLGRLTIGRNYVLRAREIDPKSLIVEAYEKGLMIAVIPFTSKVLEPCQNSIAYQPPNPWTMAILGLLAEIYSMPNLKMNLKFDIEVLFKNLGVEMKEVVPTSLLKDRKREIDGNPDFSNKDPGVTQISQPQMIPEPKTISPLKQIDLPLDVANSPNTDVPSKLLSQYVAPQRVYTNTLMDEEKVATLGLPEQLPSPQGLFQSTPSPLFSISQQLSAALPNIGNHVVINQKLSAFGMHFPFQRVVPLAMDRAIKEIVSGIVQRSVCIACQTTKELVLKDYALEPDESRIYNAAHLMVASLAGSLAHVTCKEPLRTSISGHLRNSLQGLNISNDALEQIVQLVTNDNLDLGCAAIEQAATEKAIQTIDADIAQQLLLRRKHRDGAGSSFFDPNILSQNSVSFIPESLRPKPGHLSLSQQRVYEDFVQHPWQKQSTQTSHGLSAASSSSGDVALGSGYGPVSGKVASEFLSNAGNARMDMVSRPSDISVDGFESSPVSLLSSQVDPAGDSSSLQFTKSLPTSELNLAESSDAATKETGTSLQTLTSAATMERLGASNITQPSLSTRDALDKCQIVTQKAVISEVPEIILRCISRDEAAFAVAQKAFKALYENASSNLHVSANLAILVAIRDVCKRVVKELTSWVIYSEEDRKLNKDITIGLIQRELLSLAEYNVHMAKHLDGGRNKTATDFAISLLQSLVTEESSVISELHSLVDALAKLASKSGSSESLQQLIDIIRNPVTNTAGLSDSSTGNDNNDRQKDEKVACNTTNTEESTSLDYVESDPAGFQNRVSTLFKNWYQICELPGANETACSQYVLHLHQTGLLKGDDTTESFFRILLELSVAHCISSEDINSGAVQSPQQPQSPSFLIIDMYAKLVFSILKIMADTVRFIQKDAEDKKTSLNSKPYFRLFINWLLDLCSLDPGTDGANFQVLTAFANAFHALQPLKIPAFSFAWLELVSHRSFMPKLLTVNGQKGWPYVQRLLVDLLQFLEPFLRNAELGGPVHFLYKGTLRVLLVLLHDFPEFLCDYHFTFCDVIPSSCIQMRNIILSSFPRNMRLPDPSTPNLKIDLLPEIVEAPCILSEVDAALKAKQMKNDVDEYLTSRQQNSTFLSELKTKLLLSSSEASSAGTRYSVPLINSLVLYTGMQAIQQLQAGETQAQNVVALQMFKYLSMELDTEGRYLFLNAIANQLRYPNNHTHYFSFIMLYLFFESDQEIIQEQITRVLLERLIVNRPHPWGLLITFIELIKNPRYSFWKQAFIRCAPEIEKLFESVARSCGGLKPVDEGMVSGGWVSDNSH

SEQ ID NO: 72486 - DNA, 501 bp, Arabidopsis thaliana
  misc_feature (1)..(501): Ceres Seq. ID no. 4935722
  misc_feature (1)..(501): Ortholog of  Ceres SEQ ID NO 15224680 as cited in SEQ ID NO 59829
  misc_feature (1)..(501): Ortholog of  Ceres SEQ ID NO 13594273 as cited in SEQ ID NO 60013
atggtgagtcgtttgtccatttcggtaactttgcacacgaacctgggtgacatcaagtgcgaaatcttctgtgacgaggttcccaagagtgctgagaactttttggcgttgtgtgctagtggctactacgatggtactatctttcatagaaatatcaaagggttcatgattcaaggaggagaccccaaggggaccggaaaaggaggaactagcatctggggcaagaaattcaatgatgagatccgagactcccttaagcacaatgcaagagggatgctgtcaatggcaaacagcggtccaaacaccaacggaagccagttcttcataacctatgcaaaacaaccacatctcaatggattatacaccatctttggcaaagtcattcatggcttcgaagtgcttgacattatggaaaagactcaaacaggaccaggagataggccgcttgctgagataaggctaaaccgtgtgacgatccacgccaatccacttgctggttaa

SEQ ID NO: 72487 - protein, 166 aa, Arabidopsis thaliana
  peptide (1)..(166): Ceres Seq. ID no. 4935723
MVSRLSISVTLHTNLGDIKCEIFCDEVPKSAENFLALCASGYYDGTIFHRNIKGFMIQGGDPKGTGKGGTSIWGKKFNDEIRDSLKHNARGMLSMANSGPNTNGSQFFITYAKQPHLNGLYTIFGKVIHGFEVLDIMEKTQTGPGDRPLAEIRLNRVTIHANPLAG

SEQ ID NO: 72488 - protein, 111 aa, Arabidopsis thaliana; identical to SEQ ID NO: 20914
  peptide (1)..(111): Ceres Seq. ID no. 4935724

SEQ ID NO: 72489 - DNA, 1104 bp, Arabidopsis thaliana
  misc_feature (1)..(1104): Ceres Seq. ID no. 4935733
  misc_feature (1)..(1104): Ortholog of  Ceres SEQ ID NO 15171708 as cited in SEQ ID NO 60063
atgtacccgccacctccctcaagcatctacgctcctccgatgctggtgaattgctccggttgccggacgcctctccagctcccatccggcgcccgatctattcgctgcgctctctgccaggctgttactcatatcgccgaccctcgcaccgcccctcctccgcaaccttcctccgccccttctccgcctccccaaatccacgcgcctcccggtcagctgcctcacccccatggcaggaagagggccgtgatctgtggcatctcgtatcgtttctctcgccacgagctcaaaggctgcatcaacgacgccaagtgcatgcgtcaccttctcatcaacaaattcaaattctccccagattcaattctcatgcttaccgaggaagaaactgatccatatcgtatcccgaccaagcaaaacatgaggatggcattgtattggctcgtacagggatgcacagcaggcgactcacttgtcttccactactctggtcatggttcgcgtcaaagaaactacaacggtgatgaagttgatggctatgatgaaacactctgtcctctggattttgaaactcaggggatgattgtagacgatgagatcaacgcaaccattgtacgccctcttccacatggtgtcaagctccattcaattatcgatgcttgccatagtggtaccgttctggatttacccttcctatgcagaatgaacagagctgggcagtatgtgtgggaggatcatcggcctaggtcaggtttgtggaaaggaactgctggtggagaagccatttcaattagtggatgtgatgatgatcagacttcggccgacacatcagcgctgtcgaagatcacgtctacgggtgctatgactttctgttttattcaagcaattgaacgcagcgcacaaggcacaacctatggaagccttctgaattctatgcgcaccacaataaggaatacagggaatgatggtggtggtagtggtggagttgtgacgactgtgctgagcatgcttctgacagggggaagtgcgattgggggattaagacaggagcctcaactgactgcttgccaaacattcgatgtctatgcaaagcctttcactctctag

SEQ ID NO: 72490 - protein, 367 aa, Arabidopsis thaliana
  peptide (1)..(367): Ceres Seq. ID no. 4935734
MYPPPPSSIYAPPMLVNCSGCRTPLQLPSGARSIRCALCQAVTHIADPRTAPPPQPSSAPSPPPQIHAPPGQLPHPHGRKRAVICGISYRFSRHELKGCINDAKCMRHLLINKFKFSPDSILMLTEEETDPYRIPTKQNMRMALYWLVQGCTAGDSLVFHYSGHGSRQRNYNGDEVDGYDETLCPLDFETQGMIVDDEINATIVRPLPHGVKLHSIIDACHSGTVLDLPFLCRMNRAGQYVWEDHRPRSGLWKGTAGGEAISISGCDDDQTSADTSALSKITSTGAMTFCFIQAIERSAQGTTYGSLLNSMRTTIRNTGNDGGGSGGVVTTVLSMLLTGGSAIGGLRQEPQLTACQTFDVYAKPFTL

SEQ ID NO: 72491 - protein, 354 aa, Arabidopsis thaliana
  peptide (1)..(354): Ceres Seq. ID no. 4935735
MLVNCSGCRTPLQLPSGARSIRCALCQAVTHIADPRTAPPPQPSSAPSPPPQIHAPPGQLPHPHGRKRAVICGISYRFSRHELKGCINDAKCMRHLLINKFKFSPDSILMLTEEETDPYRIPTKQNMRMALYWLVQGCTAGDSLVFHYSGHGSRQRNYNGDEVDGYDETLCPLDFETQGMIVDDEINATIVRPLPHGVKLHSIIDACHSGTVLDLPFLCRMNRAGQYVWEDHRPRSGLWKGTAGGEAISISGCDDDQTSADTSALSKITSTGAMTFCFIQAIERSAQGTTYGSLLNSMRTTIRNTGNDGGGSGGVVTTVLSMLLTGGSAIGGLRQEPQLTACQTFDVYAKPFTL

SEQ ID NO: 72492 - protein, 262 aa, Arabidopsis thaliana
  peptide (1)..(262): Ceres Seq. ID no. 4935736
MRHLLINKFKFSPDSILMLTEEETDPYRIPTKQNMRMALYWLVQGCTAGDSLVFHYSGHGSRQRNYNGDEVDGYDETLCPLDFETQGMIVDDEINATIVRPLPHGVKLHSIIDACHSGTVLDLPFLCRMNRAGQYVWEDHRPRSGLWKGTAGGEAISISGCDDDQTSADTSALSKITSTGAMTFCFIQAIERSAQGTTYGSLLNSMRTTIRNTGNDGGGSGGVVTTVLSMLLTGGSAIGGLRQEPQLTACQTFDVYAKPFTL

SEQ ID NO: 72493 - DNA, 1671 bp, Arabidopsis thaliana
  misc_feature (1)..(1671): Ceres Seq. ID no. 4935745
  misc_feature (1)..(1671): Ortholog of  Ceres SEQ ID NO 15170524 as cited in SEQ ID NO 55695
atggcgatgctttctactgcttccgtttcggggagcgtcgaccttcctcgaggaaccatgaaggttgactcgtctgcgtctccggaggtcgtatccgatctcccaccatcttccccaaagggctcacctgatcgccatgacccttccacttcttctccgagccccagtcgtggtggtgacaatcagtctgaagtcatatccaagagtgaagagtatcggcaattgtttcggcttccagctgacgaaatccttgttcaagattttaactgtgcttgtcaggagagtattcttatgcagggtcatatgtacctcttcatccattatatctgcttttactccaacatctttggttatgagaccaagaaaattatcccatttgctgaaatatcttgtgttaaacgagccaagactgctggtatttttcctaatgccattgagattttagctggagggaagaagtacttttttgcatcgtttctttcccgcgatgaagctttcaagcttatccatgatggatggttggaatatggtagtgctgtcaaatcagaaggcgagattctggtgaccgaaccgcaggtaagcgatggagttgttaaaagggcacgcagttccatggatttggccaatgaactagatattccagtaagggatgaaactcttcatctttccagcagttccagtcttcctgtcattagtcagaatggcgttccaccttcatccgttcagcggcacgctgaaccagatgtagatgttgtggcggccaatactttcaactggaagcctgaagatacagatgcacctaaattgtcatctgactttacaaagattccagtagaagagttctttagattgtttttttcagatggtgctgtcagttttgttgaatctttccataaaaattgtggagacaaagagtttaggtgtacctcttggcaacctcatgaaaagcttggacacacccgcaatgtctcatttcaacatccgataaaaatttattttggtgcaaagtttggtggctgccaggagtcacagaaatttcggatgtacagaaatagccatctggttattgaaacatcacaggagatcagcgatgtgccttatgcagattattttacggtagagggagtctgggacttgaaaagagattgcagagactcggtagaaggttgtatattggatgtttatgtcaatgtggccttctctaaaagaacagtgtggaaagggaataagttgattgaggatggtgaaccgctagcagcaagggaagaaagagtatctgaatgtgacgaggaggggaaggtggaaatggtgggcgaaggggtagttaaaaaaagcttaaaggaagcatgggtgaatctgacttcatttgtgaagaggcaaagcgggacaaggcaggttatagtattagcgtttgcagtaatcttactgatgcaggtgacgatagtggtgctactgaaaaaaggaggaggggggcaagtggagtatcatgagaggtacgacgagtacagtgtaaacggggagactttggggtggttagagaagagaatgcatttcctgagggaagagatgatgatggttgaggatcgtttgcagaggatgcgacaagaccatgccgccttgaaggctcagttccaccatttggaacgcctcctccgccgcaacaaacagtaa

SEQ ID NO: 72494 - protein, 556 aa, Arabidopsis thaliana
  peptide (1)..(556): Ceres Seq. ID no. 4935746
MAMLSTASVSGSVDLPRGTMKVDSSASPEVVSDLPPSSPKGSPDRHDPSTSSPSPSRGGDNQSEVISKSEEYRQLFRLPADEILVQDFNCACQESILMQGHMYLFIHYICFYSNIFGYETKKIIPFAEISCVKRAKTAGIFPNAIEILAGGKKYFFASFLSRDEAFKLIHDGWLEYGSAVKSEGEILVTEPQVSDGVVKRARSSMDLANELDIPVRDETLHLSSSSSLPVISQNGVPPSSVQRHAEPDVDVVAANTFNWKPEDTDAPKLSSDFTKIPVEEFFRLFFSDGAVSFVESFHKNCGDKEFRCTSWQPHEKLGHTRNVSFQHPIKIYFGAKFGGCQESQKFRMYRNSHLVIETSQEISDVPYADYFTVEGVWDLKRDCRDSVEGCILDVYVNVAFSKRTVWKGNKLIEDGEPLAAREERVSECDEEGKVEMVGEGVVKKSLKEAWVNLTSFVKRQSGTRQVIVLAFAVILLMQVTIVVLLKKGGGGQVEYHERYDEYSVNGETLGWLEKRMHFLREEMMMVEDRLQRMRQDHAALKAQFHHLERLLRRNKQ

SEQ ID NO: 72495 - protein, 554 aa, Arabidopsis thaliana
  peptide (1)..(554): Ceres Seq. ID no. 4935747
MLSTASVSGSVDLPRGTMKVDSSASPEVVSDLPPSSPKGSPDRHDPSTSSPSPSRGGDNQSEVISKSEEYRQLFRLPADEILVQDFNCACQESILMQGHMYLFIHYICFYSNIFGYETKKIIPFAEISCVKRAKTAGIFPNAIEILAGGKKYFFASFLSRDEAFKLIHDGWLEYGSAVKSEGEILVTEPQVSDGVVKRARSSMDLANELDIPVRDETLHLSSSSSLPVISQNGVPPSSVQRHAEPDVDVVAANTFNWKPEDTDAPKLSSDFTKIPVEEFFRLFFSDGAVSFVESFHKNCGDKEFRCTSWQPHEKLGHTRNVSFQHPIKIYFGAKFGGCQESQKFRMYRNSHLVIETSQEISDVPYADYFTVEGVWDLKRDCRDSVEGCILDVYVNVAFSKRTVWKGNKLIEDGEPLAAREERVSECDEEGKVEMVGEGVVKKSLKEAWVNLTSFVKRQSGTRQVIVLAFAVILLMQVTIVVLLKKGGGGQVEYHERYDEYSVNGETLGWLEKRMHFLREEMMMVEDRLQRMRQDHAALKAQFHHLERLLRRNKQ

SEQ ID NO: 72496 - protein, 537 aa, Arabidopsis thaliana
  peptide (1)..(537): Ceres Seq. ID no. 4935748
MKVDSSASPEVVSDLPPSSPKGSPDRHDPSTSSPSPSRGGDNQSEVISKSEEYRQLFRLPADEILVQDFNCACQESILMQGHMYLFIHYICFYSNIFGYETKKIIPFAEISCVKRAKTAGIFPNAIEILAGGKKYFFASFLSRDEAFKLIHDGWLEYGSAVKSEGEILVTEPQVSDGVVKRARSSMDLANELDIPVRDETLHLSSSSSLPVISQNGVPPSSVQRHAEPDVDVVAANTFNWKPEDTDAPKLSSDFTKIPVEEFFRLFFSDGAVSFVESFHKNCGDKEFRCTSWQPHEKLGHTRNVSFQHPIKIYFGAKFGGCQESQKFRMYRNSHLVIETSQEISDVPYADYFTVEGVWDLKRDCRDSVEGCILDVYVNVAFSKRTVWKGNKLIEDGEPLAAREERVSECDEEGKVEMVGEGVVKKSLKEAWVNLTSFVKRQSGTRQVIVLAFAVILLMQVTIVVLLKKGGGGQVEYHERYDEYSVNGETLGWLEKRMHFLREEMMMVEDRLQRMRQDHAALKAQFHHLERLLRRNKQ

SEQ ID NO: 72497 - DNA, 1278 bp, Arabidopsis thaliana
  misc_feature (1)..(1278): Ceres Seq. ID no. 4936090
  misc_feature (1)..(1278): Ortholog of  Ceres SEQ ID NO 13597407 as cited in SEQ ID NO 64106
atgaatggccccatcgtgtctattgcgcgtgaacttgggtttgaaggcaattctattcttgagggtcttgttgtgagcatatttattgccggtgcatttattggtagcatagtcgccggtccactagttgacaagtttggctaccgacgcacctttcagattttcacgatacccctcattcttggtgcccttgtgagtgcacaagctcactccttggatgagatcttatgtggaagatttcttgttggtcttggtattggcgtcaacacagttcttgttccaatatatatatccgaggttgctccgacgaaatacagaggttcccttggaactttatgtcaaattggcacttgtctcgggataatcttttctcttctcttagggattcctgcagaagatgaccctcattggtggaggacaatgctctatgtagcgagtatgcctggttttcttcttgcacttggtatgcaatttgcagtagaaagtccccgttggctctgtaaggttggacgacttgatgatgccaaagtagtgataagaaacatctggggaggatctgaagtcgagaaagctgtagaagattttcagtcggttatgaagaatagtggctccaacttaaatagcagatggctggaactccttgataaaccacattcacgagttgcattcattgggggctccctttttgtcctacagcaattcgcgggcataaatggcgttctttatttctcatctttaacattccaaaatgttggaatcacgagtggtgctcaagcaagtctatatgttggagtcacaaattttgcaggtgctctgtgtgcgtcttatttgattgataagcaaggaagaaagaagcttcttatcggtagctacttgggaatggcagtctctatgtttcttattgtttatgctgttggtttccccttggatgaagatctgagccagagtttgtcaatacttggaacactcatgtatatattcagttttgcaattggagctggtcctgtaacaggtctcatcatccctgagctaagcagcaacagaacgcgtggaaaaatcatgggtttcagcttctctgtacattgggtctccaacttcttggttggtttgttcttcctggatctggtggagaaatacggggttggaacggtctatgccagctttggctcagtatcattgttggcagcggcattctcacacctcttcacggtggaaacaaagggtcgatcactagaagagatcgaactgtctttgaactccagagacgacctgagttaa

SEQ ID NO: 72498 - protein, 425 aa, Arabidopsis thaliana
  peptide (1)..(425): Ceres Seq. ID no. 4936091
MNGPIVSIARELGFEGNSILEGLVVSIFIAGAFIGSIVAGPLVDKFGYRRTFQIFTIPLILGALVSAQAHSLDEILCGRFLVGLGIGVNTVLVPIYISEVAPTKYRGSLGTLCQIGTCLGIIFSLLLGIPAEDDPHWWRTMLYVASMPGFLLALGMQFAVESPRWLCKVGRLDDAKVVIRNIWGGSEVEKAVEDFQSVMKNSGSNLNSRWLELLDKPHSRVAFIGGSLFVLQQFAGINGVLYFSSLTFQNVGITSGAQASLYVGVTNFAGALCASYLIDKQGRKKLLIGSYLGMAVSMFLIVYAVGFPLDEDLSQSLSILGTLMYIFSFAIGAGPVTGLIIPELSSNRTRGKIMGFSFSVHWVSNFLVGLFFLDLVEKYGVGTVYASFGSVSLLAAAFSHLFTVETKGRSLEEIELSLNSRDDLS

SEQ ID NO: 72499 - protein, 285 aa, Arabidopsis thaliana
  peptide (1)..(285): Ceres Seq. ID no. 4936092
MLYVASMPGFLLALGMQFAVESPRWLCKVGRLDDAKVVIRNIWGGSEVEKAVEDFQSVMKNSGSNLNSRWLELLDKPHSRVAFIGGSLFVLQQFAGINGVLYFSSLTFQNVGITSGAQASLYVGVTNFAGALCASYLIDKQGRKKLLIGSYLGMAVSMFLIVYAVGFPLDEDLSQSLSILGTLMYIFSFAIGAGPVTGLIIPELSSNRTRGKIMGFSFSVHWVSNFLVGLFFLDLVEKYGVGTVYASFGSVSLLAAAFSHLFTVETKGRSLEEIELSLNSRDDLS

SEQ ID NO: 72500 - protein, 279 aa, Arabidopsis thaliana
  peptide (1)..(279): Ceres Seq. ID no. 4936093
MPGFLLALGMQFAVESPRWLCKVGRLDDAKVVIRNIWGGSEVEKAVEDFQSVMKNSGSNLNSRWLELLDKPHSRVAFIGGSLFVLQQFAGINGVLYFSSLTFQNVGITSGAQASLYVGVTNFAGALCASYLIDKQGRKKLLIGSYLGMAVSMFLIVYAVGFPLDEDLSQSLSILGTLMYIFSFAIGAGPVTGLIIPELSSNRTRGKIMGFSFSVHWVSNFLVGLFFLDLVEKYGVGTVYASFGSVSLLAAAFSHLFTVETKGRSLEEIELSLNSRDDLS

SEQ ID NO: 72501 - DNA, 1320 bp, Arabidopsis thaliana
  misc_feature (1)..(1320): Ceres Seq. ID no. 4936172
  misc_feature (1)..(1320): Ortholog of  Ceres SEQ ID NO 12586556 as cited in SEQ ID NO 64667
  misc_feature (1)..(1320): Ortholog of  Ceres SEQ ID NO 14316045 as cited in SEQ ID NO 66810
  misc_feature (1)..(1320): Ortholog of  Ceres SEQ ID NO 13660894 as cited in SEQ ID NO 67475
atgacactcgccggcgtagagcctaaccacatcactttcatagctctactctccgggtgtggtgattttacctccggaagtgaagccttgggcgatttgcttcatgggtatgcttgtaaacttggtcttgatagaaaccatgtcatggttggcaccgcaattatcggcatgtactccaaacgcggccgttttaagaaggctagattggtttttgattacatggaagataaaaattcggttacttggaatacaatgatcgatgggtacatgagaagtggtcaagtcgataacgctgctaagatgttcgacaaaatgcctgaacgagacttgatttcttggacggctatgataaatggctttgttaagaaaggttatcaagaggaagctttgttatggttccgtgaaatgcagatttctggagtaaaaccagattacgttgctattattgctgctcttaacgcttgcacaaaccttggtgctctctcatttggattatgggtacatcgttatgttttgagtcaggatttcaagaacaatgtgagggtgagtaattcactgatcgatttgtattgtcgatgcgggtgtgtggagtttgctcgacaagttttttacaacatggagaaacgaaccgtagtttcgtggaattcagtcattgttggttttgctgctaatggaaatgcacatgaatcattagtctacttcaggaaaatgcaagagaaaggctttaaacctgacgcagtcactttcactggggcgcttaccgcgtgtagccatgtaggtctagttgaagaaggtcttcgatattttcaaattatgaaatgtgattacagaatctcgcctcgaattgagcattatggatgcttagtggatttgtatagtcgggctgggagattggaagacgctttgaagttggtgcagagcatgccaatgaagccaaatgaagttgtgattggatcgttgcttgcagcttgcagcaatcatgggaacaatatcgtcttagcagagaggctgatgaagcatcttaccgacctgaatgtgaaaagccattcaaattatgtgattctctcgaatatgtatgctgctgatggaaaatgggaaggagcaagtaagatgagaaggaagatgaagggtctcggtctaaaaaagcagcctgggtttagttcgatagagattgatgattgcatgcatgtgttcatggccggtgacaatgcccatgttgagaccacttatatccgcgaggtcctggagcttatttcttctgatttgcgattacagggctgtgtagttgaaacccttgctggtgatctcctcaatgcttga

SEQ ID NO: 72502 - protein, 439 aa, Arabidopsis thaliana
  peptide (1)..(439): Ceres Seq. ID no. 4936173
MTLAGVEPNHITFIALLSGCGDFTSGSEALGDLLHGYACKLGLDRNHVMVGTAIIGMYSKRGRFKKARLVFDYMEDKNSVTWNTMIDGYMRSGQVDNAAKMFDKMPERDLISWTAMINGFVKKGYQEEALLWFREMQISGVKPDYVAIIAALNACTNLGALSFGLWVHRYVLSQDFKNNVRVSNSLIDLYCRCGCVEFARQVFYNMEKRTVVSWNSVIVGFAANGNAHESLVYFRKMQEKGFKPDAVTFTGALTACSHVGLVEEGLRYFQIMKCDYRISPRIEHYGCLVDLYSRAGRLEDALKLVQSMPMKPNEVVIGSLLAACSNHGNNIVLAERLMKHLTDLNVKSHSNYVILSNMYAADGKWEGASKMRRKMKGLGLKKQPGFSSIEIDDCMHVFMAGDNAHVETTYIREVLELISSDLRLQGCVVETLAGDLLNA

SEQ ID NO: 72503 - protein, 391 aa, Arabidopsis thaliana
  peptide (1)..(391): Ceres Seq. ID no. 4936174
MVGTAIIGMYSKRGRFKKARLVFDYMEDKNSVTWNTMIDGYMRSGQVDNAAKMFDKMPERDLISWTAMINGFVKKGYQEEALLWFREMQISGVKPDYVAIIAALNACTNLGALSFGLWVHRYVLSQDFKNNVRVSNSLIDLYCRCGCVEFARQVFYNMEKRTVVSWNSVIVGFAANGNAHESLVYFRKMQEKGFKPDAVTFTGALTACSHVGLVEEGLRYFQIMKCDYRISPRIEHYGCLVDLYSRAGRLEDALKLVQSMPMKPNEVVIGSLLAACSNHGNNIVLAERLMKHLTDLNVKSHSNYVILSNMYAADGKWEGASKMRRKMKGLGLKKQPGFSSIEIDDCMHVFMAGDNAHVETTYIREVLELISSDLRLQGCVVETLAGDLLNA

SEQ ID NO: 72504 - protein, 383 aa, Arabidopsis thaliana
  peptide (1)..(383): Ceres Seq. ID no. 4936175
MYSKRGRFKKARLVFDYMEDKNSVTWNTMIDGYMRSGQVDNAAKMFDKMPERDLISWTAMINGFVKKGYQEEALLWFREMQISGVKPDYVAIIAALNACTNLGALSFGLWVHRYVLSQDFKNNVRVSNSLIDLYCRCGCVEFARQVFYNMEKRTVVSWNSVIVGFAANGNAHESLVYFRKMQEKGFKPDAVTFTGALTACSHVGLVEEGLRYFQIMKCDYRISPRIEHYGCLVDLYSRAGRLEDALKLVQSMPMKPNEVVIGSLLAACSNHGNNIVLAERLMKHLTDLNVKSHSNYVILSNMYAADGKWEGASKMRRKMKGLGLKKQPGFSSIEIDDCMHVFMAGDNAHVETTYIREVLELISSDLRLQGCVVETLAGDLLNA

SEQ ID NO: 72505 - DNA, 1503 bp, Arabidopsis thaliana
  misc_feature (1)..(1503): Ceres Seq. ID no. 4936269
  misc_feature (1)..(1503): Ortholog of  Ceres SEQ ID NO 12586556 as cited in SEQ ID NO 64667
  misc_feature (1)..(1503): Ortholog of  Ceres SEQ ID NO 14316045 as cited in SEQ ID NO 66810
  misc_feature (1)..(1503): Ortholog of  Ceres SEQ ID NO 13660894 as cited in SEQ ID NO 67475
atgggtctccttcccgtcgtcggaattacttcgccggcgctcatcacccacaaaaatcacgccaatccaaagatacagagacataatcaatctacctccgagaccactgtttcatggacttctcgcatcaatctcctcacgcgcaatggtcgattagcggaggcagcgaaggaattctccgatatgacactcgccggcgtagagcctaaccacatcactttcatagctctactctccgggtgtggtgattttacctccggaagtgaagccttgggcgatttgcttcatgggtatgcttgtaaacttggtcttgatagaaaccatgtcatggttggcaccgcaattatcggcatgtactccaaacgcggccgttttaagaaggctagattggtttttgattacatggaagataaaaattcggttacttggaatacaatgatcgatgggtacatgagaagtggtcaagtcgataacgctgctaagatgttcgacaaaatgcctgaacgagacttgatttcttggacggctatgataaatggctttgttaagaaaggttatcaagaggaagctttgttatggttccgtgaaatgcagatttctggagtaaaaccagattacgttgctattattgctgctcttaacgcttgcacaaaccttggtgctctctcatttggattatgggtacatcgttatgttttgagtcaggatttcaagaacaatgtgagggtgagtaattcactgatcgatttgtattgtcgatgcgggtgtgtggagtttgctcgacaagttttttacaacatggagaaacgaaccgtagtttcgtggaattcagtcattgttggttttgctgctaatggaaatgcacatgaatcattagtctacttcaggaaaatgcaagagaaaggctttaaacctgacgcagtcactttcactggggcgcttaccgcgtgtagccatgtaggtctagttgaagaaggtcttcgatattttcaaattatgaaatgtgattacagaatctcgcctcgaattgagcattatggatgcttagtggatttgtatagtcgggctgggagattggaagacgctttgaagttggtgcagagcatgccaatgaagccaaatgaagttgtgattggatcgttgcttgcagcttgcagcaatcatgggaacaatatcgtcttagcagagaggctgatgaagcatcttaccgacctgaatgtgaaaagccattcaaattatgtgattctctcgaatatgtatgctgctgatggaaaatgggaaggagcaagtaagatgagaaggaagatgaagggtctcggtctaaaaaagcagcctgggtttagttcgatagagattgatgattgcatgcatgtgttcatggccggtgacaatgcccatgttgagaccacttatatccgcgaggtcctggagcttatttcttctgatttgcgattacagggctgtgtagttgaaacccttgctggtgatctcctcaatgcttga

SEQ ID NO: 72506 - protein, 500 aa, Arabidopsis thaliana
  peptide (1)..(500): Ceres Seq. ID no. 4936270
MGLLPVVGITSPALITHKNHANPKIQRHNQSTSETTVSWTSRINLLTRNGRLAEAAKEFSDMTLAGVEPNHITFIALLSGCGDFTSGSEALGDLLHGYACKLGLDRNHVMVGTAIIGMYSKRGRFKKARLVFDYMEDKNSVTWNTMIDGYMRSGQVDNAAKMFDKMPERDLISWTAMINGFVKKGYQEEALLWFREMQISGVKPDYVAIIAALNACTNLGALSFGLWVHRYVLSQDFKNNVRVSNSLIDLYCRCGCVEFARQVFYNMEKRTVVSWNSVIVGFAANGNAHESLVYFRKMQEKGFKPDAVTFTGALTACSHVGLVEEGLRYFQIMKCDYRISPRIEHYGCLVDLYSRAGRLEDALKLVQSMPMKPNEVVIGSLLAACSNHGNNIVLAERLMKHLTDLNVKSHSNYVILSNMYAADGKWEGASKMRRKMKGLGLKKQPGFSSIEIDDCMHVFMAGDNAHVETTYIREVLELISSDLRLQGCVVETLAGDLLNA

SEQ ID NO: 72507 - protein, 439 aa, Arabidopsis thaliana; identical to SEQ ID NO: 72502
  peptide (1)..(439): Ceres Seq. ID no. 4936271

SEQ ID NO: 72508 - protein, 391 aa, Arabidopsis thaliana; identical to SEQ ID NO: 72503
  peptide (1)..(391): Ceres Seq. ID no. 4936272

SEQ ID NO: 72509 - DNA, 546 bp, Arabidopsis thaliana
  misc_feature (1)..(546): Ceres Seq. ID no. 4936284
  misc_feature (1)..(546): Ortholog of  Ceres SEQ ID NO 12329459 as cited in SEQ ID NO 20533
aacatactttttacaatcacatttttgaagaactttcattccataaatctacagatctttgtgtatcaagtaaagagatgtcaggaagaggaaagggaggaaaaggattgggaaagggaggagcctattcgtcgtcttgctcgtagaggtggtgtcaagcgtatcagtggtctcatctacgaagagaccagaggtgtcctcaagatcttcctcgagaatgttatccgtgacgccgttacctacactgagcacgccaggaggaagacggtgaccgccatggatgttgtctacgctttgaagaggcaaggtcgtactctctacggtttcggaggttaatccgatttgggggattagggtttatgcaagtttggggatttcttcttgtttctgagatccgtgttaaatggtttgaattagtcaaaagtaaattcaggagttagtttttgtttctcgtttttcgttgttattagccaatgtgatgtagtagttaattatcttttgcaagctttgtgctaagaaaatctaatgagaattatccatttgctt

SEQ ID NO: 72510 - protein, 111 aa, Arabidopsis thaliana; identical to SEQ ID NO: 20534
  peptide (1)..(111): Ceres Seq. ID no. 4936285

SEQ ID NO: 72511 - DNA, 3060 bp, Arabidopsis thaliana
  misc_feature (1)..(3060): Ceres Seq. ID no. 4936388
  misc_feature (1)..(3060): Ortholog of  Ceres SEQ ID NO 14313336 as cited in SEQ ID NO 55501
atggcagctaatatgatgagaccggcgtttgcttacactgttgtgtacgtgaaggacgtagctaaatctgtagaattctactctagagcttttggtcacaacgtccgtcgtcttgacgaatcccacaggtggggggagctagagagcgggcaaaccacgatagcgttcacaccgcttcaccagcatgagaccgacgacctaaccgggaaggttcaggctacgcagtcagcacgtgaaagagcacccatcgaagtctgcttctgttaccctgatgttgatgccgctttcaagagagcggtggagaacggtgcggaggcagtgagcaagccggaagataaagaatgggggcagaaggagatagggaagaagctagggaagaaagattgggacttcaacaaagatccatgtagtggtgaaggcacttggattgtaacaacttacacaaccaaagggtttgagagtaatatcacttgtgattgctcctttcttcctcaaaactcttcttgccacgtcattagaatagtagtggctagtttaatgatggtgacaatgaaggggaaaaccactaaattccttggtgaagctctgaagtcgcagaacttaacaggcattgtccctccagaattctctaagcttcgtcaccttaaagttttagacctaagccgtaactctctgactggttccattccaaaggaatgggcttctatgcgcttggaagatttatctttcatggggaaccgattgtctggtccgtttccgaaagtcctgacccgccttacaatgctcagaaacttgagcctagaaggaaatcagttttcaggaccaatccctcctgatattggacagttggttcatttggagaaacttcatctcccttcaaatgctttcactggtccattgactgaaaaacttggattgctcaagaacctgactgatatgaggataagtgataataatttcactggaccaataccagatttcatcagcaattggacaagaatactgaaactgcagatgcatggttgcggtttggatggtccgataccttccagtatttctagcttaacaagcttgaccgacctgagaattagcgacttaggaggcaaaccgtcttccttccccccactgaagaatttggaatctatcaagacgcttgacctcagttttaatctcctaagtggtgagattccttcatcgtttgaaaatatgaagaaagccgatttcatagatgtttcttttaataacttcaccgatgaaagttcaattcctagccatgactgtaaccgagttacttcacacaagggttcaacctgttttcttcaacgcatgccttgtgttcatcctaagagatatcgaggtgaagtaaaagtggataaagaaataacatatcaggctgatgacgaacccaaaggtgcttctatgtacgtccttggcgctaacaagcgctgggcgttgagcagcaccgggaacttcatggacaatgatgacgatgctgatgagtatactgtgcagaacacatccaggttatcagttaatgcttcctctcccagctttggactttataggacagctcgagtctctcctttatcgttgacttactacggaatctgtcttggaaatgggaactacactgtgaatctccactttgctgagatcatctttaccgatgacaatacattatacagtctcggcaaacgtttgtttgatatttatgttcaggatcagttggtgattaaaaactttaacattcaagaagctgctcgaggatcagggacaacaggcattccgattagaggggtatatggtcctatgatttcagctatatctgtggaacccaatttcaaacctccggtatattatgacacaaaggatatcatactaaaagtgggggtacctgtcgctgcagcaacacttcttttgtttatcatagtgggtgtattctggaaaaaaaggcgtgacaaaaatgatattgacaaagagctaaggggtctagatcttcaaactggaacttttactctacggcagataaaagcagccactgataatttcgatgtaacaagaaagattggtgaaggtggatttggctctgtttacaagggtgaattatctgaggggaaattaattgcagttaaacaactgtctgcaaaatcgaggcagggaaatcgcgagtttgtaaatgagataggaatgatctcagctcttcaacatccgaatcttgtgaagctatatggatgttgtgttgaaggaaaccaattgatattggtgtatgagtacttggagaacaactgtctatctcgagcgttatttggaaaggatgagagttctagactgaaactagactggtcaacaaggaagaagatttttttggggatagccaagggactgacatttctccatgaagaatctaggataaagattgtacacagagatataaaggcaagcaatgtgttactcgataaggatctcaacgctaaaatttctgactttggtttggcaaagctgaatgatgatggaaacacacacatcagcactcgtattgcaggaactataggttatatggctcctgaatatgcaatgcgtggttacttgactgaaaaagcggatgtttatagcttcggcgtcgttgcactcgaaatcgttagtggaaagagtaacacaaactttaggccaaccgaggactttgtttaccttcttgattgggcttacgttttgcaagagagaggaagcttactagagctggttgatccaacgttagcctcagattactcagaagaggaagccatgttgatgctgaacgtggcattgatgtgcactaacgcatcaccgactctaaggcctacaatgtcgcaggtggtgagtctcatagaggggaagacagcgatgcaagagttgctgtcggatccgagcttctcaacggttaacccgaagcttaaagccttgaggaaccatttttggcaaaacgagctgagcagatcgcttagcttctccacaagcgggcctcgtactgcctctgctaactcactcgttgatgcagaggagaaaaccggacttttggattaa

SEQ ID NO: 72512 - protein, 1019 aa, Arabidopsis thaliana
  peptide (1)..(1019): Ceres Seq. ID no. 4936389
MAANMMRPAFAYTVVYVKDVAKSVEFYSRAFGHNVRRLDESHRWGELESGQTTIAFTPLHQHETDDLTGKVQATQSARERAPIEVCFCYPDVDAAFKRAVENGAEAVSKPEDKEWGQKEIGKKLGKKDWDFNKDPCSGEGTWIVTTYTTKGFESNITCDCSFLPQNSSCHVIRIVVASLMMVTMKGKTTKFLGEALKSQNLTGIVPPEFSKLRHLKVLDLSRNSLTGSIPKEWASMRLEDLSFMGNRLSGPFPKVLTRLTMLRNLSLEGNQFSGPIPPDIGQLVHLEKLHLPSNAFTGPLTEKLGLLKNLTDMRISDNNFTGPIPDFISNWTRILKLQMHGCGLDGPIPSSISSLTSLTDLRISDLGGKPSSFPPLKNLESIKTLDLSFNLLSGEIPSSFENMKKADFIDVSFNNFTDESSIPSHDCNRVTSHKGSTCFLQRMPCVHPKRYRGEVKVDKEITYQADDEPKGASMYVLGANKRWALSSTGNFMDNDDDADEYTVQNTSRLSVNASSPSFGLYRTARVSPLSLTYYGICLGNGNYTVNLHFAEIIFTDDNTLYSLGKRLFDIYVQDQLVIKNFNIQEAARGSGTTGIPIRGVYGPMISAISVEPNFKPPVYYDTKDIILKVGVPVAAATLLLFIIVGVFWKKRRDKNDIDKELRGLDLQTGTFTLRQIKAATDNFDVTRKIGEGGFGSVYKGELSEGKLIAVKQLSAKSRQGNREFVNEIGMISALQHPNLVKLYGCCVEGNQLILVYEYLENNCLSRALFGKDESSRLKLDWSTRKKIFLGIAKGLTFLHEESRIKIVHRDIKASNVLLDKDLNAKISDFGLAKLNDDGNTHISTRIAGTIGYMAPEYAMRGYLTEKADVYSFGVVALEIVSGKSNTNFRPTEDFVYLLDWAYVLQERGSLLELVDPTLASDYSEEEAMLMLNVALMCTNASPTLRPTMSQVVSLIEGKTAMQELLSDPSFSTVNPKLKALRNHFWQNELSRSLSFSTSGPRTASANSLVDAEEKTGLLD

SEQ ID NO: 72513 - protein, 1015 aa, Arabidopsis thaliana
  peptide (1)..(1015): Ceres Seq. ID no. 4936390
MMRPAFAYTVVYVKDVAKSVEFYSRAFGHNVRRLDESHRWGELESGQTTIAFTPLHQHETDDLTGKVQATQSARERAPIEVCFCYPDVDAAFKRAVENGAEAVSKPEDKEWGQKEIGKKLGKKDWDFNKDPCSGEGTWIVTTYTTKGFESNITCDCSFLPQNSSCHVIRIVVASLMMVTMKGKTTKFLGEALKSQNLTGIVPPEFSKLRHLKVLDLSRNSLTGSIPKEWASMRLEDLSFMGNRLSGPFPKVLTRLTMLRNLSLEGNQFSGPIPPDIGQLVHLEKLHLPSNAFTGPLTEKLGLLKNLTDMRISDNNFTGPIPDFISNWTRILKLQMHGCGLDGPIPSSISSLTSLTDLRISDLGGKPSSFPPLKNLESIKTLDLSFNLLSGEIPSSFENMKKADFIDVSFNNFTDESSIPSHDCNRVTSHKGSTCFLQRMPCVHPKRYRGEVKVDKEITYQADDEPKGASMYVLGANKRWALSSTGNFMDNDDDADEYTVQNTSRLSVNASSPSFGLYRTARVSPLSLTYYGICLGNGNYTVNLHFAEIIFTDDNTLYSLGKRLFDIYVQDQLVIKNFNIQEAARGSGTTGIPIRGVYGPMISAISVEPNFKPPVYYDTKDIILKVGVPVAAATLLLFIIVGVFWKKRRDKNDIDKELRGLDLQTGTFTLRQIKAATDNFDVTRKIGEGGFGSVYKGELSEGKLIAVKQLSAKSRQGNREFVNEIGMISALQHPNLVKLYGCCVEGNQLILVYEYLENNCLSRALFGKDESSRLKLDWSTRKKIFLGIAKGLTFLHEESRIKIVHRDIKASNVLLDKDLNAKISDFGLAKLNDDGNTHISTRIAGTIGYMAPEYAMRGYLTEKADVYSFGVVALEIVSGKSNTNFRPTEDFVYLLDWAYVLQERGSLLELVDPTLASDYSEEEAMLMLNVALMCTNASPTLRPTMSQVVSLIEGKTAMQELLSDPSFSTVNPKLKALRNHFWQNELSRSLSFSTSGPRTASANSLVDAEEKTGLLD

SEQ ID NO: 72514 - protein, 1014 aa, Arabidopsis thaliana
  peptide (1)..(1014): Ceres Seq. ID no. 4936391
MRPAFAYTVVYVKDVAKSVEFYSRAFGHNVRRLDESHRWGELESGQTTIAFTPLHQHETDDLTGKVQATQSARERAPIEVCFCYPDVDAAFKRAVENGAEAVSKPEDKEWGQKEIGKKLGKKDWDFNKDPCSGEGTWIVTTYTTKGFESNITCDCSFLPQNSSCHVIRIVVASLMMVTMKGKTTKFLGEALKSQNLTGIVPPEFSKLRHLKVLDLSRNSLTGSIPKEWASMRLEDLSFMGNRLSGPFPKVLTRLTMLRNLSLEGNQFSGPIPPDIGQLVHLEKLHLPSNAFTGPLTEKLGLLKNLTDMRISDNNFTGPIPDFISNWTRILKLQMHGCGLDGPIPSSISSLTSLTDLRISDLGGKPSSFPPLKNLESIKTLDLSFNLLSGEIPSSFENMKKADFIDVSFNNFTDESSIPSHDCNRVTSHKGSTCFLQRMPCVHPKRYRGEVKVDKEITYQADDEPKGASMYVLGANKRWALSSTGNFMDNDDDADEYTVQNTSRLSVNASSPSFGLYRTARVSPLSLTYYGICLGNGNYTVNLHFAEIIFTDDNTLYSLGKRLFDIYVQDQLVIKNFNIQEAARGSGTTGIPIRGVYGPMISAISVEPNFKPPVYYDTKDIILKVGVPVAAATLLLFIIVGVFWKKRRDKNDIDKELRGLDLQTGTFTLRQIKAATDNFDVTRKIGEGGFGSVYKGELSEGKLIAVKQLSAKSRQGNREFVNEIGMISALQHPNLVKLYGCCVEGNQLILVYEYLENNCLSRALFGKDESSRLKLDWSTRKKIFLGIAKGLTFLHEESRIKIVHRDIKASNVLLDKDLNAKISDFGLAKLNDDGNTHISTRIAGTIGYMAPEYAMRGYLTEKADVYSFGVVALEIVSGKSNTNFRPTEDFVYLLDWAYVLQERGSLLELVDPTLASDYSEEEAMLMLNVALMCTNASPTLRPTMSQVVSLIEGKTAMQELLSDPSFSTVNPKLKALRNHFWQNELSRSLSFSTSGPRTASANSLVDAEEKTGLLD

SEQ ID NO: 72515 - DNA, 2571 bp, Arabidopsis thaliana
  misc_feature (1)..(2571): Ceres Seq. ID no. 4936442
  misc_feature (1)..(2571): Ortholog of  Ceres SEQ ID NO 13654989 as cited in SEQ ID NO 63117
  misc_feature (1)..(2571): Ortholog of  Ceres SEQ ID NO 13584744 as cited in SEQ ID NO 69137
atgaaaaacctccgtggacttctattggccttcctagttttgtctttaggcatttccgattttcttcgagcacaagatcaacaaggattcatcagtttggattgcgggttgcaagccgatgagtctccttataccgaaccattaacaaagttaacattcacatcagacgccgatttcatcaaaagtggaaaaagcggcaagattcaaaatgttccggggatggagtatataaagccatacacggttttgagatattttccagatggagtacgaaactgttatactcttatcgtcatacaaggcacaaactatctgatcgtagccatgtttacttatggaaactacgataatcttaacacacacccaaagttcgacctttatcttggtccaaatatatggaccacggtcgatttgcaaagaaatgtaaacggaacaagggcggaaatcattcacataccaaggtcaacttctttgcagatttgtcttgttaagacgggaacaactacgccgctaatatcagctttagaactacgaccattgagaaataatacttatattcctcaatctggttccctcaagacattgttccgcgtccatttgactgattccaaagaaactgttcggtatccagaagatgtccatgatcgtctttggagtccatttttcatgccggaatggagactgttaagaacaagtctcacggtcaacacttctgatgataacggctatgacataccggaagacgtagtggttacggcagccacacctgcaaatgtgagttcaccattaaccatttcttggaatttggaaacacctgacgacttagtttatgcatacctccacgtcgctgagatccaatccttaagggaaaatgataccagggaattcaacattagcgcaggccaagatgttaactatggacctgttagtcctgacgagtttctagtgggtactctattcaatacatcaccagttaaatgtgaaggagggacatgccatttgcaactaataaaaactccaaaatcaactctccctcccctcctcaatgctattgaggcttttataacagtggagtttccgcagtctgaaactaatgcaaatgacgtccttgctatcaagagcatagaaacaagctatggattaagtagaattagttggcaaggagatccatgtgttcctcaacaattattgtgggatggtcttacctgcgagtacaccaatatgtctacaccaccaagaatccattccttagacttgtcctcaagtgaactaactggaattatagttcctgagatccaaaatcttacggagcttaaaaaattggacttttcaaataataatctaacaggtggagtacctgaatttctagccaaaatgaaatcattgttagtcataaacttaagcggaaacaaccttagtggatcagtccctcaagctcttctcaacaaagtgaaaaatggttcatgcaacaaaaagaaaaatagcatcatgttaccagttgttgcatcacttgcttctttggctgctataatagcaatgatcgctctgctttttgtttgtattaaaagacgctcatcaagcagaaaaggtccatcaccaagccaacaatcaatagaaacaataaagaaaagatatacatatgccgaagttcttgccatgacaaagaaatttgaaagggttttgggtaaaggaggatttggaatggtctatcatggttatataaatggtactgaagaagtagcggtcaagctactctctccatcatcagctcaaggctataaagagttcaaaacagaggtagaacttcttctaagggtttaccacacaaatctggtaagtcttgttggatactgtgatgaaaaagatcatctggccctcatctaccagtacatggtcaatggcgatttgaaaaaacatttttcaggtagctccatcattagctgggttgatagactaaacatagctgttgatgcagcgtcaggtttggagtacttgcatattggttgcaaaccgctgatagttcatagagatgtaaaaagttctaacatactattggacgatcaattacaagctaagcttgcagattttgggctttctagatcttttcccattggggatgaatctcatgtgtctacacttgttgctggaacatttggataccttgatcatgaatactaccaaactaataggttgtctgagaagagtgatgtctacagttttggtgttgtactgctagaaattattacaaacaaaccggtgatcgatcataaccgcgacatgcctcacatagcagaatgggtgaaacttatgcttactagaggagacattagcaatattatggatcctaaacttcaaggggtctatgactctggttctgcatggaaagctcttgaattagcaatgacatgtgtgaatccttcttccttgaaaagacccaacatgtcccatgttgttcatgagctgaaggagtgtctggtatctgaaaacaacaggacaagagacatagacacatcgagatccatggacattaacttaagctttggcacagatgtgaaccccaaggcacgttag

SEQ ID NO: 72516 - protein, 856 aa, Arabidopsis thaliana
  peptide (1)..(856): Ceres Seq. ID no. 4936443
MKNLRGLLLAFLVLSLGISDFLRAQDQQGFISLDCGLQADESPYTEPLTKLTFTSDADFIKSGKSGKIQNVPGMEYIKPYTVLRYFPDGVRNCYTLIVIQGTNYLIVAMFTYGNYDNLNTHPKFDLYLGPNIWTTVDLQRNVNGTRAEIIHIPRSTSLQICLVKTGTTTPLISALELRPLRNNTYIPQSGSLKTLFRVHLTDSKETVRYPEDVHDRLWSPFFMPEWRLLRTSLTVNTSDDNGYDIPEDVVVTAATPANVSSPLTISWNLETPDDLVYAYLHVAEIQSLRENDTREFNISAGQDVNYGPVSPDEFLVGTLFNTSPVKCEGGTCHLQLIKTPKSTLPPLLNAIEAFITVEFPQSETNANDVLAIKSIETSYGLSRISWQGDPCVPQQLLWDGLTCEYTNMSTPPRIHSLDLSSSELTGIIVPEIQNLTELKKLDFSNNNLTGGVPEFLAKMKSLLVINLSGNNLSGSVPQALLNKVKNGSCNKKKNSIMLPVVASLASLAAIIAMIALLFVCIKRRSSSRKGPSPSQQSIETIKKRYTYAEVLAMTKKFERVLGKGGFGMVYHGYINGTEEVAVKLLSPSSAQGYKEFKTEVELLLRVYHTNLVSLVGYCDEKDHLALIYQYMVNGDLKKHFSGSSIISWVDRLNIAVDAASGLEYLHIGCKPLIVHRDVKSSNILLDDQLQAKLADFGLSRSFPIGDESHVSTLVAGTFGYLDHEYYQTNRLSEKSDVYSFGVVLLEIITNKPVIDHNRDMPHIAEWVKLMLTRGDISNIMDPKLQGVYDSGSAWKALELAMTCVNPSSLKRPNMSHVVHELKECLVSENNRTRDIDTSRSMDINLSFGTDVNPKAR

SEQ ID NO: 72517 - protein, 783 aa, Arabidopsis thaliana
  peptide (1)..(783): Ceres Seq. ID no. 4936444
MEYIKPYTVLRYFPDGVRNCYTLIVIQGTNYLIVAMFTYGNYDNLNTHPKFDLYLGPNIWTTVDLQRNVNGTRAEIIHIPRSTSLQICLVKTGTTTPLISALELRPLRNNTYIPQSGSLKTLFRVHLTDSKETVRYPEDVHDRLWSPFFMPEWRLLRTSLTVNTSDDNGYDIPEDVVVTAATPANVSSPLTISWNLETPDDLVYAYLHVAEIQSLRENDTREFNISAGQDVNYGPVSPDEFLVGTLFNTSPVKCEGGTCHLQLIKTPKSTLPPLLNAIEAFITVEFPQSETNANDVLAIKSIETSYGLSRISWQGDPCVPQQLLWDGLTCEYTNMSTPPRIHSLDLSSSELTGIIVPEIQNLTELKKLDFSNNNLTGGVPEFLAKMKSLLVINLSGNNLSGSVPQALLNKVKNGSCNKKKNSIMLPVVASLASLAAIIAMIALLFVCIKRRSSSRKGPSPSQQSIETIKKRYTYAEVLAMTKKFERVLGKGGFGMVYHGYINGTEEVAVKLLSPSSAQGYKEFKTEVELLLRVYHTNLVSLVGYCDEKDHLALIYQYMVNGDLKKHFSGSSIISWVDRLNIAVDAASGLEYLHIGCKPLIVHRDVKSSNILLDDQLQAKLADFGLSRSFPIGDESHVSTLVAGTFGYLDHEYYQTNRLSEKSDVYSFGVVLLEIITNKPVIDHNRDMPHIAEWVKLMLTRGDISNIMDPKLQGVYDSGSAWKALELAMTCVNPSSLKRPNMSHVVHELKECLVSENNRTRDIDTSRSMDINLSFGTDVNPKAR

SEQ ID NO: 72518 - protein, 748 aa, Arabidopsis thaliana
  peptide (1)..(748): Ceres Seq. ID no. 4936445
MFTYGNYDNLNTHPKFDLYLGPNIWTTVDLQRNVNGTRAEIIHIPRSTSLQICLVKTGTTTPLISALELRPLRNNTYIPQSGSLKTLFRVHLTDSKETVRYPEDVHDRLWSPFFMPEWRLLRTSLTVNTSDDNGYDIPEDVVVTAATPANVSSPLTISWNLETPDDLVYAYLHVAEIQSLRENDTREFNISAGQDVNYGPVSPDEFLVGTLFNTSPVKCEGGTCHLQLIKTPKSTLPPLLNAIEAFITVEFPQSETNANDVLAIKSIETSYGLSRISWQGDPCVPQQLLWDGLTCEYTNMSTPPRIHSLDLSSSELTGIIVPEIQNLTELKKLDFSNNNLTGGVPEFLAKMKSLLVINLSGNNLSGSVPQALLNKVKNGSCNKKKNSIMLPVVASLASLAAIIAMIALLFVCIKRRSSSRKGPSPSQQSIETIKKRYTYAEVLAMTKKFERVLGKGGFGMVYHGYINGTEEVAVKLLSPSSAQGYKEFKTEVELLLRVYHTNLVSLVGYCDEKDHLALIYQYMVNGDLKKHFSGSSIISWVDRLNIAVDAASGLEYLHIGCKPLIVHRDVKSSNILLDDQLQAKLADFGLSRSFPIGDESHVSTLVAGTFGYLDHEYYQTNRLSEKSDVYSFGVVLLEIITNKPVIDHNRDMPHIAEWVKLMLTRGDISNIMDPKLQGVYDSGSAWKALELAMTCVNPSSLKRPNMSHVVHELKECLVSENNRTRDIDTSRSMDINLSFGTDVNPKAR

SEQ ID NO: 72519 - DNA, 1350 bp, Arabidopsis thaliana
  misc_feature (1)..(1350): Ceres Seq. ID no. 4936528
  misc_feature (1)..(1350): Ortholog of  Ceres SEQ ID NO 13590394 as cited in SEQ ID NO 66581
atgggtaaagagaagtttcacatcaacattgtggtcattggccacgtcgattctggaaagtcgacaaccactggacacttgatctacaagttgggtggtattgacaagcgtgtgatcgagaggttcgagaaggaggctgctgagatgaacaagaggtccttcaagtacgcatgggtgttggacaaacttaaggctgagcgtgagcgtggtatcaccattgacattgctctctggaagttcgagaccaccaagtactactgcactgtcattgatgctcctggtcatcgtgatttcatcaagaacatgatcactggtacctcccaggctgattgtgctgtccttatcattgactccaccactggtggttttgaggctggtatctccaaggatggtcagacccgtgagcacgctctccttgctttcacccttggtgtcaagcagatgatctgctgttgtaacaagatggatgccactacccccaagtactccaaggccaggtacgatgaaatcatcaaggaggtgtcttcctacttgaagaaggttggttacaaccccgacaaaatcccatttgtgcccatctctggatttgagggtgacaacatgattgagaggtccaccaaccttgactggtacaagggaccaactctccttgaggctcttgaccagatcaacgagcccaagaggccgtcagacaagccccttcgtctcccacttcaggatgtctacaagattggtggtattggaacggtgccagtgggacgtgttgagactggtatgatcaagcctggtatggttgtgacctttgctcccacaggattgaccactgaggtcaagtctgttgagatgcaccacgagtctcttcttgaggcacttccaggtgacaacgttgggttcaatgttaagaatgttgccgtgaaggatcttaagagagggtacgtcgcctccaactccaaggatgaccctgccaagggtgctgctaacttcacctcccaggtcatcatcatgaaccaccctggtcagattggtaacggttacgccccagtcttggattgccacacctctcacattgcagtcaagttctctgagatcttgaccaagattgacaggcgttctggtaaggagattgagaaggagcccaaattcttgaagaatggtgatgctggtatggtgaagatgactccaaccaagcccatggttgtggagaccttctctgagtacccaccacttggacgtttcgctgttagggacatgaggcagactgttgcagtcggtgttatcaagagtgttgacaagaaggacccaaccggagccaaggttaccaaggctgcagttaagaagggtgcaaagtga

SEQ ID NO: 72520 - protein, 449 aa, Arabidopsis thaliana; identical to SEQ ID NO: 27284
  peptide (1)..(449): Ceres Seq. ID no. 4936529

SEQ ID NO: 72521 - protein, 401 aa, Arabidopsis thaliana; identical to SEQ ID NO: 21437
  peptide (1)..(401): Ceres Seq. ID no. 4936530

SEQ ID NO: 72522 - protein, 348 aa, Arabidopsis thaliana; identical to SEQ ID NO: 21438
  peptide (1)..(348): Ceres Seq. ID no. 4936531

SEQ ID NO: 72523 - DNA, 1215 bp, Arabidopsis thaliana
  misc_feature (1)..(1215): Ceres Seq. ID no. 4936568
  misc_feature (1)..(1215): Ortholog of  Ceres SEQ ID NO 14310460 as cited in SEQ ID NO 55105
  misc_feature (1)..(1215): Ortholog of  Ceres SEQ ID NO 15179888 as cited in SEQ ID NO 66879
  misc_feature (1)..(1215): Ortholog of  Ceres SEQ ID NO 13596056 as cited in SEQ ID NO 68307
  misc_feature (1)..(1215): Ortholog of  Ceres SEQ ID NO 12388689 as cited in SEQ ID NO 0
ataaaaagtagtactcgtgtcttactcgtgccagccactcgcatttctccagattttattatccttcctcgaaacaagtagatccacgattcgttgctgcgatcggcgttattatcgtcagctctctcgtttctgttctgtggttcgatattgctgagtttctaggctaatcttacgaatctgtgaaagtttttgagagatttggcttctgtagctcactcctgcttgatttagagcttagctaagatgacgaagaactacccaaccgtgagcgaagattacaagaaggctgttgagaagtgcaggaggaagctcagaggtttgatcgctgagaagaactgtgcacccatcatggtccgactcgcatggcactctgctggaactttcgattgtcaatcaaggactggaggtccattcggaacaatgaggtttgacgctgagcaagctcatggagccaacagtggtatccacattgctcttaggttgttggaccccatcagggagcaattccctaccatctcttttgctgatttccatcagcttgctggtgttgtggccgttgaagttactggtggccctgacattcctttccaccctggaagagaggacaagccccaaccacctccagagggtcgtcttcctgatgctaccaagggttgtgaccatttgagagatgtctttgctaagcagatgggcttatctgacaaagacattgtcgctttatctggtgcccacactctgggacgatgccacaaggataggtctggcttcgaaggtgcatggacatcaaaccctctaatcttcgacaactcttacttcaaggaactcttgagcggagagaaggaaggccttcttcagcttgtctctgacaaagcactattggacgaccctgttttccgtcctttggtcgagaaatacgctgctgatgaagatgcctttttcgctgattacgctgaggcccacatgaagctttctgagcttgggtttgctgatgcttaagctgtgacgtatgctctgtgtgtgtgtgtgtgtctccccgagagtcatggctgtttttggttgggggctggaggggtcgcattgcatttgaactttgtcatatgattgcttaatgtactctcggatttacgtatctgtttttttcggtgggttgcgatttgaacacatccgttgcgcttttgctgcttagacacattaataaaattaatttctctc

SEQ ID NO: 72524 - protein, 250 aa, Arabidopsis thaliana; identical to SEQ ID NO: 22608
  peptide (1)..(250): Ceres Seq. ID no. 4936569

SEQ ID NO: 72525 - protein, 215 aa, Arabidopsis thaliana; identical to SEQ ID NO: 22609
  peptide (1)..(215): Ceres Seq. ID no. 4936570

SEQ ID NO: 72526 - protein, 191 aa, Arabidopsis thaliana; identical to SEQ ID NO: 22610
  peptide (1)..(191): Ceres Seq. ID no. 4936571

SEQ ID NO: 72527 - DNA, 1124 bp, Arabidopsis thaliana
  misc_feature (1)..(1124): Ceres Seq. ID no. 4936572
  misc_feature (1)..(1124): Ortholog of  Ceres SEQ ID NO 14310460 as cited in SEQ ID NO 55105
  misc_feature (1)..(1124): Ortholog of  Ceres SEQ ID NO 15179888 as cited in SEQ ID NO 66879
  misc_feature (1)..(1124): Ortholog of  Ceres SEQ ID NO 13596056 as cited in SEQ ID NO 68307
  misc_feature (1)..(1124): Ortholog of  Ceres SEQ ID NO 12388689 as cited in SEQ ID NO 0
ataaaaagtagtactcgtgtcttactcgtgccagccactcgcatttctccagattttattatccttcctcgaaacaagtagatccacgattcgttgctgcgatcggcgttattatcgtcagctctctcgtttctgttctgtgagcttagctaagatgacgaagaactacccaaccgtgagcgaagattacaagaaggctgttgagaagtgcaggaggaagctcagaggtttgatcgctgagaagaactgtgcacccatcatggtccgactcgcatggcactctgctggaactttcgattgtcaatcaaggactggaggtccattcggaacaatgaggtttgacgctgagcaagctcatggagccaacagtggtatccacattgctcttaggttgttggaccccatcagggagcaattccctaccatctcttttgctgatttccatcagcttgctggtgttgtggccgttgaagttactggtggccctgacattcctttccaccctggaagagaggacaagccccaaccacctccagagggtcgtcttcctgatgctaccaagggttgtgaccatttgagagatgtctttgctaagcagatgggcttatctgacaaagacattgtcgctttatctggtgcccacactctgggacgatgccacaaggataggtctggcttcgaaggtgcatggacatcaaaccctctaatcttcgacaactcttacttcaaggaactcttgagcggagagaaggaaggccttcttcagcttgtctctgacaaagcactattggacgaccctgttttccgtcctttggtcgagaaatacgctgctgatgaagatgcctttttcgctgattacgctgaggcccacatgaagctttctgagcttgggtttgctgatgcttaagctgtgacgtatgctctgtgtgtgtgtgtgtgtctccccgagagtcatggctgtttttggttgggggctggaggggtcgcattgcatttgaactttgtcatatgattgcttaatgtactctcggatttacgtatctgtttttttcggtgggttgcgatttgaacacatccgttgcgcttttgctgcttagacacattaataaaattaatttctctcg

SEQ ID NO: 72528 - protein, 250 aa, Arabidopsis thaliana; identical to SEQ ID NO: 22608
  peptide (1)..(250): Ceres Seq. ID no. 4936573

SEQ ID NO: 72529 - protein, 215 aa, Arabidopsis thaliana; identical to SEQ ID NO: 22609
  peptide (1)..(215): Ceres Seq. ID no. 4936574

SEQ ID NO: 72530 - protein, 191 aa, Arabidopsis thaliana; identical to SEQ ID NO: 22610
  peptide (1)..(191): Ceres Seq. ID no. 4936575

SEQ ID NO: 72531 - DNA, 2649 bp, Arabidopsis thaliana
  misc_feature (1)..(2649): Ceres Seq. ID no. 4936600
  misc_feature (1)..(2649): Ortholog of  Ceres SEQ ID NO 15171016 as cited in SEQ ID NO 55391
atggctgttgtagaagaaccgatactttcaagattggatcgtattgatttcatggtgaggaagttagaggagatgaaaggaagctcgcctagaagctcgagcccatcgactccatctagtgggactcagccatcgtcaatggatctgtcgtcaccgaggagcatagggaaggtacactgccgttcgatggaacaagtcagggaggagactgagcggaaaggaactttgctagagagacttaataatgtagaggagcaagtgcttaagctgtgttcacagtttgaggaagaagttgaagaagagaggaagagagaagataagacggataaggaaaagaagaccccgaagaagaagaagggattgaggaagctggtggagataatattagacaaagaaaatttcacgttggaagagcttcttgatgaggaagagattattcaagaatgcaaggctttgaatagcaggctcattaactttctaagggataaagctcaagtggagcaattattgcggtacattgttgaagaacctccacaggatgctgatagtaaacgtgctttcaagtttccattcatctcttgtgaaatatttacatgtgaaattgatgttattctaaaaactttggtcgaggatgaagaggttgtcatttgccttatgatcagaaaaactgcagcgcttatgaattatgtaaaagggcatcaaaatgttttctgccagttagttgatttgattgggataacatccatcatggaggttttggttcgcttggttggggctgatgaccaagtctatcccaactttctggatgtgatgcaatggttggctgatagcaatttacttgaaatgatcgtggacaaacttaaaccatctgcaaatgcagcagaaacattatgtgcaatttctcggaatgcaccgtcagctttagctacgcagctctctagccctggctacgttgcaaagatatttggtcatgctcttgaagactcgcattcaaaatccggtctagttcattcactttcagtatgcacctctcttctggatccgaggagatctgctgtttcatcttctatgttcaattcttacagaggtcaacatatgttcgagtctcctgtcccagtttccccagaaactattggtgccatgctgcccaaactcaatgacttgcttatgcttctcactgtagcatctgatagcacagtattgcctacaacatatggtgaactgaggcctcctctcggaaagcatcgtctaaagattgtggagttcattgcagttttgttgaaaactagaagtgaagctgcacaaaaggaattagtcagttcaggaacaatcaaaaggacccttgatctgtttttcgagtacccgtacaataatgctctgcatcatcaagtggagagtataatactttcttgtttggaaaacaagagcgatttgatggttaaccatattcttcgagactgcgatctgattggcaaattcctcttgtcggacagggactcaaacctcttaggtgatagccagcccactgtagctgcctccgggaaaaaaaaacctcgtgtcgggtatgtcgggcatatcacaagaatatcaaataaaattggtcagttgagtaacagcaatggccagataaaggcataccttcaggaaaacagcgaatggaatgagtggcaaggtagtgttctgcaggaccgcaacacggttgaaaatgtcaacagatggggatgtgggcgcccaactaccctacaagataggacaagagatagcgatgaggaagacagggattacgatgttgcagctctggccaataacttaagccaagcatttagatacaaaatatatggaaacgatgacaatgaagaggaccacaatgcccttgatagagacgatgatgatgtttacttcgacgatgaatctgctgaagtagtaatttcatccttaagacttggggatgaccaaggaagcttgtttacaaattcgaattggttcacattccaagacgatagattcggcagcacaccctctgacacagcgggttcgaacacgatagacgtggaattgaataaaacctataatgccaacactagcagtagtgacgatgatgaagttgtggttggagaagaagacgatgatctaactggaaacccaaaagacaacgcgttgaacacaactgaaaccaactttcaaatggagagtccactggatttcttcgacttcaacacctcacagaaagctgaagaagcttttgctgaacagccacccgaatgggtcgggtggggagaaccatctgatatgcaagcgagtggcaccggtctgaacccatttatcgatgatgatgatgatgatgacagcaagcacataatgaacctcgacataccaatggctgaggtcaaatctgaatccatgattccaaacgggtcagaaagatcgttatttgagaaggacgtggaatttgtgggagtggaaccagaaggggcagagaaagcgatggagcaagcgatgaaagaagggatagtaggagaagctggagtgatgaagaagaacaaggagatggctgaggactcaaagccggaggaaagttcaggaggagtgaaagagttcaacgataacaactactggaaagtggatcaagaagttggagtgttggaatga

SEQ ID NO: 72532 - protein, 882 aa, Arabidopsis thaliana
  peptide (1)..(882): Ceres Seq. ID no. 4936601
MAVVEEPILSRLDRIDFMVRKLEEMKGSSPRSSSPSTPSSGTQPSSMDLSSPRSIGKVHCRSMEQVREETERKGTLLERLNNVEEQVLKLCSQFEEEVEEERKREDKTDKEKKTPKKKKGLRKLVEIILDKENFTLEELLDEEEIIQECKALNSRLINFLRDKAQVEQLLRYIVEEPPQDADSKRAFKFPFISCEIFTCEIDVILKTLVEDEEVVICLMIRKTAALMNYVKGHQNVFCQLVDLIGITSIMEVLVRLVGADDQVYPNFLDVMQWLADSNLLEMIVDKLKPSANAAETLCAISRNAPSALATQLSSPGYVAKIFGHALEDSHSKSGLVHSLSVCTSLLDPRRSAVSSSMFNSYRGQHMFESPVPVSPETIGAMLPKLNDLLMLLTVASDSTVLPTTYGELRPPLGKHRLKIVEFIAVLLKTRSEAAQKELVSSGTIKRTLDLFFEYPYNNALHHQVESIILSCLENKSDLMVNHILRDCDLIGKFLLSDRDSNLLGDSQPTVAASGKKKPRVGYVGHITRISNKIGQLSNSNGQIKAYLQENSEWNEWQGSVLQDRNTVENVNRWGCGRPTTLQDRTRDSDEEDRDYDVAALANNLSQAFRYKIYGNDDNEEDHNALDRDDDDVYFDDESAEVVISSLRLGDDQGSLFTNSNWFTFQDDRFGSTPSDTAGSNTIDVELNKTYNANTSSSDDDEVVVGEEDDDLTGNPKDNALNTTETNFQMESPLDFFDFNTSQKAEEAFAEQPPEWVGWGEPSDMQASGTGLNPFIDDDDDDDSKHIMNLDIPMAEVKSESMIPNGSERSLFEKDVEFVGVEPEGAEKAMEQAMKEGIVGEAGVMKKNKEMAEDSKPEESSGGVKEFNDNNYWKVDQEVGVLE

SEQ ID NO: 72533 - protein, 865 aa, Arabidopsis thaliana
  peptide (1)..(865): Ceres Seq. ID no. 4936602
MVRKLEEMKGSSPRSSSPSTPSSGTQPSSMDLSSPRSIGKVHCRSMEQVREETERKGTLLERLNNVEEQVLKLCSQFEEEVEEERKREDKTDKEKKTPKKKKGLRKLVEIILDKENFTLEELLDEEEIIQECKALNSRLINFLRDKAQVEQLLRYIVEEPPQDADSKRAFKFPFISCEIFTCEIDVILKTLVEDEEVVICLMIRKTAALMNYVKGHQNVFCQLVDLIGITSIMEVLVRLVGADDQVYPNFLDVMQWLADSNLLEMIVDKLKPSANAAETLCAISRNAPSALATQLSSPGYVAKIFGHALEDSHSKSGLVHSLSVCTSLLDPRRSAVSSSMFNSYRGQHMFESPVPVSPETIGAMLPKLNDLLMLLTVASDSTVLPTTYGELRPPLGKHRLKIVEFIAVLLKTRSEAAQKELVSSGTIKRTLDLFFEYPYNNALHHQVESIILSCLENKSDLMVNHILRDCDLIGKFLLSDRDSNLLGDSQPTVAASGKKKPRVGYVGHITRISNKIGQLSNSNGQIKAYLQENSEWNEWQGSVLQDRNTVENVNRWGCGRPTTLQDRTRDSDEEDRDYDVAALANNLSQAFRYKIYGNDDNEEDHNALDRDDDDVYFDDESAEVVISSLRLGDDQGSLFTNSNWFTFQDDRFGSTPSDTAGSNTIDVELNKTYNANTSSSDDDEVVVGEEDDDLTGNPKDNALNTTETNFQMESPLDFFDFNTSQKAEEAFAEQPPEWVGWGEPSDMQASGTGLNPFIDDDDDDDSKHIMNLDIPMAEVKSESMIPNGSERSLFEKDVEFVGVEPEGAEKAMEQAMKEGIVGEAGVMKKNKEMAEDSKPEESSGGVKEFNDNNYWKVDQEVGVLE

SEQ ID NO: 72534 - protein, 858 aa, Arabidopsis thaliana
  peptide (1)..(858): Ceres Seq. ID no. 4936603
MKGSSPRSSSPSTPSSGTQPSSMDLSSPRSIGKVHCRSMEQVREETERKGTLLERLNNVEEQVLKLCSQFEEEVEEERKREDKTDKEKKTPKKKKGLRKLVEIILDKENFTLEELLDEEEIIQECKALNSRLINFLRDKAQVEQLLRYIVEEPPQDADSKRAFKFPFISCEIFTCEIDVILKTLVEDEEVVICLMIRKTAALMNYVKGHQNVFCQLVDLIGITSIMEVLVRLVGADDQVYPNFLDVMQWLADSNLLEMIVDKLKPSANAAETLCAISRNAPSALATQLSSPGYVAKIFGHALEDSHSKSGLVHSLSVCTSLLDPRRSAVSSSMFNSYRGQHMFESPVPVSPETIGAMLPKLNDLLMLLTVASDSTVLPTTYGELRPPLGKHRLKIVEFIAVLLKTRSEAAQKELVSSGTIKRTLDLFFEYPYNNALHHQVESIILSCLENKSDLMVNHILRDCDLIGKFLLSDRDSNLLGDSQPTVAASGKKKPRVGYVGHITRISNKIGQLSNSNGQIKAYLQENSEWNEWQGSVLQDRNTVENVNRWGCGRPTTLQDRTRDSDEEDRDYDVAALANNLSQAFRYKIYGNDDNEEDHNALDRDDDDVYFDDESAEVVISSLRLGDDQGSLFTNSNWFTFQDDRFGSTPSDTAGSNTIDVELNKTYNANTSSSDDDEVVVGEEDDDLTGNPKDNALNTTETNFQMESPLDFFDFNTSQKAEEAFAEQPPEWVGWGEPSDMQASGTGLNPFIDDDDDDDSKHIMNLDIPMAEVKSESMIPNGSERSLFEKDVEFVGVEPEGAEKAMEQAMKEGIVGEAGVMKKNKEMAEDSKPEESSGGVKEFNDNNYWKVDQEVGVLE

SEQ ID NO: 72535 - DNA, 2517 bp, Arabidopsis thaliana
  misc_feature (1)..(2517): Ceres Seq. ID no. 4936655
  misc_feature (1)..(2517): Ortholog of  Ceres SEQ ID NO 14309727 as cited in SEQ ID NO 1030
  misc_feature (1)..(2517): Ortholog of  Ceres SEQ ID NO 13581686 as cited in SEQ ID NO 57695
  misc_feature (1)..(2517): Ortholog of  Ceres SEQ ID NO 15224315 as cited in SEQ ID NO 66131
atggaatcttcgtcagaaggtgagacaaacaagatttcccgatgcaaagccactggttcagacaatcctgatgaggactacgtcgagatcacactcgaagtgcgagacgaaaccatcaacacaatgaaggccaaggcgacacttcgttcggttctttccgggaggctgaaaacgatggttaagtcgctatcgtttgcttcacgccggctcgaccgtagtaagtcgttcggtgctatgtttgctcttcgagggttgaggttcattgccaaaaacgacgccgttggtagaggctgggatgaggttgcaatgaggtttgataagttggccgttgaagggaaactccctaaatccaaatttggacattgcataggaatggttgaatctagcgaatttgtgaacgagctttttgaggcgttggtccgaaggagagggactacgtcatcgtcaatcaccaaaactgaattgtttgaattctgggagcagatcacaggcaatagttttgatgataggctgcaaatcttttttgatatggtggacaaaaatttggacggacgtattacaggagatgaggttaaggagataattgctttaagtgcttcggctaacaagctatcaaagattaaagaaaatgtagatgaatatgctgccttgatcatggaagaactagatcgcgacaacctcggatatattgagttacataacttggaaacattgcttctccaagttcctagccaatcaaataacagtccatcttccgcgaacaaacgtgcactcaacaagatgttgagccagaagctcataccaacaaaagatcgaaacccggtgaaaagatttgctatgaatatatcatacttcttcttggaaaattggaaaaggatttgggtgttaacattgtggatatccatttgcatcactctcttcacttggaaatttctccagtataaacgcaaaaccgtgttcgaggtgatgggctactgtgttaccgtggccaaaggcagtgcagagaccttgaaattcaacatggctctcattctcttgcccgtttgtaggaacactatcacttggctaaggaccaagtccaagcttattgggtctgttgttccatttgatgacaatatcaatttccacaaggttgttgcatttgggatcgcggttggaataggcttgcacgctatatctcacctggcatgtgatttcccgcgtttgctgcatgcaaaaaatgtagagtttgagccaatgaaaaagtttttcggagacgagaggcctgaaaattatggatggttcatgaaagggacagacgggtggaccggtgttaccatggtggttcttatgttagtggcctacgtcttggcgcagtcgtggttcagacgaaaccgggcaaacctaccaaaatcgttgaaacgattgactggtttcaacgcattttggtactcacaccatttgtttgtcatcgtttatgttcttctcatcgtgcatggctattttgtttatctctcaaaggaatggtaccacaagacgacgtggatgtatctggcagttcccgtactactatatgcatttgaacgattgattcgtgcatttagaccaggtgccaaggctgtcaaggttttgaaggtggcagtatatccaggaaatgtactttcactttacatgtcgaagcctaaaggtttcaagtacacaagtggacagtacatatatattaactgttctgacgtctcaccattacaatggcatccgttttcaattacttcggcttccggggatgattacctcagcgttcatatccgcacactcggagactggacatcgcaactcaaatccttatattccaaggtttgtcaacttccctcaacaagtcaaagtgggctcttcatagctgacataggtcaagccaacaatataaccaggtttccgaggctgttaatcgatggtccatatggtgcacccgcacaagattaccggaactacgatgtattgcttctagtaggtctagggatcggagcgacgccattaatcagcataatcagggacgtccttaacaacatcaagaaccagaattccatcgaacgaggcactaaccaacacataaaaaactatgttgccacaaaacgagcttatttttattgggtaacaagagagcaaggatcattggaatggttcagtgaggtcatgaacgaggtagctgagtatgatagtgaggggatgattgaactacataattactgcactagcgtgtatgaggaaggagatgcgaggtcagcactaatcaccatgttgcagtcattgcaccacgccaagagcggcattgacatcgtatcgggcactcgggtccgaacccatttcgctcgacccaattggcgtagtgtcttcaagcacgtcgcagtcaaccacgtcaatcaacgagttggggttttctactgtggtaatacatgcatcataggagagttaaagagactggctcaagatttctctaggaaaactacgaccaagtttgagttccacaaggaaaatttctag

SEQ ID NO: 72536 - protein, 838 aa, Arabidopsis thaliana
  peptide (1)..(838): Ceres Seq. ID no. 4936656
MESSSEGETNKISRCKATGSDNPDEDYVEITLEVRDETINTMKAKATLRSVLSGRLKTMVKSLSFASRRLDRSKSFGAMFALRGLRFIAKNDAVGRGWDEVAMRFDKLAVEGKLPKSKFGHCIGMVESSEFVNELFEALVRRRGTTSSSITKTELFEFWEQITGNSFDDRLQIFFDMVDKNLDGRITGDEVKEIIALSASANKLSKIKENVDEYAALIMEELDRDNLGYIELHNLETLLLQVPSQSNNSPSSANKRALNKMLSQKLIPTKDRNPVKRFAMNISYFFLENWKRIWVLTLWISICITLFTWKFLQYKRKTVFEVMGYCVTVAKGSAETLKFNMALILLPVCRNTITWLRTKSKLIGSVVPFDDNINFHKVVAFGIAVGIGLHAISHLACDFPRLLHAKNVEFEPMKKFFGDERPENYGWFMKGTDGWTGVTMVVLMLVAYVLAQSWFRRNRANLPKSLKRLTGFNAFWYSHHLFVIVYVLLIVHGYFVYLSKEWYHKTTWMYLAVPVLLYAFERLIRAFRPGAKAVKVLKVAVYPGNVLSLYMSKPKGFKYTSGQYIYINCSDVSPLQWHPFSITSASGDDYLSVHIRTLGDWTSQLKSLYSKVCQLPSTSQSGLFIADIGQANNITRFPRLLIDGPYGAPAQDYRNYDVLLLVGLGIGATPLISIIRDVLNNIKNQNSIERGTNQHIKNYVATKRAYFYWVTREQGSLEWFSEVMNEVAEYDSEGMIELHNYCTSVYEEGDARSALITMLQSLHHAKSGIDIVSGTRVRTHFARPNWRSVFKHVAVNHVNQRVGVFYCGNTCIIGELKRLAQDFSRKTTTKFEFHKENF

SEQ ID NO: 72537 - protein, 797 aa, Arabidopsis thaliana
  peptide (1)..(797): Ceres Seq. ID no. 4936657
MKAKATLRSVLSGRLKTMVKSLSFASRRLDRSKSFGAMFALRGLRFIAKNDAVGRGWDEVAMRFDKLAVEGKLPKSKFGHCIGMVESSEFVNELFEALVRRRGTTSSSITKTELFEFWEQITGNSFDDRLQIFFDMVDKNLDGRITGDEVKEIIALSASANKLSKIKENVDEYAALIMEELDRDNLGYIELHNLETLLLQVPSQSNNSPSSANKRALNKMLSQKLIPTKDRNPVKRFAMNISYFFLENWKRIWVLTLWISICITLFTWKFLQYKRKTVFEVMGYCVTVAKGSAETLKFNMALILLPVCRNTITWLRTKSKLIGSVVPFDDNINFHKVVAFGIAVGIGLHAISHLACDFPRLLHAKNVEFEPMKKFFGDERPENYGWFMKGTDGWTGVTMVVLMLVAYVLAQSWFRRNRANLPKSLKRLTGFNAFWYSHHLFVIVYVLLIVHGYFVYLSKEWYHKTTWMYLAVPVLLYAFERLIRAFRPGAKAVKVLKVAVYPGNVLSLYMSKPKGFKYTSGQYIYINCSDVSPLQWHPFSITSASGDDYLSVHIRTLGDWTSQLKSLYSKVCQLPSTSQSGLFIADIGQANNITRFPRLLIDGPYGAPAQDYRNYDVLLLVGLGIGATPLISIIRDVLNNIKNQNSIERGTNQHIKNYVATKRAYFYWVTREQGSLEWFSEVMNEVAEYDSEGMIELHNYCTSVYEEGDARSALITMLQSLHHAKSGIDIVSGTRVRTHFARPNWRSVFKHVAVNHVNQRVGVFYCGNTCIIGELKRLAQDFSRKTTTKFEFHKENF

SEQ ID NO: 72538 - protein, 780 aa, Arabidopsis thaliana
  peptide (1)..(780): Ceres Seq. ID no. 4936658
MVKSLSFASRRLDRSKSFGAMFALRGLRFIAKNDAVGRGWDEVAMRFDKLAVEGKLPKSKFGHCIGMVESSEFVNELFEALVRRRGTTSSSITKTELFEFWEQITGNSFDDRLQIFFDMVDKNLDGRITGDEVKEIIALSASANKLSKIKENVDEYAALIMEELDRDNLGYIELHNLETLLLQVPSQSNNSPSSANKRALNKMLSQKLIPTKDRNPVKRFAMNISYFFLENWKRIWVLTLWISICITLFTWKFLQYKRKTVFEVMGYCVTVAKGSAETLKFNMALILLPVCRNTITWLRTKSKLIGSVVPFDDNINFHKVVAFGIAVGIGLHAISHLACDFPRLLHAKNVEFEPMKKFFGDERPENYGWFMKGTDGWTGVTMVVLMLVAYVLAQSWFRRNRANLPKSLKRLTGFNAFWYSHHLFVIVYVLLIVHGYFVYLSKEWYHKTTWMYLAVPVLLYAFERLIRAFRPGAKAVKVLKVAVYPGNVLSLYMSKPKGFKYTSGQYIYINCSDVSPLQWHPFSITSASGDDYLSVHIRTLGDWTSQLKSLYSKVCQLPSTSQSGLFIADIGQANNITRFPRLLIDGPYGAPAQDYRNYDVLLLVGLGIGATPLISIIRDVLNNIKNQNSIERGTNQHIKNYVATKRAYFYWVTREQGSLEWFSEVMNEVAEYDSEGMIELHNYCTSVYEEGDARSALITMLQSLHHAKSGIDIVSGTRVRTHFARPNWRSVFKHVAVNHVNQRVGVFYCGNTCIIGELKRLAQDFSRKTTTKFEFHKENF

SEQ ID NO: 72539 - DNA, 741 bp, Arabidopsis thaliana
  misc_feature (1)..(741): Ceres Seq. ID no. 4936734
  misc_feature (1)..(741): Ortholog of  Ceres SEQ ID NO 15175519 as cited in SEQ ID NO 1110
  misc_feature (1)..(741): Ortholog of  Ceres SEQ ID NO 13637980 as cited in SEQ ID NO 58973
  misc_feature (1)..(741): Ortholog of  Ceres SEQ ID NO 12624081 as cited in SEQ ID NO 61729
  misc_feature (1)..(741): Ortholog of  Ceres SEQ ID NO 13599435 as cited in SEQ ID NO 0
aaaaacattcagagagaaaattcagcatttttgatagctcaagcacttgattctttccaaaggggtttcctgaggccaagtaacaatggcgaaaggagttgcagttttgaacagcagtgagggtgttacggggactatctttttcacccaggaaggcgatggtgtgaccactgtgagtggaacagtttctggccttaagcctggtcttcatggtttccatgtccatgctcttggtgacaccactaacggttgcatgtctactggtccacatttcaaccccgatggtaaaacacacggtgcccctgaggatgctaatcgacatgctggtgatctaggaaacatcactgttggagatgatggaactgccaccttcacaatcactgattgccagattcctcttactggaccaaactctattgttggtagggctgttgttgtccatgcagaccctgatgacctcggaaagggaggccatgaactcagcctggctactggaaacgcaggcggccgtgttgcttgcggcatcattggtctccagggctaaagctgctacgtttccaaagaagagattgatgtaataaggaggtccaaccttagacctgggtttggtagttgtgtgtatcttctggtgtgtggctaaaaacctatgagcttagtgtggctcaaagcatttttaattcagacagaaaacagagaaaattccgtacttttattatttcatgaataaaaaagagttgattt

SEQ ID NO: 72540 - protein, 152 aa, Arabidopsis thaliana; identical to SEQ ID NO: 22423
  peptide (1)..(152): Ceres Seq. ID no. 4936735

SEQ ID NO: 72541 - protein, 96 aa, Arabidopsis thaliana; identical to SEQ ID NO: 22424
  peptide (1)..(96): Ceres Seq. ID no. 4936736

SEQ ID NO: 72542 - DNA, 510 bp, Arabidopsis thaliana
  misc_feature (1)..(510): Ceres Seq. ID no. 4936965
  misc_feature (1)..(510): Ortholog of  Ceres SEQ ID NO 12625899 as cited in SEQ ID NO 69079
atggatgttcttatcttcaactcgtggcactggtggactcacacctccggacttcagccctgggattatatgagggaaggaaaccaattgtacaaagacatgaacaggcttgtggcttattacaaaggacttaacacatgggctcgttggattaacaataacattgtcccttcacgtactcaagtcttctttcaaggtgtttctcctgtccactatgacggaagagagtggaacgaaccattgaagtcgtgcaatggtcaaactcagccgttcatgggacaaagatatccaggaggattgcccttaggttgggttgtggttaacaaagtgttgagccgaattagaaaaccggtccatcttctcgatctcactactctctcggagtatcgcaaagacgcacatccaagtctctacaatggtatctcaaaggatctagactgtagccattggtgcctccctggactccctgatacttggaacttacttctctactcatctcttacttcctag

SEQ ID NO: 72543 - protein, 169 aa, Arabidopsis thaliana
  peptide (1)..(169): Ceres Seq. ID no. 4936966
MDVLIFNSWHWWTHTSGLQPWDYMREGNQLYKDMNRLVAYYKGLNTWARWINNNIVPSRTQVFFQGVSPVHYDGREWNEPLKSCNGQTQPFMGQRYPGGLPLGWVVVNKVLSRIRKPVHLLDLTTLSEYRKDAHPSLYNGISKDLDCSHWCLPGLPDTWNLLLYSSLTS

SEQ ID NO: 72544 - protein, 146 aa, Arabidopsis thaliana
  peptide (1)..(146): Ceres Seq. ID no. 4936967
MREGNQLYKDMNRLVAYYKGLNTWARWINNNIVPSRTQVFFQGVSPVHYDGREWNEPLKSCNGQTQPFMGQRYPGGLPLGWVVVNKVLSRIRKPVHLLDLTTLSEYRKDAHPSLYNGISKDLDCSHWCLPGLPDTWNLLLYSSLTS

SEQ ID NO: 72545 - protein, 136 aa, Arabidopsis thaliana
  peptide (1)..(136): Ceres Seq. ID no. 4936968
MNRLVAYYKGLNTWARWINNNIVPSRTQVFFQGVSPVHYDGREWNEPLKSCNGQTQPFMGQRYPGGLPLGWVVVNKVLSRIRKPVHLLDLTTLSEYRKDAHPSLYNGISKDLDCSHWCLPGLPDTWNLLLYSSLTS

SEQ ID NO: 72546 - DNA, 1587 bp, Arabidopsis thaliana
  misc_feature (1)..(1587): Ceres Seq. ID no. 4937167
  misc_feature (1)..(1587): Ortholog of  Ceres SEQ ID NO 12581709 as cited in SEQ ID NO 54052
  misc_feature (1)..(1587): Ortholog of  Ceres SEQ ID NO 13662854 as cited in SEQ ID NO 64786
atggtttcgccgtcagagatgacggagacggcaccggcaattatgacaacggaaagcgaaaggatagagagttcgagggaactcgtggataatgaagaggaggagaaaatacgccgtcagaagaagctcgaagaagctctcgaagccaaatctcttcgccgcattatcagtgcttacctcaattacccagaggcttcggaagaggatttgaaaagatgggaaagatcatatcggaagctgtctcctgcacacaaggcattggtaccccattaccctatgaagtttcagagattaagaaggtgtatatcggcgaattcatatttcatatttaatatgcttcaggcttttgagcctcctatagacttgagtcaggaacttgatggttgtgaagactcaaatcttgactgcgctccacatgagagatacactctagatgaaaggcacgactcttcttgtcagccggccttgaccaatagttgtacatataaggaagaaagcaaacacattcgtgacccaataacaggagtgtctatcgaggagcttcagaggaaagaagctcatgatcattctcccaaggatgactctgcagacacaagaatcaacgataagacatgtgattgtcatgaaggccagttaaatcatgaccatggcagtgtatcattttcatcccatgattggttggattcatcgttacagacacatgttcctctggttgatgtagataagcgtgagacaaagatcattatgtgtcatgttagaacttattctcaatctctattagttccattaggcagtttggttcgttgtattataaggaatattgttcgagactgggcagcagagggtcagagagaacgagatcaatgctacaagcctatccttgaagagcttgattccttgtttcctgaccgtttgaaggagagcacccctcctgcctgtttagtccctggtgctggacttggacgtctggcccttgaaatttcttgtctaggtttcataagccaaggaaatgaattttcatactacatgatgatatgctcaagttttattctgaattatacacaagtccctggtgagtggacaatatacccctggatacacagcaactgcaattcgctctcggacaatgatcagctacgccctattgcgattcctgatattcatcctgcaagtgcaggaataacagaaggtttctctatgtgtggtggtgattttgttgaagtatacaatgaatcaagtcatgcaggaatgtgggatgcagttgttacttgctttttcatcgacactgctcataatgtcatcgagtacattcaaaccatatccaagatcctaaaagatggaggagtttggataaatttaggacctctgttgtatcattttgcggacacatatggccatgaaaatgaaatgtctatcgagctaagtttggaggatgtaaagagggttgcttcacattttgggtttgtgatcgagaaagaaagaacaattgaaacaacttacactacaaatccccgggctatgatgcagaaccgatactatactgccttctggacaatgaggaagaaatgtgctataacaacaacttaa

SEQ ID NO: 72547 - protein, 528 aa, Arabidopsis thaliana
  peptide (1)..(528): Ceres Seq. ID no. 4937168
MVSPSEMTETAPAIMTTESERIESSRELVDNEEEEKIRRQKKLEEALEAKSLRRIISAYLNYPEASEEDLKRWERSYRKLSPAHKALVPHYPMKFQRLRRCISANSYFIFNMLQAFEPPIDLSQELDGCEDSNLDCAPHERYTLDERHDSSCQPALTNSCTYKEESKHIRDPITGVSIEELQRKEAHDHSPKDDSADTRINDKTCDCHEGQLNHDHGSVSFSSHDWLDSSLQTHVPLVDVDKRETKIIMCHVRTYSQSLLVPLGSLVRCIIRNIVRDWAAEGQRERDQCYKPILEELDSLFPDRLKESTPPACLVPGAGLGRLALEISCLGFISQGNEFSYYMMICSSFILNYTQVPGEWTIYPWIHSNCNSLSDNDQLRPIAIPDIHPASAGITEGFSMCGGDFVEVYNESSHAGMWDAVVTCFFIDTAHNVIEYIQTISKILKDGGVWINLGPLLYHFADTYGHENEMSIELSLEDVKRVASHFGFVIEKERTIETTYTTNPRAMMQNRYYTAFWTMRKKCAITTT

SEQ ID NO: 72548 - protein, 522 aa, Arabidopsis thaliana
  peptide (1)..(522): Ceres Seq. ID no. 4937169
MTETAPAIMTTESERIESSRELVDNEEEEKIRRQKKLEEALEAKSLRRIISAYLNYPEASEEDLKRWERSYRKLSPAHKALVPHYPMKFQRLRRCISANSYFIFNMLQAFEPPIDLSQELDGCEDSNLDCAPHERYTLDERHDSSCQPALTNSCTYKEESKHIRDPITGVSIEELQRKEAHDHSPKDDSADTRINDKTCDCHEGQLNHDHGSVSFSSHDWLDSSLQTHVPLVDVDKRETKIIMCHVRTYSQSLLVPLGSLVRCIIRNIVRDWAAEGQRERDQCYKPILEELDSLFPDRLKESTPPACLVPGAGLGRLALEISCLGFISQGNEFSYYMMICSSFILNYTQVPGEWTIYPWIHSNCNSLSDNDQLRPIAIPDIHPASAGITEGFSMCGGDFVEVYNESSHAGMWDAVVTCFFIDTAHNVIEYIQTISKILKDGGVWINLGPLLYHFADTYGHENEMSIELSLEDVKRVASHFGFVIEKERTIETTYTTNPRAMMQNRYYTAFWTMRKKCAITTT

SEQ ID NO: 72549 - protein, 514 aa, Arabidopsis thaliana
  peptide (1)..(514): Ceres Seq. ID no. 4937170
MTTESERIESSRELVDNEEEEKIRRQKKLEEALEAKSLRRIISAYLNYPEASEEDLKRWERSYRKLSPAHKALVPHYPMKFQRLRRCISANSYFIFNMLQAFEPPIDLSQELDGCEDSNLDCAPHERYTLDERHDSSCQPALTNSCTYKEESKHIRDPITGVSIEELQRKEAHDHSPKDDSADTRINDKTCDCHEGQLNHDHGSVSFSSHDWLDSSLQTHVPLVDVDKRETKIIMCHVRTYSQSLLVPLGSLVRCIIRNIVRDWAAEGQRERDQCYKPILEELDSLFPDRLKESTPPACLVPGAGLGRLALEISCLGFISQGNEFSYYMMICSSFILNYTQVPGEWTIYPWIHSNCNSLSDNDQLRPIAIPDIHPASAGITEGFSMCGGDFVEVYNESSHAGMWDAVVTCFFIDTAHNVIEYIQTISKILKDGGVWINLGPLLYHFADTYGHENEMSIELSLEDVKRVASHFGFVIEKERTIETTYTTNPRAMMQNRYYTAFWTMRKKCAITTT

SEQ ID NO: 72550 - DNA, 513 bp, Arabidopsis thaliana
  misc_feature (1)..(513): Ceres Seq. ID no. 4937246
  misc_feature (1)..(513): Ortholog of  Ceres SEQ ID NO 13587423 as cited in SEQ ID NO 437
  misc_feature (1)..(513): Ortholog of  Ceres SEQ ID NO 15171096 as cited in SEQ ID NO 59411
atgacaaatgctgttggtaaagccttgttctctaaagcaggggagctttgtgtgcctgttggcttcatgtgcatgaagggtctagatcttcacattgcagaaattgaggaactttgcacagaatttccaaagacaactgttttactagatcacgctggattctgcaaagtaccagaaagtggtgaggcaaagcttgcttattctcaactcatgaagctgtctagatttccacaggtatatgtgaaattcagtgctctattcaggatctcaagaaccggcttcccgtatcaggacctatcgcctctcctatctcaacttgtgtcccattttggggcaaatcgtgtcatgtggggcagtgacttcccatttgttgttcttgaatgtggatataaagaagctaaagaagctgtgactatcattgcaaaagaagcatccttgtcaagttctgagatggactggattctgggaaagactctgatgcagctcttccctggacaatgggttcttccttga

SEQ ID NO: 72551 - protein, 170 aa, Arabidopsis thaliana
  peptide (1)..(170): Ceres Seq. ID no. 4937247
MTNAVGKALFSKAGELCVPVGFMCMKGLDLHIAEIEELCTEFPKTTVLLDHAGFCKVPESGEAKLAYSQLMKLSRFPQVYVKFSALFRISRTGFPYQDLSPLLSQLVSHFGANRVMWGSDFPFVVLECGYKEAKEAVTIIAKEASLSSSEMDWILGKTLMQLFPGQWVLP

SEQ ID NO: 72552 - protein, 148 aa, Arabidopsis thaliana
  peptide (1)..(148): Ceres Seq. ID no. 4937248
MCMKGLDLHIAEIEELCTEFPKTTVLLDHAGFCKVPESGEAKLAYSQLMKLSRFPQVYVKFSALFRISRTGFPYQDLSPLLSQLVSHFGANRVMWGSDFPFVVLECGYKEAKEAVTIIAKEASLSSSEMDWILGKTLMQLFPGQWVLP

SEQ ID NO: 72553 - protein, 146 aa, Arabidopsis thaliana
  peptide (1)..(146): Ceres Seq. ID no. 4937249
MKGLDLHIAEIEELCTEFPKTTVLLDHAGFCKVPESGEAKLAYSQLMKLSRFPQVYVKFSALFRISRTGFPYQDLSPLLSQLVSHFGANRVMWGSDFPFVVLECGYKEAKEAVTIIAKEASLSSSEMDWILGKTLMQLFPGQWVLP

SEQ ID NO: 72554 - DNA, 1413 bp, Arabidopsis thaliana
  misc_feature (1)..(1413): Ceres Seq. ID no. 4937361
  misc_feature (1)..(1413): Ortholog of  Ceres SEQ ID NO 14308455 as cited in SEQ ID NO 55108
atggccactgaaaagaatactctggattctgaggctacttttgcgcaaacagtaccagctcttgattctacaacaaagaaacaggatgagtctcctccaaagagtaccccgtctcttactgtcactgcttgtgctaatggatctgatgtagtatcttctcagccaaatgacaatggccaagcacatactacagattttcgaaagggaaatcaccgtgacaaaaacagctcagatgtctatgctgattcgactttgcgtggagatcgaccaaaaggaagcaattgtttgtctcaaacttctttttcggctcctaagcctcttggaaatttcaatggtgctggtagacttcctcccaatacacaagcacatgcattcagaccaccatttaagggaaaggaagccgcaggacagttcttaacattctccaatcagaagacaagctgtgtcccatattctggttacattaatggaaactcaaataatggtttctgggatcaaagggatcataataagaaacctgagagaaatggagagtctgactacttggttgaattgaaatgtggtccgagagccaatgcaaagactcgtcctccttccgagtcgtcaccactgaagcaaaacaattcgtttgccttggctcttcgtagagagatgtataacctccctgactttcagactgactatgaagatgccaagtttttcgtaatcaagtcgtacagcgaagatgatgttcacaagagtatcaaatattctgtgtggtcaagcactatcaacggaaacaagaaactcgatgcagctttccgtgatgctgaaacaaaaacactcgaggatggcaagaaacgtccaatatttctcttcttctcggtgaatgcgagtagacaatttgtgggattagctgagatggttggatatgtggacttcaacaaggatttggatttctggcaggttgataagtggagtggctttttccctgttgaatggcatgtggttaaagatattcctaactgggaactacgccatatcatcctcgacaacaatgaggacaagccagttactcatacgagagatactcacgagatcaaactcaaagaaggtctccaaatgctttcgatattcaagaagtactctgcggtaacatttttgttagacgacatggacttctacgaagagcgagagaagtctcttcgagcgaagaaggagcataaaccagccactcttcgcatggatctcttcaaagagaaagactatgactatgagatggaaggcaacaggagaatgaatcaccaagaaagaggatataattggaacagaagtagcaatagcaaaacacaagcatctcttgtcaatcaaaccaagtatctttccataagaggctactctggttacaagaagaacactggcaattcaacatga

SEQ ID NO: 72555 - protein, 470 aa, Arabidopsis thaliana
  peptide (1)..(470): Ceres Seq. ID no. 4937362
MATEKNTLDSEATFAQTVPALDSTTKKQDESPPKSTPSLTVTACANGSDVVSSQPNDNGQAHTTDFRKGNHRDKNSSDVYADSTLRGDRPKGSNCLSQTSFSAPKPLGNFNGAGRLPPNTQAHAFRPPFKGKEAAGQFLTFSNQKTSCVPYSGYINGNSNNGFWDQRDHNKKPERNGESDYLVELKCGPRANAKTRPPSESSPLKQNNSFALALRREMYNLPDFQTDYEDAKFFVIKSYSEDDVHKSIKYSVWSSTINGNKKLDAAFRDAETKTLEDGKKRPIFLFFSVNASRQFVGLAEMVGYVDFNKDLDFWQVDKWSGFFPVEWHVVKDIPNWELRHIILDNNEDKPVTHTRDTHEIKLKEGLQMLSIFKKYSAVTFLLDDMDFYEEREKSLRAKKEHKPATLRMDLFKEKDYDYEMEGNRRMNHQERGYNWNRSSNSKTQASLVNQTKYLSIRGYSGYKKNTGNST

SEQ ID NO: 72556 - protein, 253 aa, Arabidopsis thaliana
  peptide (1)..(253): Ceres Seq. ID no. 4937363
MYNLPDFQTDYEDAKFFVIKSYSEDDVHKSIKYSVWSSTINGNKKLDAAFRDAETKTLEDGKKRPIFLFFSVNASRQFVGLAEMVGYVDFNKDLDFWQVDKWSGFFPVEWHVVKDIPNWELRHIILDNNEDKPVTHTRDTHEIKLKEGLQMLSIFKKYSAVTFLLDDMDFYEEREKSLRAKKEHKPATLRMDLFKEKDYDYEMEGNRRMNHQERGYNWNRSSNSKTQASLVNQTKYLSIRGYSGYKKNTGNST

SEQ ID NO: 72557 - DNA, 1086 bp, Arabidopsis thaliana
  misc_feature (1)..(1086): Ceres Seq. ID no. 4937451
  misc_feature (1)..(1086): Ortholog of  Ceres SEQ ID NO 15171245 as cited in SEQ ID NO 52264
  misc_feature (1)..(1086): Ortholog of  Ceres SEQ ID NO 14303576 as cited in SEQ ID NO 68428
atgaaaggagctgagacgacggagcaaggtaattgctctgcctttgcctccagcggtaaccttcctcactgctgtctcgagcgaccaaccatagtcgaccttcttcccggtgcttctctcaacgttcaagttgccaattgttgccgtggaggcgtcttgacttccatgtctcaggaccacgccaatcacgtctctgcttttcacatgacagttggaagctctcctgatggccctgaggagttcaatatgccttctaatttcgatataggggtcccgggttatagctgcgacaatgctacatccgtgtccccgactaagtttagtactgataagggccgtcgcaaaacacaagctctagcaacatgggaggcagtgtgtgtatactcgcagtttcggtcatcaccatcgccaaaatgctgcgtttcactctctgccttctactaccaaaacattgttccttgtcctacctgtagctgcggctgctcgagttcccattgtgtcaaggatggagagttgccgccatatcttgaacagaaacatgatccagatgaggaagtatcgcctgtcgtgaagtgttcggatcatatgtgtcccatccgcatccactggcatgtgaaagtgaactatagagagtattggagggttaagatcacagcaacaaatttcaacacaatgaagaattacactaattggaacttagtggtgcttcatccaaacttgaaaagcgtccaacaagtctttagctttaactacaaatctttgacaccatatcaaaacagcatcaatgacacagggatgttttggggagtccagttttataatgatgttttgcttcaagaaggaaagattgggaatgttcaaacagagttattgctgaagaaggatatgggaaatttcactttcagagaaggttgggctttcccaaggagaatcttgttcaatggtgatgaatgtgttatgccttctccagatgactttccaaggctgccaaaatctgctcattcctcttcgtcttcctctgctgttattagctctgtttcagtcgttttctgttttctccttcatcatcttcttctactagtttga

SEQ ID NO: 72558 - protein, 361 aa, Arabidopsis thaliana
  peptide (1)..(361): Ceres Seq. ID no. 4937452
MKGAETTEQGNCSAFASSGNLPHCCLERPTIVDLLPGASLNVQVANCCRGGVLTSMSQDHANHVSAFHMTVGSSPDGPEEFNMPSNFDIGVPGYSCDNATSVSPTKFSTDKGRRKTQALATWEAVCVYSQFRSSPSPKCCVSLSAFYYQNIVPCPTCSCGCSSSHCVKDGELPPYLEQKHDPDEEVSPVVKCSDHMCPIRIHWHVKVNYREYWRVKITATNFNTMKNYTNWNLVVLHPNLKSVQQVFSFNYKSLTPYQNSINDTGMFWGVQFYNDVLLQEGKIGNVQTELLLKKDMGNFTFREGWAFPRRILFNGDECVMPSPDDFPRLPKSAHSSSSSSAVISSVSVVFCFLLHHLLLLV

SEQ ID NO: 72559 - protein, 306 aa, Arabidopsis thaliana
  peptide (1)..(306): Ceres Seq. ID no. 4937453
MSQDHANHVSAFHMTVGSSPDGPEEFNMPSNFDIGVPGYSCDNATSVSPTKFSTDKGRRKTQALATWEAVCVYSQFRSSPSPKCCVSLSAFYYQNIVPCPTCSCGCSSSHCVKDGELPPYLEQKHDPDEEVSPVVKCSDHMCPIRIHWHVKVNYREYWRVKITATNFNTMKNYTNWNLVVLHPNLKSVQQVFSFNYKSLTPYQNSINDTGMFWGVQFYNDVLLQEGKIGNVQTELLLKKDMGNFTFREGWAFPRRILFNGDECVMPSPDDFPRLPKSAHSSSSSSAVISSVSVVFCFLLHHLLLLV

SEQ ID NO: 72560 - protein, 293 aa, Arabidopsis thaliana
  peptide (1)..(293): Ceres Seq. ID no. 4937454
MTVGSSPDGPEEFNMPSNFDIGVPGYSCDNATSVSPTKFSTDKGRRKTQALATWEAVCVYSQFRSSPSPKCCVSLSAFYYQNIVPCPTCSCGCSSSHCVKDGELPPYLEQKHDPDEEVSPVVKCSDHMCPIRIHWHVKVNYREYWRVKITATNFNTMKNYTNWNLVVLHPNLKSVQQVFSFNYKSLTPYQNSINDTGMFWGVQFYNDVLLQEGKIGNVQTELLLKKDMGNFTFREGWAFPRRILFNGDECVMPSPDDFPRLPKSAHSSSSSSAVISSVSVVFCFLLHHLLLLV

SEQ ID NO: 72561 - DNA, 927 bp, Arabidopsis thaliana
  misc_feature (1)..(927): Ceres Seq. ID no. 4937922
  misc_feature (1)..(927): Ortholog of  Ceres SEQ ID NO 13657064 as cited in SEQ ID NO 66003
aaataacgaattcgattttaaccggaaactgaaccggaagctgagtctcgtgcctgccttctctaggcttctttgtttccgatcagaatctcgagctcaactgtcaaaactagccgaccactaagtcgttgtcctaactttctctctgttcctcatcgaacattattgggaggagagagagagagagagaagaccaagaaacaacgaggatagatccgaggaaattgtcggaaccaaaaggaggaagatgggagatatctggacatggcttatttccttcttcttcctcatcgctcttgtcggaatcatcgtctatcagcttgtttgcttagcggatctcgagtttgattacatcaacccttacgactctgcgtcgagaataaactcagtggttttaccggagttcattgttcaaggagttctatgcgtattctacctcctaacaggacactggttcatgacactcttatgtctcccctatctatactacaacttccatctttactcgaagcgacaacacttagtagatgtcaccgagatcttcaatttgcttaactgggaaaagaagaaacggctgttcaagcttgcttacattgtccttaacctctttctcactatcttctggatgatttattcggcgctggatgattacgaggactgactaatgaagaagacatggtccatcttcttcggtttattgacactacgcttaaagatacagcgacatgcttgtggacatgaaaaaaagcaaggaaaagtgtttgctttgtgatgtttgtaagattagtggcaggaagatttgtgtatttatttctttcttagaaacatgttcagattaactgttttttttatgtcttgatcattatttgtacaagcaatcaagctcgtaaactactggttacagtaacaatgaaactgaataatttc

SEQ ID NO: 72562 - protein, 137 aa, Arabidopsis thaliana; identical to SEQ ID NO: 22542
  peptide (1)..(137): Ceres Seq. ID no. 4937923

SEQ ID NO: 72563 - DNA, 1256 bp, Arabidopsis thaliana
  misc_feature (1)..(1256): Ceres Seq. ID no. 4937924
  misc_feature (1)..(1256): Ortholog of  Ceres SEQ ID NO 14306059 as cited in SEQ ID NO 52249
  misc_feature (1)..(1256): Ortholog of  Ceres SEQ ID NO 15170479 as cited in SEQ ID NO 52835
  misc_feature (1)..(1256): Ortholog of  Ceres SEQ ID NO 13596087 as cited in SEQ ID NO 68336
agattctttcttctaaccccattcgctctctccgatcaacacaacatttgatctaacggtttaattttctcgagaaaccgaaggaaaacaaacagagcaatggcgtcgatgggacggtgcctgagctgaaattgagagtcgaagaagattccgataatggtgattatctgaaattgagaggaggatcaaatgaagaagatgaaggatcatcggcggaatcatcgagatgtccgataggatcggttacttctgtctggttctgggtgaaattgatctccttggtcgtttgtttgggttcattggcctttgttatcatcaaatgggttggtccctttttgattgaaaaggagctgattccatttataaattgggtgagaaacacattcagcataccggttctcggtcttctactatttgcctcagtggcattgtttccaagcattcttcttccttcttccccttccatgtggatggctggtcttacatttggttatggaaaagggtttcttctgattttatcagctgcttccatcggtgttactcttcctttcttaattggacatctcttcctccacaagatgcaagaatggttgaagaaataccctaaaaaagcagccatacttagagctgctggtgaaggaacctggtttcatcagtttcaagcagtcacactaatccgtgtctctccatttccttacatcatttacaactactgcgctttagcgactggagttcattatggtccttatatcttaggctctcttgttggaatggttcctgagatctttgtctcaatttacacgggtataatgctaaggacactagcagttgcatcagacacgagacacacactttcggttgtggagatagtcgtgaatgttcttggcttctgtgtaactgcgagcgcgactatagtctgcacaatctatgcgaagaagaagctaagtgcgatgcaatcagaggacgtagagacattacaaaatccaatactttattaactcttttcaccatgaccacaacataccatcatctaacacgatcttgaaattgataatatataatgtttttttttttttttgttattcttattcatttgaaaatgaatatttatgtctttttctcttgtatatatgatatgtatcaattgaattttgaaaatttccaatgtatatttattagatcatctaagtctttttctttccttgcatataatccaccttatgtatcatggaacaatgtcttgttgggttttgttc

SEQ ID NO: 72564 - protein, 177 aa, Arabidopsis thaliana; identical to SEQ ID NO: 26159
  peptide (1)..(177): Ceres Seq. ID no. 4937925

SEQ ID NO: 72565 - protein, 175 aa, Arabidopsis thaliana; identical to SEQ ID NO: 26160
  peptide (1)..(175): Ceres Seq. ID no. 4937926

SEQ ID NO: 72566 - protein, 139 aa, Arabidopsis thaliana; identical to SEQ ID NO: 39549
  peptide (1)..(139): Ceres Seq. ID no. 4937927

SEQ ID NO: 72567 - DNA, 861 bp, Arabidopsis thaliana
  misc_feature (1)..(861): Ceres Seq. ID no. 4937932
  misc_feature (1)..(861): Ortholog of  Ceres SEQ ID NO 12610385 as cited in SEQ ID NO 55938
  misc_feature (1)..(861): Ortholog of  Ceres SEQ ID NO 13661939 as cited in SEQ ID NO 61170
  misc_feature (1)..(861): Ortholog of  Ceres SEQ ID NO 14309041 as cited in SEQ ID NO 0
  misc_feature (1)..(861): Ortholog of  Ceres SEQ ID NO 14309611 as cited in SEQ ID NO 0
attgtcaatttccctttattttctcgacggaatcataaataaaaaccctaaacctaaagtcacaaattcattcttcatctgttattcacgatttgtgttgtcttttcttttgcagtaagatttcgactttggaattgggagatctttccattatgggttctgagcaaaacgacagcacaagcttctctccttcagagccaaagctctgcgtcaaaggatgtggcttcttcggatctccatcgaacatgaacctctgctctaaatgctacagagacatccgagccacggaggaacaaaccgcttccgctaaagccgccgtcgagaaatctctaaaccctaataaacccaaaactcaaccacaacagagccaagaaatcactcaaggcgtcctcggatctggatcgtcttcctcatcaacgagagggggtgattcggctgctgctccgttggatccaccgaaatcgacggctacgagatgcttgagctgtaacaagaaagttggcgtgacgggtttcaagtgtaggtgtggaagcactttctgtggaactcatagatatccagagagtcacgagtgccaattcgatttcaaaggagttgcgagagaagctattgctaaagctaatcctgtggtgaaggctgataaggttgataggatatgaattggtgaagaaactgttgtgttctcttttgtttttttattttcaagtctcgtgatgttggtggtttggctctctgttttctgctcttattatggttttatttgcttttagggtttcttaggaaaggccttagattctgctattatgtggtttcatgttttgcaacattggatttgttgttctgtaataaagtgttggttat

SEQ ID NO: 72568 - protein, 168 aa, Arabidopsis thaliana; identical to SEQ ID NO: 35636
  peptide (1)..(168): Ceres Seq. ID no. 4937933

SEQ ID NO: 72569 - protein, 137 aa, Arabidopsis thaliana; identical to SEQ ID NO: 35637
  peptide (1)..(137): Ceres Seq. ID no. 4937934

SEQ ID NO: 72570 - DNA, 1041 bp, Arabidopsis thaliana
  misc_feature (1)..(1041): Ceres Seq. ID no. 4938370
  misc_feature (1)..(1041): Ortholog of  Ceres SEQ ID NO 14304502 as cited in SEQ ID NO 53212
atggccagtttcaaattcttctttgcagccataattttggttctgtttcatccggcagcaataacttttgttgcttcgtatggctcattacagcttggcgatcaatgctcatcggacgaagactgcaatgttggacttggttgttttaaatgcggtatagatgttgcaagatgcgttagatccaatatcacagatcagttctccattgtgaacaattcgatgccgtttaataaatatgcatttttgacgacccacaattcatatgccattgaagggaaagcgcttcatgtggcgacccaagaagatactatagttcaacaactcaacagtggtgttcgagcattgatgttggatacgtacgattacgaaggagacgtatggttttgccattccttcgacgaacaatgctttgagttcaccaaatttaatcgggcgatagacacattcaaggagatattcgcgttcttgacagcgaatccatcagagatcgtgacattgatcttggaggattacgtcaaatcgcaaaacgggttaaccaaagtatttaccgattccggtttgaagaaattttggtttccggttcaaaatatgcctataggtggccaagattggccgttggttaaggatatggtcgccaataaccaccggttaatcgttttcacttcagctaaatctaagcaagaaaccgaaggaatagcttaccagtggaattacatggtggaaaatcaatatggagacgatggagttaaaccagatgaatgtagcaatagagcagattctgcactgttaaccgataaaacgaaagctttggtttcggtaaaccatttcaagacagttccggttaagatattgacttgtgaggagaactctgagcaacttctcgatatgattaagacatgttacgtagccgcagggaaccgatgggccaattttgtcgccgtcaacttttacaagaggagtaatggaggaggaacgtttcaagcaattgataaactaaacggagagcttctatgtggacgtgatgatgtgcatgcttgttaa

SEQ ID NO: 72571 - protein, 346 aa, Arabidopsis thaliana
  peptide (1)..(346): Ceres Seq. ID no. 4938371
MASFKFFFAAIILVLFHPAAITFVASYGSLQLGDQCSSDEDCNVGLGCFKCGIDVARCVRSNITDQFSIVNNSMPFNKYAFLTTHNSYAIEGKALHVATQEDTIVQQLNSGVRALMLDTYDYEGDVWFCHSFDEQCFEFTKFNRAIDTFKEIFAFLTANPSEIVTLILEDYVKSQNGLTKVFTDSGLKKFWFPVQNMPIGGQDWPLVKDMVANNHRLIVFTSAKSKQETEGIAYQWNYMVENQYGDDGVKPDECSNRADSALLTDKTKALVSVNHFKTVPVKILTCEENSEQLLDMIKTCYVAAGNRWANFVAVNFYKRSNGGGTFQAIDKLNGELLCGRDDVHAC

SEQ ID NO: 72572 - protein, 273 aa, Arabidopsis thaliana
  peptide (1)..(273): Ceres Seq. ID no. 4938372
MPFNKYAFLTTHNSYAIEGKALHVATQEDTIVQQLNSGVRALMLDTYDYEGDVWFCHSFDEQCFEFTKFNRAIDTFKEIFAFLTANPSEIVTLILEDYVKSQNGLTKVFTDSGLKKFWFPVQNMPIGGQDWPLVKDMVANNHRLIVFTSAKSKQETEGIAYQWNYMVENQYGDDGVKPDECSNRADSALLTDKTKALVSVNHFKTVPVKILTCEENSEQLLDMIKTCYVAAGNRWANFVAVNFYKRSNGGGTFQAIDKLNGELLCGRDDVHAC

SEQ ID NO: 72573 - protein, 231 aa, Arabidopsis thaliana
  peptide (1)..(231): Ceres Seq. ID no. 4938373
MLDTYDYEGDVWFCHSFDEQCFEFTKFNRAIDTFKEIFAFLTANPSEIVTLILEDYVKSQNGLTKVFTDSGLKKFWFPVQNMPIGGQDWPLVKDMVANNHRLIVFTSAKSKQETEGIAYQWNYMVENQYGDDGVKPDECSNRADSALLTDKTKALVSVNHFKTVPVKILTCEENSEQLLDMIKTCYVAAGNRWANFVAVNFYKRSNGGGTFQAIDKLNGELLCGRDDVHAC

SEQ ID NO: 72574 - DNA, 903 bp, Arabidopsis thaliana
  misc_feature (1)..(903): Ceres Seq. ID no. 4938449
  misc_feature (1)..(903): Ortholog of  Ceres SEQ ID NO 14304502 as cited in SEQ ID NO 53212
atgcagcttggcgatcaatgctcatcggacgaagactgcaatgttggacttggttgttttaaatgcggtatagatgttgcaagatgcgttagatccaatatcacagatcagttctccattgtgaacaattcgatgccgtttaataaatatgcatttttgacgacccacaattcatatgccattgaagggaaagcgcttcatgtggcgacccaagaagatactatagttcaacaactcaacagtggtgttcgagcattgatgttggatacgtacgattacgaaggagacaatcgggcgatagacacattcaaggagatattcgcgttcttgacagcgaatccatcagagatcgtgacattgatcttggaggattacgtcaaatcgcaaaacgggttaaccaaagtatttaccgattccggtttgaagaaattttggtttccggttcaaaatatgcctataggtggccaagattggccgttggttaaggatatggtcgccaataaccaccggttaatcgttttcacttcagctaaatctaagcaagaaaccgaaggaatagcttaccagtggaattacatggtggaaaatcaatatggagacgatggagttaaaccagatgaatgtagcaatagagcagattctgcactgttaaccgataaaacgaaagctttggtttcggtaaaccatttcaagacagttccggttaagatattgacttgtgaggagaactctgagcaacttctcgatatgattaagacatgttacgtagccgcagggaaccgatgggccaattttgtcgccgtcaacttttacaagaggagtaatggaggaggaacgtttcaagcaattgataaactaaacggagagcttctatgtggacgtgatgatgtgcatgcttgttaa

SEQ ID NO: 72575 - protein, 300 aa, Arabidopsis thaliana
  peptide (1)..(300): Ceres Seq. ID no. 4938450
MQLGDQCSSDEDCNVGLGCFKCGIDVARCVRSNITDQFSIVNNSMPFNKYAFLTTHNSYAIEGKALHVATQEDTIVQQLNSGVRALMLDTYDYEGDNRAIDTFKEIFAFLTANPSEIVTLILEDYVKSQNGLTKVFTDSGLKKFWFPVQNMPIGGQDWPLVKDMVANNHRLIVFTSAKSKQETEGIAYQWNYMVENQYGDDGVKPDECSNRADSALLTDKTKALVSVNHFKTVPVKILTCEENSEQLLDMIKTCYVAAGNRWANFVAVNFYKRSNGGGTFQAIDKLNGELLCGRDDVHAC

SEQ ID NO: 72576 - protein, 256 aa, Arabidopsis thaliana
  peptide (1)..(256): Ceres Seq. ID no. 4938451
MPFNKYAFLTTHNSYAIEGKALHVATQEDTIVQQLNSGVRALMLDTYDYEGDNRAIDTFKEIFAFLTANPSEIVTLILEDYVKSQNGLTKVFTDSGLKKFWFPVQNMPIGGQDWPLVKDMVANNHRLIVFTSAKSKQETEGIAYQWNYMVENQYGDDGVKPDECSNRADSALLTDKTKALVSVNHFKTVPVKILTCEENSEQLLDMIKTCYVAAGNRWANFVAVNFYKRSNGGGTFQAIDKLNGELLCGRDDVHAC

SEQ ID NO: 72577 - protein, 214 aa, Arabidopsis thaliana
  peptide (1)..(214): Ceres Seq. ID no. 4938452
MLDTYDYEGDNRAIDTFKEIFAFLTANPSEIVTLILEDYVKSQNGLTKVFTDSGLKKFWFPVQNMPIGGQDWPLVKDMVANNHRLIVFTSAKSKQETEGIAYQWNYMVENQYGDDGVKPDECSNRADSALLTDKTKALVSVNHFKTVPVKILTCEENSEQLLDMIKTCYVAAGNRWANFVAVNFYKRSNGGGTFQAIDKLNGELLCGRDDVHAC

SEQ ID NO: 72578 - DNA, 1257 bp, Arabidopsis thaliana
  misc_feature (1)..(1257): Ceres Seq. ID no. 4938538
  misc_feature (1)..(1257): Ortholog of  Ceres SEQ ID NO 14314869 as cited in SEQ ID NO 58320
atttcactttccgattttataaaattgattcttctcttcttcttaaacccatgaagagttcatgatttcttaagctcgcagcataatcgatggcgaatttgagtttgagcttgtatctaatcctccggatttacgctcttttgttgctgttcaatgtctccttcgctaaaacacttaaacgagacatgaaagctttgaatgagataaagaaattggtgggatggagattggtatactcttgggttggagatgatccttgtggcgatggagttttgcctccgtggtctggagttacttgctctaaagttggcgattatcgtgtcgtcgtcaagctagaagtgtattcaatgtcgatagttgggaatttcccaaaggctataacgaagctcttagatctcactgttttggatatgcataataacaaattaacaggtcctattcctccagaaattgggcggcttaagcggcttatcacactgaatttgaggtggaacaaacttcaacaggcactgcctcctgaaattggtggattgaagagtctaacttatctgtacctgagttttaacaatttcaaaggagaaatccccaaagaacttgcaaatctccatgagctccagtacttacatattcaggagaatcattttactgggcgaattccagcagagctgggaacattacaaaaacttcgccacttggatgctggcaacaataacttagtggggagtataagcgatctttttcgcattgaaggatgctttccagctcttagaaacctgtttttaaacaataattacttgactggaggactcccaaacaagcttgcaaatctaacaaacctggagatcttgtacttatctttcaacaaaatgactggagcaatacccgctgcacttgccagtataccaagactaactaacttgcacttggaccacaatctattcaatggaagtatacctgaagccttctacaagcatccaaacctaaaagatatgtacatagaagggaatgctttcaaatcagacgtgaaggcgattggtgcacataaggtcctcgaactttctgacacagacttccttgtttagttatgtatagcacaactttgtttcatttacagataggaatttggcagtgttaactggttatttaagattcattttctctgttaaagcgagattgtagttgatgtgttttctgaatgtaaaagattccttatccatgtatgaaaattgaatataaaaggaatctggtttgttcttt

SEQ ID NO: 72579 - protein, 330 aa, Arabidopsis thaliana; identical to SEQ ID NO: 42501
  peptide (1)..(330): Ceres Seq. ID no. 4938539

SEQ ID NO: 72580 - protein, 298 aa, Arabidopsis thaliana; identical to SEQ ID NO: 42502
  peptide (1)..(298): Ceres Seq. ID no. 4938540

SEQ ID NO: 72581 - protein, 244 aa, Arabidopsis thaliana; identical to SEQ ID NO: 42503
  peptide (1)..(244): Ceres Seq. ID no. 4938541

SEQ ID NO: 72582 - DNA, 2550 bp, Arabidopsis thaliana
  misc_feature (1)..(2550): Ceres Seq. ID no. 4938713
  misc_feature (1)..(2550): Ortholog of  Ceres SEQ ID NO 15174947 as cited in SEQ ID NO 236
atgacgcaagaaagattcaagaacaaccttaacgccgtcgtgatatcattcttcttcttcttcctctgttccacgtcggatttgctccttccacgttcaccgttagctattctcaccggcgggaggtgggatcttctgcagccgagtgtaggtatatccgcaatgcacatgcagcttctacacaacaacaaagtcgtcatctttgaccgtacggattatggaccttcgaatgtttctctcccttctcaaacctgccaaaacgccaccgtttttgactgctctgctcattcaatactatacgacgtcgcttcaaatacctttcgcccacttacactacgttacgacacgtggtgctcttccggttctttaaacgcttccggttctttaatccaaaccggcggttatggcaacggcgaaagaactgtacgggttttcacaccttgcgacggaggagttggaagcgtttcgtgtgattggattgagaacagagcgtatctctcctctcgccggtggtattccaccaatcagattcttcccgatggtcggattatcatcgtcggcggaagaagagctttcaactacgagttttaccccaaggatccgggagaatccgttttcaatctcagattcttggcggagacgagagatccgaatgaagaaaacaatctttatccgtttcttcatcttctccccgacggtaatctcttcatcttcgccaatcggagatcgattttgttcgatttcgtcaatcaccgaatcatcaaggagtttccacagattcccggcggcgataaacggaattatcccagcactggctcctccgtgctcctccctctctttctcaccggagacattaacagaacgaagataactgctgaggttatggtatgcggcggtgctccgccgggagcgttcttcaaagcggcgaggacgattcctaaaatcttcgtcgcgggatcacgcacgtgtgggagattgaaagtgaccgacccggatccgaaatgggtcatggagcaaatgccatcgccacgtgtcatgtctgatatgttactgttaccaaacggtgacgttttgatcattaacggtgctgctaacggaaccgctggttgggaagacgcgacgaacgctgttctcaacccgattttatacttacccgaggagcctgaccagacccggagattcgaaattctcaccccgactcgaatccctagaatgtaccattcggcgtctcttcttctgtcagacggcagagtcttagtcggaggaagcaatcctcatcgaaattacaatttcacggcgaggccgtacccaacggagctcagcctcgaggcttatctcccgcgttacctggatccacagtacgcacgtgtgagaccgacgatcatcacggtggagctcgccgggaatatgttgtacggtcaggcttttgccgtaacgttcgcgattccggcattcggaatgttcgacggaggggtatcggtgaggctcgtggcgccgtcgttcagcactcactcaacggcgatgaaccagaggttgttggttttgcgcgtcaggcgcgtgagtcagttatctgttttcgcttataaagctgacgtggacgggcctactaactcctacgtggcaccacctgggtattatatgatgttcgtggttcaccgtggaattccgagtgtagctgtttgggaaatttcggttaagacccctactcctcgggagaagatatttgattttgtttgtcctagtagttgtgatggtttgatatgcttctacaatctttataaatcgggtattgtagtcaatccagccactagatggcatcgaagttttcctccacctaggtataaacaagtcattctcgacaaatcttctagtgaatatagtagtgtctttcctttgcctttgcttggattcggcaaagacatcatcaatggcacatacaagccggtttgcttatataattcactagaaagaggactaagaaacgctactacgtgtgaagttttcgactttaggaccaatgtttggaagtatattaccccttcttctccttaccggatcattgctttccatgatcctgtgtacgtagatgggtcgctgcattggttcaccgaatgcaaagaaatcaaagttctatctctagatcttcataccgagacttttcaagtaatctccaaagttccttttgacattgcaaattgtgacaacattgccatgtgcaacttggataaccgcttgtgcatatccgagaacaagtggcctgaccaagtggtatggtcgtttgattcatgcaacaagaaatggcacaaaatgtttacgttagatctgaatatattttctcatgggtttgggaagcactttttggcagtctcaccagtagcagttttggaaaagaagaagaaaaatggtaagttattgttatcttctaatctaatatataagcaacaaatggtggtacatgatcccgaaaccaaatcttatgattttgttttcaagagtaagaattctggaaatcatgtttgttatttcgagagtctagtctctattttataa

SEQ ID NO: 72583 - protein, 849 aa, Arabidopsis thaliana
  peptide (1)..(849): Ceres Seq. ID no. 4938714
MTQERFKNNLNAVVISFFFFFLCSTSDLLLPRSPLAILTGGRWDLLQPSVGISAMHMQLLHNNKVVIFDRTDYGPSNVSLPSQTCQNATVFDCSAHSILYDVASNTFRPLTLRYDTWCSSGSLNASGSLIQTGGYGNGERTVRVFTPCDGGVGSVSCDWIENRAYLSSRRWYSTNQILPDGRIIIVGGRRAFNYEFYPKDPGESVFNLRFLAETRDPNEENNLYPFLHLLPDGNLFIFANRRSILFDFVNHRIIKEFPQIPGGDKRNYPSTGSSVLLPLFLTGDINRTKITAEVMVCGGAPPGAFFKAARTIPKIFVAGSRTCGRLKVTDPDPKWVMEQMPSPRVMSDMLLLPNGDVLIINGAANGTAGWEDATNAVLNPILYLPEEPDQTRRFEILTPTRIPRMYHSASLLLSDGRVLVGGSNPHRNYNFTARPYPTELSLEAYLPRYLDPQYARVRPTIITVELAGNMLYGQAFAVTFAIPAFGMFDGGVSVRLVAPSFSTHSTAMNQRLLVLRVRRVSQLSVFAYKADVDGPTNSYVAPPGYYMMFVVHRGIPSVAVWEISVKTPTPREKIFDFVCPSSCDGLICFYNLYKSGIVVNPATRWHRSFPPPRYKQVILDKSSSEYSSVFPLPLLGFGKDIINGTYKPVCLYNSLERGLRNATTCEVFDFRTNVWKYITPSSPYRIIAFHDPVYVDGSLHWFTECKEIKVLSLDLHTETFQVISKVPFDIANCDNIAMCNLDNRLCISENKWPDQVVWSFDSCNKKWHKMFTLDLNIFSHGFGKHFLAVSPVAVLEKKKKNGKLLLSSNLIYKQQMVVHDPETKSYDFVFKSKNSGNHVCYFESLVSIL

SEQ ID NO: 72584 - protein, 795 aa, Arabidopsis thaliana
  peptide (1)..(795): Ceres Seq. ID no. 4938715
MHMQLLHNNKVVIFDRTDYGPSNVSLPSQTCQNATVFDCSAHSILYDVASNTFRPLTLRYDTWCSSGSLNASGSLIQTGGYGNGERTVRVFTPCDGGVGSVSCDWIENRAYLSSRRWYSTNQILPDGRIIIVGGRRAFNYEFYPKDPGESVFNLRFLAETRDPNEENNLYPFLHLLPDGNLFIFANRRSILFDFVNHRIIKEFPQIPGGDKRNYPSTGSSVLLPLFLTGDINRTKITAEVMVCGGAPPGAFFKAARTIPKIFVAGSRTCGRLKVTDPDPKWVMEQMPSPRVMSDMLLLPNGDVLIINGAANGTAGWEDATNAVLNPILYLPEEPDQTRRFEILTPTRIPRMYHSASLLLSDGRVLVGGSNPHRNYNFTARPYPTELSLEAYLPRYLDPQYARVRPTIITVELAGNMLYGQAFAVTFAIPAFGMFDGGVSVRLVAPSFSTHSTAMNQRLLVLRVRRVSQLSVFAYKADVDGPTNSYVAPPGYYMMFVVHRGIPSVAVWEISVKTPTPREKIFDFVCPSSCDGLICFYNLYKSGIVVNPATRWHRSFPPPRYKQVILDKSSSEYSSVFPLPLLGFGKDIINGTYKPVCLYNSLERGLRNATTCEVFDFRTNVWKYITPSSPYRIIAFHDPVYVDGSLHWFTECKEIKVLSLDLHTETFQVISKVPFDIANCDNIAMCNLDNRLCISENKWPDQVVWSFDSCNKKWHKMFTLDLNIFSHGFGKHFLAVSPVAVLEKKKKNGKLLLSSNLIYKQQMVVHDPETKSYDFVFKSKNSGNHVCYFESLVSIL

SEQ ID NO: 72585 - protein, 793 aa, Arabidopsis thaliana
  peptide (1)..(793): Ceres Seq. ID no. 4938716
MQLLHNNKVVIFDRTDYGPSNVSLPSQTCQNATVFDCSAHSILYDVASNTFRPLTLRYDTWCSSGSLNASGSLIQTGGYGNGERTVRVFTPCDGGVGSVSCDWIENRAYLSSRRWYSTNQILPDGRIIIVGGRRAFNYEFYPKDPGESVFNLRFLAETRDPNEENNLYPFLHLLPDGNLFIFANRRSILFDFVNHRIIKEFPQIPGGDKRNYPSTGSSVLLPLFLTGDINRTKITAEVMVCGGAPPGAFFKAARTIPKIFVAGSRTCGRLKVTDPDPKWVMEQMPSPRVMSDMLLLPNGDVLIINGAANGTAGWEDATNAVLNPILYLPEEPDQTRRFEILTPTRIPRMYHSASLLLSDGRVLVGGSNPHRNYNFTARPYPTELSLEAYLPRYLDPQYARVRPTIITVELAGNMLYGQAFAVTFAIPAFGMFDGGVSVRLVAPSFSTHSTAMNQRLLVLRVRRVSQLSVFAYKADVDGPTNSYVAPPGYYMMFVVHRGIPSVAVWEISVKTPTPREKIFDFVCPSSCDGLICFYNLYKSGIVVNPATRWHRSFPPPRYKQVILDKSSSEYSSVFPLPLLGFGKDIINGTYKPVCLYNSLERGLRNATTCEVFDFRTNVWKYITPSSPYRIIAFHDPVYVDGSLHWFTECKEIKVLSLDLHTETFQVISKVPFDIANCDNIAMCNLDNRLCISENKWPDQVVWSFDSCNKKWHKMFTLDLNIFSHGFGKHFLAVSPVAVLEKKKKNGKLLLSSNLIYKQQMVVHDPETKSYDFVFKSKNSGNHVCYFESLVSIL

SEQ ID NO: 72586 - DNA, 1689 bp, Arabidopsis thaliana
  misc_feature (1)..(1689): Ceres Seq. ID no. 4938735
  misc_feature (1)..(1689): Ortholog of  Ceres SEQ ID NO 15170885 as cited in SEQ ID NO 54326
atgatttcccaggtggagagagatctgtcgattcaaaatcggcttccgggaagcgatcacactactccttctccgccaacatctcctcatctctgccggagccggtcgaaatcctcctctgtctccgggcaacagcaaagtcggaacgtcgctcaccgtctctcatggatcattttatctgttcttctccggcgtcagggaattctccttttcgctcctatcatctacatctcctgtatgctttttcacctacacgcggcgtcgtttgatgcctctcccattatccaccgccgtcctgctccgggatccgtctaccggagccctcaggtttacgctaggcttcgcggcgagattgaagccgataataccacggctgatgcgatatcaacaatttggaagcgttcctataaaggtgtagaatggaagccatgtgtgaacatgtctactggagttttacctgtgtcaaatggtttcatatttattgaggcaaatggaggcttgaatcagcagcggacttcgatatgcaatgcggttgctgtggcaggctaccttaatgcgacccttgtaattcccaactttcactatcacagcatatggaaagatccgagtaaatttggggacatctatgatgaagagtactttatcgataccttagcaaatgatgtgcgggtggtcgatacagttcctgaatacttgatggagcgttttgactataacttgacaaatgtctacaacttcagagttaaagcatgggcacccacctcctattaccgggactcagtcctgccaaagctgcttgaagaaaaggttataagaatttccccatttgcaaatagactttcgtttgatgctcctcgagctgtccagagatttagatgtttggcgaataatgtagccttgcgattttcaaaacccatactgacccaaggagaaacattggtgaacaaaatgaagggtcttagtgcaaacaacgccgggaaatacgtttctgtgcatcttcgttttgaagaggatatggttgcgttctcttgttgtgtatttgatggtggagaccaagaaaaacaagacatgattgccgctagagaacgaggatggaaagggaagttcacaaaaccgggccgtgtgatacgaccaggagctaacaggctcaatgggaaatgccctttaactcctttagaggtcggtttgatgcttagaggaatgggcttcaacaaaagtacatatatattccttgccgctggcccgatatatagcgcaaatagaactatggccccactactcgagatgttccctaatctacagacaaaggagatgcttgcttctgaggaagacctggctccttttaagaacttctcctcgagaatggctgcaatagattacacggtgtgtctccacagtgaggtatttgtgacaacacaaggtggaaacttccctcatttcctcatggggcatcggaggtatttgtttggaggacattcaaagacgattcagccagacaagcgaaagttagccgtactctttgacaatcccaagttgggatggaaaagttttaaacggcaaatgctaagtatgaggtcccatagtgactccaaggggtttgagctgaaacgatcaagtgactccatttacatattcccttgtcctgattgtatgtgccggaagaacaaaacaacagcatcagccacctga

SEQ ID NO: 72587 - protein, 562 aa, Arabidopsis thaliana
  peptide (1)..(562): Ceres Seq. ID no. 4938736
MISQVERDLSIQNRLPGSDHTTPSPPTSPHLCRSRSKSSSVSGQQQSRNVAHRLSWIILSVLLRRQGILLFAPIIYISCMLFHLHAASFDASPIIHRRPAPGSVYRSPQVYARLRGEIEADNTTADAISTIWKRSYKGVEWKPCVNMSTGVLPVSNGFIFIEANGGLNQQRTSICNAVAVAGYLNATLVIPNFHYHSIWKDPSKFGDIYDEEYFIDTLANDVRVVDTVPEYLMERFDYNLTNVYNFRVKAWAPTSYYRDSVLPKLLEEKVIRISPFANRLSFDAPRAVQRFRCLANNVALRFSKPILTQGETLVNKMKGLSANNAGKYVSVHLRFEEDMVAFSCCVFDGGDQEKQDMIAARERGWKGKFTKPGRVIRPGANRLNGKCPLTPLEVGLMLRGMGFNKSTYIFLAAGPIYSANRTMAPLLEMFPNLQTKEMLASEEDLAPFKNFSSRMAAIDYTVCLHSEVFVTTQGGNFPHFLMGHRRYLFGGHSKTIQPDKRKLAVLFDNPKLGWKSFKRQMLSMRSHSDSKGFELKRSSDSIYIFPCPDCMCRKNKTTASAT

SEQ ID NO: 72588 - protein, 483 aa, Arabidopsis thaliana
  peptide (1)..(483): Ceres Seq. ID no. 4938737
MLFHLHAASFDASPIIHRRPAPGSVYRSPQVYARLRGEIEADNTTADAISTIWKRSYKGVEWKPCVNMSTGVLPVSNGFIFIEANGGLNQQRTSICNAVAVAGYLNATLVIPNFHYHSIWKDPSKFGDIYDEEYFIDTLANDVRVVDTVPEYLMERFDYNLTNVYNFRVKAWAPTSYYRDSVLPKLLEEKVIRISPFANRLSFDAPRAVQRFRCLANNVALRFSKPILTQGETLVNKMKGLSANNAGKYVSVHLRFEEDMVAFSCCVFDGGDQEKQDMIAARERGWKGKFTKPGRVIRPGANRLNGKCPLTPLEVGLMLRGMGFNKSTYIFLAAGPIYSANRTMAPLLEMFPNLQTKEMLASEEDLAPFKNFSSRMAAIDYTVCLHSEVFVTTQGGNFPHFLMGHRRYLFGGHSKTIQPDKRKLAVLFDNPKLGWKSFKRQMLSMRSHSDSKGFELKRSSDSIYIFPCPDCMCRKNKTTASAT

SEQ ID NO: 72589 - protein, 416 aa, Arabidopsis thaliana
  peptide (1)..(416): Ceres Seq. ID no. 4938738
MSTGVLPVSNGFIFIEANGGLNQQRTSICNAVAVAGYLNATLVIPNFHYHSIWKDPSKFGDIYDEEYFIDTLANDVRVVDTVPEYLMERFDYNLTNVYNFRVKAWAPTSYYRDSVLPKLLEEKVIRISPFANRLSFDAPRAVQRFRCLANNVALRFSKPILTQGETLVNKMKGLSANNAGKYVSVHLRFEEDMVAFSCCVFDGGDQEKQDMIAARERGWKGKFTKPGRVIRPGANRLNGKCPLTPLEVGLMLRGMGFNKSTYIFLAAGPIYSANRTMAPLLEMFPNLQTKEMLASEEDLAPFKNFSSRMAAIDYTVCLHSEVFVTTQGGNFPHFLMGHRRYLFGGHSKTIQPDKRKLAVLFDNPKLGWKSFKRQMLSMRSHSDSKGFELKRSSDSIYIFPCPDCMCRKNKTTASAT

SEQ ID NO: 72590 - DNA, 1269 bp, Arabidopsis thaliana
  misc_feature (1)..(1269): Ceres Seq. ID no. 4938972
  misc_feature (1)..(1269): Ortholog of  Ceres SEQ ID NO 15226728 as cited in SEQ ID NO 1302
atggctgagaagcaagttttctcgagagtcctggatataggattggttaagcaaggttatttgttctctttgaatcacgcacgggtggtggttcttatggcgacaatgtatgcaatgtactgtgtcaaagtcagacttggatggcctggagttattctctcgatgaatcttgcattcttgtccaacgatatatttatttgtcttcttcaatggtgtgatactgttagtgaaaaaacacaagtggaggagccaacgaaacctgaaactgtaatagacgaagagtttccaggagagtttgagtattcttctgttcctgctgaagaagcagagaaaaaggttcatgaagataagtcgtccactaagccagcatcatcgtcaactgttgtcagtaacatgaaggagatttctactgttaaggtagtcaaaatagaaacagattcagcggatgagatgaaacgaattcttgatagtttgaatcactatgaagcattggggctccctctgtttaaaaagattgatgccgcattgcttaagaaagactatagaaagaaggcaatgctggttcatccggataaaaatatgggaagtcctttggcaagtgaatcattcaagaaacttcaaagtgcctacgaggttctttcggattctgttaaaagaagagattatgatgagctgttaaagaaggaagaatctcggaccaagattgtctgtcagtcctcgcacgcctcttctcatcagaatagtgctgcttatcgatcagaagagtcaaggcgcatacactgtacaaaatgcgggaattcacacatttgggtatgtaccaacaggagtaaggcaaaggccagatggtgtcaggagtgtggtcaatatcatcaagccaaagatggtgacggatgggttgaacacaaagggactctggtattcgagaaagcacataagattgaaataccacgagcttttgtttgcgctgagggaaaagtctttgatgtctcagaatgggctatttgtcagggaatggcgtgtagaccaaatacacataggccaagtttccatgtgaacatggtcggtttagaaaaggcaacacagagatcaaagtcgagcaggttcccgtgggatcttgatgtggagatgatggacgaggatgaggaagagtttgagttatggcttcaacaagctctagcttccggtctattctgtgaaacatcaaaacgcagaaaaagctggagtcctttcaagttaaccaagaaacaatcccgaagaacatcgacttga

SEQ ID NO: 72591 - protein, 422 aa, Arabidopsis thaliana
  peptide (1)..(422): Ceres Seq. ID no. 4938973
MAEKQVFSRVLDIGLVKQGYLFSLNHARVVVLMATMYAMYCVKVRLGWPGVILSMNLAFLSNDIFICLLQWCDTVSEKTQVEEPTKPETVIDEEFPGEFEYSSVPAEEAEKKVHEDKSSTKPASSSTVVSNMKEISTVKVVKIETDSADEMKRILDSLNHYEALGLPLFKKIDAALLKKDYRKKAMLVHPDKNMGSPLASESFKKLQSAYEVLSDSVKRRDYDELLKKEESRTKIVCQSSHASSHQNSAAYRSEESRRIHCTKCGNSHIWVCTNRSKAKARWCQECGQYHQAKDGDGWVEHKGTLVFEKAHKIEIPRAFVCAEGKVFDVSEWAICQGMACRPNTHRPSFHVNMVGLEKATQRSKSSRFPWDLDVEMMDEDEEEFELWLQQALASGLFCETSKRRKSWSPFKLTKKQSRRTST

SEQ ID NO: 72592 - protein, 390 aa, Arabidopsis thaliana
  peptide (1)..(390): Ceres Seq. ID no. 4938974
MATMYAMYCVKVRLGWPGVILSMNLAFLSNDIFICLLQWCDTVSEKTQVEEPTKPETVIDEEFPGEFEYSSVPAEEAEKKVHEDKSSTKPASSSTVVSNMKEISTVKVVKIETDSADEMKRILDSLNHYEALGLPLFKKIDAALLKKDYRKKAMLVHPDKNMGSPLASESFKKLQSAYEVLSDSVKRRDYDELLKKEESRTKIVCQSSHASSHQNSAAYRSEESRRIHCTKCGNSHIWVCTNRSKAKARWCQECGQYHQAKDGDGWVEHKGTLVFEKAHKIEIPRAFVCAEGKVFDVSEWAICQGMACRPNTHRPSFHVNMVGLEKATQRSKSSRFPWDLDVEMMDEDEEEFELWLQQALASGLFCETSKRRKSWSPFKLTKKQSRRTST

SEQ ID NO: 72593 - protein, 387 aa, Arabidopsis thaliana
  peptide (1)..(387): Ceres Seq. ID no. 4938975
MYAMYCVKVRLGWPGVILSMNLAFLSNDIFICLLQWCDTVSEKTQVEEPTKPETVIDEEFPGEFEYSSVPAEEAEKKVHEDKSSTKPASSSTVVSNMKEISTVKVVKIETDSADEMKRILDSLNHYEALGLPLFKKIDAALLKKDYRKKAMLVHPDKNMGSPLASESFKKLQSAYEVLSDSVKRRDYDELLKKEESRTKIVCQSSHASSHQNSAAYRSEESRRIHCTKCGNSHIWVCTNRSKAKARWCQECGQYHQAKDGDGWVEHKGTLVFEKAHKIEIPRAFVCAEGKVFDVSEWAICQGMACRPNTHRPSFHVNMVGLEKATQRSKSSRFPWDLDVEMMDEDEEEFELWLQQALASGLFCETSKRRKSWSPFKLTKKQSRRTST

SEQ ID NO: 72594 - DNA, 1491 bp, Arabidopsis thaliana
  misc_feature (1)..(1491): Ceres Seq. ID no. 4939065
  misc_feature (1)..(1491): Ortholog of  Ceres SEQ ID NO 15226728 as cited in SEQ ID NO 1302
atggctgagaagcaagttttctcgagagtcctggatataggattggttaagcaagaagctttggcagagcgtcattggccactagtgtgcagtggatgtgggaagctattagggttacttagtttatcgtttgtttactggaaagactgcattttgaggggtttccagtccagtgttaaatttggttcagctgctttgctcctcataatgtggagttgcttccttagcctgacttcagtatcttgcttggtttatgttctcctcggtatgggagctgccggtgctgttgtcttgtacttaggtcgcacacctgggatcttcattgtaggactatttggaattttgatattgtggatacttggatggcctggagttattctctcgatgaatcttgcattcttgtccaacgatatatttatttgtcttcttcaatggtgtgatactgttagtgaaaaaacacaagtggaggagccaacgaaacctgaaactgtaatagacgaagagtttccaggagagtttgagtattcttctgttcctgctgaagaagcagagaaaaaggttcatgaagataagtcgtccactaagccagcatcatcgtcaactgttgtcagtaacatgaaggagatttctactgttaaggtagtcaaaatagaaacagattcagcggatgagatgaaacgaattcttgatagtttgaatcactatgaagcattggggctccctctgtttaaaaagattgatgccgcattgcttaagaaagactatagaaagaaggcaatgctggttcatccggataaaaatatgggaagtcctttggcaagtgaatcattcaagaaacttcaaagtgcctacgaggttctttcggattctgttaaaagaagagattatgatgagctgttaaagaaggaagaatctcggaccaagattgtctgtcagtcctcgcacgcctcttctcatcagaatagtgctgcttatcgatcagaagagtcaaggcgcatacactgtacaaaatgcgggaattcacacatttgggtatgtaccaacaggagtaaggcaaaggccagatggtgtcaggagtgtggtcaatatcatcaagccaaagatggtgacggatgggttgaacacaaagggactctggtattcgagaaagcacataagattgaaataccacgagcttttgtttgcgctgagggaaaagtctttgatgtctcagaatgggctatttgtcagggaatggcgtgtagaccaaatacacataggccaagtttccatgtgaacatggtcggtttagaaaaggcaacacagagatcaaagtcgagcaggttcccgtgggatcttgatgtggagatgatggacgaggatgaggaagagtttgagttatggcttcaacaagctctagcttccggtctattctgtgaaacatcaaaacgcagaaaaagctggagtcctttcaagttaaccaagaaacaatcccgaagaacatcgacttga

SEQ ID NO: 72595 - protein, 496 aa, Arabidopsis thaliana
  peptide (1)..(496): Ceres Seq. ID no. 4939066
MAEKQVFSRVLDIGLVKQEALAERHWPLVCSGCGKLLGLLSLSFVYWKDCILRGFQSSVKFGSAALLLIMWSCFLSLTSVSCLVYVLLGMGAAGAVVLYLGRTPGIFIVGLFGILILWILGWPGVILSMNLAFLSNDIFICLLQWCDTVSEKTQVEEPTKPETVIDEEFPGEFEYSSVPAEEAEKKVHEDKSSTKPASSSTVVSNMKEISTVKVVKIETDSADEMKRILDSLNHYEALGLPLFKKIDAALLKKDYRKKAMLVHPDKNMGSPLASESFKKLQSAYEVLSDSVKRRDYDELLKKEESRTKIVCQSSHASSHQNSAAYRSEESRRIHCTKCGNSHIWVCTNRSKAKARWCQECGQYHQAKDGDGWVEHKGTLVFEKAHKIEIPRAFVCAEGKVFDVSEWAICQGMACRPNTHRPSFHVNMVGLEKATQRSKSSRFPWDLDVEMMDEDEEEFELWLQQALASGLFCETSKRRKSWSPFKLTKKQSRRTST

SEQ ID NO: 72596 - protein, 427 aa, Arabidopsis thaliana
  peptide (1)..(427): Ceres Seq. ID no. 4939067
MWSCFLSLTSVSCLVYVLLGMGAAGAVVLYLGRTPGIFIVGLFGILILWILGWPGVILSMNLAFLSNDIFICLLQWCDTVSEKTQVEEPTKPETVIDEEFPGEFEYSSVPAEEAEKKVHEDKSSTKPASSSTVVSNMKEISTVKVVKIETDSADEMKRILDSLNHYEALGLPLFKKIDAALLKKDYRKKAMLVHPDKNMGSPLASESFKKLQSAYEVLSDSVKRRDYDELLKKEESRTKIVCQSSHASSHQNSAAYRSEESRRIHCTKCGNSHIWVCTNRSKAKARWCQECGQYHQAKDGDGWVEHKGTLVFEKAHKIEIPRAFVCAEGKVFDVSEWAICQGMACRPNTHRPSFHVNMVGLEKATQRSKSSRFPWDLDVEMMDEDEEEFELWLQQALASGLFCETSKRRKSWSPFKLTKKQSRRTST

SEQ ID NO: 72597 - protein, 407 aa, Arabidopsis thaliana
  peptide (1)..(407): Ceres Seq. ID no. 4939068
MGAAGAVVLYLGRTPGIFIVGLFGILILWILGWPGVILSMNLAFLSNDIFICLLQWCDTVSEKTQVEEPTKPETVIDEEFPGEFEYSSVPAEEAEKKVHEDKSSTKPASSSTVVSNMKEISTVKVVKIETDSADEMKRILDSLNHYEALGLPLFKKIDAALLKKDYRKKAMLVHPDKNMGSPLASESFKKLQSAYEVLSDSVKRRDYDELLKKEESRTKIVCQSSHASSHQNSAAYRSEESRRIHCTKCGNSHIWVCTNRSKAKARWCQECGQYHQAKDGDGWVEHKGTLVFEKAHKIEIPRAFVCAEGKVFDVSEWAICQGMACRPNTHRPSFHVNMVGLEKATQRSKSSRFPWDLDVEMMDEDEEEFELWLQQALASGLFCETSKRRKSWSPFKLTKKQSRRTST

SEQ ID NO: 72598 - DNA, 1399 bp, Arabidopsis thaliana
  misc_feature (1)..(1399): Ceres Seq. ID no. 4939096
  misc_feature (1)..(1399): Ortholog of  Ceres SEQ ID NO 14315874 as cited in SEQ ID NO 59983
  misc_feature (1)..(1399): Ortholog of  Ceres SEQ ID NO 13589000 as cited in SEQ ID NO 60876
  misc_feature (1)..(1399): Ortholog of  Ceres SEQ ID NO 14302787 as cited in SEQ ID NO 65398
attatttacaggagtgcgataatattctttgaagctttaacattgttgcgaagaccagactctcagactcagactcgggagtgatttcacttcaactttctgctcagatggcagtccactactggacagccctgtttctattgttgccatgccttttctgtatttcaaatgctagtgctggcgatgctgatccagattacaggacatgtgtttcagaatgtgagataagcggttgtgttggacaactttgctttcctcagtgcaattcttcatccgatggtggtccatggtacatccaagaacctttgtatttacaatggaaaaaatggggttgtcaaggtgattgccgttatcaatgtatggttaatagagagactgaacgggaaactctcggtcaagccccagtcaagtaccatggtaaatggcccttcaagcgtgtacttgggattcaggagcctgcttctgttgctttctctgtactcaacctagcaatgcatttccatggttggctttcctttttcatcatgatctactataagttgcctctgaaacaagataggacagcgtactatgaatacgttggtttgtggcatatctacggtctcctgtccatgaactcttggttctggagtgctgttttccacagccgggatgttgaccttacagagaggttggactactcatccgcagtagcgattctcggattctcactcatcttagccattttacgaacatttgatattcgggttgaggctgcaagggtcatggtatccgctccaatactagcttttgtaaccacccacatactctacataaacttctacaaactcgactatggctggaacatgattgtgtgtgtggcaatgggagtctcacagcttttcctatgggcaagatgggccgctgtctcaagccacccttctaattggaaactttgggtggttgtgatagctggaggattagccatgcttctagagatatatgattttcctccatatgaaggctacttcgatgctcactcgatctggcacgctgccacaattcccttaaccattctctggtggagcttcattagagacgatgctgagttcagaacttccagcctcctcaagaaaactaagacgaaggcaaagtgagtctctttgctaagttttacaaggatttttatccgaccatacgagtatgcagacacgagggaaaaacaaaagatggaaatggatttaaacatcacgaagaaggcagagtcttttgtttaaagctagctggtttatggattcacaggtttcttcagttttttttattttatattgttacattaactgttgaatttgctttgagcctttcagtgtttttctttggccttacttttggttaagaaagattttgatatcatttactc

SEQ ID NO: 72599 - protein, 342 aa, Arabidopsis thaliana
  peptide (1)..(342): Ceres Seq. ID no. 4939097
MAVHYWTALFLLLPCLFCISNASAGDADPDYRTCVSECEISGCVGQLCFPQCNSSSDGGPWYIQEPLYLQWKKWGCQGDCRYQCMVNRETERETLGQAPVKYHGKWPFKRVLGIQEPASVAFSVLNLAMHFHGWLSFFIMIYYKLPLKQDRTAYYEYVGLWHIYGLLSMNSWFWSAVFHSRDVDLTERLDYSSAVAILGFSLILAILRTFDIRVEAARVMVSAPILAFVTTHILYINFYKLDYGWNMIVCVAMGVSQLFLWARWAAVSSHPSNWKLWVVVIAGGLAMLLEIYDFPPYEGYFDAHSIWHAATIPLTILWWSFIRDDAEFRTSSLLKKTKTKAK

SEQ ID NO: 72600 - protein, 258 aa, Arabidopsis thaliana
  peptide (1)..(258): Ceres Seq. ID no. 4939098
MVNRETERETLGQAPVKYHGKWPFKRVLGIQEPASVAFSVLNLAMHFHGWLSFFIMIYYKLPLKQDRTAYYEYVGLWHIYGLLSMNSWFWSAVFHSRDVDLTERLDYSSAVAILGFSLILAILRTFDIRVEAARVMVSAPILAFVTTHILYINFYKLDYGWNMIVCVAMGVSQLFLWARWAAVSSHPSNWKLWVVVIAGGLAMLLEIYDFPPYEGYFDAHSIWHAATIPLTILWWSFIRDDAEFRTSSLLKKTKTKAK

SEQ ID NO: 72601 - protein, 214 aa, Arabidopsis thaliana
  peptide (1)..(214): Ceres Seq. ID no. 4939099
MHFHGWLSFFIMIYYKLPLKQDRTAYYEYVGLWHIYGLLSMNSWFWSAVFHSRDVDLTERLDYSSAVAILGFSLILAILRTFDIRVEAARVMVSAPILAFVTTHILYINFYKLDYGWNMIVCVAMGVSQLFLWARWAAVSSHPSNWKLWVVVIAGGLAMLLEIYDFPPYEGYFDAHSIWHAATIPLTILWWSFIRDDAEFRTSSLLKKTKTKAK

SEQ ID NO: 72602 - DNA, 1159 bp, Arabidopsis thaliana
  misc_feature (1)..(1159): Ceres Seq. ID no. 4939439
  misc_feature (1)..(1159): Ortholog of  Ceres SEQ ID NO 12614972 as cited in SEQ ID NO 61986
  misc_feature (1)..(1159): Ortholog of  Ceres SEQ ID NO 12625706 as cited in SEQ ID NO 64144
  misc_feature (1)..(1159): Ortholog of  Ceres SEQ ID NO 13584933 as cited in SEQ ID NO 65009
  misc_feature (1)..(1159): Ortholog of  Ceres SEQ ID NO 12634984 as cited in SEQ ID NO 0
  misc_feature (1)..(1159): Ortholog of  Ceres SEQ ID NO 13599377 as cited in SEQ ID NO 0
atcaacgagtattaatctcttcattacatagccaaaaagaaaacactctctataatggaatccaaaaccataaacgacgtcgtcgtatcagagtcaaatcacgagttagcatcttcgtcgccatcagaatttgagaagaaccagaaacattaccaagaaatcatcgcaactcttcctcacaaagatggctggagaccaaaagatccgttcgttgagtacggtggtcactggtggctacaacctcttcttgaaggtttacttcacgcccagaagttcttcaaggcacgtcccaatgatttcttcgtctgcagctacccaaaaaccggcacgacttggctcaaagccttaactttcgcaatcgcaaatcgctccaagttcgacgtttcaacaaaccctcttctcaaacgtaatccacacgagtttgtgccttacatcgaaatcgacttcccgtttttcccaagcgttgatgttcttaaagacgaaggaaacacgcttttctcgactcatatcccttatgatctcttacctgaatcagttgtgaaatctggttgcaagattgtttacatatggagagacccaaaggacacgtttgtgtcgatgtggacttttgctcacaaggagagatcacaacaaggaccagtgggtattggaaagcttaccaagcaaacccggatcagattttgtttctcaagtatgagacaatgagagctgatccattgccttatgtgaagagattagctgagtttatgggttatgggttcacgaaggaggaagaggagggaaatgttgttgagaaagtagtgaagctttgtagctttgagactttgaagaatcttgaagctaacaaaggtgagaaagatagagaagatcgtcctgctgtttatgccaacagtgcgtatttcaggaaagggaaagttggggattggcagaattatctgactccggagatggtggctcgtattgatggtttgatggaagagaagtttaaaggaactggctttctttcttcaaaatcatgaatgtgatcttcttttgtcttgttttcgagctatgaatgtctgattcttctgatccttttgctggttatagcataagttgcttttgtttactagtatactctccattggaggaatatgtggtgaactgctgtattgttgct

SEQ ID NO: 72603 - protein, 216 aa, Arabidopsis thaliana; identical to SEQ ID NO: 28113
  peptide (1)..(216): Ceres Seq. ID no. 4939440

SEQ ID NO: 72604 - protein, 150 aa, Arabidopsis thaliana
  peptide (1)..(150): Ceres Seq. ID no. 4939441
MERPKGHVCVDVDFCSQGEITTRTSGYWKAYQANPDQILFLKYETMRADPLPYVKRLAEFMGYGFTKEEEEGNVVEKVVKLCSFETLKNLEANKGEKDREDRPAVYANSAYFRKGKVGDWQNYLTPEMVARIDGLMEEKFKGTGFLSSKS

SEQ ID NO: 72605 - DNA, 1899 bp, Arabidopsis thaliana
  misc_feature (1)..(1899): Ceres Seq. ID no. 4939446
  misc_feature (1)..(1899): Ortholog of  Ceres SEQ ID NO 13639120 as cited in SEQ ID NO 56708
atgatgcttcttcttcaccatcattcttcatactgtttctctcaatttctatctgtttcaggatatacttgctcatcagattttatagagatagactacgcctttaagctgttaagaaatctcgtatatagagaagggactgtgacacctggcaatgatgaaacagcacatgttatagaggagcttgaaaacgaaaatgttgtggaagattttgcaaatataacttcgcctgctgggaagtcgtttcttatgggagagagtgtgggatctacacattctgtgagtaacaaaaagacagtcttcaccgattatagttataagttagaccgtgtctggattcaagtgccatctggaggtctctcccctgatgggtcaagatcctcaggaagtggcagaggactgtcgacaacggctgtatcaaatggtggatggagaacccgtgggtttttgcgcggttggcagatccagaataccttatttaacaacatcaagttcatgattctctgctgcttcgtgaccattctcatcctacttggcacaatccgtgttgggaaccttggaagctccaacgccgactctgttaatcagagtttcatcaaggaaaccattccgattctcgcggagatcccctctgattcgcattcgacggacttggctgagcctcctaaagctgatgttagtcccaatgcaacgtatactctagagccaagaatcgcggagatcccatctgatgtgcattcaacggacttggttgagctgcctaaagctgatattagtcccaatgcaacgtatactctaggccccagaatcgcggagatcccatctgattcgcatttgacagacttgcttgagccgcctaaagctgatattagtcccaatgcgacatatactctagggcccaaaatcaccaactgggatagtcaacgcaaggtatggctgaatcagaaccctgagtttcctaatattgtcaatggcaaagctcgaatattgcttctcacagggtcttcccccggaccctgtgataaaccaattggaaactattatctattgaaagctgtgaagaacaagattgattactgtagactccacgggatagagattgtgtataacatggcgaatttggatgaggaactctcagggtattggacgaaattacctatgattaggacattaatgctgtctcatccagaagtagaatggatttggtggatggatagtgatgctttgttcactgatatactgtttgagatcccgttgcctcggtacgaaaatcataatctggtgatacacggttatccagacttgctgttcaaccaaaaatcatgggttgcattgaacacgggtatctttctgttgagaaattgtcagtggtcattggatttattagatgcttgggccccaatgggaccaaaagggaagatccgtgacgaaactgggaagatactgacagcttatctgaaaggcaggccagcatttgaggccgatgatcaatcggcgttgatatatctcttgctttcgcagaaggaaaaatggatagagaaggtttatgtggagaatcaatactacttgcacgggttttgggaaggtttggttgacaggtatgaagagatgatagagaagtatcatccaggattgggcgatgagagatggccctttgtgacacattttgtagggtgcaaaccgtgtggcagctatgctgattacgcagtcgatagatgcttcaagagcatggagagggcttttaattttgcagataatcaagtgctgaagctgtatgggtttagccacaggggactgttgagtcccaagattaaaaggatcagaaatgagacagtctctcctctggagtcagtagacaagtttgatattcgaagaatgcacatggaaaccaaaccatag

SEQ ID NO: 72606 - protein, 632 aa, Arabidopsis thaliana
  peptide (1)..(632): Ceres Seq. ID no. 4939447
MMLLLHHHSSYCFSQFLSVSGYTCSSDFIEIDYAFKLLRNLVYREGTVTPGNDETAHVIEELENENVVEDFANITSPAGKSFLMGESVGSTHSVSNKKTVFTDYSYKLDRVWIQVPSGGLSPDGSRSSGSGRGLSTTAVSNGGWRTRGFLRGWQIQNTLFNNIKFMILCCFVTILILLGTIRVGNLGSSNADSVNQSFIKETIPILAEIPSDSHSTDLAEPPKADVSPNATYTLEPRIAEIPSDVHSTDLVELPKADISPNATYTLGPRIAEIPSDSHLTDLLEPPKADISPNATYTLGPKITNWDSQRKVWLNQNPEFPNIVNGKARILLLTGSSPGPCDKPIGNYYLLKAVKNKIDYCRLHGIEIVYNMANLDEELSGYWTKLPMIRTLMLSHPEVEWIWWMDSDALFTDILFEIPLPRYENHNLVIHGYPDLLFNQKSWVALNTGIFLLRNCQWSLDLLDAWAPMGPKGKIRDETGKILTAYLKGRPAFEADDQSALIYLLLSQKEKWIEKVYVENQYYLHGFWEGLVDRYEEMIEKYHPGLGDERWPFVTHFVGCKPCGSYADYAVDRCFKSMERAFNFADNQVLKLYGFSHRGLLSPKIKRIRNETVSPLESVDKFDIRRMHMETKP

SEQ ID NO: 72607 - protein, 631 aa, Arabidopsis thaliana
  peptide (1)..(631): Ceres Seq. ID no. 4939448
MLLLHHHSSYCFSQFLSVSGYTCSSDFIEIDYAFKLLRNLVYREGTVTPGNDETAHVIEELENENVVEDFANITSPAGKSFLMGESVGSTHSVSNKKTVFTDYSYKLDRVWIQVPSGGLSPDGSRSSGSGRGLSTTAVSNGGWRTRGFLRGWQIQNTLFNNIKFMILCCFVTILILLGTIRVGNLGSSNADSVNQSFIKETIPILAEIPSDSHSTDLAEPPKADVSPNATYTLEPRIAEIPSDVHSTDLVELPKADISPNATYTLGPRIAEIPSDSHLTDLLEPPKADISPNATYTLGPKITNWDSQRKVWLNQNPEFPNIVNGKARILLLTGSSPGPCDKPIGNYYLLKAVKNKIDYCRLHGIEIVYNMANLDEELSGYWTKLPMIRTLMLSHPEVEWIWWMDSDALFTDILFEIPLPRYENHNLVIHGYPDLLFNQKSWVALNTGIFLLRNCQWSLDLLDAWAPMGPKGKIRDETGKILTAYLKGRPAFEADDQSALIYLLLSQKEKWIEKVYVENQYYLHGFWEGLVDRYEEMIEKYHPGLGDERWPFVTHFVGCKPCGSYADYAVDRCFKSMERAFNFADNQVLKLYGFSHRGLLSPKIKRIRNETVSPLESVDKFDIRRMHMETKP

SEQ ID NO: 72608 - protein, 549 aa, Arabidopsis thaliana
  peptide (1)..(549): Ceres Seq. ID no. 4939449
MGESVGSTHSVSNKKTVFTDYSYKLDRVWIQVPSGGLSPDGSRSSGSGRGLSTTAVSNGGWRTRGFLRGWQIQNTLFNNIKFMILCCFVTILILLGTIRVGNLGSSNADSVNQSFIKETIPILAEIPSDSHSTDLAEPPKADVSPNATYTLEPRIAEIPSDVHSTDLVELPKADISPNATYTLGPRIAEIPSDSHLTDLLEPPKADISPNATYTLGPKITNWDSQRKVWLNQNPEFPNIVNGKARILLLTGSSPGPCDKPIGNYYLLKAVKNKIDYCRLHGIEIVYNMANLDEELSGYWTKLPMIRTLMLSHPEVEWIWWMDSDALFTDILFEIPLPRYENHNLVIHGYPDLLFNQKSWVALNTGIFLLRNCQWSLDLLDAWAPMGPKGKIRDETGKILTAYLKGRPAFEADDQSALIYLLLSQKEKWIEKVYVENQYYLHGFWEGLVDRYEEMIEKYHPGLGDERWPFVTHFVGCKPCGSYADYAVDRCFKSMERAFNFADNQVLKLYGFSHRGLLSPKIKRIRNETVSPLESVDKFDIRRMHMETKP

SEQ ID NO: 72609 - DNA, 1818 bp, Arabidopsis thaliana
  misc_feature (1)..(1818): Ceres Seq. ID no. 4939477
  misc_feature (1)..(1818): Ortholog of  Ceres SEQ ID NO 14306268 as cited in SEQ ID NO 51135
  misc_feature (1)..(1818): Ortholog of  Ceres SEQ ID NO 15225368 as cited in SEQ ID NO 58345
  misc_feature (1)..(1818): Ortholog of  Ceres SEQ ID NO 13584744 as cited in SEQ ID NO 69137
atgaatccttcaactccaagtttactctacacatccatcttcttctacttcacaataatagcaactcaaaccctctctcttgatccaaagttcaaggcttgtgagccgaaatcatgcggcaaaggtccccagatctcctatccattttatctatctggaaagcaagaatctttttgtggttatccaagttttgaactcacttgtgatgatgaagaaaagctccctgttctcgggatctccggtgaggaatatgtcatcaagaacatatcttacttaacacagtcgtttcaggtcgtgaactcaaaggcttctcatgatccatgtcccagaccgctgaacaatcttaccctccataggactcctttctttgtgaacccttctcatatcaacttcactatactttacaattgttccgatcacctgctggaggattttaggacataccctcttacttgtgctcgaaacacgagtcttcttcgatcttttggggtctttgacagaaagaaacttggaaaagagaaacaaattgcatccatgtcgtgccagaaactagtggatgttcctgttttagctagtaatgagtctgatgtgatgggtatgacttatgttgagattttgaagaggggttttgttctgaattggactgcaaacagttgcttccgctgcatcaccagcggcgggagatgtggaactgatcaacaagaattcgtatgcttgtgtcctgatggacctaaacttcatgatacttgcacgaatgcattgcttccaagaaacatctcatcagatccatctgcaaagtcttttgacatcgagaaagcagaggaattattagtcggagttcatattttctcttacgaagaacttgaagaagccactaataacttcgacccatctaaagaactcggtgatggaggctttggtactgtctattacggtaagcttaaagatggacgaagcgtagccgttaaacggttatacgataacaacttcaaaagagcagagcaattcaggaatgaagttgagatcttaacgggtttacgccatccaaacctcgtggctctctttggatgctcctcaaaacagagccgggacttactgctagtgtatgagtatgttgcaaacggcacgttagctgatcatctacatggtccacaggcaaaccctagctcacttccttggtctattcggctcaaaatcgctgttgaaactgcctctgccttgaagtatctccacgcctccaagatcatccaccgtgatgttaaatccaacaacatccttctcgaccaaaacttcaatgtcaaggttgcggattttggactctctagactgtttcctatggataaaacgcacgtatctaccgctccacaaggaactccgggatatgtcgacccggattaccacttatgctatcaactctcaaacaaaagcgacgtgtacagctttgcggtagtgttaatggagcttatctcttcacttccagcagtcgacatcacaagaccgcgccaagagatcaacctctcgaacatggcagtcgttaaaatccagaaccacgagctccgcgacatggtggatccgtcacttgggtttgacacggatacaagagtgagacagacggtgatcgctgtcgctgagctggcgttccaatgcttgcagtcggataaagatcttaggccatgtatgtcgcacgtgcaggatacgttgacgaggatacagaacaatggatttggttcggaaatggatgttgtagatgtgaacaagagtggaccgttggttgcacagtctccagatagtgtcattgtgaaatgggacagtaagtaa

SEQ ID NO: 72610 - protein, 605 aa, Arabidopsis thaliana
  peptide (1)..(605): Ceres Seq. ID no. 4939478
MNPSTPSLLYTSIFFYFTIIATQTLSLDPKFKACEPKSCGKGPQISYPFYLSGKQESFCGYPSFELTCDDEEKLPVLGISGEEYVIKNISYLTQSFQVVNSKASHDPCPRPLNNLTLHRTPFFVNPSHINFTILYNCSDHLLEDFRTYPLTCARNTSLLRSFGVFDRKKLGKEKQIASMSCQKLVDVPVLASNESDVMGMTYVEILKRGFVLNWTANSCFRCITSGGRCGTDQQEFVCLCPDGPKLHDTCTNALLPRNISSDPSAKSFDIEKAEELLVGVHIFSYEELEEATNNFDPSKELGDGGFGTVYYGKLKDGRSVAVKRLYDNNFKRAEQFRNEVEILTGLRHPNLVALFGCSSKQSRDLLLVYEYVANGTLADHLHGPQANPSSLPWSIRLKIAVETASALKYLHASKIIHRDVKSNNILLDQNFNVKVADFGLSRLFPMDKTHVSTAPQGTPGYVDPDYHLCYQLSNKSDVYSFAVVLMELISSLPAVDITRPRQEINLSNMAVVKIQNHELRDMVDPSLGFDTDTRVRQTVIAVAELAFQCLQSDKDLRPCMSHVQDTLTRIQNNGFGSEMDVVDVNKSGPLVAQSPDSVIVKWDSK

SEQ ID NO: 72611 - protein, 427 aa, Arabidopsis thaliana
  peptide (1)..(427): Ceres Seq. ID no. 4939479
MSCQKLVDVPVLASNESDVMGMTYVEILKRGFVLNWTANSCFRCITSGGRCGTDQQEFVCLCPDGPKLHDTCTNALLPRNISSDPSAKSFDIEKAEELLVGVHIFSYEELEEATNNFDPSKELGDGGFGTVYYGKLKDGRSVAVKRLYDNNFKRAEQFRNEVEILTGLRHPNLVALFGCSSKQSRDLLLVYEYVANGTLADHLHGPQANPSSLPWSIRLKIAVETASALKYLHASKIIHRDVKSNNILLDQNFNVKVADFGLSRLFPMDKTHVSTAPQGTPGYVDPDYHLCYQLSNKSDVYSFAVVLMELISSLPAVDITRPRQEINLSNMAVVKIQNHELRDMVDPSLGFDTDTRVRQTVIAVAELAFQCLQSDKDLRPCMSHVQDTLTRIQNNGFGSEMDVVDVNKSGPLVAQSPDSVIVKWDSK

SEQ ID NO: 72612 - protein, 408 aa, Arabidopsis thaliana
  peptide (1)..(408): Ceres Seq. ID no. 4939480
MGMTYVEILKRGFVLNWTANSCFRCITSGGRCGTDQQEFVCLCPDGPKLHDTCTNALLPRNISSDPSAKSFDIEKAEELLVGVHIFSYEELEEATNNFDPSKELGDGGFGTVYYGKLKDGRSVAVKRLYDNNFKRAEQFRNEVEILTGLRHPNLVALFGCSSKQSRDLLLVYEYVANGTLADHLHGPQANPSSLPWSIRLKIAVETASALKYLHASKIIHRDVKSNNILLDQNFNVKVADFGLSRLFPMDKTHVSTAPQGTPGYVDPDYHLCYQLSNKSDVYSFAVVLMELISSLPAVDITRPRQEINLSNMAVVKIQNHELRDMVDPSLGFDTDTRVRQTVIAVAELAFQCLQSDKDLRPCMSHVQDTLTRIQNNGFGSEMDVVDVNKSGPLVAQSPDSVIVKWDSK

SEQ ID NO: 72613 - DNA, 897 bp, Arabidopsis thaliana
  misc_feature (1)..(897): Ceres Seq. ID no. 4939488
  misc_feature (1)..(897): Ortholog of  Ceres SEQ ID NO 13599348 as cited in SEQ ID NO 0
atgaaagctgtagcttttcccgctaaaatcgcaaatcttagcttcccttctaactgttgctcactattcttccgatcaccggcgacgtttttatcgccggcattgccttgtcggaagctgacgaaaggaataagaggtctcgaaggcttgatgtctcagtgtttatcatcatcgtcacaatcattgtcattttcatcgaattcattctcctctcaaccggaatcagagttacttcaagctttaccttcttcgaagccaaaatctccgccactgcagctgccatggctcattgttggtttgggtaatcccggcaagaagtaccagggcacgcgccacaacgttggttttgagatggtggacgctttggctgatgcagaaggcatctccatgaacactgttaacttcaaggccttgtttgggaaaggcgttattggaaatataccgattatgctggctaaaccacaaactttcatgaacctaagtggtgagtctgttggacaaatcgtttcattttacaagatcccgttaaagcaagtacttgtggtttacgatgatttagatttgccctttggtaaactacgtttattgccaaaaggtggtcacggaggccacaatgggtacaatgcttttcactctctatctggcctgatgagaagtattatagaccgcctcaaaggtagccgtgattttcctcgactaagaatagggatcggacgtcctccagggaagatggatacagccaattttgttctccgccagttcaatagacaggaacaggaagagttggatcacacattccaaaccgggttagaggcaataaggattcttttgcttgaggggttcaacaaaagtgcaacatttgtcaacactcgaaaatctatggagcaactcagttag

SEQ ID NO: 72614 - protein, 298 aa, Arabidopsis thaliana
  peptide (1)..(298): Ceres Seq. ID no. 4939489
MKAVAFPAKIANLSFPSNCCSLFFRSPATFLSPALPCRKLTKGIRGLEGLMSQCLSSSSQSLSFSSNSFSSQPESELLQALPSSKPKSPPLQLPWLIVGLGNPGKKYQGTRHNVGFEMVDALADAEGISMNTVNFKALFGKGVIGNIPIMLAKPQTFMNLSGESVGQIVSFYKIPLKQVLVVYDDLDLPFGKLRLLPKGGHGGHNGYNAFHSLSGLMRSIIDRLKGSRDFPRLRIGIGRPPGKMDTANFVLRQFNRQEQEELDHTFQTGLEAIRILLLEGFNKSATFVNTRKSMEQLS

SEQ ID NO: 72615 - protein, 248 aa, Arabidopsis thaliana
  peptide (1)..(248): Ceres Seq. ID no. 4939490
MSQCLSSSSQSLSFSSNSFSSQPESELLQALPSSKPKSPPLQLPWLIVGLGNPGKKYQGTRHNVGFEMVDALADAEGISMNTVNFKALFGKGVIGNIPIMLAKPQTFMNLSGESVGQIVSFYKIPLKQVLVVYDDLDLPFGKLRLLPKGGHGGHNGYNAFHSLSGLMRSIIDRLKGSRDFPRLRIGIGRPPGKMDTANFVLRQFNRQEQEELDHTFQTGLEAIRILLLEGFNKSATFVNTRKSMEQLS

SEQ ID NO: 72616 - protein, 181 aa, Arabidopsis thaliana
  peptide (1)..(181): Ceres Seq. ID no. 4939491
MVDALADAEGISMNTVNFKALFGKGVIGNIPIMLAKPQTFMNLSGESVGQIVSFYKIPLKQVLVVYDDLDLPFGKLRLLPKGGHGGHNGYNAFHSLSGLMRSIIDRLKGSRDFPRLRIGIGRPPGKMDTANFVLRQFNRQEQEELDHTFQTGLEAIRILLLEGFNKSATFVNTRKSMEQLS

SEQ ID NO: 72617 - DNA, 1438 bp, Arabidopsis thaliana
  misc_feature (1)..(1438): Ceres Seq. ID no. 4939528
  misc_feature (1)..(1438): Ortholog of  Ceres SEQ ID NO 13658590 as cited in SEQ ID NO 66762
cgattctctgtttcttctagattgaatttaaaaaccctacttttgaattttcacatgggagaacaatcaccttctcaaccatcgactcaatgccaaagtcatccacaatcacccaaacccgatactcataacctaatcccaccggaatccaccgatgaatgtctcgattcagctggagtttcaggctcaatcgtctcatctaccacaatcgacgctcgacggatcactgaactaggcaatgtatcgtctccgccgtccaaaatccctctccgccctcggaaaatccggaaactcacactcgacggagacgtctccggtgaagattataaggcggaggatatctcctcatctcaagtaaactctccgctcgcgacggatggaaaatctcccggtaaaggtaaattgtcgcacttacgagctataactgtgccgaggatccaagctcgtcctctgacatgtgaaggtgagctcgaaacagcgattcactatctccgtaacgcggatcctttgctcgcggcgttaatcgacgttcatccaccgccgacgtttgagtcttttaagactccgttcttagctctgatacgaaacatcctctaccaacagcttgcaatgaaagctgggaattcaatctacacacgatttgtttctctctgcggcggcgaaaatttggttgtacctgagacggtcttatcattaaatcctcagcagcttcgtcaaattggtgtctcgggacgtaaggcgagttatcttcatgatttagctagaaagtatcaaaacggaatcttgtcggattcggcgattttgaacatggatgagaagtctttgttcacgatgctaacaatggttaatggaattgggtcatggtctgttcatatgttcatgataaattctcttcatcgaccagatgttttgccggttaatgatctcggtgttaggaaaggagtgcagttgctgtatggcttagatgacctgcctcggccatcgcagatggagcagcattgtgctaagtggagaccgtacagatcagtgggttcgtggtacatgtggcggctcattgaagctaagagcacatcaacgagtgctgctgttgcagccggagtgtcattacctccattggaagatattcaacaagaacatcagcagcaacagcttatggaccctcttaatggtgtgttcagtatcggggcttggggacaatcgtagctgttcttccacgttggtcctggatggtctgatggcttacatgagttattttgttctggacttggggtttgtgcctagtaaaaaaaaaactgtgggagaaagaataataaaaggatgtgctagtctgggttccttgagacacaagctgaagtaacagtgaatatgatcttcttagttgagtgaaagagtctgtaatgttaagagtgagtagctaatgacaaagtagtgtcttctt

SEQ ID NO: 72618 - protein, 400 aa, Arabidopsis thaliana
  peptide (1)..(400): Ceres Seq. ID no. 4939529
RFSVSSRLNLKTLLLNFHMGEQSPSQPSTQCQSHPQSPKPDTHNLIPPESTDECLDSAGVSGSIVSSTTIDARRITELGNVSSPPSKIPLRPRKIRKLTLDGDVSGEDYKAEDISSSQVNSPLATDGKSPGKGKLSHLRAITVPRIQARPLTCEGELETAIHYLRNADPLLAALIDVHPPPTFESFKTPFLALIRNILYQQLAMKAGNSIYTRFVSLCGGENLVVPETVLSLNPQQLRQIGVSGRKASYLHDLARKYQNGILSDSAILNMDEKSLFTMLTMVNGIGSWSVHMFMINSLHRPDVLPVNDLGVRKGVQLLYGLDDLPRPSQMEQHCAKWRPYRSVGSWYMWRLIEAKSTSTSAAVAAGVSLPPLEDIQQEHQQQQLMDPLNGVFSIGAWGQS

SEQ ID NO: 72619 - protein, 382 aa, Arabidopsis thaliana
  peptide (1)..(382): Ceres Seq. ID no. 4939530
MGEQSPSQPSTQCQSHPQSPKPDTHNLIPPESTDECLDSAGVSGSIVSSTTIDARRITELGNVSSPPSKIPLRPRKIRKLTLDGDVSGEDYKAEDISSSQVNSPLATDGKSPGKGKLSHLRAITVPRIQARPLTCEGELETAIHYLRNADPLLAALIDVHPPPTFESFKTPFLALIRNILYQQLAMKAGNSIYTRFVSLCGGENLVVPETVLSLNPQQLRQIGVSGRKASYLHDLARKYQNGILSDSAILNMDEKSLFTMLTMVNGIGSWSVHMFMINSLHRPDVLPVNDLGVRKGVQLLYGLDDLPRPSQMEQHCAKWRPYRSVGSWYMWRLIEAKSTSTSAAVAAGVSLPPLEDIQQEHQQQQLMDPLNGVFSIGAWGQS

SEQ ID NO: 72620 - DNA, 1279 bp, Arabidopsis thaliana
  misc_feature (1)..(1279): Ceres Seq. ID no. 4939692
  misc_feature (1)..(1279): Ortholog of  Ceres SEQ ID NO 13593955 as cited in SEQ ID NO 54278
  misc_feature (1)..(1279): Ortholog of  Ceres SEQ ID NO 13597380 as cited in SEQ ID NO 64054
  misc_feature (1)..(1279): Ortholog of  Ceres SEQ ID NO 12625474 as cited in SEQ ID NO 64169
tttccagagattgatgataggtgtagaagaaccatgaaatcgatattaattggatttgttttctttcttttatcatcatttcgtagcttcttcgtgaccactacctattcccaagtgatccatcaccgacgtctacggccatggccaccgccagaatctgggtccggcccatcacctggcccatctccatcaccacataacaaaaccacaccggcagtgtttttctttggggattcgatcatagatacaggaaataataataatctaacaacagaaatgaaatgtaattttagtccttatggtaaggattttccactcggagttgcaactggtagattcagcaacggaaaggtcgtttccgattatatatctgaatatttgggagtaaaaccaattgtaccagcatattttgaccccaatgtacaactagaagatcttctcacgggtgtatcatttgcttcagagagtaaagtcaatgttggagcaattgacatatttccaacgacacatagcgagagtaaagaggttagtaggggaagagaagacggatcaactgttagccaagggcttatccgttgtggtcgcaggcagcaacgatttggctattacatattatggtcatggtgctcaattgctcaaagatgatatccactactttacttcaaagatggcaaattccgcggcaagttttgttatgcaattatacgaatatggagcaagacaaatagcagttctaggaacaccaccacttggctgcgtaccaatactaagaactctaaaaggaggtcttcgtagagagtgtgctcaagatataaactatgcttctcagcttttcaacgtcaaactctccaacattttggaccaattggcaaaaaacctaccaaattccaatctcatttacattgacatatactctgctttcagtcacatcttagaaaattcagcagattatgggtttgaagaaataaagagaggttgttgtggaactggatttgtggaagctggtccactttgcaatcgattcacaacatttgtgtgctccaatgtatctgcttacatgttttgggatagtctccatcctacccaaagattctataaaatcttaaccaaaatactttttgagaaatacatccacaatttaaattgagtagtgtgatcaaatgactcacattgtatgcttttatttttcttaaagcttgtgcagttgttataaattgtacaaaattattgtaagtcactatattgattaccaattgattttaagagaaacttttatcac

SEQ ID NO: 72621 - protein, 223 aa, Arabidopsis thaliana; identical to SEQ ID NO: 35549
  peptide (1)..(223): Ceres Seq. ID no. 4939693

SEQ ID NO: 72622 - protein, 214 aa, Arabidopsis thaliana
  peptide (1)..(214): Ceres Seq. ID no. 4939694
FPEIDDRCRRTMKSILIGFVFFLLSSFRSFFVTTTYSQVIHHRRLRPWPPPESGSGPSPGPSPSPHNKTTPAVFFFGDSIIDTGNNNNLTTEMKCNFSPYGKDFPLGVATGRFSNGKVVSDYISEYLGVKPIVPAYFDPNVQLEDLLTGVSFASESKVNVGAIDIFPTTHSESKEVSRGREDGSTVSQGLIRCGRRQQRFGYYILWSWCSIAQR

SEQ ID NO: 72623 - protein, 203 aa, Arabidopsis thaliana; identical to SEQ ID NO: 35551
  peptide (1)..(203): Ceres Seq. ID no. 4939695

SEQ ID NO: 72624 - DNA, 1439 bp, Arabidopsis thaliana
  misc_feature (1)..(1439): Ceres Seq. ID no. 4939997
  misc_feature (1)..(1439): Ortholog of  Ceres SEQ ID NO 13596581 as cited in SEQ ID NO 62420
  misc_feature (1)..(1439): Ortholog of  Ceres SEQ ID NO 13591273 as cited in SEQ ID NO 65904
  misc_feature (1)..(1439): Ortholog of  Ceres SEQ ID NO 13623086 as cited in SEQ ID NO 0
aaaagataagatacgaagaacaagagccccctctctctctctcgtccactcacctattgtgtatctcatcatcaccatggacaagacatttttctctagcaacgaagggaaaccaattacatgcaaagcagcaatatgtagaaaagcaggagaagcattggtgattgaagacatccacgtggatccaccccaagcttatgaagttaggattaagattttatgtacttctctatgtcacactgatcttactttctggaaactaagctttggaccaatttcaaggtttcctaggattcttggacacgaagcagtcggcataataacatgtatttgctgtttttattgggattttaaaccagtgtggtcgagagcattggtgaaaacgtggacggatttaaacaagatatgccgaagatttcatatcaaacacaagacgatatggaatggcttcaagattcaaagattcttcaggagaagtgattcatcattttctctttgtctcaagtttttccgaatacaccgtcgtggatattgcacatcttgtcaaaatatctcctgaaatccccgttgataaagcggctttgctcagctgcggtgtctccacaggaattggagcagcttggaaggtggctaacgtggaagaaggctccaccattgcaatttttggccttggtgctgttggacttgcggttgcagaaggagccaggctacgaggagccgcaaagattattggtattgataccaattctgataaattcgagctaggtaagaaatttggttttacggatttcatcaatccgaccttatgcggagaaaagaagattagtgaggtcattaaagaaatgacagaaggaggagttgactatagtttcgaatgcgttggcttagcttctttacttaacgaggctttcatcagtacccgcacgggaacaggtaaaactgtaatgttggggatggagaagcatgcagcgccaattagtttgggtagttttgatcttttaagaggcagagttatttgcggaagcttgttcggtggtctgaaatccaaacttgatattcccattctagtggatcattacctaaaaaaggagctcaatctggatagtttcattacacacgaactgaatttcaaagaaattaataaggctttcgctttattagaggaaggaaagtctctccgctgcattctatggatggataagtaactatccagcttcatatttgcactttataatcttctcgtggatcttgtttagattatcttcctttgtctttcaagatgctttgtcttgttaccttgcaatttttgttctttccacacgagctacaaacttatcatttggtagtccaaaccccttaacattgtgttttctgatggttacaaatattatgacaccttgtatttgttgatcaatgatcattatagtactaattgcttc

SEQ ID NO: 72625 - protein, 253 aa, Arabidopsis thaliana; identical to SEQ ID NO: 25702
  peptide (1)..(253): Ceres Seq. ID no. 4939998

SEQ ID NO: 72626 - protein, 185 aa, Arabidopsis thaliana
  peptide (1)..(185): Ceres Seq. ID no. 4939999
KDKIRRTRAPSLSLVHSPIVYLIITMDKTFFSSNEGKPITCKAAICRKAGEALVIEDIHVDPPQAYEVRIKILCTSLCHTDLTFWKLSFGPISRFPRILGHEAVGIITCICCFYWDFKPVWSRALVKTWTDLNKICRRFHIKHKTIWNGFKIQRFFRRSDSSFSLCLKFFRIHRRGYCTSCQNIS

SEQ ID NO: 72627 - protein, 160 aa, Arabidopsis thaliana
  peptide (1)..(160): Ceres Seq. ID no. 4940000
MDKTFFSSNEGKPITCKAAICRKAGEALVIEDIHVDPPQAYEVRIKILCTSLCHTDLTFWKLSFGPISRFPRILGHEAVGIITCICCFYWDFKPVWSRALVKTWTDLNKICRRFHIKHKTIWNGFKIQRFFRRSDSSFSLCLKFFRIHRRGYCTSCQNIS

SEQ ID NO: 72628 - DNA, 1713 bp, Arabidopsis thaliana
  misc_feature (1)..(1713): Ceres Seq. ID no. 4940024
  misc_feature (1)..(1713): Ortholog of  Ceres SEQ ID NO 12613725 as cited in SEQ ID NO 68196
atgtcgatctccggcgctgttgatgaagctgggactccacttctcgctgtcaccgtcgactacaggaacaaacccgccgtcaaatcttcctccggtggctggagatccgccggattcatcatcggtgtggaggttgctgagcgatttgcttactatgggatatcgtcgaatctgataacgtatttgaccggaccactgggacaatcgacggcggctgcggcggctaacgtgaacgcttggtctggaacggcgtcgttgcttcctctccttggtgcttttgtcgctgactcgtttctaggtcgtttccggacaatcctcgccgcctctgctctctatatagtgatgagtctgaagttgtatagtgatttgattgaacaacaggggctgggtgtattgactttatctgcaatgattccttcagactgcaaagtttcgaatctactctcgtcatgctctcctcgatttcaagtaattacattctttagtgcattgtatctagtggctttagctcaaggtggtcacaagccgtgtgttcaggcttttggagcggatcagtttgatgaaaaggaacctgaagagtgcaaagcaaagagttctttctttaattggtggtattttggtatgtgctttgggacgttaacaactctatgggtgttgaattatatccaagataatctaagttgggcgttaggctttggtattccatgcattgctatggtagttgctttggttgttctcttgcttggaacctgcacttatcggttcagtattcgaagagaagatcaaagtccttttgtgaggattggaaatgtttatgtagcggctgtaaagaactggagtgtttcagctttagatgtagctgctgcagaggagagacttggtcttgtgtcttgcagtagctctcagcaatttagttttctcaacaaagctctggtcgcaaagaatggttcttgtagtatagatgaacttgaagaagcaaaatcagtgcttaggttagctccgatatggttaacatgcttggtttatgcggttgtgtttgcgcagtctccaactttcttcaccaaacaaggagctacaatggagagatcaatcacacctggttacaagatctctccggctaccctccagtccttcatcagcctctctatagtcatcttcatcccaatctacgaccgtgtactaatcccaattgcaagatcatttacacataaaccaggcggaatcacaatgcttcagagaatcggcacaggcatattcctctctttccttgctatggttgtagccgctctagtggagatgaaaaggcttaaaactgctgcggattacgggctcgtagattcacctgacgctacggttccaatgagtgtgtggtggttagttcctcagtatgttctctttggtatcacggatgttttcgcaatggtgggtcttcaagagttcttctatgaccaagtcccgaatgagctgaggagtgtggggttggctctgtacttgagcatattcggtattggtaactttctcagcagtttcatgatatcaatcattgagaaagcgacaagccaatctggtcaagcgagttggttcgcaaacaacctgaaccaagctcatctcgattacttttactggttactcgcttgtctcagcttcattggcttagcctcctacttgtatgttgcaaagtcttacgtctctaaaaggctcgacaccagttaa

SEQ ID NO: 72629 - protein, 570 aa, Arabidopsis thaliana
  peptide (1)..(570): Ceres Seq. ID no. 4940025
MSISGAVDEAGTPLLAVTVDYRNKPAVKSSSGGWRSAGFIIGVEVAERFAYYGISSNLITYLTGPLGQSTAAAAANVNAWSGTASLLPLLGAFVADSFLGRFRTILAASALYIVMSLKLYSDLIEQQGLGVLTLSAMIPSDCKVSNLLSSCSPRFQVITFFSALYLVALAQGGHKPCVQAFGADQFDEKEPEECKAKSSFFNWWYFGMCFGTLTTLWVLNYIQDNLSWALGFGIPCIAMVVALVVLLLGTCTYRFSIRREDQSPFVRIGNVYVAAVKNWSVSALDVAAAEERLGLVSCSSSQQFSFLNKALVAKNGSCSIDELEEAKSVLRLAPIWLTCLVYAVVFAQSPTFFTKQGATMERSITPGYKISPATLQSFISLSIVIFIPIYDRVLIPIARSFTHKPGGITMLQRIGTGIFLSFLAMVVAALVEMKRLKTAADYGLVDSPDATVPMSVWWLVPQYVLFGITDVFAMVGLQEFFYDQVPNELRSVGLALYLSIFGIGNFLSSFMISIIEKATSQSGQASWFANNLNQAHLDYFYWLLACLSFIGLASYLYVAKSYVSKRLDTS

SEQ ID NO: 72630 - protein, 456 aa, Arabidopsis thaliana
  peptide (1)..(456): Ceres Seq. ID no. 4940026
MSLKLYSDLIEQQGLGVLTLSAMIPSDCKVSNLLSSCSPRFQVITFFSALYLVALAQGGHKPCVQAFGADQFDEKEPEECKAKSSFFNWWYFGMCFGTLTTLWVLNYIQDNLSWALGFGIPCIAMVVALVVLLLGTCTYRFSIRREDQSPFVRIGNVYVAAVKNWSVSALDVAAAEERLGLVSCSSSQQFSFLNKALVAKNGSCSIDELEEAKSVLRLAPIWLTCLVYAVVFAQSPTFFTKQGATMERSITPGYKISPATLQSFISLSIVIFIPIYDRVLIPIARSFTHKPGGITMLQRIGTGIFLSFLAMVVAALVEMKRLKTAADYGLVDSPDATVPMSVWWLVPQYVLFGITDVFAMVGLQEFFYDQVPNELRSVGLALYLSIFGIGNFLSSFMISIIEKATSQSGQASWFANNLNQAHLDYFYWLLACLSFIGLASYLYVAKSYVSKRLDTS

SEQ ID NO: 72631 - protein, 434 aa, Arabidopsis thaliana; identical to SEQ ID NO: 70218
  peptide (1)..(434): Ceres Seq. ID no. 4940027

SEQ ID NO: 72632 - DNA, 1363 bp, Arabidopsis thaliana
  misc_feature (1)..(1363): Ceres Seq. ID no. 4940134
  misc_feature (1)..(1363): Ortholog of  Ceres SEQ ID NO 15178173 as cited in SEQ ID NO 54139
  misc_feature (1)..(1363): Ortholog of  Ceres SEQ ID NO 14301836 as cited in SEQ ID NO 67386
atattaaccccttgtgtctctcacaatcccactagtactgaaacatagagatagacttagctcaagataagctaatttgttttcactctaatatagagagagagagaaagagatcggagaggaaaaaatggcgggaggaatagggctgggagacacgacatacacgaaggtgtttgtgggaggattagcttgggagacgcataaggagacgatgaagaagcactttgagcagtttggagagattttggaagccgtagtcatcaccgacaaggcctccggtagatccaagggctacggattcgtgacattcagggaagcggaggcggcgaggagtgcttgtgtggatgctactccggtgatcgacgggagaagagcaaattgcaacctcgcctctctcggtcttcaaagatccaaaccctccactcctaaccatggaggaggaggcaggattaacaatatgagagtgatgatgagcacaatgcagactggttttggaccacctccaccaccacaaccacccaccttcactcactatccccatctccctctcaatctctttgggtactctccatactcgccagactactcatcattccctacgaacttatacggcatgtacggctgcacttctggaggacaatacggagtctatggaaacagaaacagcggaggcggtggactaaccgcagcagccgcatccgctactcctttttatccttgtggtggaggacatggtggggtccagttctctcaaccacaaccattttatcatcacttgtcttcttataaccctcaccattactctcctccgaccttttctatgcaacaagtgtgttttgttgtgccacaggcgtaacaggctttccgcttcaaccacctcttattccttaccgttaaagaagcttagagtctttggtagctatcaagcttcatatcatcatcttcttcttctcaggtcaagagccattctatggtttaaaggatgctcctggctaatctcagcacttagtttctctccctctgctctaaaagctaccccattttatggaatttggaggtggctttttaagcagatcccaatgggatctcctgtttcagatggtgatcatgtcgtatttgtcatctctcaccttcttgcaattgcatcttctcgagagaatgggtttctctttgagagatattgctaatggagcatcatcatcatcaatcactcatgtgccaatctcaagctgatgcatgtatcagcttaattagtttatgttgttttagcctaaggatggctaatcaacaagacaaagaaaatgtctgttaggataatgtaaaaaaaaaatcaagcaccaaaacaattttctgtttgaaagac

SEQ ID NO: 72633 - protein, 242 aa, Arabidopsis thaliana
  peptide (1)..(242): Ceres Seq. ID no. 4940135
MAGGIGLGDTTYTKVFVGGLAWETHKETMKKHFEQFGEILEAVVITDKASGRSKGYGFVTFREAEAARSACVDATPVIDGRRANCNLASLGLQRSKPSTPNHGGGGRINNMRVMMSTMQTGFGPPPPPQPPTFTHYPHLPLNLFGYSPYSPDYSSFPTNLYGMYGCTSGGQYGVYGNRNSGGGGLTAAAASATPFYPCGGGHGGVQFSQPQPFYHHLSSYNPHHYSPPTFSMQQVCFVVPQA

SEQ ID NO: 72634 - protein, 214 aa, Arabidopsis thaliana; identical to SEQ ID NO: 24359
  peptide (1)..(214): Ceres Seq. ID no. 4940136

SEQ ID NO: 72635 - protein, 151 aa, Arabidopsis thaliana
  peptide (1)..(151): Ceres Seq. ID no. 4940137
MVGSSSLNHNHFIITCLLITLTITLLRPFLCNKCVLLCHRRNRLSASTTSYSLPLKKLRVFGSYQASYHHLLLLRSRAILWFKGCSWLISALSFSPSALKATPFYGIWRWLFKQIPMGSPVSDGDHVVFVISHLLAIASSRENGFLFERYC

SEQ ID NO: 72636 - DNA, 1180 bp, Arabidopsis thaliana
  misc_feature (1)..(1180): Ceres Seq. ID no. 4940146
  misc_feature (1)..(1180): Ortholog of  Ceres SEQ ID NO 15175697 as cited in SEQ ID NO 55165
attttaatttttcatgttactctctccttcttcttcacttgttctctttctcatcgcctcttgattcacgcgaacgagaaagcgacgatcgtaaccaccggcgctgaccaaaaagtaatcgattctcttcccgagctgatctctcagcttcaggtgtcttgaatctgaatctgtggctatatttggtgctcggtggtgagcaggaagggagggggatattgtcagggttttaatgtacgtcagatgaatagagcaactaatgttactggcagtagaaggagggggtttattctcagcgtccgcgtctgggtatagtaagggattgacccttcttttctctggtgataaagacgtagataggcccatgagagttgtcccgtggaatcactaccaggtggttgaccaagagcctgaggctgaccctgttcttcagctggattctattaagaaccgagtttcccgcggttgcgctgcttccttcagttgttttggtggcgcttccgcgggacttgagaccccttctcctcttaaagttgaacctgtgcagcagcagcatcgtgaaatatcatcaccagagtctgttgttgttgtttctgaaaagggtaaagaccaaataagtgaagctgataatggcagcagcaaagaagctttcaaactctcgttgaggagtagcttgaagaggccctctgttgcggaatcacgctctctagaagatataaaagaatacgagacgttgagtgtggatggtagcgatctcactggtgacatggcaaggcggaaagttcagtggcctgatgcttgtggtagtgaactcactcaagttagagaatttgagccgagtgagatgggattatcagatgaagaatgggaggtaggacgacaaagaacatgttcgtgtgtgatcatgtaaattcagaaatcatcggtatcactctttactcatgtcttgtgtgcattgctcatatatttaaagtgtatctgttattacaaaagttctcttcaaggttttggcttgtacattattccctttgttttgagtggcaacttgttccgggtttctgttttctaaaaacgataagacaacatccaaatcgatgcaaagtggaagagagtggcaataactcttgttcttgtaacgctctcaaccacattacgtacgtgtacaacaaaactagaatgc

SEQ ID NO: 72637 - protein, 216 aa, Arabidopsis thaliana; identical to SEQ ID NO: 38101
  peptide (1)..(216): Ceres Seq. ID no. 4940147

SEQ ID NO: 72638 - protein, 181 aa, Arabidopsis thaliana; identical to SEQ ID NO: 38102
  peptide (1)..(181): Ceres Seq. ID no. 4940148

SEQ ID NO: 72639 - DNA, 1269 bp, Arabidopsis thaliana
  misc_feature (1)..(1269): Ceres Seq. ID no. 4940181
  misc_feature (1)..(1269): Ortholog of  Ceres SEQ ID NO 14313268 as cited in SEQ ID NO 66794
atgaatcttgttgttctgctaatcctaacattactccttttcattgtttcttatgtagtagacgcaggccaagtcattttggttgattccaacataactcgctcttttgtcgacatggaagctgatttctctccatcagtgactacggtggaaaccggagtggtttatgtagctgagcctctcaacgcttgccgaaacttgaggaataaaccggagcagagcccttatggtacttcccctcttgtgttgatcataagaggaggctgcagttttgagtacaaagtcagaaacgcgcagagaagcggtttcaaggctgccattgtctatgacaatgtggaccgcaacttcttatccgcaatggggggagactcggacggtataaagattcaagcggtttttgtgatgaagagagccggagaaatgctcaagaagtacgcgggttcggaggaaatggaagtcatgttggttcctcctaatacagaggactcggtgtggtcattgtacgcttccatagcattgatcttgtcgctggctattttttgtgttatggttacttgtgtcttcttctatagatattgctcaacaattagaaactctacatctcaattcaatgggatgtgccgtagaacggtgaaagcaatgccgagtgttacattcacttgtgcaaaaatagacaacactacaggtttctcttgcgctatctgccttgaagactacattgttggagacaagctcagggtcttaccttgcagtcacaagtttcatgtcgcttgcgtagactcgtggcttatatcatggagaacgttttgtccagtgtgtaaacgggatgcgagaacgaccgcagatgagccactagctacagagagcacaccgtttctcagttcttccattgcaacatcatctctagtgtgtatagactctcctcctttgggatcctcagtttctttctctccagcgcatgtgagctcgtccttcattcatcaatttgtcaggtcttcgccaatgaatggcagccgtatctcagagaatcttaggcgacaagcctcaccattacagtcatcatcacagcgatcacacctctctatgaagtcttcccattcactgggttattcgaccatgtcacctctcaacgcgatgggcatgtcaccataccggccatacccaagcaatgcatcgcctggattattcagttcaacaaatcatctgctttccaattatacagcaaatacattctctcatttcgcctctgcacactcgcttccggactag

SEQ ID NO: 72640 - protein, 422 aa, Arabidopsis thaliana
  peptide (1)..(422): Ceres Seq. ID no. 4940182
MNLVVLLILTLLLFIVSYVVDAGQVILVDSNITRSFVDMEADFSPSVTTVETGVVYVAEPLNACRNLRNKPEQSPYGTSPLVLIIRGGCSFEYKVRNAQRSGFKAAIVYDNVDRNFLSAMGGDSDGIKIQAVFVMKRAGEMLKKYAGSEEMEVMLVPPNTEDSVWSLYASIALILSLAIFCVMVTCVFFYRYCSTIRNSTSQFNGMCRRTVKAMPSVTFTCAKIDNTTGFSCAICLEDYIVGDKLRVLPCSHKFHVACVDSWLISWRTFCPVCKRDARTTADEPLATESTPFLSSSIATSSLVCIDSPPLGSSVSFSPAHVSSSFIHQFVRSSPMNGSRISENLRRQASPLQSSSQRSHLSMKSSHSLGYSTMSPLNAMGMSPYRPYPSNASPGLFSSTNHLLSNYTANTFSHFASAHSLPD

SEQ ID NO: 72641 - protein, 384 aa, Arabidopsis thaliana
  peptide (1)..(384): Ceres Seq. ID no. 4940183
MEADFSPSVTTVETGVVYVAEPLNACRNLRNKPEQSPYGTSPLVLIIRGGCSFEYKVRNAQRSGFKAAIVYDNVDRNFLSAMGGDSDGIKIQAVFVMKRAGEMLKKYAGSEEMEVMLVPPNTEDSVWSLYASIALILSLAIFCVMVTCVFFYRYCSTIRNSTSQFNGMCRRTVKAMPSVTFTCAKIDNTTGFSCAICLEDYIVGDKLRVLPCSHKFHVACVDSWLISWRTFCPVCKRDARTTADEPLATESTPFLSSSIATSSLVCIDSPPLGSSVSFSPAHVSSSFIHQFVRSSPMNGSRISENLRRQASPLQSSSQRSHLSMKSSHSLGYSTMSPLNAMGMSPYRPYPSNASPGLFSSTNHLLSNYTANTFSHFASAHSLPD

SEQ ID NO: 72642 - protein, 303 aa, Arabidopsis thaliana
  peptide (1)..(303): Ceres Seq. ID no. 4940184
MGGDSDGIKIQAVFVMKRAGEMLKKYAGSEEMEVMLVPPNTEDSVWSLYASIALILSLAIFCVMVTCVFFYRYCSTIRNSTSQFNGMCRRTVKAMPSVTFTCAKIDNTTGFSCAICLEDYIVGDKLRVLPCSHKFHVACVDSWLISWRTFCPVCKRDARTTADEPLATESTPFLSSSIATSSLVCIDSPPLGSSVSFSPAHVSSSFIHQFVRSSPMNGSRISENLRRQASPLQSSSQRSHLSMKSSHSLGYSTMSPLNAMGMSPYRPYPSNASPGLFSSTNHLLSNYTANTFSHFASAHSLPD

SEQ ID NO: 72643 - DNA, 929 bp, Arabidopsis thaliana
  misc_feature (1)..(929): Ceres Seq. ID no. 4940501
  misc_feature (1)..(929): Ortholog of  Ceres SEQ ID NO 15174190 as cited in SEQ ID NO 64430
aaaatttctctgccggtgttgacttcaaactctctttgattagatcggcgccaacttctaaacgcaaatgggaatcacgagaaacttgatcctgggtttggcttgtttagcctttgtctccattgctaaagctctgcctcatgaaccagaacttggctcggctcgtgtcgtcttccagactagttatggagatatcgaatttgggttctatcccactgtggcacccaagacagtggatcacatcttcaagcttgttcgtttaggaggatacaacactaatcatttcttcagggttgataaaggttttgttgctcaagttgcggatgtggcgagtggacgatcagctccaatgaatgaggagcaaaggaaagaagctgagaagaaaattgtgggagagttcagtgatgttaagcatgtcagaggtactctttccatgggaagatatgacgatccaaacagtgcacaatcttcattttcgatgcttcttggcaatgctcctcatcttgatcgccagtatgctgtgtttggtaaagttactaaaggagatgaaacattgagtaagctagaagaagttcccactcgccgcgaggggatttttgttatgccgacggagcggatcacgattttgtcgacatactattacgacactaaaatggagagctgtgaagaagagagatctgtcctgaaaagaaggcttcaagcatcttttgtggaggtcgaaagacagagaatgaagtgcttcccgtgaatgaagttaacacataagaaactgttcaacaaaagccttaaaacgccagggaacacaaaggtaaatgtatgtctagtaaaaaaactcagaatgctagacagtttatgagtggtttatcagtgtgagagattgtagttaacagtgtaaacagtttgagacattgaatcatggattgtttcct

SEQ ID NO: 72644 - protein, 226 aa, Arabidopsis thaliana; identical to SEQ ID NO: 30726
  peptide (1)..(226): Ceres Seq. ID no. 4940502

SEQ ID NO: 72645 - protein, 132 aa, Arabidopsis thaliana; identical to SEQ ID NO: 30727
  peptide (1)..(132): Ceres Seq. ID no. 4940503

SEQ ID NO: 72646 - DNA, 1428 bp, Arabidopsis thaliana
  misc_feature (1)..(1428): Ceres Seq. ID no. 4940877
  misc_feature (1)..(1428): Ortholog of  Ceres SEQ ID NO 13660287 as cited in SEQ ID NO 67316
atggccggaagaggaggagagctcacggaggctctggtgaaaaagaccggcagagaagaagaggatgagttggggatgaaggagaaggtttggattgaatcaaagaaactgtgggttgtggcggcgccagcgatcttcacaagatactctacgttcggagtttcaatggtaactcaagctttcattggccatcttggcccaaccgagttggccgcttactctatcaccttcaccattctcctccgtttcagtaatggtatcttgttaggtatggccggtgcactaggaacattatgtggtcaagcctacggagccaaacaataccagatgctcgggatctacctccaaaggtcatggatcgtcctcacaggtggtaccatttgcctcatgcccgtcttcatctttgcgggccctatcctcttagctttaggtcaagaggaacgcattgttcgtgtggctcgggtcttagccctatgggtcataggcatcaacttctccttcgtgccctccttcacttgccaaatgtttctccaagctcagagcaagaacaagattatttcctacgtgactgctgtctccttagggctccatgtcttcttctcgtggctcctagtggctcatttcaattttgggatcactggtgcgatgacctctatgctaattgcgttctggttgcctatcattgtgcagctcttgtatgtaacatgtggtggatgtaaggatacatggagaggattctctatgttggccttcaaagatttgtggcccgtcttaaaactatctttgtcttccggtggaatgctttgcttggagttatggtacaactcggtattggtattgctcactggaaatttgaaaaacgcagaggtggctcttgatgcactagcaatctgcatcagcataaatgcactggagatgatgatagcacttgggtttttggcagcagtaagtgtaagagtgtccaacgagctcggtagtggaaaccccaaaggagccaagtttgcaacattgatagcggttttcacgggaagaatttcctacattttcactacaagtgaagctgtcgcggccgaagttgctgatctttctccacttttagcattttccatcctcttgaacagtgttcaacctgttctctctggagtggcaatcggagcgggatggcaaggatatgtggcttacgttaaccttgcttgctattaccttgtcggaattcctattggtgttatccttggttatgttgttggtttgcaagtgaaaggtgtatggataggaatgctttttggaatattcgttcagacttgtgtgctcaccgtcatgactctcagaacagattgggatcaacaggtatctacgtcgttgagaaatataaaccggtgggttgtaccagaatctagagatgcaaatcaaatttcatcagaggaataa

SEQ ID NO: 72647 - protein, 475 aa, Arabidopsis thaliana
  peptide (1)..(475): Ceres Seq. ID no. 4940878
MAGRGGELTEALVKKTGREEEDELGMKEKVWIESKKLWVVAAPAIFTRYSTFGVSMVTQAFIGHLGPTELAAYSITFTILLRFSNGILLGMAGALGTLCGQAYGAKQYQMLGIYLQRSWIVLTGGTICLMPVFIFAGPILLALGQEERIVRVARVLALWVIGINFSFVPSFTCQMFLQAQSKNKIISYVTAVSLGLHVFFSWLLVAHFNFGITGAMTSMLIAFWLPIIVQLLYVTCGGCKDTWRGFSMLAFKDLWPVLKLSLSSGGMLCLELWYNSVLVLLTGNLKNAEVALDALAICISINALEMMIALGFLAAVSVRVSNELGSGNPKGAKFATLIAVFTGRISYIFTTSEAVAAEVADLSPLLAFSILLNSVQPVLSGVAIGAGWQGYVAYVNLACYYLVGIPIGVILGYVVGLQVKGVWIGMLFGIFVQTCVLTVMTLRTDWDQQVSTSLRNINRWVVPESRDANQISSEE

SEQ ID NO: 72648 - protein, 450 aa, Arabidopsis thaliana
  peptide (1)..(450): Ceres Seq. ID no. 4940879
MKEKVWIESKKLWVVAAPAIFTRYSTFGVSMVTQAFIGHLGPTELAAYSITFTILLRFSNGILLGMAGALGTLCGQAYGAKQYQMLGIYLQRSWIVLTGGTICLMPVFIFAGPILLALGQEERIVRVARVLALWVIGINFSFVPSFTCQMFLQAQSKNKIISYVTAVSLGLHVFFSWLLVAHFNFGITGAMTSMLIAFWLPIIVQLLYVTCGGCKDTWRGFSMLAFKDLWPVLKLSLSSGGMLCLELWYNSVLVLLTGNLKNAEVALDALAICISINALEMMIALGFLAAVSVRVSNELGSGNPKGAKFATLIAVFTGRISYIFTTSEAVAAEVADLSPLLAFSILLNSVQPVLSGVAIGAGWQGYVAYVNLACYYLVGIPIGVILGYVVGLQVKGVWIGMLFGIFVQTCVLTVMTLRTDWDQQVSTSLRNINRWVVPESRDANQISSEE

SEQ ID NO: 72649 - protein, 420 aa, Arabidopsis thaliana
  peptide (1)..(420): Ceres Seq. ID no. 4940880
MVTQAFIGHLGPTELAAYSITFTILLRFSNGILLGMAGALGTLCGQAYGAKQYQMLGIYLQRSWIVLTGGTICLMPVFIFAGPILLALGQEERIVRVARVLALWVIGINFSFVPSFTCQMFLQAQSKNKIISYVTAVSLGLHVFFSWLLVAHFNFGITGAMTSMLIAFWLPIIVQLLYVTCGGCKDTWRGFSMLAFKDLWPVLKLSLSSGGMLCLELWYNSVLVLLTGNLKNAEVALDALAICISINALEMMIALGFLAAVSVRVSNELGSGNPKGAKFATLIAVFTGRISYIFTTSEAVAAEVADLSPLLAFSILLNSVQPVLSGVAIGAGWQGYVAYVNLACYYLVGIPIGVILGYVVGLQVKGVWIGMLFGIFVQTCVLTVMTLRTDWDQQVSTSLRNINRWVVPESRDANQISSEE

SEQ ID NO: 72650 - DNA, 1200 bp, Arabidopsis thaliana
  misc_feature (1)..(1200): Ceres Seq. ID no. 4940912
  misc_feature (1)..(1200): Ortholog of  Ceres SEQ ID NO 15177221 as cited in SEQ ID NO 53046
  misc_feature (1)..(1200): Ortholog of  Ceres SEQ ID NO 14315134 as cited in SEQ ID NO 59476
  misc_feature (1)..(1200): Ortholog of  Ceres SEQ ID NO 12616332 as cited in SEQ ID NO 63449
  misc_feature (1)..(1200): Ortholog of  Ceres SEQ ID NO 13597498 as cited in SEQ ID NO 64648
atgggaatgggaaggtatcagaaatctgcaacttctggtgtttcagctagatgggtttttgttctctgtatttctagcttccttcttggtgttcttgtcgttaacaggcttttggcaagttttgaaaccgtagatggcattgagagagcttcacctgagcaaaatgatcaatctagatcacttaatcctcttgttgattgtgagagcaaggaaggagacattctatctcgagtttcgcatactcatgatgttatcaagacattagacaagacaatttcttctcttgaggtagaactagctacagctcgagcagcaagatctgatggtagagatggatctccagctgttgcaaaaacagtagcagaccaatcgaagattcggcctcggatgttctttgtgatgggaatcatgactgctttcagtagcagaaaacgaagagactccataagaggaacttggcttcctaaaggggatgaattgaaaagattagagacagagaagggaatcattatgagatttgttataggtcacagttcttctcctggaggagtcttggaccacaccattgaagctgaagaagaacaacacaaagacttctttcgactgaatcacatagaaggttatcatgaattatcatctaaaacccaaatatacttctcatctgctgttgcaaaatgggatgcagacttctacatcaaagtggatgatgatgttcacgtaaatctcggaatgcttggttctacattggctcgccacagatcaaaaccgcgagtgtacattggttgcatgaagtctggacctgtccttgctcaaaaaggagtcaaataccatgagccagaatattggaagtttggtgaagaaggaaacaaatacttcagacatgcaactggacaaatctatgcaatctccaaagatttagcaacttatatctcagttaaccggcaactacttcacaagtatgcaaatgaagatgtctctttaggttcttggttcattggtctcgatgttgaacatatcgacgatagaagcctctgctgtggaacacctttagattgtgagtggaagggtcaagcaggaaacccttgcgcagcatcgttcgattggagctgtagtggaatctgcaaatccgtagatagaatgcttgaagtacatcaacgttgtggtgaaggcgatggagcaatttggcatagtagtttctaa

SEQ ID NO: 72651 - protein, 399 aa, Arabidopsis thaliana
  peptide (1)..(399): Ceres Seq. ID no. 4940913
MGMGRYQKSATSGVSARWVFVLCISSFLLGVLVVNRLLASFETVDGIERASPEQNDQSRSLNPLVDCESKEGDILSRVSHTHDVIKTLDKTISSLEVELATARAARSDGRDGSPAVAKTVADQSKIRPRMFFVMGIMTAFSSRKRRDSIRGTWLPKGDELKRLETEKGIIMRFVIGHSSSPGGVLDHTIEAEEEQHKDFFRLNHIEGYHELSSKTQIYFSSAVAKWDADFYIKVDDDVHVNLGMLGSTLARHRSKPRVYIGCMKSGPVLAQKGVKYHEPEYWKFGEEGNKYFRHATGQIYAISKDLATYISVNRQLLHKYANEDVSLGSWFIGLDVEHIDDRSLCCGTPLDCEWKGQAGNPCAASFDWSCSGICKSVDRMLEVHQRCGEGDGAIWHSSF

SEQ ID NO: 72652 - protein, 397 aa, Arabidopsis thaliana
  peptide (1)..(397): Ceres Seq. ID no. 4940914
MGRYQKSATSGVSARWVFVLCISSFLLGVLVVNRLLASFETVDGIERASPEQNDQSRSLNPLVDCESKEGDILSRVSHTHDVIKTLDKTISSLEVELATARAARSDGRDGSPAVAKTVADQSKIRPRMFFVMGIMTAFSSRKRRDSIRGTWLPKGDELKRLETEKGIIMRFVIGHSSSPGGVLDHTIEAEEEQHKDFFRLNHIEGYHELSSKTQIYFSSAVAKWDADFYIKVDDDVHVNLGMLGSTLARHRSKPRVYIGCMKSGPVLAQKGVKYHEPEYWKFGEEGNKYFRHATGQIYAISKDLATYISVNRQLLHKYANEDVSLGSWFIGLDVEHIDDRSLCCGTPLDCEWKGQAGNPCAASFDWSCSGICKSVDRMLEVHQRCGEGDGAIWHSSF

SEQ ID NO: 72653 - protein, 270 aa, Arabidopsis thaliana
  peptide (1)..(270): Ceres Seq. ID no. 4940915
MFFVMGIMTAFSSRKRRDSIRGTWLPKGDELKRLETEKGIIMRFVIGHSSSPGGVLDHTIEAEEEQHKDFFRLNHIEGYHELSSKTQIYFSSAVAKWDADFYIKVDDDVHVNLGMLGSTLARHRSKPRVYIGCMKSGPVLAQKGVKYHEPEYWKFGEEGNKYFRHATGQIYAISKDLATYISVNRQLLHKYANEDVSLGSWFIGLDVEHIDDRSLCCGTPLDCEWKGQAGNPCAASFDWSCSGICKSVDRMLEVHQRCGEGDGAIWHSSF

SEQ ID NO: 72654 - DNA, 2985 bp, Arabidopsis thaliana
  misc_feature (1)..(2985): Ceres Seq. ID no. 4942550
  misc_feature (1)..(2985): Ortholog of  Ceres SEQ ID NO 15225873 as cited in SEQ ID NO 54927
atgaaggccatggagactatacaggatctgatcgaagaagctaaagtacgagccgtatggtggtgcttgtgcatcttctccgtcacctatttcttgacccatacaagtatctattggtggctgaatttgccaattgcaatcctcatttgtggcggtgcgcggtttttttttaaccattttgagttcagatggaaagttccggcgactcctaggcagagtcagttgtcttatcttgagaagaagcagttgtctgtgaatgatccacgtctttctggtatcccacctcctccaaggtggaagaagaaaatagattctcctgttgtggaagctgcgattaatgattttattgacaagatccttaatgatttcgtggtgaatttgtggtactctttgattactcctgataaagaagcgcctgaacttatacgtgcagtgatcatggatgctcttggtgagatttcagttagggtgaaagagatcaatattgttgacttgttaaccagggatatagttgatctgataggtgatcatttggaaagttttagaagaaaccaagctgctataggtactgatgtgatgaaaactttgtcatctgaggagagagatgaaagattgaaataccatcttatggcttctggggaactctatcctgcactcgtgtcacctgagagtgaatacaaggttcttcagaaaatagttgctggcatattatctgtggttctcagaccacgagaagctcagtgccctcttgttcgaacaatagctagagagattgttacttgcttggtaattcaacctcttttgaatttagcatgccccgagcgtatcaatgaagtgtttgagatcattatcaatcttattaaagaaggaaactttgagcagtttacggcggaagagcagaatgtaaattctgccccattgtcagccttcgatagtcaagcaaaaaatatgaatttgacaaaagctattgagcagaaatcaccaaacataaatgacagacacccagatctacacgttcaacagcactctgctgattgggctcggtcgctagaggttgcgacgcaaaggagaacagaggttcttagacctgaaaaccttgaaaacatgtggacgaaaggaaggaactatcaaaagaaggagtacaaaaaatctctgaaaaagggttcttctactggagcaaaagaaaacgcagtggcgcagttaccccctaaagtgagcactgataagcagtcacaagcacagatggctgaggaatttagtaaatcatctttacatgatggagggcaccagatttatgaggctgatgttagaaaggaatctcgttcagatggaaataaaaataggcttaaaagatccaatagtacatcagatcttaatctacgtcctgaaacgagtctagcactcttaggagtcagtgaggggccgctaatcacagaattttacaccacagattttatcaagcacaatgataactacataagtgataataaatcccaaagcattgttcttcacaaagagggtcagcactgcctgaagctcaaatgtcgcgttcttggagcttattttgagaagcaaggatcaaaatcatttgcagtatattctattgcggtgacagatgtggaaaacaaaacttggtttgttaagagaagatacagtaattttgagcgattacatcgtcaactcaaagaaatcccgaactacaatttacagttgcctcccaagcgtattttctcatcaagcaccgaagatgcttttgttcatcgtcgctgtattcagctggacaagtatctacaagatctcttgtgtatagctaatgttgctgaacagcatgaagtttgggattttctaagcgcagcctctaagaattattcttttggaaagtcttcatcagtgatgaaaactcttgcagtcaatgttgatgatgccatggacgatattgtacgtcagttcaaaggtgtctcagatggccttatgcgcaaggttgtaggatctccacttgatgaacatgatcatgctcctacccgccacctctcctggagtgtaaatgaaataagcactcagctctctagggaaagcgcaactgaatctatgcacagcagcatttctgatactgaagacatcgacaaacttggagagaacactcaaggggaaggtagatttgattcagaagccaatgggtggcactcagataatgaattggactctaagtatgttccaccgagagtggttagacgtcttggagagcctgagagttcgccctcagagaaggaaaatgattttaaggcaaaatctcaagttagggggtccaccgattttcagcatgctgatccattgacagctttagtccaaaatccccatggcatacccgagtggatgccacccaatgtcagtgtgccaattttgaacttagttgataaagtgtttcagttaaatagaagaggttggttaaggaggcaagttttctggatatcaaagcaaatattacaattagttatggaagatgctgtggatgacttgctcatgagggagatatgttggctgcggaatgaagacacaattgctcaaggaattcgttgggctcaagatattctatggccaaatggtgtattctttaccagattgaatgatagtcaagaggcatcagatgagaccgaccctagtgaaaaaacttaccaaatggcaggccaacttggtggcatgaaggtgactaaacccagttcctttgagcagcaactcgaggcttttcgtagagctagtgaaataaaaaaattccttttcgatggcgccccaacagccttagtgagtttggtagggcacaatcagtacaggagatgtgcaagagacattttctatttcactcagtcaaacatatgcataaagcaactcacatttgcaatactggagctgctactccgatcggtattccccgagctgcaagatcttctaagagacataagggagaatccgcaaggtcggtcagagtaa

SEQ ID NO: 72655 - protein, 994 aa, Arabidopsis thaliana
  peptide (1)..(994): Ceres Seq. ID no. 4942551
MKAMETIQDLIEEAKVRAVWWCLCIFSVTYFLTHTSIYWWLNLPIAILICGGARFFFNHFEFRWKVPATPRQSQLSYLEKKQLSVNDPRLSGIPPPPRWKKKIDSPVVEAAINDFIDKILNDFVVNLWYSLITPDKEAPELIRAVIMDALGEISVRVKEINIVDLLTRDIVDLIGDHLESFRRNQAAIGTDVMKTLSSEERDERLKYHLMASGELYPALVSPESEYKVLQKIVAGILSVVLRPREAQCPLVRTIAREIVTCLVIQPLLNLACPERINEVFEIIINLIKEGNFEQFTAEEQNVNSAPLSAFDSQAKNMNLTKAIEQKSPNINDRHPDLHVQQHSADWARSLEVATQRRTEVLRPENLENMWTKGRNYQKKEYKKSLKKGSSTGAKENAVAQLPPKVSTDKQSQAQMAEEFSKSSLHDGGHQIYEADVRKESRSDGNKNRLKRSNSTSDLNLRPETSLALLGVSEGPLITEFYTTDFIKHNDNYISDNKSQSIVLHKEGQHCLKLKCRVLGAYFEKQGSKSFAVYSIAVTDVENKTWFVKRRYSNFERLHRQLKEIPNYNLQLPPKRIFSSSTEDAFVHRRCIQLDKYLQDLLCIANVAEQHEVWDFLSAASKNYSFGKSSSVMKTLAVNVDDAMDDIVRQFKGVSDGLMRKVVGSPLDEHDHAPTRHLSWSVNEISTQLSRESATESMHSSISDTEDIDKLGENTQGEGRFDSEANGWHSDNELDSKYVPPRVVRRLGEPESSPSEKENDFKAKSQVRGSTDFQHADPLTALVQNPHGIPEWMPPNVSVPILNLVDKVFQLNRRGWLRRQVFWISKQILQLVMEDAVDDLLMREICWLRNEDTIAQGIRWAQDILWPNGVFFTRLNDSQEASDETDPSEKTYQMAGQLGGMKVTKPSSFEQQLEAFRRASEIKKFLFDGAPTALVSLVGHNQYRRCARDIFYFTQSNICIKQLTFAILELLLRSVFPELQDLLRDIRENPQGRSE

SEQ ID NO: 72656 - protein, 991 aa, Arabidopsis thaliana
  peptide (1)..(991): Ceres Seq. ID no. 4942552
METIQDLIEEAKVRAVWWCLCIFSVTYFLTHTSIYWWLNLPIAILICGGARFFFNHFEFRWKVPATPRQSQLSYLEKKQLSVNDPRLSGIPPPPRWKKKIDSPVVEAAINDFIDKILNDFVVNLWYSLITPDKEAPELIRAVIMDALGEISVRVKEINIVDLLTRDIVDLIGDHLESFRRNQAAIGTDVMKTLSSEERDERLKYHLMASGELYPALVSPESEYKVLQKIVAGILSVVLRPREAQCPLVRTIAREIVTCLVIQPLLNLACPERINEVFEIIINLIKEGNFEQFTAEEQNVNSAPLSAFDSQAKNMNLTKAIEQKSPNINDRHPDLHVQQHSADWARSLEVATQRRTEVLRPENLENMWTKGRNYQKKEYKKSLKKGSSTGAKENAVAQLPPKVSTDKQSQAQMAEEFSKSSLHDGGHQIYEADVRKESRSDGNKNRLKRSNSTSDLNLRPETSLALLGVSEGPLITEFYTTDFIKHNDNYISDNKSQSIVLHKEGQHCLKLKCRVLGAYFEKQGSKSFAVYSIAVTDVENKTWFVKRRYSNFERLHRQLKEIPNYNLQLPPKRIFSSSTEDAFVHRRCIQLDKYLQDLLCIANVAEQHEVWDFLSAASKNYSFGKSSSVMKTLAVNVDDAMDDIVRQFKGVSDGLMRKVVGSPLDEHDHAPTRHLSWSVNEISTQLSRESATESMHSSISDTEDIDKLGENTQGEGRFDSEANGWHSDNELDSKYVPPRVVRRLGEPESSPSEKENDFKAKSQVRGSTDFQHADPLTALVQNPHGIPEWMPPNVSVPILNLVDKVFQLNRRGWLRRQVFWISKQILQLVMEDAVDDLLMREICWLRNEDTIAQGIRWAQDILWPNGVFFTRLNDSQEASDETDPSEKTYQMAGQLGGMKVTKPSSFEQQLEAFRRASEIKKFLFDGAPTALVSLVGHNQYRRCARDIFYFTQSNICIKQLTFAILELLLRSVFPELQDLLRDIRENPQGRSE

SEQ ID NO: 72657 - protein, 848 aa, Arabidopsis thaliana
  peptide (1)..(848): Ceres Seq. ID no. 4942553
MDALGEISVRVKEINIVDLLTRDIVDLIGDHLESFRRNQAAIGTDVMKTLSSEERDERLKYHLMASGELYPALVSPESEYKVLQKIVAGILSVVLRPREAQCPLVRTIAREIVTCLVIQPLLNLACPERINEVFEIIINLIKEGNFEQFTAEEQNVNSAPLSAFDSQAKNMNLTKAIEQKSPNINDRHPDLHVQQHSADWARSLEVATQRRTEVLRPENLENMWTKGRNYQKKEYKKSLKKGSSTGAKENAVAQLPPKVSTDKQSQAQMAEEFSKSSLHDGGHQIYEADVRKESRSDGNKNRLKRSNSTSDLNLRPETSLALLGVSEGPLITEFYTTDFIKHNDNYISDNKSQSIVLHKEGQHCLKLKCRVLGAYFEKQGSKSFAVYSIAVTDVENKTWFVKRRYSNFERLHRQLKEIPNYNLQLPPKRIFSSSTEDAFVHRRCIQLDKYLQDLLCIANVAEQHEVWDFLSAASKNYSFGKSSSVMKTLAVNVDDAMDDIVRQFKGVSDGLMRKVVGSPLDEHDHAPTRHLSWSVNEISTQLSRESATESMHSSISDTEDIDKLGENTQGEGRFDSEANGWHSDNELDSKYVPPRVVRRLGEPESSPSEKENDFKAKSQVRGSTDFQHADPLTALVQNPHGIPEWMPPNVSVPILNLVDKVFQLNRRGWLRRQVFWISKQILQLVMEDAVDDLLMREICWLRNEDTIAQGIRWAQDILWPNGVFFTRLNDSQEASDETDPSEKTYQMAGQLGGMKVTKPSSFEQQLEAFRRASEIKKFLFDGAPTALVSLVGHNQYRRCARDIFYFTQSNICIKQLTFAILELLLRSVFPELQDLLRDIRENPQGRSE

SEQ ID NO: 72658 - DNA, 633 bp, Arabidopsis thaliana
  misc_feature (1)..(633): Ceres Seq. ID no. 4942847
  misc_feature (1)..(633): Ortholog of  Ceres SEQ ID NO 12635883 as cited in SEQ ID NO 0
gaaaggtagacgtagacgttggatacttatttggtaggctcttaagaatcttaggtgtatctctttagtttgaagggatatggatcaagaaagatcgatggagacagcataaccaataaacagatcaagaagttctggagacagaagcagatcattgaagaggatcatctctattctgctattaaggctgcagctcgtgtcagagctcgtaatctctctgatgaggactacaaacgctttgaagaaagcttggacatggaggacctggaaaccgaagatcatcagggattgaaagactggtggacaaagagcaaatacgcgtacttgaaccagccggctcttggatctgcagattcactgaagagaaagaggttttcgacttatacaccaaactgtttctcgttcaagccttgcaatcctctctacgcaacttcgctcaatgtcttttgaaccatgagcagcaaactctgcaagatcaatcgtcttgcatatatgtatatatttgttcgtgtgtgtctctgtacatgtcatgtgttattgcttctatattaatggatctggactttggtgtggttgttgatttgtaactgttgaataaaatctttctatggaacactaatttcttcttgttcc

SEQ ID NO: 72659 - protein, 64 aa, Arabidopsis thaliana; identical to SEQ ID NO: 21695
  peptide (1)..(64): Ceres Seq. ID no. 4942848

SEQ ID NO: 72660 - protein, 32 aa, Arabidopsis thaliana; identical to SEQ ID NO: 21696
  peptide (1)..(32): Ceres Seq. ID no. 4942849

SEQ ID NO: 72661 - DNA, 1424 bp, Arabidopsis thaliana
  misc_feature (1)..(1424): Ceres Seq. ID no. 4943199
  misc_feature (1)..(1424): Ortholog of  Ceres SEQ ID NO 13663419 as cited in SEQ ID NO 66561
aaatgattttagaaactaaagtaaaatgagcttgacactagagtttctgcttcttctgattgtacttatcttgagtcaccatgctcattctggctctattgtcaaattccttcctggttttgaaggcccccttccttttgaactcgaaaccgggtacattggtattggtgaggaagaggaagtgcaattattctactatttcatcaaatctgagaagaatccagaagaagaccctcttcttctatggttaagtggaggacctggatgttcctctcttactggccttctttttgagaatggaccggtggctttgaagttcgaggtttacaatggaagtgttccatctttggtctctactacatattcatggacaaaggtaaaaatggcgaacataatattcttggatcagccagttggatctggcttctcctattcaagaactccacttgttgataaaattagtgacactggtgaagttaagaggatttatgagtttcttcaaaagtggttaagcaaacatcaacaatttttttccaaccctttttacgttggtggagattcttattcaggtatgattgttccacccctagttcaagaaatcggaaaaggaaattatcaaataaatctacagggttatatcctcggaaacccgataacagatactgaatctgaacaaaactatcagattccatatgctcatggaatggcattaatctctgatgaactatacaagtcaatggagagaatctgcaaaggaaattatgtgaaagtggattcacttaacacaaaatgctataaactaatcaaagattatcaaaagtgtattcataaactgaataagtatcatatattattacctgactgcgatataacatctcctgattgctttttatataggtatactctcataaccttttgggccaacaacaagagcgttcgcgaagctctgcaagtcaataagggaagtataggaaaatgggtacaatgtaactataaaaatatttcctacaattacgatatcaagagcagcgtcgcataccatatgaagaatagtattgatggctaccgatctcttatctacaatggtgaccatgatatgatggtgcctttccttgcaactcaagcctggataagatctctcaattattccatcactgatgattggaagccttggatgataaacgatcaaattgctggatacacgagaagttattccaataagatgacatttgctactatcaaaggaagtggacacacagcagagtataaaccaaaagagacctctatcatgttcaaaagatggatcagtgcccagcctttgtaaaagaggatgatggtctttgcgtatgtagaataaaactatgtaacataaaaaatgtttgtatacaatataatcatctacttggtaattaagtactaccgct

SEQ ID NO: 72662 - protein, 432 aa, Arabidopsis thaliana
  peptide (1)..(432): Ceres Seq. ID no. 4943200
MSLTLEFLLLLIVLILSHHAHSGSIVKFLPGFEGPLPFELETGYIGIGEEEEVQLFYYFIKSEKNPEEDPLLLWLSGGPGCSSLTGLLFENGPVALKFEVYNGSVPSLVSTTYSWTKVKMANIIFLDQPVGSGFSYSRTPLVDKISDTGEVKRIYEFLQKWLSKHQQFFSNPFYVGGDSYSGMIVPPLVQEIGKGNYQINLQGYILGNPITDTESEQNYQIPYAHGMALISDELYKSMERICKGNYVKVDSLNTKCYKLIKDYQKCIHKLNKYHILLPDCDITSPDCFLYRYTLITFWANNKSVREALQVNKGSIGKWVQCNYKNISYNYDIKSSVAYHMKNSIDGYRSLIYNGDHDMMVPFLATQAWIRSLNYSITDDWKPWMINDQIAGYTRSYSNKMTFATIKGSGHTAEYKPKETSIMFKRWISAQPL

SEQ ID NO: 72663 - protein, 313 aa, Arabidopsis thaliana
  peptide (1)..(313): Ceres Seq. ID no. 4943201
MANIIFLDQPVGSGFSYSRTPLVDKISDTGEVKRIYEFLQKWLSKHQQFFSNPFYVGGDSYSGMIVPPLVQEIGKGNYQINLQGYILGNPITDTESEQNYQIPYAHGMALISDELYKSMERICKGNYVKVDSLNTKCYKLIKDYQKCIHKLNKYHILLPDCDITSPDCFLYRYTLITFWANNKSVREALQVNKGSIGKWVQCNYKNISYNYDIKSSVAYHMKNSIDGYRSLIYNGDHDMMVPFLATQAWIRSLNYSITDDWKPWMINDQIAGYTRSYSNKMTFATIKGSGHTAEYKPKETSIMFKRWISAQPL

SEQ ID NO: 72664 - protein, 250 aa, Arabidopsis thaliana; identical to SEQ ID NO: 29009
  peptide (1)..(250): Ceres Seq. ID no. 4943202

SEQ ID NO: 72665 - DNA, 1497 bp, Arabidopsis thaliana
  misc_feature (1)..(1497): Ceres Seq. ID no. 4943579
  misc_feature (1)..(1497): Ortholog of  Ceres SEQ ID NO 13594209 as cited in SEQ ID NO 59089
  misc_feature (1)..(1497): Ortholog of  Ceres SEQ ID NO 13502874 as cited in SEQ ID NO 66298
  misc_feature (1)..(1497): Ortholog of  Ceres SEQ ID NO 12614124 as cited in SEQ ID NO 68392
atgaacgttgactttcaaaactgtttgatcttaatcctcctctgcctcctttccttcctctgttactctttcttcttcaagaaaccaaaggatggtttcaatttgccaccgagccctccctctctaccgatcattggccatcttcatcatctcctctctctttttatgcacagatctttgcaaaaactctcctccaagtatggacctctcctctatcttcacgtcttcaatgttcccatactccttgtctcgtctccctcaatagcctatgagatctttaggacacaagacgtaaacgtttcctcgcgcgactttcctacgaacgaagggtctctcctcttcggatcctttggcttcggcaccgcaccttcctcgggcctcaagcactcgagaggtcacaaaaagtccgtgcagaggagttattacttaaacctattagataaggcggtgaagaaggagagcgttgagattgctgaggaagctatgaagctggtcaacaataccgtttgccagatgattatggggaggagttgttcagaggaaaacggtgaagcagagagagtcagaggcttggtgaccaagacagatgccttgacgaagaagtttatcttggcaggcatcttgcggaaaccgcttcagaagattgggatctcactgttcaaaaaggagttaatggatgcttcctgcaagttcaacgaggtgttggagaagattcttgtagaatataaagagaaagttgaagagcatcatcaaggtactgacatgatggataagctcttagaagtttatggagacgaaaaagcagagtataagatcactagagaccatatcaagtccttgtttgtggatcttttctttgcaggcactgacacctggacgcacgctatacaatggattatggccgagatcattaacaactcgtacattcttgagagattgagagaagaaattgattctgttgtaggaaaaacaaggttgattcaagaaactgatctaccgaacctcccgtgcttgcaagcaaccgtcaaagaagggctaaggttgcaccctccggttcctcttgtgttaagaacgtttaaagaagggtgtacgattggaggcttttatgttccggagaagacaacacttgttgttaatgggtatgctatgatgagagatcctgaatactgggaagatcctcaagaatttaagccagagagatttctagcttcttcaagatcaagccaaaatgatgagataagagacgaactcctaaaataccttcctttcgggaatggaagaagagcctgtccaggagctaacctagcttatatctctgtaggaaccgcgattggagtgatggttcagtgctttgactgggagatcaaaggagataagatcaacatggatgaggctcctggaaaaataacgttgaccatggctcatcctcttaactgcactcttgttcctcgaaccctaatccctgttacttcaactgtacagattcctagttcttga

SEQ ID NO: 72666 - protein, 498 aa, Arabidopsis thaliana
  peptide (1)..(498): Ceres Seq. ID no. 4943580
MNVDFQNCLILILLCLLSFLCYSFFFKKPKDGFNLPPSPPSLPIIGHLHHLLSLFMHRSLQKLSSKYGPLLYLHVFNVPILLVSSPSIAYEIFRTQDVNVSSRDFPTNEGSLLFGSFGFGTAPSSGLKHSRGHKKSVQRSYYLNLLDKAVKKESVEIAEEAMKLVNNTVCQMIMGRSCSEENGEAERVRGLVTKTDALTKKFILAGILRKPLQKIGISLFKKELMDASCKFNEVLEKILVEYKEKVEEHHQGTDMMDKLLEVYGDEKAEYKITRDHIKSLFVDLFFAGTDTWTHAIQWIMAEIINNSYILERLREEIDSVVGKTRLIQETDLPNLPCLQATVKEGLRLHPPVPLVLRTFKEGCTIGGFYVPEKTTLVVNGYAMMRDPEYWEDPQEFKPERFLASSRSSQNDEIRDELLKYLPFGNGRRACPGANLAYISVGTAIGVMVQCFDWEIKGDKINMDEAPGKITLTMAHPLNCTLVPRTLIPVTSTVQIPSS

SEQ ID NO: 72667 - protein, 443 aa, Arabidopsis thaliana
  peptide (1)..(443): Ceres Seq. ID no. 4943581
MHRSLQKLSSKYGPLLYLHVFNVPILLVSSPSIAYEIFRTQDVNVSSRDFPTNEGSLLFGSFGFGTAPSSGLKHSRGHKKSVQRSYYLNLLDKAVKKESVEIAEEAMKLVNNTVCQMIMGRSCSEENGEAERVRGLVTKTDALTKKFILAGILRKPLQKIGISLFKKELMDASCKFNEVLEKILVEYKEKVEEHHQGTDMMDKLLEVYGDEKAEYKITRDHIKSLFVDLFFAGTDTWTHAIQWIMAEIINNSYILERLREEIDSVVGKTRLIQETDLPNLPCLQATVKEGLRLHPPVPLVLRTFKEGCTIGGFYVPEKTTLVVNGYAMMRDPEYWEDPQEFKPERFLASSRSSQNDEIRDELLKYLPFGNGRRACPGANLAYISVGTAIGVMVQCFDWEIKGDKINMDEAPGKITLTMAHPLNCTLVPRTLIPVTSTVQIPSS

SEQ ID NO: 72668 - protein, 337 aa, Arabidopsis thaliana
  peptide (1)..(337): Ceres Seq. ID no. 4943582
MKLVNNTVCQMIMGRSCSEENGEAERVRGLVTKTDALTKKFILAGILRKPLQKIGISLFKKELMDASCKFNEVLEKILVEYKEKVEEHHQGTDMMDKLLEVYGDEKAEYKITRDHIKSLFVDLFFAGTDTWTHAIQWIMAEIINNSYILERLREEIDSVVGKTRLIQETDLPNLPCLQATVKEGLRLHPPVPLVLRTFKEGCTIGGFYVPEKTTLVVNGYAMMRDPEYWEDPQEFKPERFLASSRSSQNDEIRDELLKYLPFGNGRRACPGANLAYISVGTAIGVMVQCFDWEIKGDKINMDEAPGKITLTMAHPLNCTLVPRTLIPVTSTVQIPSS

SEQ ID NO: 72669 - DNA, 1521 bp, Arabidopsis thaliana
  misc_feature (1)..(1521): Ceres Seq. ID no. 4943676
  misc_feature (1)..(1521): Ortholog of  Ceres SEQ ID NO 14309993 as cited in SEQ ID NO 213
  misc_feature (1)..(1521): Ortholog of  Ceres SEQ ID NO 14307460 as cited in SEQ ID NO 54091
  misc_feature (1)..(1521): Ortholog of  Ceres SEQ ID NO 14304851 as cited in SEQ ID NO 54837
atgaactctcaaatcactcttttcttcttcttcttctcaatcctctccctctcccaaatctcaaattcatcatcactactaaaaccacacccatgtccaattttacccctcccatcctcccaacagctccaatggcaactcggatccatggccatgttcctccattttggacccaacactttcaccgactccgaatggggcaccggaaaagctaacccatccattttcaacccgacccatctcaacgcaagtcaatgggtccaaatcgctaaagactcaggcttttcccgcgttatcctcacagctaagcaccatgatggattctgtctctggcctagcgaatacactgattactccgtcaaatctagccaatggagaaacggagccggcgatgtagtggctgaactagcttctgcggcaaaggaagctggaattggacttggtctttacctttctccatgggatcgacatgaacagtgttatggcaagacattggagtataacgagttctatctgagtcaaatgaccgagttactaacaaagtatggagagattaaggaagtttggttagatggagctaaaggagacggagagaaagatatggaatatttctttgatacttggtttagtttgatccatcagcttcagcctaaagctgttatattctctgacgctggtcctgatgtcaggtggattggtgatgaagctggtctagctggctctacttgctggtcactctttaacagaaccaatgcaaagattggtgacactgagccttcgtattctcaagaaggtgatggctatgggcaagattgggtaccagcggaatgtgatgtatcgattcgacccggttggttttggcatgcgtcggagtcgcctaaaccggctgttcagcttttggatatatactataactcagttggaagaaactgtctcttcttgcttaatgtacctcctaattcttcaggattgatatctgagcaagacattaaggttcttgaagagttcagcgaaatgaagaactccattttctcgaacaatctcgcccgtaaagcattcgttaactcgagcagtattcgtggcgatcaaagttcacagtttggtcctaagaatgttttggaagaaggattagacaagtactgggcgccagaagagaatcaaaacgaatgggtgttatacttagagtttaaagatttggttagcttcaatgtgttggagattcgagaaccaatccatatgggtcaaaggatcgcatctttccatctcgagacacggaagactggaagcggtgagtgggagagagttgtgagcggcacgacggttggtaacaaaaggcttttacggtttctgaatgttgttgagtcgcggtctctaaagcttgtggtggacaaagcgaggaccgacccacttatatcgtacctcggactctacatggataagttttcgggttctagtagaaacacaacaaagataacaatcacaaggacactaaaggaagagcagcaactacatgatttgtaa

SEQ ID NO: 72670 - protein, 506 aa, Arabidopsis thaliana
  peptide (1)..(506): Ceres Seq. ID no. 4943677
MNSQITLFFFFFSILSLSQISNSSSLLKPHPCPILPLPSSQQLQWQLGSMAMFLHFGPNTFTDSEWGTGKANPSIFNPTHLNASQWVQIAKDSGFSRVILTAKHHDGFCLWPSEYTDYSVKSSQWRNGAGDVVAELASAAKEAGIGLGLYLSPWDRHEQCYGKTLEYNEFYLSQMTELLTKYGEIKEVWLDGAKGDGEKDMEYFFDTWFSLIHQLQPKAVIFSDAGPDVRWIGDEAGLAGSTCWSLFNRTNAKIGDTEPSYSQEGDGYGQDWVPAECDVSIRPGWFWHASESPKPAVQLLDIYYNSVGRNCLFLLNVPPNSSGLISEQDIKVLEEFSEMKNSIFSNNLARKAFVNSSSIRGDQSSQFGPKNVLEEGLDKYWAPEENQNEWVLYLEFKDLVSFNVLEIREPIHMGQRIASFHLETRKTGSGEWERVVSGTTVGNKRLLRFLNVVESRSLKLVVDKARTDPLISYLGLYMDKFSGSSRNTTKITITRTLKEEQQLHDL

SEQ ID NO: 72671 - protein, 457 aa, Arabidopsis thaliana
  peptide (1)..(457): Ceres Seq. ID no. 4943678
MAMFLHFGPNTFTDSEWGTGKANPSIFNPTHLNASQWVQIAKDSGFSRVILTAKHHDGFCLWPSEYTDYSVKSSQWRNGAGDVVAELASAAKEAGIGLGLYLSPWDRHEQCYGKTLEYNEFYLSQMTELLTKYGEIKEVWLDGAKGDGEKDMEYFFDTWFSLIHQLQPKAVIFSDAGPDVRWIGDEAGLAGSTCWSLFNRTNAKIGDTEPSYSQEGDGYGQDWVPAECDVSIRPGWFWHASESPKPAVQLLDIYYNSVGRNCLFLLNVPPNSSGLISEQDIKVLEEFSEMKNSIFSNNLARKAFVNSSSIRGDQSSQFGPKNVLEEGLDKYWAPEENQNEWVLYLEFKDLVSFNVLEIREPIHMGQRIASFHLETRKTGSGEWERVVSGTTVGNKRLLRFLNVVESRSLKLVVDKARTDPLISYLGLYMDKFSGSSRNTTKITITRTLKEEQQLHDL

SEQ ID NO: 72672 - protein, 455 aa, Arabidopsis thaliana
  peptide (1)..(455): Ceres Seq. ID no. 4943679
MFLHFGPNTFTDSEWGTGKANPSIFNPTHLNASQWVQIAKDSGFSRVILTAKHHDGFCLWPSEYTDYSVKSSQWRNGAGDVVAELASAAKEAGIGLGLYLSPWDRHEQCYGKTLEYNEFYLSQMTELLTKYGEIKEVWLDGAKGDGEKDMEYFFDTWFSLIHQLQPKAVIFSDAGPDVRWIGDEAGLAGSTCWSLFNRTNAKIGDTEPSYSQEGDGYGQDWVPAECDVSIRPGWFWHASESPKPAVQLLDIYYNSVGRNCLFLLNVPPNSSGLISEQDIKVLEEFSEMKNSIFSNNLARKAFVNSSSIRGDQSSQFGPKNVLEEGLDKYWAPEENQNEWVLYLEFKDLVSFNVLEIREPIHMGQRIASFHLETRKTGSGEWERVVSGTTVGNKRLLRFLNVVESRSLKLVVDKARTDPLISYLGLYMDKFSGSSRNTTKITITRTLKEEQQLHDL

SEQ ID NO: 72673 - DNA, 3375 bp, Arabidopsis thaliana
  misc_feature (1)..(3375): Ceres Seq. ID no. 4943891
  misc_feature (1)..(3375): Ortholog of  Ceres SEQ ID NO 13656160 as cited in SEQ ID NO 64905
atgttcgtcagaaaatttctgcagaaatcctccggcggtcagaatcctcctcctcctatagctcctccgcctcggggatgtttgatggcagaagatttggatcctcatattatcacccactctgggataccttcgacggcgtctcttcttgcctttgaccctattcaatgcctcttggctgtgggaacactagatggaaggataaaagtgattggtggcgataacatcgaggcaattcttgcatctcctaagcagttacctttcaaaaacttagagttcatgcagaaccaaggctttctggttagcatctcaaatgaaaacgagattcaggtttgggacttggatcttaggcaaccagcatcaagcttaaagtgggagtcaaacattactgcgtttgcaatccttcatggcactggttacatgtatgttggtgatgagtacggtatggtgtctgttctaaactacagcgctgacgaagggaaattactgcagcttccttattatgttccaactgatgctttatctgaagcagcggggctttcatctcctattgattatccggttgttggacttctttcccagccttgttcaaagggaactagattgttgattgcattttcaaatggattactttttctttgggatgcatcagaagatcatgtcgtgttagttcgggggaacaaagatctacctgtggagggtaaaacagttgctgattctcttgaagcttcacatgatgagctttccaatcttgaactcgatggaaaagagataagttctttgtgttgggcatcaactgatggttcagttcttgctgttggctatgtggatggggatatattattttgggacttttctgatgggcaaaaggggaagccatctaatcacgttgttaagttacagttgtcttcggctgagaaaagacttcctgtcattgttatgcattggtgtttggatgtatcccgcaagagtagtggtggaaaactcttcatctatggtggtgatatcattggatctgacgaagtacttacgatgttaggtcttgattggtcttctggtatgggaggtctgaaatgtgttggccgtgctgacctgacccttagtggttcatttgctgatatggtcttgtctccaattgccagttcaaggcagagtggggtgtttttatttctgttgacaaatccaggacaactgcaagcatatgacgatacctctctggcttctctgatgtctcagaaagagaataagatttctgtttctccactgccatatccaatggttgtaccaacgatggatccacatatgacagtagcaacgttttctgcattaaatgtgaatgataaaacgtcattagctctttctgagatagtcttagctgcaaaagctcgaacccctcgtaccccatccggagaaagtgcacaatggcctctgacaggtggtgttccaagccacgttgatgactacaagcttgaaagactttacatggcaggatatcaagatgggtctatgcgaatatgggatgcaacctatccatgtctgtcccttatttatattttggagccaaaggcaagtgttattgacataactggagtagatgcatctgtaacggcattttgcttctgctctaagacttcttgtttggctgttggtaacgaatgtggtatggttcgcctatacaagttggtcggccatacaagtggaggaactttggaagttgttaccaacactgagaagaaaggtttggctattgttacaacgttgacactatggatttgttatgctttatctcatgctgttggttcattacttgtagctcaccatttgcatcaagaagatggtcctcaatggttggctgcgttttccttcctgagttccccagtgtgcaccctgcaatttgtacagtctacaagaaggcttgccgtgggatttaaatgtggcaaggttgcagtgcttgacattggtgtgccgtcagtattatttgttacaaatagcttatctgactcaggttctccgatcaagtcactctatgtgaaatcctcttcagctccaacaggctcaaaaagtgatccaactgatcacaactccataaattctgaagatgatttactcttgtgtgcaatgaccaaagatggacagaccattcttttggatggcaatactgggaaaatacttgcctcttgcctgagacctctaaagaacccaactgcgatttgtatgcacattatagagaactgctatgaaaactatgaaacgcccagtgaaaaaccagctgaaaatccatctgggaaggataaacatgagaacaaatctcatataatcaaagctagtgagagtcattcaccagacggtgaacagaatgctgtcacagaaacaaaacttattgatcagatatttgcgaattcattatttctcatgtgttctgaggatgcactgcgcttgtatactgtaaagtctctatctcagggaagtcttgagagcattatggaggtaaatcttccaaggccgtgttgctggatgggaatcctaaaaaaagatggaagggaatgtgcagtactcctgttttaccgaacagggcatattgaaataagatctttcccgaatcttgaagttgtgggagagagctctttgctgtcacttcttaggtggaacttcaagcctaacatggagaagacagtatgttcagatgatttcggccatgtcgtcctggtaaatggttgtgaagttgccatcctttcgtttttggcccacgcaaacggcttcaggctcccagagtctttacctttgcttcatgacaaagtccttgcagcagctgctgacgctacctttagccatatctctgttcataagaaaaatcatgatggcgctcccaaattcctaagtaacattatcaaaggcttcagatcaagcactgaacagaagatggaccaagtacaagatttctcccacctggggaacatcttttctaatccaccatacttaaaaccttctgataccggtggcgacgacgaaaagattgttgagctaaacatagatgacatcgagatagatgaacctgtgatcatcttgccgttgacagagaaagacaaaaaagaaaagaaagataagagaacggataaggaaaagctgttcgacggtgcatccagcgatgcacaacccaaaacaagaacagtggatgaaattaagtccaaatacagaaaagctggggaaacctcagcaatagcttcacaagcgaaggacaaacttcatgagcggggagaaaaactcgagagaatcagccaacgcacagctgagcttcaagacaatgctgagaactttgcatccatggcacatgaacttgctaagcaaatggagaagcgaaaatggtggaacatatga

SEQ ID NO: 72674 - protein, 1124 aa, Arabidopsis thaliana
  peptide (1)..(1124): Ceres Seq. ID no. 4943892
MFVRKFLQKSSGGQNPPPPIAPPPRGCLMAEDLDPHIITHSGIPSTASLLAFDPIQCLLAVGTLDGRIKVIGGDNIEAILASPKQLPFKNLEFMQNQGFLVSISNENEIQVWDLDLRQPASSLKWESNITAFAILHGTGYMYVGDEYGMVSVLNYSADEGKLLQLPYYVPTDALSEAAGLSSPIDYPVVGLLSQPCSKGTRLLIAFSNGLLFLWDASEDHVVLVRGNKDLPVEGKTVADSLEASHDELSNLELDGKEISSLCWASTDGSVLAVGYVDGDILFWDFSDGQKGKPSNHVVKLQLSSAEKRLPVIVMHWCLDVSRKSSGGKLFIYGGDIIGSDEVLTMLGLDWSSGMGGLKCVGRADLTLSGSFADMVLSPIASSRQSGVFLFLLTNPGQLQAYDDTSLASLMSQKENKISVSPLPYPMVVPTMDPHMTVATFSALNVNDKTSLALSEIVLAAKARTPRTPSGESAQWPLTGGVPSHVDDYKLERLYMAGYQDGSMRIWDATYPCLSLIYILEPKASVIDITGVDASVTAFCFCSKTSCLAVGNECGMVRLYKLVGHTSGGTLEVVTNTEKKGLAIVTTLTLWICYALSHAVGSLLVAHHLHQEDGPQWLAAFSFLSSPVCTLQFVQSTRRLAVGFKCGKVAVLDIGVPSVLFVTNSLSDSGSPIKSLYVKSSSAPTGSKSDPTDHNSINSEDDLLLCAMTKDGQTILLDGNTGKILASCLRPLKNPTAICMHIIENCYENYETPSEKPAENPSGKDKHENKSHIIKASESHSPDGEQNAVTETKLIDQIFANSLFLMCSEDALRLYTVKSLSQGSLESIMEVNLPRPCCWMGILKKDGRECAVLLFYRTGHIEIRSFPNLEVVGESSLLSLLRWNFKPNMEKTVCSDDFGHVVLVNGCEVAILSFLAHANGFRLPESLPLLHDKVLAAAADATFSHISVHKKNHDGAPKFLSNIIKGFRSSTEQKMDQVQDFSHLGNIFSNPPYLKPSDTGGDDEKIVELNIDDIEIDEPVIILPLTEKDKKEKKDKRTDKEKLFDGASSDAQPKTRTVDEIKSKYRKAGETSAIASQAKDKLHERGEKLERISQRTAELQDNAENFASMAHELAKQMEKRKWWNI

SEQ ID NO: 72675 - protein, 1096 aa, Arabidopsis thaliana
  peptide (1)..(1096): Ceres Seq. ID no. 4943893
MAEDLDPHIITHSGIPSTASLLAFDPIQCLLAVGTLDGRIKVIGGDNIEAILASPKQLPFKNLEFMQNQGFLVSISNENEIQVWDLDLRQPASSLKWESNITAFAILHGTGYMYVGDEYGMVSVLNYSADEGKLLQLPYYVPTDALSEAAGLSSPIDYPVVGLLSQPCSKGTRLLIAFSNGLLFLWDASEDHVVLVRGNKDLPVEGKTVADSLEASHDELSNLELDGKEISSLCWASTDGSVLAVGYVDGDILFWDFSDGQKGKPSNHVVKLQLSSAEKRLPVIVMHWCLDVSRKSSGGKLFIYGGDIIGSDEVLTMLGLDWSSGMGGLKCVGRADLTLSGSFADMVLSPIASSRQSGVFLFLLTNPGQLQAYDDTSLASLMSQKENKISVSPLPYPMVVPTMDPHMTVATFSALNVNDKTSLALSEIVLAAKARTPRTPSGESAQWPLTGGVPSHVDDYKLERLYMAGYQDGSMRIWDATYPCLSLIYILEPKASVIDITGVDASVTAFCFCSKTSCLAVGNECGMVRLYKLVGHTSGGTLEVVTNTEKKGLAIVTTLTLWICYALSHAVGSLLVAHHLHQEDGPQWLAAFSFLSSPVCTLQFVQSTRRLAVGFKCGKVAVLDIGVPSVLFVTNSLSDSGSPIKSLYVKSSSAPTGSKSDPTDHNSINSEDDLLLCAMTKDGQTILLDGNTGKILASCLRPLKNPTAICMHIIENCYENYETPSEKPAENPSGKDKHENKSHIIKASESHSPDGEQNAVTETKLIDQIFANSLFLMCSEDALRLYTVKSLSQGSLESIMEVNLPRPCCWMGILKKDGRECAVLLFYRTGHIEIRSFPNLEVVGESSLLSLLRWNFKPNMEKTVCSDDFGHVVLVNGCEVAILSFLAHANGFRLPESLPLLHDKVLAAAADATFSHISVHKKNHDGAPKFLSNIIKGFRSSTEQKMDQVQDFSHLGNIFSNPPYLKPSDTGGDDEKIVELNIDDIEIDEPVIILPLTEKDKKEKKDKRTDKEKLFDGASSDAQPKTRTVDEIKSKYRKAGETSAIASQAKDKLHERGEKLERISQRTAELQDNAENFASMAHELAKQMEKRKWWNI

SEQ ID NO: 72676 - protein, 1031 aa, Arabidopsis thaliana
  peptide (1)..(1031): Ceres Seq. ID no. 4943894
MQNQGFLVSISNENEIQVWDLDLRQPASSLKWESNITAFAILHGTGYMYVGDEYGMVSVLNYSADEGKLLQLPYYVPTDALSEAAGLSSPIDYPVVGLLSQPCSKGTRLLIAFSNGLLFLWDASEDHVVLVRGNKDLPVEGKTVADSLEASHDELSNLELDGKEISSLCWASTDGSVLAVGYVDGDILFWDFSDGQKGKPSNHVVKLQLSSAEKRLPVIVMHWCLDVSRKSSGGKLFIYGGDIIGSDEVLTMLGLDWSSGMGGLKCVGRADLTLSGSFADMVLSPIASSRQSGVFLFLLTNPGQLQAYDDTSLASLMSQKENKISVSPLPYPMVVPTMDPHMTVATFSALNVNDKTSLALSEIVLAAKARTPRTPSGESAQWPLTGGVPSHVDDYKLERLYMAGYQDGSMRIWDATYPCLSLIYILEPKASVIDITGVDASVTAFCFCSKTSCLAVGNECGMVRLYKLVGHTSGGTLEVVTNTEKKGLAIVTTLTLWICYALSHAVGSLLVAHHLHQEDGPQWLAAFSFLSSPVCTLQFVQSTRRLAVGFKCGKVAVLDIGVPSVLFVTNSLSDSGSPIKSLYVKSSSAPTGSKSDPTDHNSINSEDDLLLCAMTKDGQTILLDGNTGKILASCLRPLKNPTAICMHIIENCYENYETPSEKPAENPSGKDKHENKSHIIKASESHSPDGEQNAVTETKLIDQIFANSLFLMCSEDALRLYTVKSLSQGSLESIMEVNLPRPCCWMGILKKDGRECAVLLFYRTGHIEIRSFPNLEVVGESSLLSLLRWNFKPNMEKTVCSDDFGHVVLVNGCEVAILSFLAHANGFRLPESLPLLHDKVLAAAADATFSHISVHKKNHDGAPKFLSNIIKGFRSSTEQKMDQVQDFSHLGNIFSNPPYLKPSDTGGDDEKIVELNIDDIEIDEPVIILPLTEKDKKEKKDKRTDKEKLFDGASSDAQPKTRTVDEIKSKYRKAGETSAIASQAKDKLHERGEKLERISQRTAELQDNAENFASMAHELAKQMEKRKWWNI

SEQ ID NO: 72677 - DNA, 1701 bp, Arabidopsis thaliana
  misc_feature (1)..(1701): Ceres Seq. ID no. 4944047
  misc_feature (1)..(1701): Ortholog of  Ceres SEQ ID NO 13639469 as cited in SEQ ID NO 54825
  misc_feature (1)..(1701): Ortholog of  Ceres SEQ ID NO 15179301 as cited in SEQ ID NO 0
atggcagctcaaggtttgttattgattttcttattcttctctagctcttcctcacttgatgataacagtaatcgaatcgagttcacttgtttgtttttgttggtgacaggaggtgattcatatgaggaagcgttggctgctttgtcgtctttgatcacgaaacgaagtcgtgctgataagagcaataaaggggatcgctttgagttagtctttgattatctcaagctacttgacctggaagaagacattttaaagatgaatgttattcatgtcgctggtaccaaaggcaagggatccacatgtacctttacagagtctattattcgaaactatggctttcgaactggactcttcacttcacctcacctcattgatgtccgggaaagatttcgtttggatggtgtggacataagtgaagagaaatttttgggatatttctggtggtgctataacaggctcaagttttggtacttagagaaattgtattattggaactattttcatcgagggggtggtgatgcggtagagctcatgtatagtgtcttccctgtagatgctgctatattggaggttggattaggtggaaagtttgatgccaccaatgcggttcagaaacctgtggtatgtggtatttcttcactcggatatgaccacatggaaattctaggtgatacacttggaaaaattgctggtgagaaggctggaattttcaagcttggagttccagctttcacagtgccccaacctgatgaagccatgcgtgtccttgaagagaaagcttccgaaacagaagtgaatctcgaagtggtgcagccactaaccgcaaggctgttaagtggtcagaaacttgggcttgatggggaacaccaatatgtcaatgctggtctagcagtttcgcttgcctctatctggcttcagcaaattggtaaactagaagttccgagtcggactcagatgagtattctgcctgagaaattcatcaaagggttagctacagcgagtttgcaaggacgagcacaggtcgtccctgatcaatatactgaatctcggacttcaggagatctagtattttatctggatggagctcacagtccagaaagcatggaagcatgcgccaaatggttttcggttgcggttaagggagacaaccagtcagggagttcaggacatttgatattgttgttcaattgtatgtcagttcgggacccaaatctactgcttccacatctaaagaatatgtgcgcaaaatacggtgtcaatttcaagaaggcattgtttgtaccaaacatgtcggtgtatcataaggttggtacagcagctgatttgccagagaatgatccacaggttgacttgtcatggcagttcacacttcagaaagtgtgggaaagccttgtgcagagtgaaagagatggagaaaaagatggtgaaagtgatggaaacagtgaggtgtttacttcactacccatggcaataaaatgtctaagggacactgtacatgagagtagctcagccacacgtttccagggactgtttgtgtgtgcaggtccttgtaactggttcgttacatcttgtgggcgatgtactgagattaatcagaaaatgaagagaaacaaacacacttcacttttcaaatttcaatacacgagtcgtcatccaccaatcaccgtacccactgtggaagaggatggcatttcttattaa

SEQ ID NO: 72678 - protein, 566 aa, Arabidopsis thaliana
  peptide (1)..(566): Ceres Seq. ID no. 4944048
MAAQGLLLIFLFFSSSSSLDDNSNRIEFTCLFLLVTGGDSYEEALAALSSLITKRSRADKSNKGDRFELVFDYLKLLDLEEDILKMNVIHVAGTKGKGSTCTFTESIIRNYGFRTGLFTSPHLIDVRERFRLDGVDISEEKFLGYFWWCYNRLKFWYLEKLYYWNYFHRGGGDAVELMYSVFPVDAAILEVGLGGKFDATNAVQKPVVCGISSLGYDHMEILGDTLGKIAGEKAGIFKLGVPAFTVPQPDEAMRVLEEKASETEVNLEVVQPLTARLLSGQKLGLDGEHQYVNAGLAVSLASIWLQQIGKLEVPSRTQMSILPEKFIKGLATASLQGRAQVVPDQYTESRTSGDLVFYLDGAHSPESMEACAKWFSVAVKGDNQSGSSGHLILLFNCMSVRDPNLLLPHLKNMCAKYGVNFKKALFVPNMSVYHKVGTAADLPENDPQVDLSWQFTLQKVWESLVQSERDGEKDGESDGNSEVFTSLPMAIKCLRDTVHESSSATRFQGLFVCAGPCNWFVTSCGRCTEINQKMKRNKHTSLFKFQYTSRHPPITVPTVEEDGISY

SEQ ID NO: 72679 - protein, 481 aa, Arabidopsis thaliana
  peptide (1)..(481): Ceres Seq. ID no. 4944049
MNVIHVAGTKGKGSTCTFTESIIRNYGFRTGLFTSPHLIDVRERFRLDGVDISEEKFLGYFWWCYNRLKFWYLEKLYYWNYFHRGGGDAVELMYSVFPVDAAILEVGLGGKFDATNAVQKPVVCGISSLGYDHMEILGDTLGKIAGEKAGIFKLGVPAFTVPQPDEAMRVLEEKASETEVNLEVVQPLTARLLSGQKLGLDGEHQYVNAGLAVSLASIWLQQIGKLEVPSRTQMSILPEKFIKGLATASLQGRAQVVPDQYTESRTSGDLVFYLDGAHSPESMEACAKWFSVAVKGDNQSGSSGHLILLFNCMSVRDPNLLLPHLKNMCAKYGVNFKKALFVPNMSVYHKVGTAADLPENDPQVDLSWQFTLQKVWESLVQSERDGEKDGESDGNSEVFTSLPMAIKCLRDTVHESSSATRFQGLFVCAGPCNWFVTSCGRCTEINQKMKRNKHTSLFKFQYTSRHPPITVPTVEEDGISY

SEQ ID NO: 72680 - protein, 389 aa, Arabidopsis thaliana
  peptide (1)..(389): Ceres Seq. ID no. 4944050
MYSVFPVDAAILEVGLGGKFDATNAVQKPVVCGISSLGYDHMEILGDTLGKIAGEKAGIFKLGVPAFTVPQPDEAMRVLEEKASETEVNLEVVQPLTARLLSGQKLGLDGEHQYVNAGLAVSLASIWLQQIGKLEVPSRTQMSILPEKFIKGLATASLQGRAQVVPDQYTESRTSGDLVFYLDGAHSPESMEACAKWFSVAVKGDNQSGSSGHLILLFNCMSVRDPNLLLPHLKNMCAKYGVNFKKALFVPNMSVYHKVGTAADLPENDPQVDLSWQFTLQKVWESLVQSERDGEKDGESDGNSEVFTSLPMAIKCLRDTVHESSSATRFQGLFVCAGPCNWFVTSCGRCTEINQKMKRNKHTSLFKFQYTSRHPPITVPTVEEDGISY

SEQ ID NO: 72681 - DNA, 1716 bp, Arabidopsis thaliana
  misc_feature (1)..(1716): Ceres Seq. ID no. 4944063
  misc_feature (1)..(1716): Ortholog of  Ceres SEQ ID NO 13574398 as cited in SEQ ID NO 0
atggagaatttagtgaagagctgcgcagggatcgagaagaaaagaagcaatttgactccatcgatggaagatatacttacagagtcaaaggagagaagcagcactagcggagcgagctacgaaagctcctccaccaccaccgtcgcttcgtcttctccaccaccaccaccgtcgcagattctggatgtggagatgatgaaggagagatttgcaaagttgttacttggtgaagatatgtcaggttctggtaaaggtgtgtgtacggctttagctatctccaacgccataacaaatctctgtgctacgattttcgggcaactatggagattagagccactttcaagcgaaaagaaggagatgtggagaagggaaatggagtggattcttagtgttagtgatcacatcgtcgagttaacaccttcaacacaaacttatccagacggcaacaagtttgaggtcatgacttgtcgaccaagatttgatcttttcatcaacctccctgctctccgtaaactagacaatatgcttctcgatatattggcgagtttcaagaaaactgagttctggtatgttgatcaagggatcgttgcttcggaaaacgatggctcagcttctttccgcagaaagattcagcgccaagaggagaaatggtggttgcctgttcctcgtttagcaccgaatggtcttactgaagaagcaagaacagaattgaatcataagagggaatgtgcgacgcagatacttaaagctgcaatggctattaacagccttgctttaaccgaaatggatgttcctaaatcataccttgaaacccttccaaagaacggtaggtcctgccttggggatgttatctacaggtatgtaacatctgacaaattttctgcggagtctcttctcgattgccttgatctgtcctctgagcatattgctcttgatatcgcaaaccgtgtggaagcttcgatatatgtttggaggagaagagttcaaacaaaacttggagtcaacaataatacttcaagcactactccaaagttaacatgggaaatggtcaaagaactaatggctgctggtgacaaaaggggattgcttgtggagagatcggaaactctcttacgttgcttgaagcagcggtttccttctctaacgcagacttctctagacataagcaagattcaatggaacaaggatattgggaaatcaatcctcgaaagctactcaagggctttggagagcttagcatcaaacatcatagcacgaatcgatgatttactctacgtggacgacttaacaaagcaatcagatgataacaatcttttgtcaagtccagcggtcagcagcattatagctcacaagaaagtagtaccactcccttatctaatatctgcatcaggaactccatatagaacaagcttctcaacaacaccaggcttctctccttcaatgattagccccaagaaaggagagaggagaacaccttactccagcaaggacactaacaaaatcattgagaaaggtcttccttctcgaggatatggagtgagaagagtcttgaacaattatcttggcatggaatcaaaactgaaaatatgcgttaatccgtcagataatgcagatacagcagtgattaaccaaatcagcaaagacgtggaagaagagaagaaaagaaactcaacatcagtccatcaaaagggtcctccaaagtacactgtctcttaa

SEQ ID NO: 72682 - protein, 571 aa, Arabidopsis thaliana
  peptide (1)..(571): Ceres Seq. ID no. 4944064
MENLVKSCAGIEKKRSNLTPSMEDILTESKERSSTSGASYESSSTTTVASSSPPPPPSQILDVEMMKERFAKLLLGEDMSGSGKGVCTALAISNAITNLCATIFGQLWRLEPLSSEKKEMWRREMEWILSVSDHIVELTPSTQTYPDGNKFEVMTCRPRFDLFINLPALRKLDNMLLDILASFKKTEFWYVDQGIVASENDGSASFRRKIQRQEEKWWLPVPRLAPNGLTEEARTELNHKRECATQILKAAMAINSLALTEMDVPKSYLETLPKNGRSCLGDVIYRYVTSDKFSAESLLDCLDLSSEHIALDIANRVEASIYVWRRRVQTKLGVNNNTSSTTPKLTWEMVKELMAAGDKRGLLVERSETLLRCLKQRFPSLTQTSLDISKIQWNKDIGKSILESYSRALESLASNIIARIDDLLYVDDLTKQSDDNNLLSSPAVSSIIAHKKVVPLPYLISASGTPYRTSFSTTPGFSPSMISPKKGERRTPYSSKDTNKIIEKGLPSRGYGVRRVLNNYLGMESKLKICVNPSDNADTAVINQISKDVEEEKKRNSTSVHQKGPPKYTVS

SEQ ID NO: 72683 - protein, 550 aa, Arabidopsis thaliana
  peptide (1)..(550): Ceres Seq. ID no. 4944065
MEDILTESKERSSTSGASYESSSTTTVASSSPPPPPSQILDVEMMKERFAKLLLGEDMSGSGKGVCTALAISNAITNLCATIFGQLWRLEPLSSEKKEMWRREMEWILSVSDHIVELTPSTQTYPDGNKFEVMTCRPRFDLFINLPALRKLDNMLLDILASFKKTEFWYVDQGIVASENDGSASFRRKIQRQEEKWWLPVPRLAPNGLTEEARTELNHKRECATQILKAAMAINSLALTEMDVPKSYLETLPKNGRSCLGDVIYRYVTSDKFSAESLLDCLDLSSEHIALDIANRVEASIYVWRRRVQTKLGVNNNTSSTTPKLTWEMVKELMAAGDKRGLLVERSETLLRCLKQRFPSLTQTSLDISKIQWNKDIGKSILESYSRALESLASNIIARIDDLLYVDDLTKQSDDNNLLSSPAVSSIIAHKKVVPLPYLISASGTPYRTSFSTTPGFSPSMISPKKGERRTPYSSKDTNKIIEKGLPSRGYGVRRVLNNYLGMESKLKICVNPSDNADTAVINQISKDVEEEKKRNSTSVHQKGPPKYTVS

SEQ ID NO: 72684 - protein, 507 aa, Arabidopsis thaliana
  peptide (1)..(507): Ceres Seq. ID no. 4944066
MMKERFAKLLLGEDMSGSGKGVCTALAISNAITNLCATIFGQLWRLEPLSSEKKEMWRREMEWILSVSDHIVELTPSTQTYPDGNKFEVMTCRPRFDLFINLPALRKLDNMLLDILASFKKTEFWYVDQGIVASENDGSASFRRKIQRQEEKWWLPVPRLAPNGLTEEARTELNHKRECATQILKAAMAINSLALTEMDVPKSYLETLPKNGRSCLGDVIYRYVTSDKFSAESLLDCLDLSSEHIALDIANRVEASIYVWRRRVQTKLGVNNNTSSTTPKLTWEMVKELMAAGDKRGLLVERSETLLRCLKQRFPSLTQTSLDISKIQWNKDIGKSILESYSRALESLASNIIARIDDLLYVDDLTKQSDDNNLLSSPAVSSIIAHKKVVPLPYLISASGTPYRTSFSTTPGFSPSMISPKKGERRTPYSSKDTNKIIEKGLPSRGYGVRRVLNNYLGMESKLKICVNPSDNADTAVINQISKDVEEEKKRNSTSVHQKGPPKYTVS

SEQ ID NO: 72685 - DNA, 1023 bp, Arabidopsis thaliana
  misc_feature (1)..(1023): Ceres Seq. ID no. 4944172
  misc_feature (1)..(1023): Ortholog of  Ceres SEQ ID NO 12614972 as cited in SEQ ID NO 61986
  misc_feature (1)..(1023): Ortholog of  Ceres SEQ ID NO 12625706 as cited in SEQ ID NO 64144
  misc_feature (1)..(1023): Ortholog of  Ceres SEQ ID NO 13584933 as cited in SEQ ID NO 65009
  misc_feature (1)..(1023): Ortholog of  Ceres SEQ ID NO 12634984 as cited in SEQ ID NO 0
  misc_feature (1)..(1023): Ortholog of  Ceres SEQ ID NO 13599377 as cited in SEQ ID NO 0
atgtgtcacaagcccgagctccttaaggaaggcaaaagcgaaggccaagaagaagaagggctaagctacgagttccaagagatgttggactctcttcctaaggagagaggacggagaaatcgttacctttacttattccaagggtttcggtgccaagctaaggagattcaagctatcacgtctttccaaaaacattttcagtcccttccagacgacgttgtcctcgccaccatacctaaatctggcacaacctggttaaaagctttaactttcaccatccttacccgtcatcggtttgatccggtttcctcatcaagttccgaccaccctcttctcacatccaaccctcacgacctcgtacctttcttcgagtacaagctttacgccaacggaaatgttcccgatctctcgggtctagccagtccaagaacattcgcaacccacgtaccgttcggtgcccttaaggattcggtcgagaatcccagtgtgaaggttgtgtacctgtgccggaacccgtttgacacattcatctccatgtggcattacatcaacaacatcacttccgagtcagtgagcgcagtcttgctagacgaagcttttgatctatattgccggggattactgatcggatttggcccgttttgggaacacatgttgggatactggagagagagcttgaagaggccagagaaagtcttatttttaaagtacgaggatctcaaagaagacatcgagaccaacttgaagaagctagcaagtttcttaggacttcctttcaccgaagaagaggaacaaaagggagttgtgaaagctatcgctgatctgtgtagctttgagaatctgaagaagttggaggtgaacaagtcaagcaaattgatccagaactatgagaaccggttcttgtttaggaaaggagaagtgagtgatttggttaactatttgtcgccatcacaagtggaaagattgtcagccttagtggatgacaagttagctggatctggtctcactttcagattgagttaa

SEQ ID NO: 72686 - protein, 340 aa, Arabidopsis thaliana
  peptide (1)..(340): Ceres Seq. ID no. 4944173
MCHKPELLKEGKSEGQEEEGLSYEFQEMLDSLPKERGRRNRYLYLFQGFRCQAKEIQAITSFQKHFQSLPDDVVLATIPKSGTTWLKALTFTILTRHRFDPVSSSSSDHPLLTSNPHDLVPFFEYKLYANGNVPDLSGLASPRTFATHVPFGALKDSVENPSVKVVYLCRNPFDTFISMWHYINNITSESVSAVLLDEAFDLYCRGLLIGFGPFWEHMLGYWRESLKRPEKVLFLKYEDLKEDIETNLKKLASFLGLPFTEEEEQKGVVKAIADLCSFENLKKLEVNKSSKLIQNYENRFLFRKGEVSDLVNYLSPSQVERLSALVDDKLAGSGLTFRLS

SEQ ID NO: 72687 - protein, 313 aa, Arabidopsis thaliana
  peptide (1)..(313): Ceres Seq. ID no. 4944174
MLDSLPKERGRRNRYLYLFQGFRCQAKEIQAITSFQKHFQSLPDDVVLATIPKSGTTWLKALTFTILTRHRFDPVSSSSSDHPLLTSNPHDLVPFFEYKLYANGNVPDLSGLASPRTFATHVPFGALKDSVENPSVKVVYLCRNPFDTFISMWHYINNITSESVSAVLLDEAFDLYCRGLLIGFGPFWEHMLGYWRESLKRPEKVLFLKYEDLKEDIETNLKKLASFLGLPFTEEEEQKGVVKAIADLCSFENLKKLEVNKSSKLIQNYENRFLFRKGEVSDLVNYLSPSQVERLSALVDDKLAGSGLTFRLS

SEQ ID NO: 72688 - DNA, 1194 bp, Arabidopsis thaliana
  misc_feature (1)..(1194): Ceres Seq. ID no. 4944298
  misc_feature (1)..(1194): Ortholog of  Ceres SEQ ID NO 13657647 as cited in SEQ ID NO 66399
atgttgcctaacgaagaacttgttccggtgaagaggattacaccccagtcatcgtggagttggatttccatagacgcgacgggaaaaaaaacggtgcttgacgttgacaaatatgtgattatgcaccgtgttcagatccacgctcgcgatctccggatacttgacccaaatctcttttacccttctgctattctgggtcgagaaagagccattgttcttaacttagagcatatcaaggcgatcatcactgccaaagaggattcgtcagatgaaaatcttattccaaccctggaggagtttcagacacgcttatctgttggaaacaaggcacacggtggtcaattagatggtgatgtggttgaagaagatgaatccgcgtttgaatttcgggcactagaggttgctttggaagctatttgtagcttcctagctgcaaggacaatagaattagagaagtctgcttatcctgctttggatgaacttaccttgaagttccatgacccgattgacagctcaggtccaaaaggtgagcaggaatcacttggaacagggtctatgtttagaaaagaaatatatttaggagttatgcataagataaaagagttcaaagactcattgaaagaaccatcaaaactggagtatatgcttttgggattataccgagtgaaagttgggtctaaatcagaatatgatgtggatttgcagataaaggatgagcttgaacagttgttggaagatgacgaagatatggctgaactctacctttcaaggaagctcgcgggtgcatcttcaccagctattgattctggtgaacacattaattggtatcctacgtccccaacaataggtgctaagatttccagagcaaagagccatttggtgaggtcagccacggttcgtggggacgacaaaaatgatgttgaagaagttgaaatgttgcttgagctacgcgagtatgtggatgagacagaagatttccttaatatccagttcgaaattattttaaccgctggaagcatctgtgtatcagtgtactctgtagttgttggcattctaggcatgaacattcctttcccgtggaacatcaaaaaacatatgttcaaatgggtggtgagcggcactgcaacagtttgcgcaatcttgttcgtgattataatgtcgttcgctcggtacaaaaagctctttggtttttga

SEQ ID NO: 72689 - protein, 397 aa, Arabidopsis thaliana
  peptide (1)..(397): Ceres Seq. ID no. 4944299
MLPNEELVPVKRITPQSSWSWISIDATGKKTVLDVDKYVIMHRVQIHARDLRILDPNLFYPSAILGRERAIVLNLEHIKAIITAKEDSSDENLIPTLEEFQTRLSVGNKAHGGQLDGDVVEEDESAFEFRALEVALEAICSFLAARTIELEKSAYPALDELTLKFHDPIDSSGPKGEQESLGTGSMFRKEIYLGVMHKIKEFKDSLKEPSKLEYMLLGLYRVKVGSKSEYDVDLQIKDELEQLLEDDEDMAELYLSRKLAGASSPAIDSGEHINWYPTSPTIGAKISRAKSHLVRSATVRGDDKNDVEEVEMLLELREYVDETEDFLNIQFEIILTAGSICVSVYSVVVGILGMNIPFPWNIKKHMFKWVVSGTATVCAILFVIIMSFARYKKLFGF

SEQ ID NO: 72690 - protein, 357 aa, Arabidopsis thaliana
  peptide (1)..(357): Ceres Seq. ID no. 4944300
MHRVQIHARDLRILDPNLFYPSAILGRERAIVLNLEHIKAIITAKEDSSDENLIPTLEEFQTRLSVGNKAHGGQLDGDVVEEDESAFEFRALEVALEAICSFLAARTIELEKSAYPALDELTLKFHDPIDSSGPKGEQESLGTGSMFRKEIYLGVMHKIKEFKDSLKEPSKLEYMLLGLYRVKVGSKSEYDVDLQIKDELEQLLEDDEDMAELYLSRKLAGASSPAIDSGEHINWYPTSPTIGAKISRAKSHLVRSATVRGDDKNDVEEVEMLLELREYVDETEDFLNIQFEIILTAGSICVSVYSVVVGILGMNIPFPWNIKKHMFKWVVSGTATVCAILFVIIMSFARYKKLFGF

SEQ ID NO: 72691 - protein, 212 aa, Arabidopsis thaliana
  peptide (1)..(212): Ceres Seq. ID no. 4944301
MFRKEIYLGVMHKIKEFKDSLKEPSKLEYMLLGLYRVKVGSKSEYDVDLQIKDELEQLLEDDEDMAELYLSRKLAGASSPAIDSGEHINWYPTSPTIGAKISRAKSHLVRSATVRGDDKNDVEEVEMLLELREYVDETEDFLNIQFEIILTAGSICVSVYSVVVGILGMNIPFPWNIKKHMFKWVVSGTATVCAILFVIIMSFARYKKLFGF

SEQ ID NO: 72692 - DNA, 1206 bp, Arabidopsis thaliana
  misc_feature (1)..(1206): Ceres Seq. ID no. 4944309
  misc_feature (1)..(1206): Ortholog of  Ceres SEQ ID NO 15178767 as cited in SEQ ID NO 55317
atgtcacctgacggagaacttgttccggtggattcatcggcggtagtcacggcgaagaggaagacatctcagttatcaaggagttggatttccatagacgccacggggcaaaaaactgtgcttgacgttgacaaacacgtgattatgcaccgtgttcaaatccacgctcgtgatctccggatccttgacccgaatctattttacccttctgctattttgggtcgagaaagagccattgttcttaacttagagcatatcaaggcgattatcactgccgaagaggtcagaatcatttcttactggcttgtagccaaatattcgtcagatgaaaatgttatccccgtcctggaggagtttcagagaagattacctgtaggaaacgaggcacatggtgttcacggagatggtgatttgggtgaagaagatgaatccccgtttgaattccgggcgctagaggtggccttggaagctatttgtagttttctagctgcaaggacaacagaactagagaagtttgcttatcctgctttggatgaacttaccttgaagataagtagccgtaacttggaaagagttcgtaaattgaagagtgccatgacccgtttgacagctcgggtccaaaaggtaagggatgagcttgaacagttgttggatgatgatggtgatatggctgatctctaccttacaaggaagcttgttggtgcatcttcatctgtcagcgtttcagatgaacccatttggtatcctacttccccaacaataggttctatgatttccagagcaagtagagtgagtttagtcacggttcgtggagacgacgaaactgatgttgaagagcttgaaatgttgcttgaggcatacttcatgcaaatagacagcactttgaacaaattaaccgagctacgcgagtatattgatgacacagaggattacattaacatccaggctataatcactgtttatttgcagttagacaatcatcgaaatcagctgattcagttagagctaatgttaagcgcaggaaccgtctgtgtatcagtgtactctatgatcgccggaatattcggcatgaacattcccaacacatggaaccacgaccatggttacattttcaaatgggtcgtaagtctcacgggaacattttgcatagtcttgttcgtgattatactgtcgtacgctcggtttagaggactcatcggatcttaa

SEQ ID NO: 72693 - protein, 401 aa, Arabidopsis thaliana
  peptide (1)..(401): Ceres Seq. ID no. 4944310
MSPDGELVPVDSSAVVTAKRKTSQLSRSWISIDATGQKTVLDVDKHVIMHRVQIHARDLRILDPNLFYPSAILGRERAIVLNLEHIKAIITAEEVRIISYWLVAKYSSDENVIPVLEEFQRRLPVGNEAHGVHGDGDLGEEDESPFEFRALEVALEAICSFLAARTTELEKFAYPALDELTLKISSRNLERVRKLKSAMTRLTARVQKVRDELEQLLDDDGDMADLYLTRKLVGASSSVSVSDEPIWYPTSPTIGSMISRASRVSLVTVRGDDETDVEELEMLLEAYFMQIDSTLNKLTELREYIDDTEDYINIQAIITVYLQLDNHRNQLIQLELMLSAGTVCVSVYSMIAGIFGMNIPNTWNHDHGYIFKWVVSLTGTFCIVLFVIILSYARFRGLIGS

SEQ ID NO: 72694 - protein, 353 aa, Arabidopsis thaliana
  peptide (1)..(353): Ceres Seq. ID no. 4944311
MHRVQIHARDLRILDPNLFYPSAILGRERAIVLNLEHIKAIITAEEVRIISYWLVAKYSSDENVIPVLEEFQRRLPVGNEAHGVHGDGDLGEEDESPFEFRALEVALEAICSFLAARTTELEKFAYPALDELTLKISSRNLERVRKLKSAMTRLTARVQKVRDELEQLLDDDGDMADLYLTRKLVGASSSVSVSDEPIWYPTSPTIGSMISRASRVSLVTVRGDDETDVEELEMLLEAYFMQIDSTLNKLTELREYIDDTEDYINIQAIITVYLQLDNHRNQLIQLELMLSAGTVCVSVYSMIAGIFGMNIPNTWNHDHGYIFKWVVSLTGTFCIVLFVIILSYARFRGLIGS

SEQ ID NO: 72695 - protein, 203 aa, Arabidopsis thaliana
  peptide (1)..(203): Ceres Seq. ID no. 4944312
MTRLTARVQKVRDELEQLLDDDGDMADLYLTRKLVGASSSVSVSDEPIWYPTSPTIGSMISRASRVSLVTVRGDDETDVEELEMLLEAYFMQIDSTLNKLTELREYIDDTEDYINIQAIITVYLQLDNHRNQLIQLELMLSAGTVCVSVYSMIAGIFGMNIPNTWNHDHGYIFKWVVSLTGTFCIVLFVIILSYARFRGLIGS

SEQ ID NO: 72696 - DNA, 420 bp, Arabidopsis thaliana
  misc_feature (1)..(420): Ceres Seq. ID no. 4944327
  misc_feature (1)..(420): Ortholog of  Ceres SEQ ID NO 15173047 as cited in SEQ ID NO 61816
  misc_feature (1)..(420): Ortholog of  Ceres SEQ ID NO 13591134 as cited in SEQ ID NO 63820
  misc_feature (1)..(420): Ortholog of  Ceres SEQ ID NO 15178530 as cited in SEQ ID NO 67823
  misc_feature (1)..(420): Ortholog of  Ceres SEQ ID NO 13599565 as cited in SEQ ID NO 0
atgcctcgaggaagctccggaggaagatctagctaccgtccttctcgccctgcagctgcacgaagcccgcctcctcaatctgtgaaccgtgctcctcctccagcaacagctcagcctagtagcggtggttctttcttaggcaatattggtgcatccataactgaaggtctggcttggggtactggaactgcatttggacacagggttgtggattctgtgatgggtccacgaacctttaagcacgaaaccgttgtttctcaggttccatctgctgcaaataccatgactgcttgtgacattcactccaaggctttccaagattgcgtcaaccattttggaagcgacatcagtaagtgccagttctacatggacatgctgagtgaatgcaagaagaattctggttccgtggtggctgcttaa

SEQ ID NO: 72697 - protein, 139 aa, Arabidopsis thaliana
  peptide (1)..(139): Ceres Seq. ID no. 4944328
MPRGSSGGRSSYRPSRPAAARSPPPQSVNRAPPPATAQPSSGGSFLGNIGASITEGLAWGTGTAFGHRVVDSVMGPRTFKHETVVSQVPSAANTMTACDIHSKAFQDCVNHFGSDISKCQFYMDMLSECKKNSGSVVAA

SEQ ID NO: 72698 - DNA, 2988 bp, Arabidopsis thaliana
  misc_feature (1)..(2988): Ceres Seq. ID no. 4944508
  misc_feature (1)..(2988): Ortholog of  Ceres SEQ ID NO 12586556 as cited in SEQ ID NO 64667
  misc_feature (1)..(2988): Ortholog of  Ceres SEQ ID NO 13660894 as cited in SEQ ID NO 67475
atgactaattgtgttcctctttcttttgttcagagctgcgttggacatagaggagctgctagattcttccattcccgattatataagaataggttagataaagatgtctacttgtgcaacaacctcatcaatgcttatcttgaaacgggtgattcggtttctgcacgtaaggtgtttgacgaaatgcctcttaggaactgtgtttcttgggcgtgtattgtttcaggatatagtcgtaatggagaacataaggaagctttagtgtttttgagagatatggttaaagaagggattttttctaatcaatacgcttttgttagtgttcttcgggcttgtcaggagataggttctgttgggattcttttcgggagacaaattcatggcctgatgttcaaactttcttatgcagtggatgcagttgtttctaatgtgctcatatcaatgtactggaaatgtatcgggtctgtcggttatgctctctgtgctttcggtgacatagaagttaagaattctgtttcatggaattcgattatttcggtttattcacaggctggggatcagagatctgcgtttaggattttctctagcatgcaatatgatggttctagaccaactgaatacacttttggtagtcttgtaactactgcttgttctttgactgaaccagatgttcgtttgctcgagcagatcatgtgcaccatacagaaatcagggttgctcacagatctttttgttggcagcggactggtgagtgcatttgcaaagtctggttcattgagttatgctaggaaggtttttaatcagatggaaacaagaaatgcggtcaccttaaatggtctaatggttggtctggtgcgacagaaatggggagaagaagcaactaaactctttatggatatgaatagcatgattgatgttagtcctgagtcatacgtgattctcctgagctcatttcctgagtattctctagcagaggaagttggtctgaaaaaaggcagagaggttcatggacatgtaataacaactggcttagttgacttcatggttggcattggaaatggccttgttaatatgtatgctaagtgcggctcaatagctgacgctagacgtgttttctatttcatgaccgataaagattctgtctcctggaactccatgatcactggtcttgaccaaaacggctgtttcatagaagcagttgaacgctacaaaagtatgagacgacatgacatcttgcctggaagtttcacactgattagttcgctaagctcatgcgcgagcttgaaatgggcaaaattaggacaacagattcatggagagagcctcaagttggggattgatttgaatgtttcagtttcaaatgcgcttatgacactgtatgcagagaccggctatctcaatgaatgccgtaagatattttcctcaatgccagagcatgatcaggtgtcttggaattctataataggagctttagcccgttcagaacggtcattacctgaagccgtggtatgtttcttgaatgcacaacgagcaggacagaaacttaatagaataaccttttcaagcgttctttcagccgtttcatccctttcatttggtgaactgggcaagcagatacacggactagctttaaagaacaatattgcagatgaagcaaccactgaaaatgcgcttatagcttgttatgggaagtgtggggagatggatgggtgtgagaagatattttctagaatggcagagagaagagataatgtaacttggaactcaatgatctcggggtatatacataacgagctccttgccaaggccttggatttggtctggtttatgttgcagacaggtcagagattggatagtttcatgtatgcgactgttcttagcgcgtttgcttctgttgcaacgctagagcgtggtatggaagtgcatgcttgttcggtgagagcttgtttagaatctgacgtggtagttgggagtgcacttgttgacatgtattccaaatgtggaagactagattatgctttgaggttttttaacacaatgcctgtaagaaattcatattcttggaactctatgatttcgggctatgcacgacatgggcaaggagaagaagctttgaagctttttgaaactatgaagctcgatggccaaacaccacctgaccatgttacattcgtgggagtcttgtcagcttgtagccatgcgggtctgcttgaagaagggtttaaacatttcgaatctatgagtgattcatatggcttagctcctaggattgaacacttctcatgtatggctgacgtgctaggccgtgcaggtgaactcgataagttggaagatttcatcgagaaaatgccaatgaagcctaatgttctcatctggaggactgtacttggggcttgttgcagagcaaatggtcgaaaagcagaattaggaaagaaagcagcagaaatgctttttcaattggagccagaaaacgctgtaaactatgtgctacttggtaacatgtatgctgctggaggaagatgggaagatttagtaaaggcgagaaagaaaatgaaagatgcagatgtgaaaaaggaagctggttatagttgggtcaccatgaaggatggagtccatatgtttgttgctggggataagtcacacccagacgctgatgtgatctacaagaagctcaaggagctcaacagaaagatgagagacgcaggttatgtgccacagacaggatttgccttgtatgatctagagcaagagaacaaggaagagattctgagctatcacagcgagaagctcgctgtagcttttgttctcgcagcccagaggagctctacgctgccaatcagaataatgaagaacctcagagtttgcggtgattgccactctgccttcaagtatatatcaaagatcgaagggagacagataattctaagggattcaaacaggtttcatcattttcaagacggtgcatgttcttgtagtgatttctggtga

SEQ ID NO: 72699 - protein, 995 aa, Arabidopsis thaliana
  peptide (1)..(995): Ceres Seq. ID no. 4944509
MTNCVPLSFVQSCVGHRGAARFFHSRLYKNRLDKDVYLCNNLINAYLETGDSVSARKVFDEMPLRNCVSWACIVSGYSRNGEHKEALVFLRDMVKEGIFSNQYAFVSVLRACQEIGSVGILFGRQIHGLMFKLSYAVDAVVSNVLISMYWKCIGSVGYALCAFGDIEVKNSVSWNSIISVYSQAGDQRSAFRIFSSMQYDGSRPTEYTFGSLVTTACSLTEPDVRLLEQIMCTIQKSGLLTDLFVGSGLVSAFAKSGSLSYARKVFNQMETRNAVTLNGLMVGLVRQKWGEEATKLFMDMNSMIDVSPESYVILLSSFPEYSLAEEVGLKKGREVHGHVITTGLVDFMVGIGNGLVNMYAKCGSIADARRVFYFMTDKDSVSWNSMITGLDQNGCFIEAVERYKSMRRHDILPGSFTLISSLSSCASLKWAKLGQQIHGESLKLGIDLNVSVSNALMTLYAETGYLNECRKIFSSMPEHDQVSWNSIIGALARSERSLPEAVVCFLNAQRAGQKLNRITFSSVLSAVSSLSFGELGKQIHGLALKNNIADEATTENALIACYGKCGEMDGCEKIFSRMAERRDNVTWNSMISGYIHNELLAKALDLVWFMLQTGQRLDSFMYATVLSAFASVATLERGMEVHACSVRACLESDVVVGSALVDMYSKCGRLDYALRFFNTMPVRNSYSWNSMISGYARHGQGEEALKLFETMKLDGQTPPDHVTFVGVLSACSHAGLLEEGFKHFESMSDSYGLAPRIEHFSCMADVLGRAGELDKLEDFIEKMPMKPNVLIWRTVLGACCRANGRKAELGKKAAEMLFQLEPENAVNYVLLGNMYAAGGRWEDLVKARKKMKDADVKKEAGYSWVTMKDGVHMFVAGDKSHPDADVIYKKLKELNRKMRDAGYVPQTGFALYDLEQENKEEILSYHSEKLAVAFVLAAQRSSTLPIRIMKNLRVCGDCHSAFKYISKIEGRQIILRDSNRFHHFQDGACSCSDFW

SEQ ID NO: 72700 - protein, 934 aa, Arabidopsis thaliana
  peptide (1)..(934): Ceres Seq. ID no. 4944510
MPLRNCVSWACIVSGYSRNGEHKEALVFLRDMVKEGIFSNQYAFVSVLRACQEIGSVGILFGRQIHGLMFKLSYAVDAVVSNVLISMYWKCIGSVGYALCAFGDIEVKNSVSWNSIISVYSQAGDQRSAFRIFSSMQYDGSRPTEYTFGSLVTTACSLTEPDVRLLEQIMCTIQKSGLLTDLFVGSGLVSAFAKSGSLSYARKVFNQMETRNAVTLNGLMVGLVRQKWGEEATKLFMDMNSMIDVSPESYVILLSSFPEYSLAEEVGLKKGREVHGHVITTGLVDFMVGIGNGLVNMYAKCGSIADARRVFYFMTDKDSVSWNSMITGLDQNGCFIEAVERYKSMRRHDILPGSFTLISSLSSCASLKWAKLGQQIHGESLKLGIDLNVSVSNALMTLYAETGYLNECRKIFSSMPEHDQVSWNSIIGALARSERSLPEAVVCFLNAQRAGQKLNRITFSSVLSAVSSLSFGELGKQIHGLALKNNIADEATTENALIACYGKCGEMDGCEKIFSRMAERRDNVTWNSMISGYIHNELLAKALDLVWFMLQTGQRLDSFMYATVLSAFASVATLERGMEVHACSVRACLESDVVVGSALVDMYSKCGRLDYALRFFNTMPVRNSYSWNSMISGYARHGQGEEALKLFETMKLDGQTPPDHVTFVGVLSACSHAGLLEEGFKHFESMSDSYGLAPRIEHFSCMADVLGRAGELDKLEDFIEKMPMKPNVLIWRTVLGACCRANGRKAELGKKAAEMLFQLEPENAVNYVLLGNMYAAGGRWEDLVKARKKMKDADVKKEAGYSWVTMKDGVHMFVAGDKSHPDADVIYKKLKELNRKMRDAGYVPQTGFALYDLEQENKEEILSYHSEKLAVAFVLAAQRSSTLPIRIMKNLRVCGDCHSAFKYISKIEGRQIILRDSNRFHHFQDGACSCSDFW

SEQ ID NO: 72701 - protein, 903 aa, Arabidopsis thaliana
  peptide (1)..(903): Ceres Seq. ID no. 4944511
MVKEGIFSNQYAFVSVLRACQEIGSVGILFGRQIHGLMFKLSYAVDAVVSNVLISMYWKCIGSVGYALCAFGDIEVKNSVSWNSIISVYSQAGDQRSAFRIFSSMQYDGSRPTEYTFGSLVTTACSLTEPDVRLLEQIMCTIQKSGLLTDLFVGSGLVSAFAKSGSLSYARKVFNQMETRNAVTLNGLMVGLVRQKWGEEATKLFMDMNSMIDVSPESYVILLSSFPEYSLAEEVGLKKGREVHGHVITTGLVDFMVGIGNGLVNMYAKCGSIADARRVFYFMTDKDSVSWNSMITGLDQNGCFIEAVERYKSMRRHDILPGSFTLISSLSSCASLKWAKLGQQIHGESLKLGIDLNVSVSNALMTLYAETGYLNECRKIFSSMPEHDQVSWNSIIGALARSERSLPEAVVCFLNAQRAGQKLNRITFSSVLSAVSSLSFGELGKQIHGLALKNNIADEATTENALIACYGKCGEMDGCEKIFSRMAERRDNVTWNSMISGYIHNELLAKALDLVWFMLQTGQRLDSFMYATVLSAFASVATLERGMEVHACSVRACLESDVVVGSALVDMYSKCGRLDYALRFFNTMPVRNSYSWNSMISGYARHGQGEEALKLFETMKLDGQTPPDHVTFVGVLSACSHAGLLEEGFKHFESMSDSYGLAPRIEHFSCMADVLGRAGELDKLEDFIEKMPMKPNVLIWRTVLGACCRANGRKAELGKKAAEMLFQLEPENAVNYVLLGNMYAAGGRWEDLVKARKKMKDADVKKEAGYSWVTMKDGVHMFVAGDKSHPDADVIYKKLKELNRKMRDAGYVPQTGFALYDLEQENKEEILSYHSEKLAVAFVLAAQRSSTLPIRIMKNLRVCGDCHSAFKYISKIEGRQIILRDSNRFHHFQDGACSCSDFW

SEQ ID NO: 72702 - DNA, 750 bp, Arabidopsis thaliana
  misc_feature (1)..(750): Ceres Seq. ID no. 4944658
  misc_feature (1)..(750): Ortholog of  Ceres SEQ ID NO 14303051 as cited in SEQ ID NO 66608
atggaaaagttgaaaggccttggctttgatccttctttcttcaccggagctataactagtggtgaactaactcatcaatctttgcagaggagagatgatccttggtttgctgcactgggaaggaggtgcattcacattacttggaatgaccgaggagcaatctctttggagggtctagatctaaatgttgtggagaatgtggaagaagctgactttgttttagcgcacggcactgaagccctaggacttccttcaggcagtgtatctccaaggactattgatgagctagagaagattttggagaaatctgcagctcgaggacttcccatgatcgtagctaatccagattacgtgactgttgaagcaaatgtttttcatatcatgccaggtacactagcttccaagtatgaagaactgggaggagaagtgaagtcgatgggaaaacctcataagatgatctatgagtctgctatagcaattgcgggagtcaatccgtctgagtctatcgcagtaggagattcgctacatcatgatataaggggagcaaatgtttcaggaattgaatcaatattcatcactggagggattcatggtaatgagcttggtctcacttcttttgatgaaactgcaagtctagactcagtcaagacccttactgctaaacacaatgcattcccaacttatgtattatcagcctttaaatgctcatttgctgagaaagtaatttatagctgtgtgaatacaaaatga

SEQ ID NO: 72703 - protein, 249 aa, Arabidopsis thaliana
  peptide (1)..(249): Ceres Seq. ID no. 4944659
MEKLKGLGFDPSFFTGAITSGELTHQSLQRRDDPWFAALGRRCIHITWNDRGAISLEGLDLNVVENVEEADFVLAHGTEALGLPSGSVSPRTIDELEKILEKSAARGLPMIVANPDYVTVEANVFHIMPGTLASKYEELGGEVKSMGKPHKMIYESAIAIAGVNPSESIAVGDSLHHDIRGANVSGIESIFITGGIHGNELGLTSFDETASLDSVKTLTAKHNAFPTYVLSAFKCSFAEKVIYSCVNTK

SEQ ID NO: 72704 - protein, 140 aa, Arabidopsis thaliana
  peptide (1)..(140): Ceres Seq. ID no. 4944660
MIVANPDYVTVEANVFHIMPGTLASKYEELGGEVKSMGKPHKMIYESAIAIAGVNPSESIAVGDSLHHDIRGANVSGIESIFITGGIHGNELGLTSFDETASLDSVKTLTAKHNAFPTYVLSAFKCSFAEKVIYSCVNTK

SEQ ID NO: 72705 - DNA, 2415 bp, Arabidopsis thaliana
  misc_feature (1)..(2415): Ceres Seq. ID no. 4944694
  misc_feature (1)..(2415): Ortholog of  Ceres SEQ ID NO 13655744 as cited in SEQ ID NO 64032
atgtcaggagtttgggtgttcaataacggagtgatacgtctagtggagaacccgaaccagtccggtggagtttccacacagtcgcacggccggagaaatgtcttggtttacttgccgaccggtgaagccgtctcatcttactcgtcgctcgaacaaatcctaaggagcctcgggtgggaaagatacttcagtggagactccgatctcatccagtaccacaaacgctcctccatcgacctcatctccttaccaagagacttctccaagttcaactccgtttacatgtacgacatcgttgtcaagaaccctaattccttccacaaacaaacgatgcctcgtaaaggattatccaatttcgatgattatgatgatggttttgatgatgatgacgatgcttttgattatgactatgatgttgatatagatgaacatgaagaagaagctgctgctgaaccaaaggaagaaattgctaaaacgcaagggctttggcgatgtgctatctgtacatatgacaatgttgagactatgtttgtgtgtgatatctgcggtgttcttcgtcatcctgtcgccggaaatcaaagtatcaataagaatacagctgttcgtgttgtgagtctctttgcaattgtggtgttgcaaaggcgttattctgacagttccttttcaacttatgtagcacctttcaagtttgatgctccatcgccagatgatttagtctccaatggactaacatcctcaaaaactggtccaaaaggctcaggtgatgctagcatgagacagaaggagaagcaagatagcgtagaacagaaacctttaaagaaaggaggagatagttcagaaacaagctcccgaggtagacatgataaacttgatgataagggcggtgctggcggcataaaatcaggcaaaagtttgccaaaagcaaaagcagatatgtctaatgagacaagttcgtcctctaaatatatggagacgtcggagagtcttactggtactatgaacaagatgtctttgattggggaaacagaaaactctagcgatattaaaattagaggaccaaaatcacaatctaagcataagccagaggagtggatgcttcttgataaagaatcagatgcactaagccagcttaatcttgccatcgtggggcatgttgattccggtaagtctacactttcgggtagattattgcatcttttgggaagaatatcgcagaagcaaatgcacaagtatgagaaagaagcaaagttgcagggcaaagggtcctttgcatatgcctgggcattggatgagagtgctgaagagagggaacgaggaataacaatgactgtggctgttgcttatttcaattccaaaagacatcatgttgttttgctcgactctcctggacacaaagattttgttccaaacatgatagcaggagcaacacaagcagatgctgcgattcttgtcatagatgcatctgttggtgcttttgaagctggttttgataatttgaaagggcagacaagggagcatgcacgggttctgagaggttttggcgtggagcaagtcatagttgcaatcaacaaaatggatattgttggctactcaaaggaaagatttgatttgattaagcagcacgttggatcttttttgcaatcctgtcgttttaaggattcttctctgacatggattccattaagtgccatggaaaaccaaaacttggtggcagctccctctgataaccgcctatcctcatggtatcaaggtccatgtttattggatgccgtcgactctgtcaagtctcctgatagagacgtctcaaagcctctactcatgcctatatgtgacgctgtaagatcaacttcgcaagggcaggtatctgcatgtggcaaacttgaagctggagctgtccggccaggatctaaggtaatggttatgccatcaggagatcaaggaaccatacgatcactagagcgtgactctcaggcttgcaccattgcaagagctggagataacgtagcgttagcgttgcaagggatcgatgcaaatcaagtaatggcaggagatgtattgtgccatcctgatttccctgtatcagtagcaactcatttggaattgatggtgctcgtcttggaaggcgcaacaccgatcttgctcggttctcagttggagtttcatgtgcatcatgcaaaggaagcagcaacagttgtgaaacttgtggcaatgcttgatcccaaaacagggcagccaacaaagaagtctcctcgttgtctaactgctaaacagagcgcaatgcttgaggttagtctccaaaatccagtatgtgtggagacattttctgagagtagagctcttggaagagtgttccttagatcatcgggaagaactgttgctatgggcaaagttactcggattatccaagactcataa

SEQ ID NO: 72706 - protein, 804 aa, Arabidopsis thaliana
  peptide (1)..(804): Ceres Seq. ID no. 4944695
MSGVWVFNNGVIRLVENPNQSGGVSTQSHGRRNVLVYLPTGEAVSSYSSLEQILRSLGWERYFSGDSDLIQYHKRSSIDLISLPRDFSKFNSVYMYDIVVKNPNSFHKQTMPRKGLSNFDDYDDGFDDDDDAFDYDYDVDIDEHEEEAAAEPKEEIAKTQGLWRCAICTYDNVETMFVCDICGVLRHPVAGNQSINKNTAVRVVSLFAIVVLQRRYSDSSFSTYVAPFKFDAPSPDDLVSNGLTSSKTGPKGSGDASMRQKEKQDSVEQKPLKKGGDSSETSSRGRHDKLDDKGGAGGIKSGKSLPKAKADMSNETSSSSKYMETSESLTGTMNKMSLIGETENSSDIKIRGPKSQSKHKPEEWMLLDKESDALSQLNLAIVGHVDSGKSTLSGRLLHLLGRISQKQMHKYEKEAKLQGKGSFAYAWALDESAEERERGITMTVAVAYFNSKRHHVVLLDSPGHKDFVPNMIAGATQADAAILVIDASVGAFEAGFDNLKGQTREHARVLRGFGVEQVIVAINKMDIVGYSKERFDLIKQHVGSFLQSCRFKDSSLTWIPLSAMENQNLVAAPSDNRLSSWYQGPCLLDAVDSVKSPDRDVSKPLLMPICDAVRSTSQGQVSACGKLEAGAVRPGSKVMVMPSGDQGTIRSLERDSQACTIARAGDNVALALQGIDANQVMAGDVLCHPDFPVSVATHLELMVLVLEGATPILLGSQLEFHVHHAKEAATVVKLVAMLDPKTGQPTKKSPRCLTAKQSAMLEVSLQNPVCVETFSESRALGRVFLRSSGRTVAMGKVTRIIQDS

SEQ ID NO: 72707 - protein, 710 aa, Arabidopsis thaliana
  peptide (1)..(710): Ceres Seq. ID no. 4944696
MYDIVVKNPNSFHKQTMPRKGLSNFDDYDDGFDDDDDAFDYDYDVDIDEHEEEAAAEPKEEIAKTQGLWRCAICTYDNVETMFVCDICGVLRHPVAGNQSINKNTAVRVVSLFAIVVLQRRYSDSSFSTYVAPFKFDAPSPDDLVSNGLTSSKTGPKGSGDASMRQKEKQDSVEQKPLKKGGDSSETSSRGRHDKLDDKGGAGGIKSGKSLPKAKADMSNETSSSSKYMETSESLTGTMNKMSLIGETENSSDIKIRGPKSQSKHKPEEWMLLDKESDALSQLNLAIVGHVDSGKSTLSGRLLHLLGRISQKQMHKYEKEAKLQGKGSFAYAWALDESAEERERGITMTVAVAYFNSKRHHVVLLDSPGHKDFVPNMIAGATQADAAILVIDASVGAFEAGFDNLKGQTREHARVLRGFGVEQVIVAINKMDIVGYSKERFDLIKQHVGSFLQSCRFKDSSLTWIPLSAMENQNLVAAPSDNRLSSWYQGPCLLDAVDSVKSPDRDVSKPLLMPICDAVRSTSQGQVSACGKLEAGAVRPGSKVMVMPSGDQGTIRSLERDSQACTIARAGDNVALALQGIDANQVMAGDVLCHPDFPVSVATHLELMVLVLEGATPILLGSQLEFHVHHAKEAATVVKLVAMLDPKTGQPTKKSPRCLTAKQSAMLEVSLQNPVCVETFSESRALGRVFLRSSGRTVAMGKVTRIIQDS

SEQ ID NO: 72708 - protein, 694 aa, Arabidopsis thaliana
  peptide (1)..(694): Ceres Seq. ID no. 4944697
MPRKGLSNFDDYDDGFDDDDDAFDYDYDVDIDEHEEEAAAEPKEEIAKTQGLWRCAICTYDNVETMFVCDICGVLRHPVAGNQSINKNTAVRVVSLFAIVVLQRRYSDSSFSTYVAPFKFDAPSPDDLVSNGLTSSKTGPKGSGDASMRQKEKQDSVEQKPLKKGGDSSETSSRGRHDKLDDKGGAGGIKSGKSLPKAKADMSNETSSSSKYMETSESLTGTMNKMSLIGETENSSDIKIRGPKSQSKHKPEEWMLLDKESDALSQLNLAIVGHVDSGKSTLSGRLLHLLGRISQKQMHKYEKEAKLQGKGSFAYAWALDESAEERERGITMTVAVAYFNSKRHHVVLLDSPGHKDFVPNMIAGATQADAAILVIDASVGAFEAGFDNLKGQTREHARVLRGFGVEQVIVAINKMDIVGYSKERFDLIKQHVGSFLQSCRFKDSSLTWIPLSAMENQNLVAAPSDNRLSSWYQGPCLLDAVDSVKSPDRDVSKPLLMPICDAVRSTSQGQVSACGKLEAGAVRPGSKVMVMPSGDQGTIRSLERDSQACTIARAGDNVALALQGIDANQVMAGDVLCHPDFPVSVATHLELMVLVLEGATPILLGSQLEFHVHHAKEAATVVKLVAMLDPKTGQPTKKSPRCLTAKQSAMLEVSLQNPVCVETFSESRALGRVFLRSSGRTVAMGKVTRIIQDS

SEQ ID NO: 72709 - DNA, 1194 bp, Arabidopsis thaliana
  misc_feature (1)..(1194): Ceres Seq. ID no. 4944798
  misc_feature (1)..(1194): Ortholog of  Ceres SEQ ID NO 14310713 as cited in SEQ ID NO 53582
atggattaccgaccttctgatagtagtggtacagatgatgacctgcctccatctcatcaaggtagatatcaaagaaacgccagacctaccgggaatggaaggccttcagttctcaattctgctcctttatcacgggtgcacaatgaaatggaaactcaaattcatctcattgagcaagaagcttatagctcgatactccgcgcatttaaagcccagtccgatgctattacctgggagaaagaaagtttgatcactgaactcagaaaagaacttcgagtgtctgatgaggaacacagagagctgttatcaagggttaacgctgatgaaatgatcaggcgaataagggaatggagaaaggcaaacagccttcagtctagtgttcctcagctggttcatgatgctccgagtccggctgtatcaggatcacgtaagaagcaaaagacatcacaatcaatcgcctcattagcgatgggcccaccatctccttctttgcacccttcaatgcaaccatcgtcatctgcactaagaaggggaggtcctccaccaggtccaaagaccaagaagccaaagacatcgatgcagtacccatctacaggcattgctggaaggccccaggctggcgctttaacaaatgaaccaggtgaatcgggatcatatgacccgttggttggaaggaaggtatggacgaagtggcctgatgacaaccaatactacgaagctgttataactgactacaaccctgttgaggggcgtcatgctttagtgtatgatattaactctgcgaatgaaacctgggaatgggtaaatcttaaagagatatctccgggagatatcagatgggaaggtgaagatcctgggatttctcgtaaaggaggacatcctgggcaaggccgtggaacaaaaaccatggctcgtggtggtcctgcaagcaatgcgggtggtagaggtaggggaagcatgaggatgcagcaacctaagacacagaatggcatcggaaagaaagctttaggcgaaatcgaaattctccacactgagacattgttaaaagaggtggaaaaagtttttgggtcagttaaccccaacccagcagaggtagagaaggcaaagagagtgctgagagatcatgaactagctcttatggatgccatcgcaaagcttgaagaaatatcagatggagaaagcggtaatatttga

SEQ ID NO: 72710 - protein, 397 aa, Arabidopsis thaliana
  peptide (1)..(397): Ceres Seq. ID no. 4944799
MDYRPSDSSGTDDDLPPSHQGRYQRNARPTGNGRPSVLNSAPLSRVHNEMETQIHLIEQEAYSSILRAFKAQSDAITWEKESLITELRKELRVSDEEHRELLSRVNADEMIRRIREWRKANSLQSSVPQLVHDAPSPAVSGSRKKQKTSQSIASLAMGPPSPSLHPSMQPSSSALRRGGPPPGPKTKKPKTSMQYPSTGIAGRPQAGALTNEPGESGSYDPLVGRKVWTKWPDDNQYYEAVITDYNPVEGRHALVYDINSANETWEWVNLKEISPGDIRWEGEDPGISRKGGHPGQGRGTKTMARGGPASNAGGRGRGSMRMQQPKTQNGIGKKALGEIEILHTETLLKEVEKVFGSVNPNPAEVEKAKRVLRDHELALMDAIAKLEEISDGESGNI

SEQ ID NO: 72711 - protein, 348 aa, Arabidopsis thaliana
  peptide (1)..(348): Ceres Seq. ID no. 4944800
METQIHLIEQEAYSSILRAFKAQSDAITWEKESLITELRKELRVSDEEHRELLSRVNADEMIRRIREWRKANSLQSSVPQLVHDAPSPAVSGSRKKQKTSQSIASLAMGPPSPSLHPSMQPSSSALRRGGPPPGPKTKKPKTSMQYPSTGIAGRPQAGALTNEPGESGSYDPLVGRKVWTKWPDDNQYYEAVITDYNPVEGRHALVYDINSANETWEWVNLKEISPGDIRWEGEDPGISRKGGHPGQGRGTKTMARGGPASNAGGRGRGSMRMQQPKTQNGIGKKALGEIEILHTETLLKEVEKVFGSVNPNPAEVEKAKRVLRDHELALMDAIAKLEEISDGESGNI

SEQ ID NO: 72712 - protein, 288 aa, Arabidopsis thaliana
  peptide (1)..(288): Ceres Seq. ID no. 4944801
MIRRIREWRKANSLQSSVPQLVHDAPSPAVSGSRKKQKTSQSIASLAMGPPSPSLHPSMQPSSSALRRGGPPPGPKTKKPKTSMQYPSTGIAGRPQAGALTNEPGESGSYDPLVGRKVWTKWPDDNQYYEAVITDYNPVEGRHALVYDINSANETWEWVNLKEISPGDIRWEGEDPGISRKGGHPGQGRGTKTMARGGPASNAGGRGRGSMRMQQPKTQNGIGKKALGEIEILHTETLLKEVEKVFGSVNPNPAEVEKAKRVLRDHELALMDAIAKLEEISDGESGNI

SEQ ID NO: 72713 - DNA, 874 bp, Arabidopsis thaliana
  misc_feature (1)..(874): Ceres Seq. ID no. 4944833
  misc_feature (1)..(874): Ortholog of  Ceres SEQ ID NO 13598028 as cited in SEQ ID NO 66219
accgccattgattagcttcctctctatttttactctcgtcacgtcctccacttttgggtcattattacttctcgaagctcaccaagatcttgaatttgccgacctctcaagattcttgatggtaaaagcatacagacaagagcatgtttacaagcatccgtgggagcgggtgagtgctgcttcatggaggaagtttgcagaccctgaaaacaaacgcatcctttctcacatccttgaagtcgataccttgaacaggaaactcgacactgagaccgggaaactccacaccacgcgtgctctcaccatccatgctcctggtccatggtttctccataggatcattggtcaggacatctgtcactgtgttgaatcaacagttgtagatggcaaatcacgttctatgcagctaacaacaaagaacattagtctcaaaaagttcattgaagtggaggagaggataagatatgatccgcatccagataatccatcagcctggactgtttgtagccaggagacaagcattcggatcaaacccttgtcggctctggcctcaatggctgagaaggttgaacagaagtgcgcagagaaattcatgcagaatagcgctaaaggaagagaggttatggagaggatttgtaagtatatggaagcagaatccgctcggatctaaagatcaaaacttcttagattccagtatcttcttggtttgtgattcttgaatgttttgtaagtcaagagagctacgtttttggagcatggttataataagtttatgaaacagtttagatcaaattggtgtttgtttcagtaactcctgttttgtgttagcaactgaaagttgaattgtgaagcttttatccaaatttttgaatcc

SEQ ID NO: 72714 - protein, 222 aa, Arabidopsis thaliana; identical to SEQ ID NO: 28228
  peptide (1)..(222): Ceres Seq. ID no. 4944834

SEQ ID NO: 72715 - protein, 183 aa, Arabidopsis thaliana; identical to SEQ ID NO: 28229
  peptide (1)..(183): Ceres Seq. ID no. 4944835

SEQ ID NO: 72716 - DNA, 2457 bp, Arabidopsis thaliana
  misc_feature (1)..(2457): Ceres Seq. ID no. 4944886
  misc_feature (1)..(2457): Ortholog of  Ceres SEQ ID NO 12586556 as cited in SEQ ID NO 64667
  misc_feature (1)..(2457): Ortholog of  Ceres SEQ ID NO 13660894 as cited in SEQ ID NO 67475
atgagaataattcatgttgcgcagactcgcagattgatgatccgatgcaatcgcattcgacaatgtgggttttctgtgaaaactgcggcattggatttagaatcgtcggattcgataatcccaggcttagactctcatgcttacggtgcaatgctccgtcgctgcattcagaagaacgacccaatttcagcaaaggctattcattgcgacatcttgaagaaaggaagctgcttagaccttttcgccacaaacattctactcaacgcttatgtgaaagctggctttgacaaagatgcgttaaacctgttcgacgaaatgcctgagagaaataatgtctcttttgttactcttgcgcaagggtatgcgtgtcaagatcccattggtttgtattccaggttgcatcgagagggtcatgagcttaatccacacgtcttcacttctttcttgaagttgtttgttagtttggacaaagctgagatttgtccatggttgcattctcctatcgttaagctcggttatgattctaatgcttttgttggagctgcgcttattaatgcttactctgtctgtggttctgttgatagtgcaagaactgtttttgaagggattttgtgcaaagacattgttgtttgggcaggaattgtatcttgctatgtagaaaatggatatttcgaggattctcttaagctgctatcttgtatgaggatggctggtttcatgcccaacaactacacctttgacacggcgcttaaggctagtattgggctaggcgcatttgatttcgcgaaaggtgttcatggccaaatcttaaaaacatgttatgtgttggatcctcgtgtgggtgttggtttgcttcagttgtatacacaactcggagacatgtctgatgctttcaaagtgtttaatgagatgccaaagaatgatgtggtaccttggagttttatgattgctcgtttttgtcaaaacggtttctgcaacgaggcggttgatctttttattcgaatgagggaagcttttgttgtccctaacgagtttactttaagcagtattttgaatggctgtgccatcggaaagtgttctggcttaggtgagcaactccatggtcttgtagtcaaagttggctttgatttggatatctatgtctcaaatgctcttattgatgtatatgccaaatgtgagaaaatggataccgctgtgaagttatttgctgagttatcaagtaaaaatgaggtaagctggaacacagtcattgtcgggtatgagaatctaggcgaaggaggaaaagcgttcagcatgtttcgtgaagcgctcagaaatcaggtgtcggtaactgaagtaactttctcaagtgctcttggagcttgtgcttcattggcgagcatggacctcggtgtccaagttcatggactggcgataaaaaccaataatgccaaaaaagttgcagtgagtaactcattgatagatatgtatgcaaaatgtggtgatatcaaattcgcacaatcggtgttcaacgagatggaaacgatagatgtcgcttcatggaatgcgttgatctcaggctattccacacatggactgggtagacaggcattgagaatcctcgacattatgaaggatagagattgcaagccaaatggtttaacatttcttggtgttctttctggatgcagcaatgcaggattaatagatcaaggtcaagaatgttttgaatcaatgattcgtgatcatggtattgaaccatgtttggaacattatacgtgtatggtcaggcttttgggaagatcagggcagcttgacaaagcaatgaagctgattgaagggattccatatgagcctagcgttatgatctggagggcaatgcttagtgcctctatgaatcagaacaatgaagagtttgcaaggagatcggcagaggaaatactaaagatcaatccaaaggacgaggcgacatatgttctggtatcaaacatgtacgcaggtgcaaaacaatgggcaaacgtagcttccattaggaaaagcatgaaggaaatgggtgtcaagaaggaacctggtttaagttggatagaacatcaaggtgatgtgcattacttcagtgtggggttatcagatcatccggatatgaagctcataaatggaatgttggaatggcttaacatgaaagcaactcgagctggttacgttcctgatcggaatgcggtcctgctcgatatggatgatgaagaaaaggataagagattgtgggttcatagcgagaggttggctttggcgtatgggcttgttcgaatgccatcatcaagaaatcgcatactgatcatgaagaatctacggatatgttcagattgccacagtgctatgaaagtgatttcaagtatcgtacagcgagatctggttataagagatatgaaccggttccatcattttcatgcaggagtctgctcttgcggcgaccactggtga

SEQ ID NO: 72717 - protein, 818 aa, Arabidopsis thaliana; identical to SEQ ID NO: 70757
  peptide (1)..(818): Ceres Seq. ID no. 4944887

SEQ ID NO: 72718 - protein, 806 aa, Arabidopsis thaliana; identical to SEQ ID NO: 70758
  peptide (1)..(806): Ceres Seq. ID no. 4944888

SEQ ID NO: 72719 - protein, 768 aa, Arabidopsis thaliana
  peptide (1)..(768): Ceres Seq. ID no. 4944889
MLRRCIQKNDPISAKAIHCDILKKGSCLDLFATNILLNAYVKAGFDKDALNLFDEMPERNNVSFVTLAQGYACQDPIGLYSRLHREGHELNPHVFTSFLKLFVSLDKAEICPWLHSPIVKLGYDSNAFVGAALINAYSVCGSVDSARTVFEGILCKDIVVWAGIVSCYVENGYFEDSLKLLSCMRMAGFMPNNYTFDTALKASIGLGAFDFAKGVHGQILKTCYVLDPRVGVGLLQLYTQLGDMSDAFKVFNEMPKNDVVPWSFMIARFCQNGFCNEAVDLFIRMREAFVVPNEFTLSSILNGCAIGKCSGLGEQLHGLVVKVGFDLDIYVSNALIDVYAKCEKMDTAVKLFAELSSKNEVSWNTVIVGYENLGEGGKAFSMFREALRNQVSVTEVTFSSALGACASLASMDLGVQVHGLAIKTNNAKKVAVSNSLIDMYAKCGDIKFAQSVFNEMETIDVASWNALISGYSTHGLGRQALRILDIMKDRDCKPNGLTFLGVLSGCSNAGLIDQGQECFESMIRDHGIEPCLEHYTCMVRLLGRSGQLDKAMKLIEGIPYEPSVMIWRAMLSASMNQNNEEFARRSAEEILKINPKDEATYVLVSNMYAGAKQWANVASIRKSMKEMGVKKEPGLSWIEHQGDVHYFSVGLSDHPDMKLINGMLEWLNMKATRAGYVPDRNAVLLDMDDEEKDKRLWVHSERLALAYGLVRMPSSRNRILIMKNLRICSDCHSAMKVISSIVQRDLVIRDMNRFHHFHAGVCSCGDHW

SEQ ID NO: 72720 - DNA, 1785 bp, Arabidopsis thaliana
  misc_feature (1)..(1785): Ceres Seq. ID no. 4944916
  misc_feature (1)..(1785): Ortholog of  Ceres SEQ ID NO 15177463 as cited in SEQ ID NO 0
atgttgccaaagttcgatccaacagaccaaaaagcttgtctgtctcttcttgaggatgtgactaccaacgtaaagcagattcaagattctgtcttggaagcaatactttcacgtaatgctcataccgagtatcttagtggtttcctcaacggtcaagctgataagaaaagcttcaagaagaatgtacccgttgtaacctacgaagatattaagccttatatcgatcgtatcgccaatggagagccgtctgatctcatctgtgatcgacccatcagtgtactcttgactagctcaggtacttcaggaggagttccgaagctgattcctttgacaacagaggagttggaacagaggatttcgtttgcttctctctatagacctctactctacaagtacatcgagggtattagagaaagaaaatctttcatgttatatttcgtgactcgagaaagcgagactgcttctgggatactggtcaggactatgataacttgtgttttgaaaagcgtgacgccagctaactcttttatctgggatcaatcacagataagcccgcatgcgattacgacttgttcagacactactcagagcatgtactgccaactgctttgtgggcttctacaacgagataatgtaggtcgccttggtgcaccatttgcttcatcctttctcaaaataatcaagttcttggaggatcactggcctgagttttgctcaaacataaggactggttgtctcagtgactggattacagacccccaatgtgtttcagggatcggtaagttcctcactgctcctaatccggaactagcgagccttatcgagcaagaatgcagtcaaacatcatgggaagcaatagtgaagagactatggccaaaagcaaaatgcatcgaagccattgttacaggaaccatggcacagtacaatccattactggaattctatagcggtggtcttcctgtgatttcaacgttttatggcagctctgaatgtttcttcggtctcaatctcaatcctctgtctaagcctaatgaggtgtcgtacaccatcattccatgtatggcttatttcgagttcttagaggttgagaaagactatgaaagtggtcatgatcccgcagagaatcctgttgtagtcgatcttgtcgatgttaaaatcggtcatgattatgaacctgttgtcacaacgtttgctggtttgtataggtaccgtttaggggacgttttaagagtgactggtttctacaacaatgcgccacagtttcatttcgtgggaagacagaaagttgttctgagcatcgacatggacaagacctacgacgaagacctcctcaaggcagtgactaacgcgagtctcctgcttgagccacatgacctaatgctcatggatttcactagccgtgtggattcctcctcgtatccaggtcactacgtgctctactgggaactcgggagaaaagtcaaggacgccaagcttgagcttgaccagaatgttttggaggaatgctgcttcaccattgaggagtctctggacgcggtttacagaaaaggacgaaagaatgataagaacattggaccacttgagattaaggttgttaagcctggcgctttcgacaagctcatgaacttctttctgtctagaggctcttctgtgagtcagtataagacaccgaggtcggtgacgaatgaagaagccttgaagatattggaggccaacgttgtgtccgagtttcttagccagaaaactccgtcgtgggagctacatgagctgcattccagccgataa

SEQ ID NO: 72721 - protein, 594 aa, Arabidopsis thaliana; identical to SEQ ID NO: 71256
  peptide (1)..(594): Ceres Seq. ID no. 4944917

SEQ ID NO: 72722 - protein, 452 aa, Arabidopsis thaliana
  peptide (1)..(452): Ceres Seq. ID no. 4944918
MLYFVTRESETASGILVRTMITCVLKSVTPANSFIWDQSQISPHAITTCSDTTQSMYCQLLCGLLQRDNVGRLGAPFASSFLKIIKFLEDHWPEFCSNIRTGCLSDWITDPQCVSGIGKFLTAPNPELASLIEQECSQTSWEAIVKRLWPKAKCIEAIVTGTMAQYNPLLEFYSGGLPVISTFYGSSECFFGLNLNPLSKPNEVSYTIIPCMAYFEFLEVEKDYESGHDPAENPVVVDLVDVKIGHDYEPVVTTFAGLYRYRLGDVLRVTGFYNNAPQFHFVGRQKVVLSIDMDKTYDEDLLKAVTNASLLLEPHDLMLMDFTSRVDSSSYPGHYVLYWELGRKVKDAKLELDQNVLEECCFTIEESLDAVYRKGRKNDKNIGPLEIKVVKPGAFDKLMNFFLSRGSSVSQYKTPRSVTNEEALKILEANVVSEFLSQKTPSWELHELHSSR

SEQ ID NO: 72723 - protein, 433 aa, Arabidopsis thaliana
  peptide (1)..(433): Ceres Seq. ID no. 4944919
MITCVLKSVTPANSFIWDQSQISPHAITTCSDTTQSMYCQLLCGLLQRDNVGRLGAPFASSFLKIIKFLEDHWPEFCSNIRTGCLSDWITDPQCVSGIGKFLTAPNPELASLIEQECSQTSWEAIVKRLWPKAKCIEAIVTGTMAQYNPLLEFYSGGLPVISTFYGSSECFFGLNLNPLSKPNEVSYTIIPCMAYFEFLEVEKDYESGHDPAENPVVVDLVDVKIGHDYEPVVTTFAGLYRYRLGDVLRVTGFYNNAPQFHFVGRQKVVLSIDMDKTYDEDLLKAVTNASLLLEPHDLMLMDFTSRVDSSSYPGHYVLYWELGRKVKDAKLELDQNVLEECCFTIEESLDAVYRKGRKNDKNIGPLEIKVVKPGAFDKLMNFFLSRGSSVSQYKTPRSVTNEEALKILEANVVSEFLSQKTPSWELHELHSSR

SEQ ID NO: 72724 - DNA, 1086 bp, Arabidopsis thaliana
  misc_feature (1)..(1086): Ceres Seq. ID no. 4945017
  misc_feature (1)..(1086): Ortholog of  Ceres SEQ ID NO 14304628 as cited in SEQ ID NO 53313
atgcatctttttccaaatctcactggccgttcttacttattcaaagaaataaagaactcttctcttcacatgaccatttcaggcaacagctattccattctttcagctcatccatcccttgatagccaagaggtttacccaacagcatgtgctggctccagatacaatactggattcagaaaacaggtcaacctgttccaggaaagctccttcgcaggacccaagcaatacacagaggaagacttcaaggatgagagaaacagtgatttttttgatggatttcttgccattggaacccttggtggagaaacacttcttgatgaacaaccagcaacgccgacatttggcatgtcatttgaggacccagcaatagatgatgcagatgtgacagagaatgatttgaagctcataagcaatgaattggataagttccttgaggctgaagctaaagaaggacaccaccaaccatcaggaagaaacagtgacactaacactattgcatccaccattgaggccattgagggagtagatgatgaagaagataatcagccaatgaagttcccactccaagagtatttttttggatctctaatcgaactcccagaatcaaagattgcagggaagaaggatagggcatcacttggcgaactgtttcaaataacagaagtgcaagataaacaatcagaaaacatatatgggaagaaaaagaagcaacccaattcagctcacaagtccgcaaagcatcttgtgaagaaggtactgaaaaagatacacccatcctcaaggggctctgtcagtggtaaacctgaagtggattccacaaaaaagaagttccaaaaggttttccataggaaagtacatccagaagaatccataatggaaaccaaaatatacagcagcgtggcaaatccaaaaagcagcaaagcaaattctattgacttaacattcgagaaggtgaaccattgtcacgaggcaagtaaaagatgtatccagtatgagcttagaagttctcgctcagccaaaaacggagaacactggatcaagacagacgaagactgtaagtccaccatcatatgcaattcatag

SEQ ID NO: 72725 - protein, 361 aa, Arabidopsis thaliana
  peptide (1)..(361): Ceres Seq. ID no. 4945018
MHLFPNLTGRSYLFKEIKNSSLHMTISGNSYSILSAHPSLDSQEVYPTACAGSRYNTGFRKQVNLFQESSFAGPKQYTEEDFKDERNSDFFDGFLAIGTLGGETLLDEQPATPTFGMSFEDPAIDDADVTENDLKLISNELDKFLEAEAKEGHHQPSGRNSDTNTIASTIEAIEGVDDEEDNQPMKFPLQEYFFGSLIELPESKIAGKKDRASLGELFQITEVQDKQSENIYGKKKKQPNSAHKSAKHLVKKVLKKIHPSSRGSVSGKPEVDSTKKKFQKVFHRKVHPEESIMETKIYSSVANPKSSKANSIDLTFEKVNHCHEASKRCIQYELRSSRSAKNGEHWIKTDEDCKSTIICNS

SEQ ID NO: 72726 - protein, 338 aa, Arabidopsis thaliana
  peptide (1)..(338): Ceres Seq. ID no. 4945019
MTISGNSYSILSAHPSLDSQEVYPTACAGSRYNTGFRKQVNLFQESSFAGPKQYTEEDFKDERNSDFFDGFLAIGTLGGETLLDEQPATPTFGMSFEDPAIDDADVTENDLKLISNELDKFLEAEAKEGHHQPSGRNSDTNTIASTIEAIEGVDDEEDNQPMKFPLQEYFFGSLIELPESKIAGKKDRASLGELFQITEVQDKQSENIYGKKKKQPNSAHKSAKHLVKKVLKKIHPSSRGSVSGKPEVDSTKKKFQKVFHRKVHPEESIMETKIYSSVANPKSSKANSIDLTFEKVNHCHEASKRCIQYELRSSRSAKNGEHWIKTDEDCKSTIICNS

SEQ ID NO: 72727 - protein, 245 aa, Arabidopsis thaliana
  peptide (1)..(245): Ceres Seq. ID no. 4945020
MSFEDPAIDDADVTENDLKLISNELDKFLEAEAKEGHHQPSGRNSDTNTIASTIEAIEGVDDEEDNQPMKFPLQEYFFGSLIELPESKIAGKKDRASLGELFQITEVQDKQSENIYGKKKKQPNSAHKSAKHLVKKVLKKIHPSSRGSVSGKPEVDSTKKKFQKVFHRKVHPEESIMETKIYSSVANPKSSKANSIDLTFEKVNHCHEASKRCIQYELRSSRSAKNGEHWIKTDEDCKSTIICNS

SEQ ID NO: 72728 - DNA, 1299 bp, Arabidopsis thaliana
  misc_feature (1)..(1299): Ceres Seq. ID no. 4945025
  misc_feature (1)..(1299): Ortholog of  Ceres SEQ ID NO 15175957 as cited in SEQ ID NO 20615
  misc_feature (1)..(1299): Ortholog of  Ceres SEQ ID NO 14301490 as cited in SEQ ID NO 66234
atggggtgtgctcaatctactattgctgttgtgggaaggaagaacaagaagaggatcattcaagaatctgtagtgtttgttctacagttccgtgttcctgttcagtctgatcttcagcgccaactcaaaggtgtttctcccaagacaaccatcaatcggttgacatgtttaagaaatcagattgagttggtagctgaggacacagggggttcagccatctctgagttgcgtacagctttggaggagtacttgtcacttctatccggtcttatcaagaaaagttcgtgtttgcaagttttgattaacttaaacagtttagtatattcaaatggtgatattagaatatttaactctacaggtaaagatggaatggagggctgcgtagagctcaaatggaggacccttggcgatggtcgacgagcagagatatgttgcacaaacctttggatggagatgttgatagtgatccacatgatggctgctttggcattgactgaagctaactctctcatgattccaaaggattgctatgcttctggttctggcaatggcgtccgtgtggtctccactgattgcaggagagatgcggttgacttgctgctcaaggcatctggatacttggagttctgcgtccgagagattctgactcaacttcctcatgatataaagagtaagttgccagatgatatgcaggaaagtgtattacaaactctctctatacaagcactaggccagggaactgagattcaacttggattagcagttgatagtcagaaagcaacattgtctgtgaagaggagaattgcatgtgagcaagtcatctacttcactcaggcatatcactgcttgtctagttgtgaagcagttagccatggatgcgccaagaaacttctccggtttatctactggaagtttctggaagcaaaggtattgtatgtgtatgctgcagcatactactaccatggactggtaacagacaagggaagtgagccggcttgtcacttgagcgctgtgtgttgtttccttgcagctgcagagatcctaggagaaagcaaaaaagcctgtcttagcttctgcttagctcctcctgtcacaagggctcctcctatgtggggtgttatgaagcatttgagccagaagattccagaagttgcttttagaaagtcgcagacatatggatacttgcttgaagaagaagaaaaggcaatgcagtgtttgccagagcttccagactttcagttgtcattgagacccgacgactttgaactgcctgaaatagaggatgtctcttcctcatga

SEQ ID NO: 72729 - protein, 432 aa, Arabidopsis thaliana
  peptide (1)..(432): Ceres Seq. ID no. 4945026
MGCAQSTIAVVGRKNKKRIIQESVVFVLQFRVPVQSDLQRQLKGVSPKTTINRLTCLRNQIELVAEDTGGSAISELRTALEEYLSLLSGLIKKSSCLQVLINLNSLVYSNGDIRIFNSTGKDGMEGCVELKWRTLGDGRRAEICCTNLWMEMLIVIHMMAALALTEANSLMIPKDCYASGSGNGVRVVSTDCRRDAVDLLLKASGYLEFCVREILTQLPHDIKSKLPDDMQESVLQTLSIQALGQGTEIQLGLAVDSQKATLSVKRRIACEQVIYFTQAYHCLSSCEAVSHGCAKKLLRFIYWKFLEAKVLYVYAAAYYYHGLVTDKGSEPACHLSAVCCFLAAAEILGESKKACLSFCLAPPVTRAPPMWGVMKHLSQKIPEVAFRKSQTYGYLLEEEEKAMQCLPELPDFQLSLRPDDFELPEIEDVSSS

SEQ ID NO: 72730 - protein, 309 aa, Arabidopsis thaliana
  peptide (1)..(309): Ceres Seq. ID no. 4945027
MEGCVELKWRTLGDGRRAEICCTNLWMEMLIVIHMMAALALTEANSLMIPKDCYASGSGNGVRVVSTDCRRDAVDLLLKASGYLEFCVREILTQLPHDIKSKLPDDMQESVLQTLSIQALGQGTEIQLGLAVDSQKATLSVKRRIACEQVIYFTQAYHCLSSCEAVSHGCAKKLLRFIYWKFLEAKVLYVYAAAYYYHGLVTDKGSEPACHLSAVCCFLAAAEILGESKKACLSFCLAPPVTRAPPMWGVMKHLSQKIPEVAFRKSQTYGYLLEEEEKAMQCLPELPDFQLSLRPDDFELPEIEDVSSS

SEQ ID NO: 72731 - protein, 283 aa, Arabidopsis thaliana
  peptide (1)..(283): Ceres Seq. ID no. 4945028
MEMLIVIHMMAALALTEANSLMIPKDCYASGSGNGVRVVSTDCRRDAVDLLLKASGYLEFCVREILTQLPHDIKSKLPDDMQESVLQTLSIQALGQGTEIQLGLAVDSQKATLSVKRRIACEQVIYFTQAYHCLSSCEAVSHGCAKKLLRFIYWKFLEAKVLYVYAAAYYYHGLVTDKGSEPACHLSAVCCFLAAAEILGESKKACLSFCLAPPVTRAPPMWGVMKHLSQKIPEVAFRKSQTYGYLLEEEEKAMQCLPELPDFQLSLRPDDFELPEIEDVSSS

SEQ ID NO: 72732 - DNA, 1206 bp, Arabidopsis thaliana
  misc_feature (1)..(1206): Ceres Seq. ID no. 4945202
  misc_feature (1)..(1206): Ortholog of  Ceres SEQ ID NO 14303324 as cited in SEQ ID NO 54563
  misc_feature (1)..(1206): Ortholog of  Ceres SEQ ID NO 14308575 as cited in SEQ ID NO 58782
cacttgtaacatttccacaactgtagccaaacttttgtgttctgatagtgatgatcatgatcatcacatgaataagtagaagatatctcttaccttctccttcttctaataagatcagagttttggttcttatttctttgctctcaaaacaatgggtagatcaccgtgttgtgacaaattgggtttgaagaaaggaccttggacaccagaggaggatcagaaacttttagcttatattgaagaacatggtcatggaagttggcgttcattgcctgagaaagctggtctccatcgatgcggaaagagttgtagactaagatggactaactacctaagacctgacatcaaaagaggcaaattcaacttacaagaagaacaaaccattatccaactccatgctctgttaggaaacagatggtcagcgattgctactcatttgccaaagagaacagacaacgagatcaagaactattggaacactcatttgaagaaacggttagtgaaaatggggattgatccagtgactcataaacccaaaaacgagactcctttatcttctcttggtctatccaagaacgcagctatacttagccacactgctcaatgggaaagtgcaaggcttgaagctgaagcaagactagctagagaatcaaagcttcttcatttacaacattaccaaaccaaaacatcatctcaacctcatcatcatcatggattcactcacaagtcattgttacctaattggacaacaaaaccacacgaagtgtcattctctgagatgaaggaatcaatcccggcgaagatagagtttgtcggatcatcaactggtgtgactctgatgaaagaacctgaacacgattggatcaattcaacgatgcacgagtttgaaactacgcagatgggagaaggaatcgaagaagggttcacgggtctcttgctcggtggtgattcaatcgaccggagtttctccggcgataaaaacgagacggccggcgagagtagtggtggtgactgcaactactatgaggacaacaagaactacttggacagcatttttaactttgtagatccttcaccgtcggattcaccgatgttctgaatctaagggttgatatttgttgggaatgtttttgattcttttttagtttctagtttttgtgcttaaactctgattagacaatttttaaactaatccaatttttgcgc

SEQ ID NO: 72733 - protein, 315 aa, Arabidopsis thaliana
  peptide (1)..(315): Ceres Seq. ID no. 4945203
MGRSPCCDKLGLKKGPWTPEEDQKLLAYIEEHGHGSWRSLPEKAGLHRCGKSCRLRWTNYLRPDIKRGKFNLQEEQTIIQLHALLGNRWSAIATHLPKRTDNEIKNYWNTHLKKRLVKMGIDPVTHKPKNETPLSSLGLSKNAAILSHTAQWESARLEAEARLARESKLLHLQHYQTKTSSQPHHHHGFTHKSLLPNWTTKPHEVSFSEMKESIPAKIEFVGSSTGVTLMKEPEHDWINSTMHEFETTQMGEGIEEGFTGLLLGGDSIDRSFSGDKNETAGESSGGDCNYYEDNKNYLDSIFNFVDPSPSDSPMF

SEQ ID NO: 72734 - protein, 197 aa, Arabidopsis thaliana
  peptide (1)..(197): Ceres Seq. ID no. 4945204
MGIDPVTHKPKNETPLSSLGLSKNAAILSHTAQWESARLEAEARLARESKLLHLQHYQTKTSSQPHHHHGFTHKSLLPNWTTKPHEVSFSEMKESIPAKIEFVGSSTGVTLMKEPEHDWINSTMHEFETTQMGEGIEEGFTGLLLGGDSIDRSFSGDKNETAGESSGGDCNYYEDNKNYLDSIFNFVDPSPSDSPMF

SEQ ID NO: 72735 - DNA, 1400 bp, Arabidopsis thaliana
  misc_feature (1)..(1400): Ceres Seq. ID no. 4945205
  misc_feature (1)..(1400): Ortholog of  Ceres SEQ ID NO 14314400 as cited in SEQ ID NO 57691
gggttcgagacgacgacaagagacaagctctgtctgtggtcgggaaatcgaaaccagagccttggactgtgtctctgctctgtggagtatccattttcgatttcttgaaggtgaatccagcgaatccttaatctcaagctccgagactgtgcaataaacaaaacagtagctagcagcagcagcaacacatgaactcgtgcaaatcccttatccgtgcctcaatctcttcctttccatttgttcctcttccaaaccctaatttctctatcaccttcatctccgttcgcgccttttctcctctctctgtccttcatccaaattcatcatgtattgtaacagctcgacgcacatttcatggagctgtggctctttcaccggagagcttaacggaagagtctcccaaggatactgtgaaaggattgttaacaaccaatcgtggtgaggcctcaagcttgatgaagatggagcggaggtgtagcttaagcaatggtgagggtgattgtagaggatcttggtttccttacgaggataggttcaggtgtggtgaggtgcatcttagtagccgtgaggtgttggaggcggtgagtcctcatatgatggaagagaggacagataggttcaggcgtgtggtggagaatcgaagctactcggtgtgtcttgtggttgaaggtctctctgattttggaaacatctctgctgctttccgctcagctgatgcgttggggattcaatctgtacatgttgtttcctgtgacagctccaaaaggtgcccctttgaggtataacggaaatcgccatgtgagtatgggagctgagaaatggctggacattgagttttgggacacacctaaagaatgtttcaaagttttgaagtctcgcggttacagaatagctacaactcatttgggaatggacacggtttccatttacgatatggactggtcatgcccaacagcaatagttgttggaaacgagggcaggggaataagtgacgaagcgttggagttatcagatctgcgttgcagtattccgatgaatggaatggttgattcgtttaatgtctcagtggctgcagggattctgatgcaccacgcagtctctgatagaaccactcgtctgggaagccatggagatctgtcggaagcagagaaagagatattgatggctgagttctcacttcgtcacagtagaagctcaatttgcattgcttacgagttcgctaaacgtaaacaacaacactctacctcctcctaattttgaaaccgttgtcttattctctcgctgttttgcgtgttataggcttcgaatgacgcctataaaaactctttcgaactctttttttggtacgacgcttgcttcatgtacaactcttaaattctataaaagacatccttctgtcg

SEQ ID NO: 72736 - protein, 198 aa, Arabidopsis thaliana; identical to SEQ ID NO: 24596
  peptide (1)..(198): Ceres Seq. ID no. 4945206

SEQ ID NO: 72737 - protein, 179 aa, Arabidopsis thaliana; identical to SEQ ID NO: 24597
  peptide (1)..(179): Ceres Seq. ID no. 4945207

SEQ ID NO: 72738 - protein, 171 aa, Arabidopsis thaliana; identical to SEQ ID NO: 24598
  peptide (1)..(171): Ceres Seq. ID no. 4945208

SEQ ID NO: 72739 - DNA, 1271 bp, Arabidopsis thaliana
  misc_feature (1)..(1271): Ceres Seq. ID no. 4945209
  misc_feature (1)..(1271): Ortholog of  Ceres SEQ ID NO 13528157 as cited in SEQ ID NO 60102
  misc_feature (1)..(1271): Ortholog of  Ceres SEQ ID NO 15226041 as cited in SEQ ID NO 62920
  misc_feature (1)..(1271): Ortholog of  Ceres SEQ ID NO 15179340 as cited in SEQ ID NO 0
accttatctttacttctatcatctattcttcttcttcctccatctctagaaaattataatacttcttgtttcttaaatcttatttgtattacaataaccaaaacccaagtttacaaaacatttcttcttcttgtttttcgaaaccctaaatgttttgagttgtcatggatgtaatagctactacaactactatagtatccgacttggattcacgacaacccgaaatcgaagctccgatccggatccagcccgcgaagcctatttctttctcaaacggcaaacgctgccaccaccatcatcttgcatctgaagcggttgcggttgcgacttataaagaatgtctaaagaatcacgcagcaggtatcggcggtcacgctttagacggatgcggcgagtttatgccgtcaccgtcgtttaactccaatgaccccgcttcactaacgtgcgctgcttgtggttgccaccgtaacttccaccgccgtgaggaggatccatcttctctctctgccatcgtccctgcgatcgaatttcgacctcacaaccgtcaccagcttcctccaccgcctcctcctcatctggcggggattcgtagtccagacgacgatgattcagcttctccaccgccgatctcgtcttcttacatgcttctcgcactctctggaggaagaggaggagctaacacggcggttccaatgtctaggaaacgttttaggacgaagtttagtcagtatcagaaggagaagatgttcgagttctcggagagagttgggtggaggatgccgaaagctgatgacgtggtggttaaggagttttgtcgggagattggagttgataaaagcgttttcaaagtgtggatgcataacaacaagatttcaggacgcagcggcgctagaagagctaacggcggagtagtagtaggaggagtaggagatagtcgtcagagtgttgttccgacaaatgggtcgttttcttcgacgtgaggaaaagaatggaaagcgttgaaaaagcgtcgtcgttttagaggctaattcttttttggtttttcttctctgtgttttgaagattttttatttttagtcaacgggtcaaaatcttttttctattccactttgttttgttatgtcttgtagtttgtactcttgttagtagtttatctttgttagagaggtgatttgagttgtatctttcgaccaaatgtgagaagaaagataaatgagtaacctcctaaaaccgaataacaaagtcaattaatccaattgttttctaaattc

SEQ ID NO: 72740 - protein, 271 aa, Arabidopsis thaliana; identical to SEQ ID NO: 25961
  peptide (1)..(271): Ceres Seq. ID no. 4945210

SEQ ID NO: 72741 - protein, 193 aa, Arabidopsis thaliana; identical to SEQ ID NO: 25962
  peptide (1)..(193): Ceres Seq. ID no. 4945211

SEQ ID NO: 72742 - DNA, 2064 bp, Arabidopsis thaliana
  misc_feature (1)..(2064): Ceres Seq. ID no. 4945238
  misc_feature (1)..(2064): Ortholog of  Ceres SEQ ID NO 13595870 as cited in SEQ ID NO 62101
  misc_feature (1)..(2064): Ortholog of  Ceres SEQ ID NO 13590241 as cited in SEQ ID NO 63878
  misc_feature (1)..(2064): Ortholog of  Ceres SEQ ID NO 13657939 as cited in SEQ ID NO 66349
atgaaaatggcatcatcatcatcagctttgtctttccctctctccaacatcccaacctgtagtaagaagtctcaacaatttcaaaaaccggcttctttatccaaatccagtcacacacataaacctagtctcaaaacccaaattttacaccacaaattcactaagagaaatttactgagtttgacgactgccttgggatttacgtcagcgctaggaactgttcttgctcaccccgcaaaagctgaaccagaagctcccatcgaagccacttccaatagaatgtcgtattcgagattcctgcagcatctgaaagagaatgaagtgaagaaagttgacttgatcgagaacggaacggttgcgatcgtagagatctctaatccagtagtaggaaagatccagagggttagggttaaccttcccggtttaccagtcgatctggtgagggagatgaaggagaagaacgtcgatttcgctgctcatcccatgaatgtgaactggggagctttcttgctcaacttcttggggaatttagggtttcctttgatcttgcttgtctctctgcttttaacatcttcttcaagaagaaaccctgctggacctaacttgccttttggtcttggaagcaaagctaagtttcagatggagcctaacacagggataacgttcgaggatgtagcaggagtagacgaagccaagcaagactttgaagagatcgttgaatttttgaaaaccccagagaaattctcagctttgggggctaaaatcccaaaaggcgtcttgttgaccggaccgccaggaaccggaaagacactcttggccaaggctatagccggagaagccggtgttccttttttttcattgtctggttcggagttcatagagatgtttgttggtgtaggagcatctagagctagagacttgtttaacaaggcaaaggctaattcaccttgtatagtgttcattgatgagattgatgctgttgggagaatgagaggaaccggtataggaggaggaaacgacgaacgtgagcagacgctaaaccagatattaaccgaaatggatgggtttgcggggaataccggagtaattgtgatcgctgcaacgaaccggccagagattctagactctgctttgctccgaccaggaagattcgataggcaggtttctgttggtttaccggatataagaggaagagaggagatattaaaagttcacagcagaagcaagaaactcgacaaagatgtatctttgagcgtaattgccatgagaactccaggttttagtggagctgacttggccaatcttatgaacgaagcagcgattctcgccggaagaagaggaaaagacaagattacccttacagagatcgacgactctatcgatcggatagtcgccggaatggaagggacaaagatgatcgacggtaaaagtaaagcgattgtagcgtaccatgaagtaggacatgcaatttgtgcgactttgacggagggtcatgatccggttcagaaagttacgttggttcctagaggtcaagcacgtggtctcacgtggttcttaccgggagaagatccgacattggtgtctaaacagcaattgttcgctagaatcgtcggaggactcggaggcagagccgccgaagatgtaatttttggagaaccggagataaccaccggcgctgccggtgatctccagcaagtcactgagatagcaagacagatggtgacgatgtttggtatgtcggaaatcggtccatgggcactaaccgacccagcggttaagcaaaacgatgtggttctacggatgctagcgaggaactcaatgtccgagaaacttgcggaggatattgattcttgcgtgaagaaaataatcggtgacgcttacgaggttgcgaaaaagcacgtgaggaataatagagaagctatagacaagcttgttgatgttttgttggagaaagaaaccttaacgggagacgagtttcgagcaattctgtctgagtatactgatcaaccgttaaataccgatggcgatgtaagaattcgaatcaatgacttgattagtgtctaa

SEQ ID NO: 72743 - protein, 687 aa, Arabidopsis thaliana
  peptide (1)..(687): Ceres Seq. ID no. 4945239
MKMASSSSALSFPLSNIPTCSKKSQQFQKPASLSKSSHTHKPSLKTQILHHKFTKRNLLSLTTALGFTSALGTVLAHPAKAEPEAPIEATSNRMSYSRFLQHLKENEVKKVDLIENGTVAIVEISNPVVGKIQRVRVNLPGLPVDLVREMKEKNVDFAAHPMNVNWGAFLLNFLGNLGFPLILLVSLLLTSSSRRNPAGPNLPFGLGSKAKFQMEPNTGITFEDVAGVDEAKQDFEEIVEFLKTPEKFSALGAKIPKGVLLTGPPGTGKTLLAKAIAGEAGVPFFSLSGSEFIEMFVGVGASRARDLFNKAKANSPCIVFIDEIDAVGRMRGTGIGGGNDEREQTLNQILTEMDGFAGNTGVIVIAATNRPEILDSALLRPGRFDRQVSVGLPDIRGREEILKVHSRSKKLDKDVSLSVIAMRTPGFSGADLANLMNEAAILAGRRGKDKITLTEIDDSIDRIVAGMEGTKMIDGKSKAIVAYHEVGHAICATLTEGHDPVQKVTLVPRGQARGLTWFLPGEDPTLVSKQQLFARIVGGLGGRAAEDVIFGEPEITTGAAGDLQQVTEIARQMVTMFGMSEIGPWALTDPAVKQNDVVLRMLARNSMSEKLAEDIDSCVKKIIGDAYEVAKKHVRNNREAIDKLVDVLLEKETLTGDEFRAILSEYTDQPLNTDGDVRIRINDLISV

SEQ ID NO: 72744 - protein, 685 aa, Arabidopsis thaliana
  peptide (1)..(685): Ceres Seq. ID no. 4945240
MASSSSALSFPLSNIPTCSKKSQQFQKPASLSKSSHTHKPSLKTQILHHKFTKRNLLSLTTALGFTSALGTVLAHPAKAEPEAPIEATSNRMSYSRFLQHLKENEVKKVDLIENGTVAIVEISNPVVGKIQRVRVNLPGLPVDLVREMKEKNVDFAAHPMNVNWGAFLLNFLGNLGFPLILLVSLLLTSSSRRNPAGPNLPFGLGSKAKFQMEPNTGITFEDVAGVDEAKQDFEEIVEFLKTPEKFSALGAKIPKGVLLTGPPGTGKTLLAKAIAGEAGVPFFSLSGSEFIEMFVGVGASRARDLFNKAKANSPCIVFIDEIDAVGRMRGTGIGGGNDEREQTLNQILTEMDGFAGNTGVIVIAATNRPEILDSALLRPGRFDRQVSVGLPDIRGREEILKVHSRSKKLDKDVSLSVIAMRTPGFSGADLANLMNEAAILAGRRGKDKITLTEIDDSIDRIVAGMEGTKMIDGKSKAIVAYHEVGHAICATLTEGHDPVQKVTLVPRGQARGLTWFLPGEDPTLVSKQQLFARIVGGLGGRAAEDVIFGEPEITTGAAGDLQQVTEIARQMVTMFGMSEIGPWALTDPAVKQNDVVLRMLARNSMSEKLAEDIDSCVKKIIGDAYEVAKKHVRNNREAIDKLVDVLLEKETLTGDEFRAILSEYTDQPLNTDGDVRIRINDLISV

SEQ ID NO: 72745 - protein, 594 aa, Arabidopsis thaliana
  peptide (1)..(594): Ceres Seq. ID no. 4945241
MSYSRFLQHLKENEVKKVDLIENGTVAIVEISNPVVGKIQRVRVNLPGLPVDLVREMKEKNVDFAAHPMNVNWGAFLLNFLGNLGFPLILLVSLLLTSSSRRNPAGPNLPFGLGSKAKFQMEPNTGITFEDVAGVDEAKQDFEEIVEFLKTPEKFSALGAKIPKGVLLTGPPGTGKTLLAKAIAGEAGVPFFSLSGSEFIEMFVGVGASRARDLFNKAKANSPCIVFIDEIDAVGRMRGTGIGGGNDEREQTLNQILTEMDGFAGNTGVIVIAATNRPEILDSALLRPGRFDRQVSVGLPDIRGREEILKVHSRSKKLDKDVSLSVIAMRTPGFSGADLANLMNEAAILAGRRGKDKITLTEIDDSIDRIVAGMEGTKMIDGKSKAIVAYHEVGHAICATLTEGHDPVQKVTLVPRGQARGLTWFLPGEDPTLVSKQQLFARIVGGLGGRAAEDVIFGEPEITTGAAGDLQQVTEIARQMVTMFGMSEIGPWALTDPAVKQNDVVLRMLARNSMSEKLAEDIDSCVKKIIGDAYEVAKKHVRNNREAIDKLVDVLLEKETLTGDEFRAILSEYTDQPLNTDGDVRIRINDLISV

SEQ ID NO: 72746 - DNA, 1344 bp, Arabidopsis thaliana
  misc_feature (1)..(1344): Ceres Seq. ID no. 4945326
  misc_feature (1)..(1344): Ortholog of  Ceres SEQ ID NO 13596921 as cited in SEQ ID NO 62368
atggttgatgatccgttgaccaatgaggtcgtttcgtggagcagcgggaacaacagcttcgtcgtctggagtgccccggagttctcgaaggtgctcttgcccaagtatttcaagcacaacaacttctccagcttcgtcagacagttaaatacttatggtttcagaaaagttgatcctgaccgatgggaatttgcaaatgaaggatttcttagaggccgaaaacaactactgaagagtattgtcaggagaaaaccttcgcatgtgcagcagaatcagcaacaaactcaagttcagagctcatctgttggtgcttgtgtcgaggtggggaagtttggaatagaagaagaagtggaaagacttaagcgggataagaatgttcttatgcaagaactcgtcaggttaaggcagcaacagcaagctactgaaaaccaactgcagaatgtgggacagaaagttcaggtgatggagcaaaggcaacaacaaatgatgtcgtttttagcaaaggctgttcaaagtccaggtttcttaaaccagttagtacaacagaataataatgatggcaacagacaaattccaggaagcaacaaaaagaggagacttcctgtagatgagcaggagaatcgtggtgacaatgtggctaatggtcttaaccgccagattgttagatatcagccgtcgataaacgaagcagcacaaaatatgcttcgacagttcttaaatactagtacctcacctcggtatgaatcagtttcaaacaatcctgacagtttcctattgggtgatgttcccagttctacctctgtagacaatgggaacccttcaagtagagtttctggagtaacattggccgagttttcacccaacacagttcagtcagcaacgaatcaagtacccgaagcaagtttggctcatcatcctcaagctggtctggttcagccaaatataggtcaaagtccggctcaaggagcagcacctgcagactcttggagccctgaatttgatttagttggatgcgagacagatagtggagagtgttttgatccaataatggctgttttagatgagtcagaaggcgatgcaatttctcctgaaggtgagggcaagatgaatgagttactggagggagtccctaagctgcccggaatccaagatccattctgggaacagttcttttctgttgaactcccagcgattgcagatacagacgatattctatcaggatcagtggagaataatgacttggtattggaacaagaaccaaacgagtggacccgtaatgaacaacaaatgaagtatcttactgaacaaatgggactgctttcctcagaagcacagaggaaataa

SEQ ID NO: 72747 - protein, 447 aa, Arabidopsis thaliana
  peptide (1)..(447): Ceres Seq. ID no. 4945327
MVDDPLTNEVVSWSSGNNSFVVWSAPEFSKVLLPKYFKHNNFSSFVRQLNTYGFRKVDPDRWEFANEGFLRGRKQLLKSIVRRKPSHVQQNQQQTQVQSSSVGACVEVGKFGIEEEVERLKRDKNVLMQELVRLRQQQQATENQLQNVGQKVQVMEQRQQQMMSFLAKAVQSPGFLNQLVQQNNNDGNRQIPGSNKKRRLPVDEQENRGDNVANGLNRQIVRYQPSINEAAQNMLRQFLNTSTSPRYESVSNNPDSFLLGDVPSSTSVDNGNPSSRVSGVTLAEFSPNTVQSATNQVPEASLAHHPQAGLVQPNIGQSPAQGAAPADSWSPEFDLVGCETDSGECFDPIMAVLDESEGDAISPEGEGKMNELLEGVPKLPGIQDPFWEQFFSVELPAIADTDDILSGSVENNDLVLEQEPNEWTRNEQQMKYLTEQMGLLSSEAQRK

SEQ ID NO: 72748 - protein, 320 aa, Arabidopsis thaliana
  peptide (1)..(320): Ceres Seq. ID no. 4945328
MQELVRLRQQQQATENQLQNVGQKVQVMEQRQQQMMSFLAKAVQSPGFLNQLVQQNNNDGNRQIPGSNKKRRLPVDEQENRGDNVANGLNRQIVRYQPSINEAAQNMLRQFLNTSTSPRYESVSNNPDSFLLGDVPSSTSVDNGNPSSRVSGVTLAEFSPNTVQSATNQVPEASLAHHPQAGLVQPNIGQSPAQGAAPADSWSPEFDLVGCETDSGECFDPIMAVLDESEGDAISPEGEGKMNELLEGVPKLPGIQDPFWEQFFSVELPAIADTDDILSGSVENNDLVLEQEPNEWTRNEQQMKYLTEQMGLLSSEAQRK

SEQ ID NO: 72749 - protein, 293 aa, Arabidopsis thaliana
  peptide (1)..(293): Ceres Seq. ID no. 4945329
MEQRQQQMMSFLAKAVQSPGFLNQLVQQNNNDGNRQIPGSNKKRRLPVDEQENRGDNVANGLNRQIVRYQPSINEAAQNMLRQFLNTSTSPRYESVSNNPDSFLLGDVPSSTSVDNGNPSSRVSGVTLAEFSPNTVQSATNQVPEASLAHHPQAGLVQPNIGQSPAQGAAPADSWSPEFDLVGCETDSGECFDPIMAVLDESEGDAISPEGEGKMNELLEGVPKLPGIQDPFWEQFFSVELPAIADTDDILSGSVENNDLVLEQEPNEWTRNEQQMKYLTEQMGLLSSEAQRK

SEQ ID NO: 72750 - DNA, 1680 bp, Arabidopsis thaliana
  misc_feature (1)..(1680): Ceres Seq. ID no. 4945606
  misc_feature (1)..(1680): Ortholog of  Ceres SEQ ID NO 14314096 as cited in SEQ ID NO 63279
atgggattttcattttcttcaaaccgttttggttacttgacagtcacattccttctcgttatctcttgtcttctgttgggtttcttcacgaatcctgttgattcaagtgctctaagacctaaatcagagcatgattgtagtgccctgaagcactttcatgactacaaatcaaagtgtgcttacctgaaatcgattgatccatgtgctagtcaaggtttcttcgattacctctcttttctctactgtaatttcgaaggtttcccaattttgggtcagtttcttctcttcctctggttgcttctcttgttctatctattgggtcatacggcctctgagtacttttgttcatctcttgaaagtctctcaaagctgcttaatttgtcaccaactgttgctggtgttactcttttgtcgcttggtaatggtgctcctgatttgtttgcaagtttggtctctttcatgggagaatctaaaggtacttatgatgttggtctcaacactgttgtgggaggttctggttttgttacctgtgttgttgttgggatcattagcatttcgttgcataagagacgtgtgaggattgagagagctgcgtttataagagacatttgcttcttctgtgctgctattggttctttggctttgattttggtctatggaaagatcaatttctggggtgctcttgggttttgttcattgtatgctgtttatgttgcctttgtggttctctcttggagatttggtggagatcaaggtgctgaatctgatcttgagtcaatccataagcgtggtagtcttagtgaaccaatcttgcagagagacggtcttgaggaaattgaagatggtgttgttaatggagagcatcagattgttgatgatgatgatgatcaccagagatattattactggaaaagattggtcatttgggctatcactctgcctctcaacttgccaaggatattaacaattcctgtagtgagtgaagacaaatggtctaaaccattagctgttgcctcggtcacatttgccccggttctgttgtcgtttttatggaactggaagcggaaaccgacgagttttgaggcgggggttgtttatctcatcgggtgtttgatcggtatagctcttggtttcattgcaggagccacgacgaagaaattaaccccaccaaagaaatggttgttgccttggttagcaggagggtttgtaatgagcatgacatggagttacatatcagcacaagagctagttgcgcttttgacctcactaggatacattttcggtgtaagcccttcgatcttaggcttaacggtcctcgcttggggtaattcaattggagatctaataaccaacttgacaatggcgctacacgatgggaacgaaggagctcaagtggctgtatcgggatgttacgccggtccgatcttcaatacattgtttgctctcgggatatcgcttgtgggatgtgcatgggaggcttatccgttgagcattgtgattaagacagatcctcgtttgttggagagtcttggatttctggtcgcaggactggtatggtcgttcttggttctgtttagtaaccgtatgaggcttggtggtgtgatgggcatagggcttttggttatttacttggcttcattgtctctaagaattatgcaaaccgttggagatgctcactaa

SEQ ID NO: 72751 - protein, 559 aa, Arabidopsis thaliana
  peptide (1)..(559): Ceres Seq. ID no. 4945607
MGFSFSSNRFGYLTVTFLLVISCLLLGFFTNPVDSSALRPKSEHDCSALKHFHDYKSKCAYLKSIDPCASQGFFDYLSFLYCNFEGFPILGQFLLFLWLLLLFYLLGHTASEYFCSSLESLSKLLNLSPTVAGVTLLSLGNGAPDLFASLVSFMGESKGTYDVGLNTVVGGSGFVTCVVVGIISISLHKRRVRIERAAFIRDICFFCAAIGSLALILVYGKINFWGALGFCSLYAVYVAFVVLSWRFGGDQGAESDLESIHKRGSLSEPILQRDGLEEIEDGVVNGEHQIVDDDDDHQRYYYWKRLVIWAITLPLNLPRILTIPVVSEDKWSKPLAVASVTFAPVLLSFLWNWKRKPTSFEAGVVYLIGCLIGIALGFIAGATTKKLTPPKKWLLPWLAGGFVMSMTWSYISAQELVALLTSLGYIFGVSPSILGLTVLAWGNSIGDLITNLTMALHDGNEGAQVAVSGCYAGPIFNTLFALGISLVGCAWEAYPLSIVIKTDPRLLESLGFLVAGLVWSFLVLFSNRMRLGGVMGIGLLVIYLASLSLRIMQTVGDAH

SEQ ID NO: 72752 - protein, 406 aa, Arabidopsis thaliana
  peptide (1)..(406): Ceres Seq. ID no. 4945608
MGESKGTYDVGLNTVVGGSGFVTCVVVGIISISLHKRRVRIERAAFIRDICFFCAAIGSLALILVYGKINFWGALGFCSLYAVYVAFVVLSWRFGGDQGAESDLESIHKRGSLSEPILQRDGLEEIEDGVVNGEHQIVDDDDDHQRYYYWKRLVIWAITLPLNLPRILTIPVVSEDKWSKPLAVASVTFAPVLLSFLWNWKRKPTSFEAGVVYLIGCLIGIALGFIAGATTKKLTPPKKWLLPWLAGGFVMSMTWSYISAQELVALLTSLGYIFGVSPSILGLTVLAWGNSIGDLITNLTMALHDGNEGAQVAVSGCYAGPIFNTLFALGISLVGCAWEAYPLSIVIKTDPRLLESLGFLVAGLVWSFLVLFSNRMRLGGVMGIGLLVIYLASLSLRIMQTVGDAH

SEQ ID NO: 72753 - DNA, 1257 bp, Arabidopsis thaliana
  misc_feature (1)..(1257): Ceres Seq. ID no. 4945794
  misc_feature (1)..(1257): Ortholog of  Ceres SEQ ID NO 14314536 as cited in SEQ ID NO 52436
atggaaggctcttcaattcaaccgcccagaaattttgttctcgctaaagattcttctactggttcttcttcttcttcttcttcttctcagtatgaggttttaatcaatgattgttatcaggttaaagaacaatctgttgaagatgtatccagatctcagccaagtggaagccaattggatgtttctatccaaataccaccaaaaccgacgcctagtttaggaattttgagaaatctgagtctgaaaaggaaagcttctctaccaaactatgagagaagattgctactaagtcctagtgtttcagaaaccagtgaaaagcctcttgttgcaagtccgatcacatcgccttactggaaaaggtgtttgtcacttccttctagtaattctgctaaactgtctctggttgtatctacaacgcctgtttccgctgtggtgcatagtgaacagcctaagtctaataaagatggtcttcatgcatctgtttcaagatccttgtccatgaacagagtgattgtacgagctgtctcttttgacgacaacaaaaatcacatttcaaatgaagcaaatggcgatcaaatcactccagttcctgcagaagaaacagaagaagaaattcctgaagaagaagcagtatgcaggatttgtcttgatgtgtgcgaagaaggtaacacactgaaaatggaatgcagttgcaaaggtgacctcagacttgttcacgagcattgtgccattaagtggtttagtacaaaaggaacacgaatctgcgatgtatgcagacaagaagtccggaacttaccagtgatactcctccgtgtcccaacaattaatcaacttaccaatagacgggaactcactcagcagagttcagagccacaaagcatcagtgttgggcaagagtttgtagtgcttgtactcatcagcaccgtctgctacttcttcttccttgaacatttactggcaatatttgttgcagcgccattttcattcacccttgcactcttagcctcaacttttgccgtcatcctcgcgatcagagaatacatatggacatacgcagctcttgagtttgcactagtggcattgcttgttcatctattatatgctacagtaagtaatactaaaccggatactgggtttcgggatggcaatgtgcttaaacttgttgtgcatttgttattcctctcggcctgtgcggtttccgcggaatacaaacttagtataaagatagtctcttctgttcttaaagttcggatttga

SEQ ID NO: 72754 - protein, 418 aa, Arabidopsis thaliana
  peptide (1)..(418): Ceres Seq. ID no. 4945795
MEGSSIQPPRNFVLAKDSSTGSSSSSSSSQYEVLINDCYQVKEQSVEDVSRSQPSGSQLDVSIQIPPKPTPSLGILRNLSLKRKASLPNYERRLLLSPSVSETSEKPLVASPITSPYWKRCLSLPSSNSAKLSLVVSTTPVSAVVHSEQPKSNKDGLHASVSRSLSMNRVIVRAVSFDDNKNHISNEANGDQITPVPAEETEEEIPEEEAVCRICLDVCEEGNTLKMECSCKGDLRLVHEHCAIKWFSTKGTRICDVCRQEVRNLPVILLRVPTINQLTNRRELTQQSSEPQSISVGQEFVVLVLISTVCYFFFLEHLLAIFVAAPFSFTLALLASTFAVILAIREYIWTYAALEFALVALLVHLLYATVSNTKPDTGFRDGNVLKLVVHLLFLSACAVSAEYKLSIKIVSSVLKVRI

SEQ ID NO: 72755 - protein, 252 aa, Arabidopsis thaliana
  peptide (1)..(252): Ceres Seq. ID no. 4945796
MNRVIVRAVSFDDNKNHISNEANGDQITPVPAEETEEEIPEEEAVCRICLDVCEEGNTLKMECSCKGDLRLVHEHCAIKWFSTKGTRICDVCRQEVRNLPVILLRVPTINQLTNRRELTQQSSEPQSISVGQEFVVLVLISTVCYFFFLEHLLAIFVAAPFSFTLALLASTFAVILAIREYIWTYAALEFALVALLVHLLYATVSNTKPDTGFRDGNVLKLVVHLLFLSACAVSAEYKLSIKIVSSVLKVRI

SEQ ID NO: 72756 - DNA, 705 bp, Arabidopsis thaliana
  misc_feature (1)..(705): Ceres Seq. ID no. 4945938
  misc_feature (1)..(705): Ortholog of  Ceres SEQ ID NO 13599348 as cited in SEQ ID NO 0
atgctgagtaggttgtcaaggcgttgctactgcacttcttctgttcatcggccatggctgtttctaggactgggcaatccaggtgacaaatacaaaggaactagacacaacattggattcgaaatgattgatgttttcgctgagtcagtggggattcaaatgaacttggtaaatttcaaggctataatgggacaaggtttcgtggcagatcttcccgtcatccttgcaaaaccgcaaacctacatgaacttgagcggtgaatcaagtggacctctcgcagcttattacaagttacctctcaatcgtgtgcttgtggttcatgatgacatgcaattgccatgtggtgttcttcgtcttcaagaaaaaggaggccatggatgtcacaacgggttaaaaagtgtaatgaaccatttccgaggcaacagggaatttgcaaggctacgaatcggaattggaaagcctccgggacaaatggacccaaaggcgttcttgttgcagaagttcagcatgccagctcgtgaacgggaattgtatttatggctccctgtgtattgtgtgtttctcggaaagatggataaagctttagcagaaggggtggatgctctgaagctcgtcttggctaaagactttggagaaagctggagattgttcaatgtggaacagaagtacaaacacttaaaacaacacacaatactatcagcttga

SEQ ID NO: 72757 - protein, 234 aa, Arabidopsis thaliana
  peptide (1)..(234): Ceres Seq. ID no. 4945939
MLSRLSRRCYCTSSVHRPWLFLGLGNPGDKYKGTRHNIGFEMIDVFAESVGIQMNLVNFKAIMGQGFVADLPVILAKPQTYMNLSGESSGPLAAYYKLPLNRVLVVHDDMQLPCGVLRLQEKGGHGCHNGLKSVMNHFRGNREFARLRIGIGKPPGQMDPKAFLLQKFSMPARERELYLWLPVYCVFLGKMDKALAEGVDALKLVLAKDFGESWRLFNVEQKYKHLKQHTILSA

SEQ ID NO: 72758 - protein, 193 aa, Arabidopsis thaliana
  peptide (1)..(193): Ceres Seq. ID no. 4945940
MIDVFAESVGIQMNLVNFKAIMGQGFVADLPVILAKPQTYMNLSGESSGPLAAYYKLPLNRVLVVHDDMQLPCGVLRLQEKGGHGCHNGLKSVMNHFRGNREFARLRIGIGKPPGQMDPKAFLLQKFSMPARERELYLWLPVYCVFLGKMDKALAEGVDALKLVLAKDFGESWRLFNVEQKYKHLKQHTILSA

SEQ ID NO: 72759 - protein, 181 aa, Arabidopsis thaliana
  peptide (1)..(181): Ceres Seq. ID no. 4945941
MNLVNFKAIMGQGFVADLPVILAKPQTYMNLSGESSGPLAAYYKLPLNRVLVVHDDMQLPCGVLRLQEKGGHGCHNGLKSVMNHFRGNREFARLRIGIGKPPGQMDPKAFLLQKFSMPARERELYLWLPVYCVFLGKMDKALAEGVDALKLVLAKDFGESWRLFNVEQKYKHLKQHTILSA

SEQ ID NO: 72760 - DNA, 1803 bp, Arabidopsis thaliana
  misc_feature (1)..(1803): Ceres Seq. ID no. 4945965
  misc_feature (1)..(1803): Ortholog of  Ceres SEQ ID NO 14306420 as cited in SEQ ID NO 53854
atggaggttagatctgagctccgaaaacagtcacgaagtggaaagaggaaatgggctattttagttgggattgtggctcttactcatatcttgttattactttcatatggtgacgccttaagatatctgttgcctgatggtagaagactgaaacttcccaatgagaacaatgcgttgttgatgactccatcacgaaacacacttgcggttaacgtttctgaggattctgcagtctcggggattcatgtcttggagaaaaatgggtatgtttcaggttttggtctaaggaatgagtctgaggatgatgaagggtttgttggaaatgttgattttgagagctttgaagatgtgaaagacagtatcatcatcaaagaagttgctggaagcagtgataatctttttccttcagagactactgtaatgcaaaaggagagtgtttcaacgagtaataatggttatcaggtgcaaaatgtgacggttcaaagtcagaagaacgtcaaaagctctattttaagtgggggctcctccattgctagtcctgcatctggaaatagttccttgcttgtttctaagaaagtaagtaagaagaagaaaatgcggtgtgatcttccaccaaaatctgtgacaacaatagatgagatgaatcggatattagcaaggcaccgtagaacttcacgagcaatggagatattgactgcaaggaaggagatagagaatgctccggttgcaaaacttgaacgggagctctaccctccaatattccgtaatgtttccctgtttaaaaggagttacgaacttatggaacggatactcaaagtttacgtatataaggaagggaaccgccccatctttcatactccgatactcaagggattgtatgcatcagagggatggttcatgaagttgatggaaggaaacaagcagtacactgtaaaggacccaagaaaggctcacttgtactatatgccatttagtgcacggatgctagaatacacactttatgtgcgtaattctcacaaccgcactaacctacgccagtttcttaaggaatatacggagcacatcagttccaagtaccctttcttcaatagaaccgatggagccgatcattttcttgttgcttgtcatgattgggcaccatatgagactaggcaccacatggagcattgcattaaagctttatgcaatgcagacgtaaccgcaggctttaagattggaagagacatctcactccctgaaacatatgtcagagccgccaaaaatccgcttcgtgatttgggtggaaaaccgccgtctcagaggcggaccctggctttctatgctggaagcatgcacggttacttacgtcagattctgctacagcattggaaagacaaagacccggacatgaaaatcttcgggcgaatgccatttggtgtggcgagcaagatgaattacatcgagcagatgaaaagcagcaagtactgcatttgtcctaaagggtacgaagtcaacagcccgagggtggttgaatcgattttctatgagtgtgtccctgtgatcatctccgacaactttgtgccacctttcttcgaggttcttgattggagtgcgttctcggtcattgttgcggagaaagacatcccgaggttgaaagatatcttgttatcaataccagaagacaaatacgtgaagatgcaaatggcggtgagaaaggcgcaaaggcactttctgtggcatgctaaacctgagaaatatgatctgtttcatatggttttgcattctatttggtataacagagtgttccaagcaaagcgtagatga

SEQ ID NO: 72761 - protein, 600 aa, Arabidopsis thaliana
  peptide (1)..(600): Ceres Seq. ID no. 4945966
MEVRSELRKQSRSGKRKWAILVGIVALTHILLLLSYGDALRYLLPDGRRLKLPNENNALLMTPSRNTLAVNVSEDSAVSGIHVLEKNGYVSGFGLRNESEDDEGFVGNVDFESFEDVKDSIIIKEVAGSSDNLFPSETTVMQKESVSTSNNGYQVQNVTVQSQKNVKSSILSGGSSIASPASGNSSLLVSKKVSKKKKMRCDLPPKSVTTIDEMNRILARHRRTSRAMEILTARKEIENAPVAKLERELYPPIFRNVSLFKRSYELMERILKVYVYKEGNRPIFHTPILKGLYASEGWFMKLMEGNKQYTVKDPRKAHLYYMPFSARMLEYTLYVRNSHNRTNLRQFLKEYTEHISSKYPFFNRTDGADHFLVACHDWAPYETRHHMEHCIKALCNADVTAGFKIGRDISLPETYVRAAKNPLRDLGGKPPSQRRTLAFYAGSMHGYLRQILLQHWKDKDPDMKIFGRMPFGVASKMNYIEQMKSSKYCICPKGYEVNSPRVVESIFYECVPVIISDNFVPPFFEVLDWSAFSVIVAEKDIPRLKDILLSIPEDKYVKMQMAVRKAQRHFLWHAKPEKYDLFHMVLHSIWYNRVFQAKRR

SEQ ID NO: 72762 - protein, 540 aa, Arabidopsis thaliana
  peptide (1)..(540): Ceres Seq. ID no. 4945967
MTPSRNTLAVNVSEDSAVSGIHVLEKNGYVSGFGLRNESEDDEGFVGNVDFESFEDVKDSIIIKEVAGSSDNLFPSETTVMQKESVSTSNNGYQVQNVTVQSQKNVKSSILSGGSSIASPASGNSSLLVSKKVSKKKKMRCDLPPKSVTTIDEMNRILARHRRTSRAMEILTARKEIENAPVAKLERELYPPIFRNVSLFKRSYELMERILKVYVYKEGNRPIFHTPILKGLYASEGWFMKLMEGNKQYTVKDPRKAHLYYMPFSARMLEYTLYVRNSHNRTNLRQFLKEYTEHISSKYPFFNRTDGADHFLVACHDWAPYETRHHMEHCIKALCNADVTAGFKIGRDISLPETYVRAAKNPLRDLGGKPPSQRRTLAFYAGSMHGYLRQILLQHWKDKDPDMKIFGRMPFGVASKMNYIEQMKSSKYCICPKGYEVNSPRVVESIFYECVPVIISDNFVPPFFEVLDWSAFSVIVAEKDIPRLKDILLSIPEDKYVKMQMAVRKAQRHFLWHAKPEKYDLFHMVLHSIWYNRVFQAKRR

SEQ ID NO: 72763 - protein, 460 aa, Arabidopsis thaliana
  peptide (1)..(460): Ceres Seq. ID no. 4945968
MQKESVSTSNNGYQVQNVTVQSQKNVKSSILSGGSSIASPASGNSSLLVSKKVSKKKKMRCDLPPKSVTTIDEMNRILARHRRTSRAMEILTARKEIENAPVAKLERELYPPIFRNVSLFKRSYELMERILKVYVYKEGNRPIFHTPILKGLYASEGWFMKLMEGNKQYTVKDPRKAHLYYMPFSARMLEYTLYVRNSHNRTNLRQFLKEYTEHISSKYPFFNRTDGADHFLVACHDWAPYETRHHMEHCIKALCNADVTAGFKIGRDISLPETYVRAAKNPLRDLGGKPPSQRRTLAFYAGSMHGYLRQILLQHWKDKDPDMKIFGRMPFGVASKMNYIEQMKSSKYCICPKGYEVNSPRVVESIFYECVPVIISDNFVPPFFEVLDWSAFSVIVAEKDIPRLKDILLSIPEDKYVKMQMAVRKAQRHFLWHAKPEKYDLFHMVLHSIWYNRVFQAKRR

SEQ ID NO: 72764 - DNA, 2250 bp, Arabidopsis thaliana
  misc_feature (1)..(2250): Ceres Seq. ID no. 4946067
  misc_feature (1)..(2250): Ortholog of  Ceres SEQ ID NO 14310206 as cited in SEQ ID NO 20650
atgacgattaaaccggcggttcgtatttccgacgggaatctaatcatcaaaaaccggacgattctaaccggtgtaccagataatgtcatcacgacgtcagcatcggaagctggaccggtagaaggagtcttcgtcggagctgtatttaacaaggaagagagtaaacacatcgtaccgatcggtacgcttcgcaattcccggtttatgtcttgtttccggtttaagctctggtggatggcccagagaatgggagaaatgggccgagatattccctacgagacgcagttcttattggtcgagagcaacgatgggtcccaccttgagtctgacggagctaacggcgtcgagtgtaaccagaaagtttacaccgttttcttgccgttaatcgaaggatctttccgttcgtgtctccaaggaaacgttaacgatgaggttgagctctgtttggagagtggtgacgtggacactaaacggtcgtcgtttactcactctctgtatattcacgccggtacagatccgtttcagacaataacggacgctattcgcaccgttaagttgcatctgaatagtttccgtcaacgtcacgaaaagaagcttccagggatcgttgactacttcggatggtgcacttgggacgcgttttatcaagaagtgactcaggaaggcgtcgaagctggtcttaagtctctcgccgccggtggtacgccgccgaagtttgttatcatagacgacggttggcaatcagttgagagagatgccacggtggaggccggagatgagaagaaagagtcaccgatttttcgactgacggggatcaaggagaacgaaaagtttaagaagaaggatgatccaaacgttgggattaagaacattgtcaagattgctaaggagaaacacggtttgaaatatgtttacgtgtggcacgcgataacgggttattggggcggagttagacccggggaagaatacggatctgttatgaaatatcctaatatgtcaaagggtgtggtggagaatgatccgacgtggaagactgatgtaatgacgctgcaagggttgggtttggttagccccaagaaagtgtataagttttacaatgagcttcatagttacttggctgatgctggcgtggacggtgtgaaagtggatgtgcagtgtgtattggagactttgggtggtggtttaggcggtcgggttgagctgactcgtcagtttcatcaagctcttgactcctctgttgctaagaacttcccggataatggctgcattgcttgtatgagccataatacggatgctctttactgctcgaagcaagcagctgtgattagagcatcagatgatttctatccacgggatccggtgtctcataccatccatatagcctccgttgcttataacagtgtgttcttgggagagtttatgcagcctgactgggatatgttccattccgtgcaccctgctgcagagtatcatgcctctgctagggccatcagtggtgggcctctctatgtcagtgattctcctggaaagcacaactttgagcttctaagaaagcttgtattgcctgatggatcgattcttcgtgctcgactccctggtagaccaactcgcgattgtttgttcgctgatcctgcccgtgatggtgtcagcttgctaaagatatggaacatgaacaagtacactggagttcttggcgtgtataactgccaaggagcagcttggagcagcacagagagaaaaaacattttccaccagactaaaactgatagcctcactggctccattcgtggtcgtgatgtgcattcaatatcggaggcctccactgatccaacaacctggaatggagactgtgctgtttactcccagagcagaggcgaacttattgttatgccatacaatgtgtctcttccagtctcactcaaaatccgtgagcacgagatcttcacggtgagccccattagtcatcttgttgatggtgtatcttttgccccaattggtctagtaaacatgtacaattcgggaggagctatcgaaggacttagatatgaagccgagaagatgaaagtggtaatggaagttaaaggatgtggcaaattcggatcttactcttctgtgaagcctaagagatgcgttgttgagtcaaatgagattgcattcgagtacgattcctcctctggattggtcacctttgagttagacaaaatgcctatagagaacaaacgatttcatctgatccaagttgagttatga

SEQ ID NO: 72765 - protein, 749 aa, Arabidopsis thaliana; identical to SEQ ID NO: 44843
  peptide (1)..(749): Ceres Seq. ID no. 4946068

SEQ ID NO: 72766 - protein, 681 aa, Arabidopsis thaliana
  peptide (1)..(681): Ceres Seq. ID no. 4946069
MSCFRFKLWWMAQRMGEMGRDIPYETQFLLVESNDGSHLESDGANGVECNQKVYTVFLPLIEGSFRSCLQGNVNDEVELCLESGDVDTKRSSFTHSLYIHAGTDPFQTITDAIRTVKLHLNSFRQRHEKKLPGIVDYFGWCTWDAFYQEVTQEGVEAGLKSLAAGGTPPKFVIIDDGWQSVERDATVEAGDEKKESPIFRLTGIKENEKFKKKDDPNVGIKNIVKIAKEKHGLKYVYVWHAITGYWGGVRPGEEYGSVMKYPNMSKGVVENDPTWKTDVMTLQGLGLVSPKKVYKFYNELHSYLADAGVDGVKVDVQCVLETLGGGLGGRVELTRQFHQALDSSVAKNFPDNGCIACMSHNTDALYCSKQAAVIRASDDFYPRDPVSHTIHIASVAYNSVFLGEFMQPDWDMFHSVHPAAEYHASARAISGGPLYVSDSPGKHNFELLRKLVLPDGSILRARLPGRPTRDCLFADPARDGVSLLKIWNMNKYTGVLGVYNCQGAAWSSTERKNIFHQTKTDSLTGSIRGRDVHSISEASTDPTTWNGDCAVYSQSRGELIVMPYNVSLPVSLKIREHEIFTVSPISHLVDGVSFAPIGLVNMYNSGGAIEGLRYEAEKMKVVMEVKGCGKFGSYSSVKPKRCVVESNEIAFEYDSSSGLVTFELDKMPIENKRFHLIQVEL

SEQ ID NO: 72767 - protein, 671 aa, Arabidopsis thaliana
  peptide (1)..(671): Ceres Seq. ID no. 4946070
MAQRMGEMGRDIPYETQFLLVESNDGSHLESDGANGVECNQKVYTVFLPLIEGSFRSCLQGNVNDEVELCLESGDVDTKRSSFTHSLYIHAGTDPFQTITDAIRTVKLHLNSFRQRHEKKLPGIVDYFGWCTWDAFYQEVTQEGVEAGLKSLAAGGTPPKFVIIDDGWQSVERDATVEAGDEKKESPIFRLTGIKENEKFKKKDDPNVGIKNIVKIAKEKHGLKYVYVWHAITGYWGGVRPGEEYGSVMKYPNMSKGVVENDPTWKTDVMTLQGLGLVSPKKVYKFYNELHSYLADAGVDGVKVDVQCVLETLGGGLGGRVELTRQFHQALDSSVAKNFPDNGCIACMSHNTDALYCSKQAAVIRASDDFYPRDPVSHTIHIASVAYNSVFLGEFMQPDWDMFHSVHPAAEYHASARAISGGPLYVSDSPGKHNFELLRKLVLPDGSILRARLPGRPTRDCLFADPARDGVSLLKIWNMNKYTGVLGVYNCQGAAWSSTERKNIFHQTKTDSLTGSIRGRDVHSISEASTDPTTWNGDCAVYSQSRGELIVMPYNVSLPVSLKIREHEIFTVSPISHLVDGVSFAPIGLVNMYNSGGAIEGLRYEAEKMKVVMEVKGCGKFGSYSSVKPKRCVVESNEIAFEYDSSSGLVTFELDKMPIENKRFHLIQVEL

SEQ ID NO: 72768 - DNA, 660 bp, Arabidopsis thaliana
  misc_feature (1)..(660): Ceres Seq. ID no. 4946463
  misc_feature (1)..(660): Ortholog of  Ceres SEQ ID NO 13595919 as cited in SEQ ID NO 67751
atgtcatcccacggccgagaagtagaggtgaccatctcatcggcaaaggatatcaagaacgtgaactggcgcaacggcccaaacaagccatacgccgttgtatggatcgatccgaagttcaaatcctccacaagagttgacgaagacggcaacacttgtacaacgtggaacgagacatttgtcatcgctttacctccggccaacgacgatgacgacaaggtatacatcaacatcgtacacgcaggccgtgaagagaacacaaagcccctcatcggctccgcccatctcagcctccgtgatgtcattgatgacgtcggcttcggcgtccccttcatgaaaaccctcaagctcaaacgcccctctggccgacctcagggcaaactcgacgtcactgtcaccgttcgagagactccaggatcaaattacgcgcttccttatggcgatccatacgcgccggaaaaggggagcaagttcggtgggatggggactggactggcggtcggggcggtggccggagttttgggtggggtggcattagcggagggactggaggctgtggaaggcgatgaggatgatgatgatgacgatgatgctgctgctgctgctgctgctgatgatgatgatgatgatgatgatgatgatgatgatgatgacgagtga

SEQ ID NO: 72769 - protein, 219 aa, Arabidopsis thaliana
  peptide (1)..(219): Ceres Seq. ID no. 4946464
MSSHGREVEVTISSAKDIKNVNWRNGPNKPYAVVWIDPKFKSSTRVDEDGNTCTTWNETFVIALPPANDDDDKVYINIVHAGREENTKPLIGSAHLSLRDVIDDVGFGVPFMKTLKLKRPSGRPQGKLDVTVTVRETPGSNYALPYGDPYAPEKGSKFGGMGTGLAVGAVAGVLGGVALAEGLEAVEGDEDDDDDDDAAAAAAADDDDDDDDDDDDDDE

SEQ ID NO: 72770 - DNA, 312 bp, Arabidopsis thaliana
  misc_feature (1)..(312): Ceres Seq. ID no. 4946465
  misc_feature (1)..(312): Ortholog of  Ceres SEQ ID NO 13599595 as cited in SEQ ID NO 0
atgtcggaagaaatacgagagaaagatctcaccgactctaaaccatctccaccgcaaccaccaccgaaacgtggtctcatcagccgcaaaagacagcttgtgtttctctctttcatgattttattagccgcaaaaggactcgttgggatcggagaaatagcgtttgtaatcttgtgttatatctacttgtatgagtttctctcaagatttgccttccctcgcaagcaaacagaacagaagaagagactctcaaaccctaaaaacaaactctttcaagcttacttcctcgccactgcaattataggttactaa

SEQ ID NO: 72771 - protein, 103 aa, Arabidopsis thaliana
  peptide (1)..(103): Ceres Seq. ID no. 4946466
MSEEIREKDLTDSKPSPPQPPPKRGLISRKRQLVFLSFMILLAAKGLVGIGEIAFVILCYIYLYEFLSRFAFPRKQTEQKKRLSNPKNKLFQAYFLATAIIGY

SEQ ID NO: 72772 - protein, 65 aa, Arabidopsis thaliana
  peptide (1)..(65): Ceres Seq. ID no. 4946467
MILLAAKGLVGIGEIAFVILCYIYLYEFLSRFAFPRKQTEQKKRLSNPKNKLFQAYFLATAIIGY

SEQ ID NO: 72773 - DNA, 1377 bp, Arabidopsis thaliana
  misc_feature (1)..(1377): Ceres Seq. ID no. 4946526
  misc_feature (1)..(1377): Ortholog of  Ceres SEQ ID NO 13596816 as cited in SEQ ID NO 62287
atgaattatgtgctaccatttttctctctttctatgtttactatagtcggagttctcttaatcctttcaacaggaagtgaagcgagtattggtgtaaactacggcacactagctaacaacctccctccaccgcaacaagtagcggagttcctcctccattccaccgtcattaaccgcatccgcctcttcgacaccgatcctcaaatcctccaagccttcgctaacaccggtatcgccgttaccgtaaccgtccccaacgaccaaatcccacacttaaccaacctctcctccgccaaacaatggatctccgatcacatccaacctcacttcccatccacaaacatcatccgtatcctcgtcggaaacgaagtcatctccaccgccgatcacctcctcatcagaaccttaatcccggctatgcaatctctccacaccgccttagtctccgcctctctccaccgtcgaattcaaatctcaacgccacattctttaggaaccctcactaattcaaccccaccttcttccgctaagttccggcgaggctacgacgcccaagtcctcaagcctctccttagcttcctccgttctacttcttcgccgttcgtcgtgaatccttatcccttcttcggttattcaatcgaaactctcgatttcgctctctttagacctaatccaggcttatttgatcaacacacgaagcttctctacacaaacatgctcgatgctcagcttgattcggtttattccgccatggataaattagggttttcagatgttgagattgtgattggtgaaattggatggccatcggagggagatatagatcagatcggagttgatgttgatacagcggctgagtttaacaagaatctgattgcgcgtgtagattccggtaccggaactccattgatgccaaatcggacttttgaaacttacattttcgcgctcttcaatgaaaatctcaaatcgggaccaacgtcggagcgtaatttcggcatcttccgatcagatctgacaccgatttacgacatcggaatcctccggccaacgtttagatcatcggatccggtttacaatcctcgatcaccggttagaggatcgtcgtcgaagcggtggtgcgtgacaaaggccggtgcagagacggtggctttacaaaggaacattgattacgtatgtgggttgggtttggattgtaggcccattaatgaaggtgggctttgttacttgccgaatacagtgaaagcccattcgaagtacgcaatgaacttgtattaccaaactatggagaaacacgagttcgattgcgatttcgacaacactggagagataactacgattgatcccagttatggaaattgtgaatatcaggctaattag

SEQ ID NO: 72774 - protein, 458 aa, Arabidopsis thaliana
  peptide (1)..(458): Ceres Seq. ID no. 4946527
MNYVLPFFSLSMFTIVGVLLILSTGSEASIGVNYGTLANNLPPPQQVAEFLLHSTVINRIRLFDTDPQILQAFANTGIAVTVTVPNDQIPHLTNLSSAKQWISDHIQPHFPSTNIIRILVGNEVISTADHLLIRTLIPAMQSLHTALVSASLHRRIQISTPHSLGTLTNSTPPSSAKFRRGYDAQVLKPLLSFLRSTSSPFVVNPYPFFGYSIETLDFALFRPNPGLFDQHTKLLYTNMLDAQLDSVYSAMDKLGFSDVEIVIGEIGWPSEGDIDQIGVDVDTAAEFNKNLIARVDSGTGTPLMPNRTFETYIFALFNENLKSGPTSERNFGIFRSDLTPIYDIGILRPTFRSSDPVYNPRSPVRGSSSKRWCVTKAGAETVALQRNIDYVCGLGLDCRPINEGGLCYLPNTVKAHSKYAMNLYYQTMEKHEFDCDFDNTGEITTIDPSYGNCEYQAN

SEQ ID NO: 72775 - protein, 447 aa, Arabidopsis thaliana
  peptide (1)..(447): Ceres Seq. ID no. 4946528
MFTIVGVLLILSTGSEASIGVNYGTLANNLPPPQQVAEFLLHSTVINRIRLFDTDPQILQAFANTGIAVTVTVPNDQIPHLTNLSSAKQWISDHIQPHFPSTNIIRILVGNEVISTADHLLIRTLIPAMQSLHTALVSASLHRRIQISTPHSLGTLTNSTPPSSAKFRRGYDAQVLKPLLSFLRSTSSPFVVNPYPFFGYSIETLDFALFRPNPGLFDQHTKLLYTNMLDAQLDSVYSAMDKLGFSDVEIVIGEIGWPSEGDIDQIGVDVDTAAEFNKNLIARVDSGTGTPLMPNRTFETYIFALFNENLKSGPTSERNFGIFRSDLTPIYDIGILRPTFRSSDPVYNPRSPVRGSSSKRWCVTKAGAETVALQRNIDYVCGLGLDCRPINEGGLCYLPNTVKAHSKYAMNLYYQTMEKHEFDCDFDNTGEITTIDPSYGNCEYQAN

SEQ ID NO: 72776 - protein, 319 aa, Arabidopsis thaliana
  peptide (1)..(319): Ceres Seq. ID no. 4946529
MQSLHTALVSASLHRRIQISTPHSLGTLTNSTPPSSAKFRRGYDAQVLKPLLSFLRSTSSPFVVNPYPFFGYSIETLDFALFRPNPGLFDQHTKLLYTNMLDAQLDSVYSAMDKLGFSDVEIVIGEIGWPSEGDIDQIGVDVDTAAEFNKNLIARVDSGTGTPLMPNRTFETYIFALFNENLKSGPTSERNFGIFRSDLTPIYDIGILRPTFRSSDPVYNPRSPVRGSSSKRWCVTKAGAETVALQRNIDYVCGLGLDCRPINEGGLCYLPNTVKAHSKYAMNLYYQTMEKHEFDCDFDNTGEITTIDPSYGNCEYQAN

SEQ ID NO: 72777 - DNA, 1388 bp, Arabidopsis thaliana
  misc_feature (1)..(1388): Ceres Seq. ID no. 4946563
  misc_feature (1)..(1388): Ortholog of  Ceres SEQ ID NO 15168355 as cited in SEQ ID NO 57246
acaatgaatttttaaaactagctcaaatgtctttctcttcaggttgatcatcaacctgtgtttgtttttggttggtttcgtcagtagctctctcacttcactcacaaagtgaaaccagttacaaaaccagggtgataaaaagaagaagaagagaagacggtgaaagtgtgaattaggaggagctgctgatggcctcacgcagagagatttttagcttttctggtccccctccaattccctcttttgactggaacaatttgtaccaccgagcgtcattggtatcatgtttagtgcaaggagtgtacacaatggaacgagataggcaacaaaaccggtgtggttctgactcaaaagctagaccttggtgggcgttttacaggttcactttataccaacaacttagggacgcattagatggctccatatacggggccgttttccagaacgacatcaattaccagaatactcccaactcgatagtacctccacgttacattattgcgttacgtggaacgatcttaagcccacaaactatggcttgtgatgttcagcttaacattcgtatcgccttcgagaacctctaccgcgggggtagatttgtgcaggccattcaagcaatgcaatattttgtggccacatatggaaacacagctatctggatcgctggacactctctaggagctggccttgcactactcgcggggaagatcatggccatgtatggatgccctgtcgaggcttacatcttcaatccacctatctccttgattcctctagagcagctagtggagagtgaggatcttaaatgtgcggtccgactcgctagggatatcctcaaagccggcatagcaagagtcctagaccttaatgagggtcacgaaagccatctatttatgaatctagcttcctggagacctcatttgtttgtgaaccaatcagatccaatctgctcagaatatattggctatttcaatcatagaggcgatatgaatgagctgcaactgggtaggatcgagaggttggctagatactcaattaggagaatattgttcggaggaggagaaagttcgtcgtcgtattcttcagaagaacatcttcattttcttccgtcggccatcgtgatggtgaacacaatcatatcaccggattttcagacagatcatgggattcatcaatggtggaatcctatgcttggacagttttcataccaaattatagcatgacttgcgcttaatttcatcgcttcagttattttcttttcagttgaatcttctatacaaatattgtaaggtttttttgcttcatgtcacatcaaactttttttcagcattttattttcaattggattacttcccgaatatactttatttgattaacattattcttct

SEQ ID NO: 72778 - protein, 229 aa, Arabidopsis thaliana
  peptide (1)..(229): Ceres Seq. ID no. 4946564
MACDVQLNIRIAFENLYRGGRFVQAIQAMQYFVATYGNTAIWIAGHSLGAGLALLAGKIMAMYGCPVEAYIFNPPISLIPLEQLVESEDLKCAVRLARDILKAGIARVLDLNEGHESHLFMNLASWRPHLFVNQSDPICSEYIGYFNHRGDMNELQLGRIERLARYSIRRILFGGGESSSSYSSEEHLHFLPSAIVMVNTIISPDFQTDHGIHQWWNPMLGQFSYQIIA

SEQ ID NO: 72779 - protein, 344 aa, Arabidopsis thaliana
  peptide (1)..(344): Ceres Seq. ID no. 4946565
MASRREIFSFSGPPPIPSFDWNNLYHRASLVSCLVQGVYTMERDRQQNRCGSDSKARPWWAFYRFTLYQQLRDALDGSIYGAVFQNDINYQNTPNSIVPPRYIIALRGTILSPQTMACDVQLNIRIAFENLYRGGRFVQAIQAMQYFVATYGNTAIWIAGHSLGAGLALLAGKIMAMYGCPVEAYIFNPPISLIPLEQLVESEDLKCAVRLARDILKAGIARVLDLNEGHESHLFMNLASWRPHLFVNQSDPICSEYIGYFNHRGDMNELQLGRIERLARYSIRRILFGGGESSSSYSSEEHLHFLPSAIVMVNTIISPDFQTDHGIHQWWNPMLGQFSYQIIA

SEQ ID NO: 72780 - protein, 304 aa, Arabidopsis thaliana
  peptide (1)..(304): Ceres Seq. ID no. 4946566
MERDRQQNRCGSDSKARPWWAFYRFTLYQQLRDALDGSIYGAVFQNDINYQNTPNSIVPPRYIIALRGTILSPQTMACDVQLNIRIAFENLYRGGRFVQAIQAMQYFVATYGNTAIWIAGHSLGAGLALLAGKIMAMYGCPVEAYIFNPPISLIPLEQLVESEDLKCAVRLARDILKAGIARVLDLNEGHESHLFMNLASWRPHLFVNQSDPICSEYIGYFNHRGDMNELQLGRIERLARYSIRRILFGGGESSSSYSSEEHLHFLPSAIVMVNTIISPDFQTDHGIHQWWNPMLGQFSYQIIA

SEQ ID NO: 72781 - DNA, 1250 bp, Arabidopsis thaliana
  misc_feature (1)..(1250): Ceres Seq. ID no. 4946681
  misc_feature (1)..(1250): Ortholog of  Ceres SEQ ID NO 13598741 as cited in SEQ ID NO 62749
  misc_feature (1)..(1250): Ortholog of  Ceres SEQ ID NO 12587535 as cited in SEQ ID NO 64020
  misc_feature (1)..(1250): Ortholog of  Ceres SEQ ID NO 15176854 as cited in SEQ ID NO 64525
  misc_feature (1)..(1250): Ortholog of  Ceres SEQ ID NO 12586366 as cited in SEQ ID NO 68983
  misc_feature (1)..(1250): Ortholog of  Ceres SEQ ID NO 15178891 as cited in SEQ ID NO 0
aattacattttacactcatctcgttctctcttccgtcaatatggaaggcgtcaccgtcgtgtctttcttccttcttttcatcgccaccgccatggccgccaagtccaccgtctccttccgtgacggcatgttaccaaacggagacttcgagctaggaccaaaaccatcagacatgaaaggaacagaaatactaaacaaactagcaataccaaactgggaagtcacaggattcgtcgaatacattaaatcaggacataaacaaggagacatgcttctcgttgttcccgccggtaaattcgcttgctgctagaacttgtgcacaagacgagagacttaacatatctgtagcacctgactccggtgtgattccgattcagacggtttatagtagtagtggttgggatttatatgcttgggcgtttcaagctgagagtgatgttgctgaagttgtgattcataatcctggtgttgaggaagatccagcttgtggtccacttattgatggtgttgctatgagatctctttaccctcctagaccaactaataagaacattttgaaaaacggaggatttgaagaaggtccattagtattacccggctcgacaactggagttttgatcccaccgtttatagaagacgaccactctcctttacctggatggatggtggagtctctcaaagctgtcaagtacgtagacgttgaacatttctcagtcccacagggtcgcagagctattgagcttgtagcgggtaaagagagtgccatcgctcaagtggttcggactgtcattgggaagacttacgtgctgtcttttgcggttggagacgccaacaatgcttgcaaaggatcaatggtggttgaggcttttgcaggaaaagatacacttaaggtcccttacgagtcgaaaggcacaggagggtttaaacgagcttctattcgatttgtggcggtttcgacccgatcaagaattatgttctacagcactttctatgccatgaggagcgatgatttctcgtcattgtgtgggcctgtgatcgatgatgtcaagcttataagcgttcgtaaaccatagatgaatcaccaatcctattacaagaaaatgcatcgtgtggtcttcttttattttccttaaactgtctttggtgtgtgttggattttattgaaacgagaaggtgaaaaaaacagagttttatttacgagagttagggttttatataggcagatgggcctttgcttatattgtattttc

SEQ ID NO: 72782 - protein, 186 aa, Arabidopsis thaliana
  peptide (1)..(186): Ceres Seq. ID no. 4946682
MRSLYPPRPTNKNILKNGGFEEGPLVLPGSTTGVLIPPFIEDDHSPLPGWMVESLKAVKYVDVEHFSVPQGRRAIELVAGKESAIAQVVRTVIGKTYVLSFAVGDANNACKGSMVVEAFAGKDTLKVPYESKGTGGFKRASIRFVAVSTRSRIMFYSTFYAMRSDDFSSLCGPVIDDVKLISVRKP

SEQ ID NO: 72783 - protein, 136 aa, Arabidopsis thaliana
  peptide (1)..(136): Ceres Seq. ID no. 4946683
MVESLKAVKYVDVEHFSVPQGRRAIELVAGKESAIAQVVRTVIGKTYVLSFAVGDANNACKGSMVVEAFAGKDTLKVPYESKGTGGFKRASIRFVAVSTRSRIMFYSTFYAMRSDDFSSLCGPVIDDVKLISVRKP

SEQ ID NO: 72784 - protein, 102 aa, Arabidopsis thaliana; identical to SEQ ID NO: 42800
  peptide (1)..(102): Ceres Seq. ID no. 4946684

SEQ ID NO: 72785 - DNA, 1005 bp, Arabidopsis thaliana
  misc_feature (1)..(1005): Ceres Seq. ID no. 4946723
  misc_feature (1)..(1005): Ortholog of  Ceres SEQ ID NO 14306410 as cited in SEQ ID NO 53870
atggagaagaggtttaaggtgtatgtatacgaagaaggcgagccaccgctagttcacgatggaccgtgtaagagtgtttacgcggttgaagggagattcataactgagatggagaaaagaaggactaagtttcgtacttatgatcctaaccaagcttatgtttacttcttgccatttagtgttacttggctggttcgatacttatacgaaggcaattctgatgctaagcctttgaaaacatttgtttccgattatatcagattagtatctactaatcatcctttttggaatcgaactaatggtgctgatcacttcatgcttacttgtcacgattggggacctctgacttcacaagctaatagagatttgttcaacacttcgattcgagttatgtgtaatgctaattcatcagaagggtttaatcctactaaagatgtgactcttcctgagatcaaactctatggtggtgaagttgatcacaaactcaggttatctaaaaccttatccgcttctccgcggccttacctcgggttcttcgcaggcggtgtccacggtccggttagaccgattcttttaaaacactggaaacagcgtgacctggatatgcctgtttatgaataccttcctaaacacttaaactactatgatttcatgagaagttcaaagttctgtttttgtcccagtgggtatgaggtagctagtcctcgagtcatcgaagccatctactctgagtgtatccccgtcattctctcggttaacttcgtgttaccattcactgatgttcttcgttgggagactttctctgtactggtcgacgtttcagagattccgaggttgaaggagattctcatgtcgatctccaatgagaaatatgaatggcttaaaagtaacttgaggtatgtgaggagacatttcgagcttaacgatcctcctcagagatttgatgcatttcacttgactcttcattccatttggttacgtagacttaacttgaagcttacgtaa

SEQ ID NO: 72786 - protein, 334 aa, Arabidopsis thaliana
  peptide (1)..(334): Ceres Seq. ID no. 4946724
MEKRFKVYVYEEGEPPLVHDGPCKSVYAVEGRFITEMEKRRTKFRTYDPNQAYVYFLPFSVTWLVRYLYEGNSDAKPLKTFVSDYIRLVSTNHPFWNRTNGADHFMLTCHDWGPLTSQANRDLFNTSIRVMCNANSSEGFNPTKDVTLPEIKLYGGEVDHKLRLSKTLSASPRPYLGFFAGGVHGPVRPILLKHWKQRDLDMPVYEYLPKHLNYYDFMRSSKFCFCPSGYEVASPRVIEAIYSECIPVILSVNFVLPFTDVLRWETFSVLVDVSEIPRLKEILMSISNEKYEWLKSNLRYVRRHFELNDPPQRFDAFHLTLHSIWLRRLNLKLT

SEQ ID NO: 72787 - protein, 298 aa, Arabidopsis thaliana
  peptide (1)..(298): Ceres Seq. ID no. 4946725
MEKRRTKFRTYDPNQAYVYFLPFSVTWLVRYLYEGNSDAKPLKTFVSDYIRLVSTNHPFWNRTNGADHFMLTCHDWGPLTSQANRDLFNTSIRVMCNANSSEGFNPTKDVTLPEIKLYGGEVDHKLRLSKTLSASPRPYLGFFAGGVHGPVRPILLKHWKQRDLDMPVYEYLPKHLNYYDFMRSSKFCFCPSGYEVASPRVIEAIYSECIPVILSVNFVLPFTDVLRWETFSVLVDVSEIPRLKEILMSISNEKYEWLKSNLRYVRRHFELNDPPQRFDAFHLTLHSIWLRRLNLKLT

SEQ ID NO: 72788 - protein, 229 aa, Arabidopsis thaliana
  peptide (1)..(229): Ceres Seq. ID no. 4946726
MLTCHDWGPLTSQANRDLFNTSIRVMCNANSSEGFNPTKDVTLPEIKLYGGEVDHKLRLSKTLSASPRPYLGFFAGGVHGPVRPILLKHWKQRDLDMPVYEYLPKHLNYYDFMRSSKFCFCPSGYEVASPRVIEAIYSECIPVILSVNFVLPFTDVLRWETFSVLVDVSEIPRLKEILMSISNEKYEWLKSNLRYVRRHFELNDPPQRFDAFHLTLHSIWLRRLNLKLT

SEQ ID NO: 72789 - DNA, 1875 bp, Arabidopsis thaliana
  misc_feature (1)..(1875): Ceres Seq. ID no. 4946804
  misc_feature (1)..(1875): Ortholog of  Ceres SEQ ID NO 14302990 as cited in SEQ ID NO 67543
attcctttttaacaatcttctgcattttcgaacttgctttgctgtgataaagttctctcctttcctttctaaaggaagaagaaaggctttatctctcaaaaccctcatccacaaaatcccctttaatccgctaatcagagggtttttctgtttttgtgttgcttcgttactacggttacattcttctcttccccttttgatttcaaaggtacgaattttatcctcaattgcgtttcgatcgtatctcaaattctcttcgatctctgacagaaagtttccaactttagtgaatcgcgaaattgggttcgtgttcttgctctgatttcggtgtaacccttcaatttcagaaccctcttgataccttaagaagaggcaatttgaagttttcttcacagatccgtcttagctctttctagagaatggcggatttgataccattttatctgaatattgtggcgtttctatgtactgttggagctattgctttggcgatatttcatatctacaggcatcttttgaattacacggaaccaacttatcagagatatattgtacgcattatcttcatggtcccggtttatgccttcatgtcattcttgtctcttgtgttacccaaaagctcgatatattttgattccatacgagaagtatatgaagcatgggttatctacaattttctatcgctgtgtttggcatgggttggaggcccaggatcagtagtgcttagtttgagtggtcgttctttaaagccatcatggtctcttatgacatgttgctttccgcctttaacactggacgggcgatttattcgacgatgcaagcagggttgtctgcaatttgtaattctgaagcctatcctagttgctgtcacacttgtgctttatgctaaagggaagtacaaggatggaaattttaaccctgatcaagcatatctctatcttaccatcatctataccatatcctacacagtggctttgtacgcacttgtgctgttttatatggcatgcagagatctacttcagccattcaatccagtcccaaagtttgtgatcataaagtctgtggtctttctaacctattggcagggtgttctcgttttccttgctgcaaaatctggattcataaagagtgcagaggcagcagctcattttcaaaattttataatatgtgtcgagatgctcattgctgcagcatgtcatttctatgcttttccatacaaggagtatgctggtgccaatgttggtggatctggcagtttctcaggaagcttatcacatgctgtaaaactaaatgacttttaccatgacactgttcaccagtttgctcctacctatcacgattatgtgctctataaccatcaagatggtggtgacgaggggacaaagaagtaccgatcgagaacctttgtgccaactggccaagagatggatgcaatgagaaaaaacaaacctgtgtatgcaaacaagatagatggtgtttcagtctcaagtagtctatcttcagaggcaagctcacctaaaagctccagcgtaacttctgatcctgcacgctctgatgctgtgaaatcttccttgctggtggatgcctcagattctcttgaaacaatgtatgatatgtcgctcattgacattgatctatctagtttccccagcaatgtcccatctgcaagtgaaagtgggcctagataggagcagagaaaatgtagaaatcaccattaacaggtacaaaacatgctcctaatagttgtattcagatgaatcttctgaggtgtgttcttagttggaagatgttgttagttggagacttgaggataaatgaaaaaagcttataaacccatttaccttttgtagctttatacaatgagtcttctactgc

SEQ ID NO: 72790 - protein, 422 aa, Arabidopsis thaliana
  peptide (1)..(422): Ceres Seq. ID no. 4946805
MADLIPFYLNIVAFLCTVGAIALAIFHIYRHLLNYTEPTYQRYIVRIIFMVPVYAFMSFLSLVLPKSSIYFDSIREVYEAWVIYNFLSLCLAWVGGPGSVVLSLSGRSLKPSWSLMTCCFPPLTLDGRFIRRCKQGCLQFVILKPILVAVTLVLYAKGKYKDGNFNPDQAYLYLTIIYTISYTVALYALVLFYMACRDLLQPFNPVPKFVIIKSVVFLTYWQGVLVFLAAKSGFIKSAEAAAHFQNFIICVEMLIAAACHFYAFPYKEYAGANVGGSGSFSGSLSHAVKLNDFYHDTVHQFAPTYHDYVLYNHQDGGDEGTKKYRSRTFVPTGQEMDAMRKNKPVYANKIDGVSVSSSLSSEASSPKSSSVTSDPARSDAVKSSLLVDASDSLETMYDMSLIDIDLSSFPSNVPSASESGPR

SEQ ID NO: 72791 - protein, 373 aa, Arabidopsis thaliana
  peptide (1)..(373): Ceres Seq. ID no. 4946806
MVPVYAFMSFLSLVLPKSSIYFDSIREVYEAWVIYNFLSLCLAWVGGPGSVVLSLSGRSLKPSWSLMTCCFPPLTLDGRFIRRCKQGCLQFVILKPILVAVTLVLYAKGKYKDGNFNPDQAYLYLTIIYTISYTVALYALVLFYMACRDLLQPFNPVPKFVIIKSVVFLTYWQGVLVFLAAKSGFIKSAEAAAHFQNFIICVEMLIAAACHFYAFPYKEYAGANVGGSGSFSGSLSHAVKLNDFYHDTVHQFAPTYHDYVLYNHQDGGDEGTKKYRSRTFVPTGQEMDAMRKNKPVYANKIDGVSVSSSLSSEASSPKSSSVTSDPARSDAVKSSLLVDASDSLETMYDMSLIDIDLSSFPSNVPSASESGPR

SEQ ID NO: 72792 - protein, 366 aa, Arabidopsis thaliana
  peptide (1)..(366): Ceres Seq. ID no. 4946807
MSFLSLVLPKSSIYFDSIREVYEAWVIYNFLSLCLAWVGGPGSVVLSLSGRSLKPSWSLMTCCFPPLTLDGRFIRRCKQGCLQFVILKPILVAVTLVLYAKGKYKDGNFNPDQAYLYLTIIYTISYTVALYALVLFYMACRDLLQPFNPVPKFVIIKSVVFLTYWQGVLVFLAAKSGFIKSAEAAAHFQNFIICVEMLIAAACHFYAFPYKEYAGANVGGSGSFSGSLSHAVKLNDFYHDTVHQFAPTYHDYVLYNHQDGGDEGTKKYRSRTFVPTGQEMDAMRKNKPVYANKIDGVSVSSSLSSEASSPKSSSVTSDPARSDAVKSSLLVDASDSLETMYDMSLIDIDLSSFPSNVPSASESGPR

SEQ ID NO: 72793 - DNA, 2286 bp, Arabidopsis thaliana
  misc_feature (1)..(2286): Ceres Seq. ID no. 4947296
  misc_feature (1)..(2286): Ortholog of  Ceres SEQ ID NO 13657677 as cited in SEQ ID NO 66119
atgagtatcatgctatcaatttcccggcgccagaactcttatattctgctcaaccattctcgattcctccggcgtttttcttatgatgttgacccacggccggaaatcaaatcggagagccaggaatttgtagtagtcaaatttgtgaaaactcttcaaaataccccgcaacatgattgggcgtcgagcgagtcgctaagtgcgcttgtcgtatcttcttcttctgcttctcctttagtattctcgcaaatcacgcggcggctaggatcgtattctctagcaatctcgttcttcgagtacctggatgcgaagtctcagtctctgaaacgccgtgaagaatctctctccttggcgcttcagtcggtcattgaattcgccggtagtgaaccggacccgcgtgataaacttctccgtctctacgagatcgccaaagagaagaacattcctcttactatcgttgccactaagcttctgatccgatggtttgggcgtatgggtatggtgaatcagtcggttcttgtatacgaaagactcgattcgaatatgaaaaactcgcaggttcgtaatgttgtggtagacgtcttgctaagaaatggacttgtggatgatgccttcaaggtgctcgacgaaatgcttcagaaagaatctgtttttcctcctaatagaatcacagcggatattgtgttacacgaggtttggaaggaaaggcttttgacagaagaaaagataattgctttgatttcaagatttagctctcatggtgtctccccaaactctgtttggttgactcggtttatatcaagtctatgcaaaaatgctcgcgccaatactgcttgggatattttgagcgacctgatgaagaacaaaaccccacttgaagctcctcccttcaatgcgcttttgtcttgcttaggaaggaatatggacattagtagaatgaatgatttagtcttgaagatggatgaggtgaaaatccggcctgatgttgtgactttagggattcttattaacactttatgcaaatcaagaagggtagatgaagctctcgaagtttttgaacaaatgcgtggaaagagaactgatgatggaaatgtgattaaagctgattcgattcattttaatactctcattgacgggctctgcaaggtggggaggttgaaagaagcagaggagttattggtaaggatgaaactggaagagagatgtgtgcccaatgcagttacttacaattgcttgattgatgggtattgcagagctggaaagcttgagacggctaaagaagtcgtttctcggatgaaagaggacgagattaaacctaatgtggtaactgttaatacaatcgttggtgggatgtgcaggcaccatggattgaacatggcggttgttttctttatggatatggaaaaggaaggcgtgaaagggaatgtggttacttatatgacattgattcatgcttgttgcagcgtcagtaatgtagagaaggctatgtattggtatgaaaaaatgttggaagctggttgttctcctgatgcaaagatctattatgctttgatctctggattgtgccaagttagacgggatcatgacgccattagagtggtggagaaactgaaagaaggagggttttctcttgacttattggcttacaacatgcttattgggttgttttgtgataagaataatgcagagaaagtctatgagatgctaaccgatatggaaaaagaagggaagaaacctgattccatcacttacaacactctgatttcgtttttcggtaaacacaaggacttcgagagtgttgagagaatgatggagcagatgagagaagacgggttagacccgactgtcacgacatatggagcggtgattgacgcttattgctcagtcggcgaattagacgaagcattgaagctctttaaggacatgggtttgcactcaaaggtcaatccgaacactgtaatatacaacattctcataaacgcattttctaagctggggaatttcgggcaagcgctctctctgaaagaggaaatgaagatgaagatggtgagacctaatgttgaaacttacaatgccttgtttaagtgtcttaacgagaaaacccaaggagagacattacttaaactgatggatgagatggtcgaacatcttatcacaatggagattctaatggagcgtctctcaggttctgatgagttagttaagctgaggaagtttatgcaaggctactctgttgcttcgccgaccgagaaagcttcacctttcgatgtctttagcttgggataa

SEQ ID NO: 72794 - protein, 761 aa, Arabidopsis thaliana
  peptide (1)..(761): Ceres Seq. ID no. 4947297
MSIMLSISRRQNSYILLNHSRFLRRFSYDVDPRPEIKSESQEFVVVKFVKTLQNTPQHDWASSESLSALVVSSSSASPLVFSQITRRLGSYSLAISFFEYLDAKSQSLKRREESLSLALQSVIEFAGSEPDPRDKLLRLYEIAKEKNIPLTIVATKLLIRWFGRMGMVNQSVLVYERLDSNMKNSQVRNVVVDVLLRNGLVDDAFKVLDEMLQKESVFPPNRITADIVLHEVWKERLLTEEKIIALISRFSSHGVSPNSVWLTRFISSLCKNARANTAWDILSDLMKNKTPLEAPPFNALLSCLGRNMDISRMNDLVLKMDEVKIRPDVVTLGILINTLCKSRRVDEALEVFEQMRGKRTDDGNVIKADSIHFNTLIDGLCKVGRLKEAEELLVRMKLEERCVPNAVTYNCLIDGYCRAGKLETAKEVVSRMKEDEIKPNVVTVNTIVGGMCRHHGLNMAVVFFMDMEKEGVKGNVVTYMTLIHACCSVSNVEKAMYWYEKMLEAGCSPDAKIYYALISGLCQVRRDHDAIRVVEKLKEGGFSLDLLAYNMLIGLFCDKNNAEKVYEMLTDMEKEGKKPDSITYNTLISFFGKHKDFESVERMMEQMREDGLDPTVTTYGAVIDAYCSVGELDEALKLFKDMGLHSKVNPNTVIYNILINAFSKLGNFGQALSLKEEMKMKMVRPNVETYNALFKCLNEKTQGETLLKLMDEMVEHLITMEILMERLSGSDELVKLRKFMQGYSVASPTEKASPFDVFSLG

SEQ ID NO: 72795 - protein, 758 aa, Arabidopsis thaliana
  peptide (1)..(758): Ceres Seq. ID no. 4947298
MLSISRRQNSYILLNHSRFLRRFSYDVDPRPEIKSESQEFVVVKFVKTLQNTPQHDWASSESLSALVVSSSSASPLVFSQITRRLGSYSLAISFFEYLDAKSQSLKRREESLSLALQSVIEFAGSEPDPRDKLLRLYEIAKEKNIPLTIVATKLLIRWFGRMGMVNQSVLVYERLDSNMKNSQVRNVVVDVLLRNGLVDDAFKVLDEMLQKESVFPPNRITADIVLHEVWKERLLTEEKIIALISRFSSHGVSPNSVWLTRFISSLCKNARANTAWDILSDLMKNKTPLEAPPFNALLSCLGRNMDISRMNDLVLKMDEVKIRPDVVTLGILINTLCKSRRVDEALEVFEQMRGKRTDDGNVIKADSIHFNTLIDGLCKVGRLKEAEELLVRMKLEERCVPNAVTYNCLIDGYCRAGKLETAKEVVSRMKEDEIKPNVVTVNTIVGGMCRHHGLNMAVVFFMDMEKEGVKGNVVTYMTLIHACCSVSNVEKAMYWYEKMLEAGCSPDAKIYYALISGLCQVRRDHDAIRVVEKLKEGGFSLDLLAYNMLIGLFCDKNNAEKVYEMLTDMEKEGKKPDSITYNTLISFFGKHKDFESVERMMEQMREDGLDPTVTTYGAVIDAYCSVGELDEALKLFKDMGLHSKVNPNTVIYNILINAFSKLGNFGQALSLKEEMKMKMVRPNVETYNALFKCLNEKTQGETLLKLMDEMVEHLITMEILMERLSGSDELVKLRKFMQGYSVASPTEKASPFDVFSLG

SEQ ID NO: 72796 - protein, 597 aa, Arabidopsis thaliana
  peptide (1)..(597): Ceres Seq. ID no. 4947299
MGMVNQSVLVYERLDSNMKNSQVRNVVVDVLLRNGLVDDAFKVLDEMLQKESVFPPNRITADIVLHEVWKERLLTEEKIIALISRFSSHGVSPNSVWLTRFISSLCKNARANTAWDILSDLMKNKTPLEAPPFNALLSCLGRNMDISRMNDLVLKMDEVKIRPDVVTLGILINTLCKSRRVDEALEVFEQMRGKRTDDGNVIKADSIHFNTLIDGLCKVGRLKEAEELLVRMKLEERCVPNAVTYNCLIDGYCRAGKLETAKEVVSRMKEDEIKPNVVTVNTIVGGMCRHHGLNMAVVFFMDMEKEGVKGNVVTYMTLIHACCSVSNVEKAMYWYEKMLEAGCSPDAKIYYALISGLCQVRRDHDAIRVVEKLKEGGFSLDLLAYNMLIGLFCDKNNAEKVYEMLTDMEKEGKKPDSITYNTLISFFGKHKDFESVERMMEQMREDGLDPTVTTYGAVIDAYCSVGELDEALKLFKDMGLHSKVNPNTVIYNILINAFSKLGNFGQALSLKEEMKMKMVRPNVETYNALFKCLNEKTQGETLLKLMDEMVEHLITMEILMERLSGSDELVKLRKFMQGYSVASPTEKASPFDVFSLG

SEQ ID NO: 72797 - DNA, 2184 bp, Arabidopsis thaliana
  misc_feature (1)..(2184): Ceres Seq. ID no. 4947356
  misc_feature (1)..(2184): Ortholog of  Ceres SEQ ID NO 13657677 as cited in SEQ ID NO 66119
atgagtatcatgctatcaatttcccggcgccagaactcttatattctgctcaaccattctcgattcctccggcgtttttcttatgatgttgacccacggccggaaatcaaatcggagagccaggaatttgtagtagtcaaatttgtgaaaactcttcaaaataccccgcaacatgattgggcgtcgagcgagtcgctaagtgcgcttgtcgtatcttcttcttctgcttctcctttagtattctcgcaaatcacgcggcggctaggatcgtattctctagcaatctcgttcttcgagtacctggatgcgaagtctcagtctctgaaacgccgtgaagaatctctctccttggcgcttcagtcggtcattgaattcgccggtagtgaaccggacccgcgtgataaacttctccgtctctacgagatcgccaaagagaagaacattcctcttactatcgttgccactaagcttctgatccgatggtttgggcgtatgggtatggtgaatcagtcggttcttgtatacgaaagactcgattcgaatatgaaaaactcgcaggttcgtaatgttgtggtagacgtcttgctaagaaatggacttgtggatgatgccttcaaggtgctcgacgaaatgcttcagaaagaatctgtttttcctcctaatagaatcacagcggatattgtgttacacgaggtttggaaggaaaggcttttgacagaagaaaagataattgctttgatttcaagatttagctctcatggtgtctccccaaactctgtttggttgactcggtttatatcaagtctatgcaaaaatgctcgcgccaatactgcttgggatattttgagcgacctgatgaagaacaaaaccccacttgaagctcctcccttcaatgcgcttttgtcttgcttaggaaggaatatggacattagtagaatgaatgatttagtcttgaagatggatgaggtgaaaatccggcctgatgttgtgactttagggattcttattaacactttatgcaaatcaagaagggtagatgaagctctcgaagtttttgaacaaatgcgtggaaagagaactgatgatggaaatgtgattaaagctgattcgattcattttaatactctcattgacgggctctgcaaggtggggaggttgaaagaagcagaggagttattggtaaggatgaaactggaagagagatgtgtgcccaatgcagttacttacaattgcttgattgatgggtattgcagagctggaaagcttgagacggctaaagaagtcgtttctcggatgaaagaggacgagattaaacctaatgtggtaactgttaatacaatcgttggtgggatgtgcaggcaccatggattgaacatggcggttgttttctttatggatatggaaaaggaaggcgtgaaagggaatgtggttacttatatgacattgattcatgcttgttgcagcgtcagtaatgtagagaaggctatgtattggtatgaaaaaatgttggaagctggttgttctcctgatgcaaagatctattatgctttgatctctggattgtgccaagttagacgggatcatgacgccattagagtggtggagaaactgaaagaaggagggttttctcttgacttattggcttacaacatgcttattgggttgttttgtgataagaataatgcagagaaagtctatgagatgctaaccgatatggaaaaagaagggaagaaacctgattccatcacttacaacactctgatttcgtttttcggtaaacacaaggacttcgagagtgttgagagaatgatggagcagatgagagaagacgggttagacccgactgtcacgacatatggagcggtgattgacgcttattgctcagtcggcgaattagacgaagcattgaagctctttaaggacatgggtttgcactcaaaggtcaatccgaacactgtaatatacaacattctcataaacgcattttctaagctggggaatttcgggcaagcgctctctctgaaagaggaaatgaagatgaagatggtgagacctaatgttgaaacttacaatgccttgtttaagtgtcttaacgagaaaacccaaggagagacattacttaaactgatggatgagatggtcgaacatcttgtgaaccaaatcagatcacaatggagattctaa

SEQ ID NO: 72798 - protein, 727 aa, Arabidopsis thaliana
  peptide (1)..(727): Ceres Seq. ID no. 4947357
MSIMLSISRRQNSYILLNHSRFLRRFSYDVDPRPEIKSESQEFVVVKFVKTLQNTPQHDWASSESLSALVVSSSSASPLVFSQITRRLGSYSLAISFFEYLDAKSQSLKRREESLSLALQSVIEFAGSEPDPRDKLLRLYEIAKEKNIPLTIVATKLLIRWFGRMGMVNQSVLVYERLDSNMKNSQVRNVVVDVLLRNGLVDDAFKVLDEMLQKESVFPPNRITADIVLHEVWKERLLTEEKIIALISRFSSHGVSPNSVWLTRFISSLCKNARANTAWDILSDLMKNKTPLEAPPFNALLSCLGRNMDISRMNDLVLKMDEVKIRPDVVTLGILINTLCKSRRVDEALEVFEQMRGKRTDDGNVIKADSIHFNTLIDGLCKVGRLKEAEELLVRMKLEERCVPNAVTYNCLIDGYCRAGKLETAKEVVSRMKEDEIKPNVVTVNTIVGGMCRHHGLNMAVVFFMDMEKEGVKGNVVTYMTLIHACCSVSNVEKAMYWYEKMLEAGCSPDAKIYYALISGLCQVRRDHDAIRVVEKLKEGGFSLDLLAYNMLIGLFCDKNNAEKVYEMLTDMEKEGKKPDSITYNTLISFFGKHKDFESVERMMEQMREDGLDPTVTTYGAVIDAYCSVGELDEALKLFKDMGLHSKVNPNTVIYNILINAFSKLGNFGQALSLKEEMKMKMVRPNVETYNALFKCLNEKTQGETLLKLMDEMVEHLVNQIRSQWRF

SEQ ID NO: 72799 - protein, 724 aa, Arabidopsis thaliana
  peptide (1)..(724): Ceres Seq. ID no. 4947358
MLSISRRQNSYILLNHSRFLRRFSYDVDPRPEIKSESQEFVVVKFVKTLQNTPQHDWASSESLSALVVSSSSASPLVFSQITRRLGSYSLAISFFEYLDAKSQSLKRREESLSLALQSVIEFAGSEPDPRDKLLRLYEIAKEKNIPLTIVATKLLIRWFGRMGMVNQSVLVYERLDSNMKNSQVRNVVVDVLLRNGLVDDAFKVLDEMLQKESVFPPNRITADIVLHEVWKERLLTEEKIIALISRFSSHGVSPNSVWLTRFISSLCKNARANTAWDILSDLMKNKTPLEAPPFNALLSCLGRNMDISRMNDLVLKMDEVKIRPDVVTLGILINTLCKSRRVDEALEVFEQMRGKRTDDGNVIKADSIHFNTLIDGLCKVGRLKEAEELLVRMKLEERCVPNAVTYNCLIDGYCRAGKLETAKEVVSRMKEDEIKPNVVTVNTIVGGMCRHHGLNMAVVFFMDMEKEGVKGNVVTYMTLIHACCSVSNVEKAMYWYEKMLEAGCSPDAKIYYALISGLCQVRRDHDAIRVVEKLKEGGFSLDLLAYNMLIGLFCDKNNAEKVYEMLTDMEKEGKKPDSITYNTLISFFGKHKDFESVERMMEQMREDGLDPTVTTYGAVIDAYCSVGELDEALKLFKDMGLHSKVNPNTVIYNILINAFSKLGNFGQALSLKEEMKMKMVRPNVETYNALFKCLNEKTQGETLLKLMDEMVEHLVNQIRSQWRF

SEQ ID NO: 72800 - protein, 563 aa, Arabidopsis thaliana
  peptide (1)..(563): Ceres Seq. ID no. 4947359
MGMVNQSVLVYERLDSNMKNSQVRNVVVDVLLRNGLVDDAFKVLDEMLQKESVFPPNRITADIVLHEVWKERLLTEEKIIALISRFSSHGVSPNSVWLTRFISSLCKNARANTAWDILSDLMKNKTPLEAPPFNALLSCLGRNMDISRMNDLVLKMDEVKIRPDVVTLGILINTLCKSRRVDEALEVFEQMRGKRTDDGNVIKADSIHFNTLIDGLCKVGRLKEAEELLVRMKLEERCVPNAVTYNCLIDGYCRAGKLETAKEVVSRMKEDEIKPNVVTVNTIVGGMCRHHGLNMAVVFFMDMEKEGVKGNVVTYMTLIHACCSVSNVEKAMYWYEKMLEAGCSPDAKIYYALISGLCQVRRDHDAIRVVEKLKEGGFSLDLLAYNMLIGLFCDKNNAEKVYEMLTDMEKEGKKPDSITYNTLISFFGKHKDFESVERMMEQMREDGLDPTVTTYGAVIDAYCSVGELDEALKLFKDMGLHSKVNPNTVIYNILINAFSKLGNFGQALSLKEEMKMKMVRPNVETYNALFKCLNEKTQGETLLKLMDEMVEHLVNQIRSQWRF

SEQ ID NO: 72801 - DNA, 1611 bp, Arabidopsis thaliana
  misc_feature (1)..(1611): Ceres Seq. ID no. 4948138
  misc_feature (1)..(1611): Ortholog of  Ceres SEQ ID NO 12605517 as cited in SEQ ID NO 20422
atggcttatcgtcaaattttggccatagttttgtttctttgtgtgtttcaattcttggactgcactgttagctccgccgtagaagagaatgggactgtgtttgtgtacggaagagccgccgttggaacaatagatgaagacttcatttgcgccaccttagactggtggccaccggagaaatgtgactacggcagttgtagttgggaccatgcttcaattctcaatctggatttgaccattgttgttccaatttccaaaaacacagcatttgctccgttgaaaataagaataggaggaacattacaagacatagtgatatatgagacaccagattcgaagcaaccatgtcttccttttaccaaaaactcttcaattctttttggttacacacaaggatgtctacctatgcgtcgatgggacgagctcaatgccttctttcgcaaaaccggaactaaagtcatcttcgggctgaatgcactttctggacgttccataaaatctaacggtgaagccataggagcctggaattacaccaatgctgaatcgttcatccggtttacagcagagaacaattacaccatcgacgggtgggagctcggcaatgagctgtgtggaagtggtgttggtgcacgagttggtgcaaatcaatatgctatagacaccataaatctgcgaaacattgtgaaccgggtttacaagaatgtgagtcccatgccgttggtgataggtccgggtggcttctttgaagttgattggttcacagaatacctgaacaaagcagaaaactctctcaatgctactactcgacatatctacgatctcggtccaggagtcgatgaacatctgatagaaaagattctaaacccttcatatctggaccaagaggcaaaaagttttcgcagtctcaagaacataatcaaaaactcctcaacaaaggctgtggcatgggttggtgagtccggtggtgcctacaacagtgggcggaatcttgtctctaatgctttcgtgtatagtttctggtacctggaccagcttggtatggcatcgctttatgatacaaaaacatactgtagacagtctctgatcggaggaaactatgggctgctaaatactactaacttcacaccaaatccagactattacagtgctctgatctggcgacaacttatgggaagaaaggcattgttcacaaccttttccggaaccaaaaagatacgttcgtacacccattgtgcaagacaatcgaaagggatcacagttttactgatgaaccttgacaatactacaacggttgtagcgaaagtagagttaaataacagtttcagtctgagacatacaaagcacatgaagtcttataaaagagcaagttcccaactttttgggggtcctaatggagtaatccaaagagaagagtaccatttgacagcaaaggatggaaacctacacagtcagactatgctactcaacggaaatgctcttcaggttaattcgatgggtgatttacctcctatagagccgatacatataaattcaacagagccaataacaatagctccatattccattgtgtttgtgcatatgcggaatgttgttgtacctgcatgtgcttaa

SEQ ID NO: 72802 - protein, 536 aa, Arabidopsis thaliana
  peptide (1)..(536): Ceres Seq. ID no. 4948139
MAYRQILAIVLFLCVFQFLDCTVSSAVEENGTVFVYGRAAVGTIDEDFICATLDWWPPEKCDYGSCSWDHASILNLDLTIVVPISKNTAFAPLKIRIGGTLQDIVIYETPDSKQPCLPFTKNSSILFGYTQGCLPMRRWDELNAFFRKTGTKVIFGLNALSGRSIKSNGEAIGAWNYTNAESFIRFTAENNYTIDGWELGNELCGSGVGARVGANQYAIDTINLRNIVNRVYKNVSPMPLVIGPGGFFEVDWFTEYLNKAENSLNATTRHIYDLGPGVDEHLIEKILNPSYLDQEAKSFRSLKNIIKNSSTKAVAWVGESGGAYNSGRNLVSNAFVYSFWYLDQLGMASLYDTKTYCRQSLIGGNYGLLNTTNFTPNPDYYSALIWRQLMGRKALFTTFSGTKKIRSYTHCARQSKGITVLLMNLDNTTTVVAKVELNNSFSLRHTKHMKSYKRASSQLFGGPNGVIQREEYHLTAKDGNLHSQTMLLNGNALQVNSMGDLPPIEPIHINSTEPITIAPYSIVFVHMRNVVVPACA

SEQ ID NO: 72803 - protein, 401 aa, Arabidopsis thaliana; identical to SEQ ID NO: 20424
  peptide (1)..(401): Ceres Seq. ID no. 4948140

SEQ ID NO: 72804 - protein, 299 aa, Arabidopsis thaliana; identical to SEQ ID NO: 20425
  peptide (1)..(299): Ceres Seq. ID no. 4948141

SEQ ID NO: 72805 - DNA, 1140 bp, Arabidopsis thaliana
  misc_feature (1)..(1140): Ceres Seq. ID no. 4948502
  misc_feature (1)..(1140): Ortholog of  Ceres SEQ ID NO 14312266 as cited in SEQ ID NO 59225
  misc_feature (1)..(1140): Ortholog of  Ceres SEQ ID NO 13597620 as cited in SEQ ID NO 65383
ctttctcagattcgctctttcccgagaaaatttgaagaaacagagattcatcattttctcttcctctcaaaaatcagatctgcaaaactctcagatcactcatgggtttgatttcaaaccctacccgtttgattctcgtcgccaccatcttcttcctcgtttcttcaatctccggtcaggattctgtcgttgagaacaatgagagacaagaatctgaaggatctggtaaagagcttggtcgtcgtggaatggttggtactgaacgaattggagttgatactgttgtagacaatattggtgctcttggtttgaatctagaccttgatgctactgctcctagtgtatttgatgctttgttttcgagtttctcgatgatacttgtcaccgagattggggatgaaacttttataatagcggcattgatggctatgcgacatcctaaagctactgttttatctggtgcactctcagctttgtttgttatgactatactttctactggacttggtaggatagtgccaaacttgatatcgaggaagcacaccaatagtgctgctacagtgctctatgcattttttggtttgcgactactctacattgcttggaggtctactgattcaaagtcaaatcagaagaaagaaatggaggaagttgaagagaagctcgagtcaggtcaagggaagacacccttccgtcgtttattctcaagattttgtaccccaatatttctggagtccttcatcttaacctttctagctgaatggggtgaccgtagccagatcgctacaatagctttggcgactcacaagaacgccataggagtggccattggggcaagtattggacacactgtgtgtacttcactagcagttgttggaggaagcatgctggcttcaaggatctcgcaacgtacggtcgcaactgttggaggcttactcttcctcggcttttcagtctcctcctatttctatcctccattgtagtaaatgtgcttctttcgaaaatgggtgttagagacaatttctaagtaaagtttcaattttttttttgattttaatttaagtttgatattttgtttaatatcaatggccaaaatggccaaaccaaagaatccaacgcctatgcttttacaatttactt

SEQ ID NO: 72806 - protein, 293 aa, Arabidopsis thaliana; identical to SEQ ID NO: 25308
  peptide (1)..(293): Ceres Seq. ID no. 4948503

SEQ ID NO: 72807 - protein, 244 aa, Arabidopsis thaliana; identical to SEQ ID NO: 25309
  peptide (1)..(244): Ceres Seq. ID no. 4948504

SEQ ID NO: 72808 - protein, 203 aa, Arabidopsis thaliana; identical to SEQ ID NO: 25310
  peptide (1)..(203): Ceres Seq. ID no. 4948505

SEQ ID NO: 72809 - DNA, 1899 bp, Arabidopsis thaliana
  misc_feature (1)..(1899): Ceres Seq. ID no. 4948732
  misc_feature (1)..(1899): Ortholog of  Ceres SEQ ID NO 13596319 as cited in SEQ ID NO 67933
atgggttgtttaagaagcttagtaagaaggaaacaattcgactcttcaaatggcaaagcagagactcatcatcatcaccaacagcttgcaaaagcgttgacctttcctcacttgattgccattggtgttggatcaacaattggagcaggggtttatattcttgtgggaacagtagctagagagcattcaggacctgctcttgctttatccttccttatagctggaatttctgctgccctttctgcgttttgttatgcggaactatctagtcgttttccctctgctgggagtgcctatcattattcttacatttgcattggtgaaggtttactcattgcctttgcagttttgcttatgaattcttggtactgcagtgttgcgtggttgattggctgggcgctgattttggaatacacaattggtggttcaacagttgcccgcggcatatctccaaatctggcaatgattttcggtggtgaagattgtctgcctacaatattagctcgtcatcaaatcccaggccttgatattgttgttgacccgtgtgctgctgtgctagtgttcattgtaacaggactttgttgccttggagtaaaggagagcacatttgctcagggaattgtaacaacagcaaatgtctttgtcatgatatttgtcatagtagctggaagctatttgtgtttcaagacaggttgggttggttatgaacttccaacggggtattttccttacggggttgatggaatgcttactggatctgctactgtcttctttgcctacatcgggtttgatacagttgcaagtatggcagaggaggtgaaaaatccccggcgggatttaccgctcggtattgggatttcgctcctgctttgttgtttgctgtacatgatggtgtctgttgttattgttggtttagtgccgtattatgctatggaccctgacactccaatatcatccgcattttctagtcatggaattcaatgggctgcatatttgataaatttaggtgctgtcatggctctctgttctgcattaatgggctccattctccctcagccgcggattctgatggcaatggctagggatggtctcttgccttcatatttctcatatgtgaatcaacgcacgcaggttccaattaatggcaccataaccactggtgtttgtgcagcaatcttagctttctttatggatgtttcgcaactggcgggaatggtgagtgtcgggacacttgttgcatttacaatggttgcaatatcattgttgatagtcagatatgttgttcctccagatgaggtactgataagattggaactggtacctcttccctcatcacttcaagaaaactcatccagtcacgtcggaacttccatccgtagtaaacaacctttacttggcaaagtggatgattcagttgtcgataaggaaaatgctccaggaagttgggttctcaacaaaaaaaacagacggaaatttgctggttggagcattatgttcacttgtattggaaacttccttttaagctatgcagcgtcaagcttcctcttgccaggactcctccgatattctctatgtggtgttggtggattgttccttcttgtcggtttgattgttctgatttgcatagatcaggatgatgctagacacagttttgggcattctggaggcttcatttgcccgtttgttccgcttttgcctatagtttgcattcttatcaacatgtatctcttggtaaaccttggagctgcgacgtgggttcgtgtatcggtttggctgttcctcggagtggttgtttacattttctatgggagaagaaacagctctcttgtgaatgctgtttatgtctccactgctcatctccaggagattcgtcgcacttctggacattctttggcttaa

SEQ ID NO: 72810 - protein, 632 aa, Arabidopsis thaliana
  peptide (1)..(632): Ceres Seq. ID no. 4948733
MGCLRSLVRRKQFDSSNGKAETHHHHQQLAKALTFPHLIAIGVGSTIGAGVYILVGTVAREHSGPALALSFLIAGISAALSAFCYAELSSRFPSAGSAYHYSYICIGEGLLIAFAVLLMNSWYCSVAWLIGWALILEYTIGGSTVARGISPNLAMIFGGEDCLPTILARHQIPGLDIVVDPCAAVLVFIVTGLCCLGVKESTFAQGIVTTANVFVMIFVIVAGSYLCFKTGWVGYELPTGYFPYGVDGMLTGSATVFFAYIGFDTVASMAEEVKNPRRDLPLGIGISLLLCCLLYMMVSVVIVGLVPYYAMDPDTPISSAFSSHGIQWAAYLINLGAVMALCSALMGSILPQPRILMAMARDGLLPSYFSYVNQRTQVPINGTITTGVCAAILAFFMDVSQLAGMVSVGTLVAFTMVAISLLIVRYVVPPDEVLIRLELVPLPSSLQENSSSHVGTSIRSKQPLLGKVDDSVVDKENAPGSWVLNKKNRRKFAGWSIMFTCIGNFLLSYAASSFLLPGLLRYSLCGVGGLFLLVGLIVLICIDQDDARHSFGHSGGFICPFVPLLPIVCILINMYLLVNLGAATWVRVSVWLFLGVVVYIFYGRRNSSLVNAVYVSTAHLQEIRRTSGHSLA

SEQ ID NO: 72811 - protein, 514 aa, Arabidopsis thaliana
  peptide (1)..(514): Ceres Seq. ID no. 4948734
MNSWYCSVAWLIGWALILEYTIGGSTVARGISPNLAMIFGGEDCLPTILARHQIPGLDIVVDPCAAVLVFIVTGLCCLGVKESTFAQGIVTTANVFVMIFVIVAGSYLCFKTGWVGYELPTGYFPYGVDGMLTGSATVFFAYIGFDTVASMAEEVKNPRRDLPLGIGISLLLCCLLYMMVSVVIVGLVPYYAMDPDTPISSAFSSHGIQWAAYLINLGAVMALCSALMGSILPQPRILMAMARDGLLPSYFSYVNQRTQVPINGTITTGVCAAILAFFMDVSQLAGMVSVGTLVAFTMVAISLLIVRYVVPPDEVLIRLELVPLPSSLQENSSSHVGTSIRSKQPLLGKVDDSVVDKENAPGSWVLNKKNRRKFAGWSIMFTCIGNFLLSYAASSFLLPGLLRYSLCGVGGLFLLVGLIVLICIDQDDARHSFGHSGGFICPFVPLLPIVCILINMYLLVNLGAATWVRVSVWLFLGVVVYIFYGRRNSSLVNAVYVSTAHLQEIRRTSGHSLA

SEQ ID NO: 72812 - protein, 478 aa, Arabidopsis thaliana
  peptide (1)..(478): Ceres Seq. ID no. 4948735
MIFGGEDCLPTILARHQIPGLDIVVDPCAAVLVFIVTGLCCLGVKESTFAQGIVTTANVFVMIFVIVAGSYLCFKTGWVGYELPTGYFPYGVDGMLTGSATVFFAYIGFDTVASMAEEVKNPRRDLPLGIGISLLLCCLLYMMVSVVIVGLVPYYAMDPDTPISSAFSSHGIQWAAYLINLGAVMALCSALMGSILPQPRILMAMARDGLLPSYFSYVNQRTQVPINGTITTGVCAAILAFFMDVSQLAGMVSVGTLVAFTMVAISLLIVRYVVPPDEVLIRLELVPLPSSLQENSSSHVGTSIRSKQPLLGKVDDSVVDKENAPGSWVLNKKNRRKFAGWSIMFTCIGNFLLSYAASSFLLPGLLRYSLCGVGGLFLLVGLIVLICIDQDDARHSFGHSGGFICPFVPLLPIVCILINMYLLVNLGAATWVRVSVWLFLGVVVYIFYGRRNSSLVNAVYVSTAHLQEIRRTSGHSLA

SEQ ID NO: 72813 - DNA, 1089 bp, Arabidopsis thaliana
  misc_feature (1)..(1089): Ceres Seq. ID no. 4948902
  misc_feature (1)..(1089): Ortholog of  Ceres SEQ ID NO 13658153 as cited in SEQ ID NO 66326
atgccaacatttcctcaatcgtttcctatgaacggtggtgatggtccgcacagttacatccacaattcctcttatcaaaaagtagcgatagatggcgctaaagaaaagacaagtgaagccatcctaaaaaacctcgatctcgaactcttgaaccgtaattctgatgaaaatatcttaagaattgcggattttggttgttctattggacccaacacgttcgaagtagtccaaaatattatcgatacggtgaagcaaaaaaacctaaaagaaaacaatgcctatattggtgctcctctcgagttccaagtttgcttcaatgatcaaccaaacaatgattttaacacactttttagaacccaacctatctcttccaaacaagcatatttatcggttggagttccaggatctttccatggtagagtattaccaaaaaatagcctccatatcggtcacattacctatgcgctccactggctttctacagttccccaacatgtttgcgacaagaaatctccggcattgaataaaagctacattcaatgtaataatttagtagaggaagtgactgaagcttaccgggtccagtttaaaaaggacatgggagattttcttggggcaagagctgaagagcttgtttcgggcggattgatgatcctatcaggacaatgcttgcccgatggtgtccctaaggctttgacatggcaaggggttgtgatcgatatgattggagattgtcttatggatatggctaaacagggaattacgaccaaggaaaagatcgaactgttcagtttgcccatatatattccgcatattagtgaattcaaggcagaaatagagcgaaatgaaaactttagtatcgagacaatggagaagataagtcatcctatggattataagccactaaccaacgacttcatcacttccatgtttcgagccattctcaatacgattattgaagaacactttggagatggtgtggtcaatgagctattcgatcgatttgctaagaagctcaacaagtacccaattgatttcaaaaggtgtaaaaagtatgtgaattattttatcgtgcttaaaagaaaataa

SEQ ID NO: 72814 - protein, 362 aa, Arabidopsis thaliana; identical to SEQ ID NO: 71119
  peptide (1)..(362): Ceres Seq. ID no. 4948903

SEQ ID NO: 72815 - protein, 353 aa, Arabidopsis thaliana
  peptide (1)..(353): Ceres Seq. ID no. 4948904
MNGGDGPHSYIHNSSYQKVAIDGAKEKTSEAILKNLDLELLNRNSDENILRIADFGCSIGPNTFEVVQNIIDTVKQKNLKENNAYIGAPLEFQVCFNDQPNNDFNTLFRTQPISSKQAYLSVGVPGSFHGRVLPKNSLHIGHITYALHWLSTVPQHVCDKKSPALNKSYIQCNNLVEEVTEAYRVQFKKDMGDFLGARAEELVSGGLMILSGQCLPDGVPKALTWQGVVIDMIGDCLMDMAKQGITTKEKIELFSLPIYIPHISEFKAEIERNENFSIETMEKISHPMDYKPLTNDFITSMFRAILNTIIEEHFGDGVVNELFDRFAKKLNKYPIDFKRCKKYVNYFIVLKRK

SEQ ID NO: 72816 - DNA, 1557 bp, Arabidopsis thaliana
  misc_feature (1)..(1557): Ceres Seq. ID no. 4948905
  misc_feature (1)..(1557): Ortholog of  Ceres SEQ ID NO 12614670 as cited in SEQ ID NO 68565
atgttgcttactatattaaaatcactcctcgtgatattcgtgactacgatattgagagttttatacgacaccatatcgtgctactggctaacacctagacgaatcaagaagatcatggaacagcaaggcgtaacgggtcctaaaccgcgtccgttaaccggaaatatccttgaaatctcggccatggtttcgcaatccgcttccaaggattgtgactctattcaccatgacatcgtcggccgccttctcccgcattacgttgcttggtccaaacaatacgggaagaggtttattgtgtggaacgggacggatcctcggctttgcttaacggaaacggaattgataaaggagttgctgatgaaacacaacggtgttagtggaagatcgtggctacaacaacaagggactaagaattttatcggtcgcggtctcctaatggctaatggccaagattggcaccaccaacgccaccttgctgcaccggcatttaccggagaaagactcaagggatacgcaaggcatatggtggagtgcacaagcaagctagttgagaggttgaggaaggaagttggggaaggagcaaatgaggtggagataggagaggagatgcataaactcacggctgatattatatcgaggacaaagttcggaagcagctttgagaaaggcaaagagcttttcaaccacctcactgtcctccagcgccgttgcgctcaagccacccgccacctctgctttcccggcagccggtttcttccaagcaaatacaacagagagatcaagtctctgaaaaaagaagttgagcgtttgttgattgagatcatacaaagcaggcgagactgcgctgaaatgggtaggagtagcactcacggtgacgaccttctcgggcttctcttgaacgaaatggatattgacaagaacaataacaataacaacaacaatcttcagttgataatggatgaatgcaagacattcttctttgctggccatgaaaccacggctttgctcctcacatggacaacaatgctcctcgccgataatcccacatggcaggaaaaagtccgtgaggaggtcagggaggtctttggccgcaatggccttccctcagtcgatcaactatctaagctaacctcgttaagcaaagtgattaacgagtcactaagactttaccctccagctactcttctaccaaggatggcatttgaagatctaaaactaggtgatctaaccattcctaaaggtttatcaatatggataccggttcttgctatccatcacagtgaagaattatggggtaaagacgcgaaccaattcaatcccgaacgttttggaggcagaccattcgcgtctggtcgccatttcatcccatttgcagccggtccacggaactgcatcggacaacagtttgcgttgatggaagctaaaataatattagccacgttaatttcaaagtttaacttcacaatatcaaagaattataggcatgccccaatcgttgtgcttactataaaacctaagtatggagttcaagtgatattgaagccattggtttcatga

SEQ ID NO: 72817 - protein, 518 aa, Arabidopsis thaliana
  peptide (1)..(518): Ceres Seq. ID no. 4948906
MLLTILKSLLVIFVTTILRVLYDTISCYWLTPRRIKKIMEQQGVTGPKPRPLTGNILEISAMVSQSASKDCDSIHHDIVGRLLPHYVAWSKQYGKRFIVWNGTDPRLCLTETELIKELLMKHNGVSGRSWLQQQGTKNFIGRGLLMANGQDWHHQRHLAAPAFTGERLKGYARHMVECTSKLVERLRKEVGEGANEVEIGEEMHKLTADIISRTKFGSSFEKGKELFNHLTVLQRRCAQATRHLCFPGSRFLPSKYNREIKSLKKEVERLLIEIIQSRRDCAEMGRSSTHGDDLLGLLLNEMDIDKNNNNNNNNLQLIMDECKTFFFAGHETTALLLTWTTMLLADNPTWQEKVREEVREVFGRNGLPSVDQLSKLTSLSKVINESLRLYPPATLLPRMAFEDLKLGDLTIPKGLSIWIPVLAIHHSEELWGKDANQFNPERFGGRPFASGRHFIPFAAGPRNCIGQQFALMEAKIILATLISKFNFTISKNYRHAPIVVLTIKPKYGVQVILKPLVS

SEQ ID NO: 72818 - protein, 480 aa, Arabidopsis thaliana
  peptide (1)..(480): Ceres Seq. ID no. 4948907
MEQQGVTGPKPRPLTGNILEISAMVSQSASKDCDSIHHDIVGRLLPHYVAWSKQYGKRFIVWNGTDPRLCLTETELIKELLMKHNGVSGRSWLQQQGTKNFIGRGLLMANGQDWHHQRHLAAPAFTGERLKGYARHMVECTSKLVERLRKEVGEGANEVEIGEEMHKLTADIISRTKFGSSFEKGKELFNHLTVLQRRCAQATRHLCFPGSRFLPSKYNREIKSLKKEVERLLIEIIQSRRDCAEMGRSSTHGDDLLGLLLNEMDIDKNNNNNNNNLQLIMDECKTFFFAGHETTALLLTWTTMLLADNPTWQEKVREEVREVFGRNGLPSVDQLSKLTSLSKVINESLRLYPPATLLPRMAFEDLKLGDLTIPKGLSIWIPVLAIHHSEELWGKDANQFNPERFGGRPFASGRHFIPFAAGPRNCIGQQFALMEAKIILATLISKFNFTISKNYRHAPIVVLTIKPKYGVQVILKPLVS

SEQ ID NO: 72819 - protein, 457 aa, Arabidopsis thaliana
  peptide (1)..(457): Ceres Seq. ID no. 4948908
MVSQSASKDCDSIHHDIVGRLLPHYVAWSKQYGKRFIVWNGTDPRLCLTETELIKELLMKHNGVSGRSWLQQQGTKNFIGRGLLMANGQDWHHQRHLAAPAFTGERLKGYARHMVECTSKLVERLRKEVGEGANEVEIGEEMHKLTADIISRTKFGSSFEKGKELFNHLTVLQRRCAQATRHLCFPGSRFLPSKYNREIKSLKKEVERLLIEIIQSRRDCAEMGRSSTHGDDLLGLLLNEMDIDKNNNNNNNNLQLIMDECKTFFFAGHETTALLLTWTTMLLADNPTWQEKVREEVREVFGRNGLPSVDQLSKLTSLSKVINESLRLYPPATLLPRMAFEDLKLGDLTIPKGLSIWIPVLAIHHSEELWGKDANQFNPERFGGRPFASGRHFIPFAAGPRNCIGQQFALMEAKIILATLISKFNFTISKNYRHAPIVVLTIKPKYGVQVILKPLVS

SEQ ID NO: 72820 - DNA, 1072 bp, Arabidopsis thaliana
  misc_feature (1)..(1072): Ceres Seq. ID no. 4948995
  misc_feature (1)..(1072): Ortholog of  Ceres SEQ ID NO 14311392 as cited in SEQ ID NO 58307
  misc_feature (1)..(1072): Ortholog of  Ceres SEQ ID NO 13599348 as cited in SEQ ID NO 0
acttaaagatgataagtactgtactgtactgtctaatgtctatcctctcttaaggcttcgtttcaaattcttcaatcgtcctttagaaatcctcaaaatatccacaattttcctctctttacccagaagatttcatcagaacctcttcgccattaatggttacagcgatgttttgtgcatcatcttctccaattacatctcctctctacccaaaagcttataaattttctcaaacaaaatcgaattcgaagagattttcctctctgcgtgcttcgttgcctgtttctgataacaagcttcttaaatttgaatacacaccatggcttattgttggacttggtaaccctggattaaagtattacggaacaaggcataatattggttttgagatgattgatcatatagctcgagcaacggatatttctatgaacacaattcagtccaaggctttagttgggataggttctgttggagaagttccgattttgttggttaaacctcaaggatacatgaatttcagtggtgaatcggttgggccgttagctgcttactaccaaatacccttacgtcacattcttatgatatatgatgacatgggtttgtctaatggtgtcttgagacttcaaccaaaaggtgggcatagccaacacaatggattgaagaatgtgacagaacatttaaatggttgtcgcggctatccccgcttatcaatcggaattggaaatccaccaggtaacatggacatgaaagcgtttcttctccagaaattcagccccttggagcgcaaacagatggatgagggactggaacaaggtgttgaaggtgtgaagacacttgttgaagaggggtttagtgactcaatatctcgattcaatttgggacagaaatacaagtttcataaagtttgattccttgacatttgcctcatcgtgatacctgtcacagtaacagtagcaacacccatagtccaacattgttcatttgttcttatccttgtggtctttgtttagctgataggtaatattgtaacatttgtattctctaagatcaattttattgatttatattttgt

SEQ ID NO: 72821 - protein, 250 aa, Arabidopsis thaliana
  peptide (1)..(250): Ceres Seq. ID no. 4948996
MVTAMFCASSSPITSPLYPKAYKFSQTKSNSKRFSSLRASLPVSDNKLLKFEYTPWLIVGLGNPGLKYYGTRHNIGFEMIDHIARATDISMNTIQSKALVGIGSVGEVPILLVKPQGYMNFSGESVGPLAAYYQIPLRHILMIYDDMGLSNGVLRLQPKGGHSQHNGLKNVTEHLNGCRGYPRLSIGIGNPPGNMDMKAFLLQKFSPLERKQMDEGLEQGVEGVKTLVEEGFSDSISRFNLGQKYKFHKV

SEQ ID NO: 72822 - protein, 246 aa, Arabidopsis thaliana
  peptide (1)..(246): Ceres Seq. ID no. 4948997
MFCASSSPITSPLYPKAYKFSQTKSNSKRFSSLRASLPVSDNKLLKFEYTPWLIVGLGNPGLKYYGTRHNIGFEMIDHIARATDISMNTIQSKALVGIGSVGEVPILLVKPQGYMNFSGESVGPLAAYYQIPLRHILMIYDDMGLSNGVLRLQPKGGHSQHNGLKNVTEHLNGCRGYPRLSIGIGNPPGNMDMKAFLLQKFSPLERKQMDEGLEQGVEGVKTLVEEGFSDSISRFNLGQKYKFHKV

SEQ ID NO: 72823 - protein, 172 aa, Arabidopsis thaliana
  peptide (1)..(172): Ceres Seq. ID no. 4948998
MIDHIARATDISMNTIQSKALVGIGSVGEVPILLVKPQGYMNFSGESVGPLAAYYQIPLRHILMIYDDMGLSNGVLRLQPKGGHSQHNGLKNVTEHLNGCRGYPRLSIGIGNPPGNMDMKAFLLQKFSPLERKQMDEGLEQGVEGVKTLVEEGFSDSISRFNLGQKYKFHKV

SEQ ID NO: 72824 - DNA, 2034 bp, Arabidopsis thaliana
  misc_feature (1)..(2034): Ceres Seq. ID no. 4949128
  misc_feature (1)..(2034): Ortholog of  Ceres SEQ ID NO 12586556 as cited in SEQ ID NO 64667
  misc_feature (1)..(2034): Ortholog of  Ceres SEQ ID NO 13660894 as cited in SEQ ID NO 67475
atgagtgaagttttgcgcagagccaacaacgcacttagtagcgtcaagcaataccaatctctcttgaatcactttgcagctactcaatcaatttcaaaaaccaaagctttacactgccacgtcatcaccggcggtcgagtttccggccacattctctcgactctctccgtaacttatgcgttatgtggtcacatcacttatgcacggaagctgttcgaggaaatgcctcaaagctctttgctttcttataacattgttattagaatgtacgtgcgtgaaggattgtatcacgatgcgattagcgtgtttattaggatggttagtgagggggttaagtgtgttccggatggttatacatacccttttgttgctaaagctgctggagaattgaaatcgatgaaattggggttggttgttcatgggaggatcttgaggagttggtttggtagggataagtatgtgcagaacgcgttgttagcgatgtatatgaactttgggaaggttgaaatggcgagggatgtgtttgatgtgatgaagaaccgtgatgtgatttcgtggaacacgatgattagtgggtattataggaatggttatatgaatgatgcgttaatgatgtttgattggatggttaatgaaagtgttgatcttgaccatgctacgattgtttctatgttgcctgtttgtggtcacttgaaggatttggagatggggaggaatgttcataagttggtggaagagaagcggttaggggataaaattgaggtgaagaatgcgttggtgaatatgtacttgaaatgtggtcgtatggatgaagcgagatttgtttttgacaggatggaacgaagggatgtgatcacgtggacttgtatgattaacggatatactgaagatggagatgtggaaaacgctttagagttgtgtagattgatgcagtttgaaggcgtaagacctaatgctgtgactatagcttctcttgtttcggtgtgtggtgatgctttgaaggtgaatgatggtaaatgtttacacggttgggcggtgaggcaacaggtttattccgatatcattatagaaacatctttgatcagcatgtatgctaaatgcaaacgtgtagacctctgctttagagtattttcgggggcttcgaaataccataccggtccttggagtgcaattatcgctggttgtgtacagaatgaacttgtgagtgatgcgttaggtctattcaaacggatgcgacgggaagatgtggagcccaatattgctacattaaacagtctccttccagcatatgcagctttggcagatttgcgtcaagcaatgaatatccattgctacctaaccaaaaccgggtttatgtcaagccttgatgctgctacagggttggttcatgtttactcaaagtgtggaacattagaatctgctcacaagatattcaatggaatccaggaaaaacacaagagcaaagatgtagttctatggggtgcgttaatatccggctacgggatgcacggagatggtcataatgcgttgcaagttttcatggaaatggttcgatctggtgtaacgccaaacgaaatcacatttacatctgccttgaatgcttgcagtcattcgggtttggttgaagaaggcttgacattattcaggttcatgcttgaacattacaaaacgttagccagatcaaaccattacacttgcattgttgatctccttggtcgagcaggtcggttagacgaagcttacaatctcatcacaacaattccatttgaaccaacgtcaaccgtttggggtgcgttgcttgctgcttgtgtcacacatgagaatgtccagcttggagaaatggcagcaaacaagttgttcgagctggaaccagagaacacgggcaactatgtgttgttggcaaacatctatgcggctttaggacgatggaaagatatggagaaggtgagaagcatgatggagaatgttggattgagaaagaaaccaggtcatagcacaatcgagatcagaagtaattcagttgatacaagatga

SEQ ID NO: 72825 - protein, 677 aa, Arabidopsis thaliana
  peptide (1)..(677): Ceres Seq. ID no. 4949129
MSEVLRRANNALSSVKQYQSLLNHFAATQSISKTKALHCHVITGGRVSGHILSTLSVTYALCGHITYARKLFEEMPQSSLLSYNIVIRMYVREGLYHDAISVFIRMVSEGVKCVPDGYTYPFVAKAAGELKSMKLGLVVHGRILRSWFGRDKYVQNALLAMYMNFGKVEMARDVFDVMKNRDVISWNTMISGYYRNGYMNDALMMFDWMVNESVDLDHATIVSMLPVCGHLKDLEMGRNVHKLVEEKRLGDKIEVKNALVNMYLKCGRMDEARFVFDRMERRDVITWTCMINGYTEDGDVENALELCRLMQFEGVRPNAVTIASLVSVCGDALKVNDGKCLHGWAVRQQVYSDIIIETSLISMYAKCKRVDLCFRVFSGASKYHTGPWSAIIAGCVQNELVSDALGLFKRMRREDVEPNIATLNSLLPAYAALADLRQAMNIHCYLTKTGFMSSLDAATGLVHVYSKCGTLESAHKIFNGIQEKHKSKDVVLWGALISGYGMHGDGHNALQVFMEMVRSGVTPNEITFTSALNACSHSGLVEEGLTLFRFMLEHYKTLARSNHYTCIVDLLGRAGRLDEAYNLITTIPFEPTSTVWGALLAACVTHENVQLGEMAANKLFELEPENTGNYVLLANIYAALGRWKDMEKVRSMMENVGLRKKPGHSTIEIRSNSVDTR

SEQ ID NO: 72826 - protein, 603 aa, Arabidopsis thaliana
  peptide (1)..(603): Ceres Seq. ID no. 4949130
MPQSSLLSYNIVIRMYVREGLYHDAISVFIRMVSEGVKCVPDGYTYPFVAKAAGELKSMKLGLVVHGRILRSWFGRDKYVQNALLAMYMNFGKVEMARDVFDVMKNRDVISWNTMISGYYRNGYMNDALMMFDWMVNESVDLDHATIVSMLPVCGHLKDLEMGRNVHKLVEEKRLGDKIEVKNALVNMYLKCGRMDEARFVFDRMERRDVITWTCMINGYTEDGDVENALELCRLMQFEGVRPNAVTIASLVSVCGDALKVNDGKCLHGWAVRQQVYSDIIIETSLISMYAKCKRVDLCFRVFSGASKYHTGPWSAIIAGCVQNELVSDALGLFKRMRREDVEPNIATLNSLLPAYAALADLRQAMNIHCYLTKTGFMSSLDAATGLVHVYSKCGTLESAHKIFNGIQEKHKSKDVVLWGALISGYGMHGDGHNALQVFMEMVRSGVTPNEITFTSALNACSHSGLVEEGLTLFRFMLEHYKTLARSNHYTCIVDLLGRAGRLDEAYNLITTIPFEPTSTVWGALLAACVTHENVQLGEMAANKLFELEPENTGNYVLLANIYAALGRWKDMEKVRSMMENVGLRKKPGHSTIEIRSNSVDTR

SEQ ID NO: 72827 - protein, 589 aa, Arabidopsis thaliana
  peptide (1)..(589): Ceres Seq. ID no. 4949131
MYVREGLYHDAISVFIRMVSEGVKCVPDGYTYPFVAKAAGELKSMKLGLVVHGRILRSWFGRDKYVQNALLAMYMNFGKVEMARDVFDVMKNRDVISWNTMISGYYRNGYMNDALMMFDWMVNESVDLDHATIVSMLPVCGHLKDLEMGRNVHKLVEEKRLGDKIEVKNALVNMYLKCGRMDEARFVFDRMERRDVITWTCMINGYTEDGDVENALELCRLMQFEGVRPNAVTIASLVSVCGDALKVNDGKCLHGWAVRQQVYSDIIIETSLISMYAKCKRVDLCFRVFSGASKYHTGPWSAIIAGCVQNELVSDALGLFKRMRREDVEPNIATLNSLLPAYAALADLRQAMNIHCYLTKTGFMSSLDAATGLVHVYSKCGTLESAHKIFNGIQEKHKSKDVVLWGALISGYGMHGDGHNALQVFMEMVRSGVTPNEITFTSALNACSHSGLVEEGLTLFRFMLEHYKTLARSNHYTCIVDLLGRAGRLDEAYNLITTIPFEPTSTVWGALLAACVTHENVQLGEMAANKLFELEPENTGNYVLLANIYAALGRWKDMEKVRSMMENVGLRKKPGHSTIEIRSNSVDTR

SEQ ID NO: 72828 - DNA, 786 bp, Arabidopsis thaliana
  misc_feature (1)..(786): Ceres Seq. ID no. 4949143
  misc_feature (1)..(786): Ortholog of  Ceres SEQ ID NO 13596519 as cited in SEQ ID NO 62572
  misc_feature (1)..(786): Ortholog of  Ceres SEQ ID NO 12625108 as cited in SEQ ID NO 68102
atggtgatatgggtcgtgcccatgagttacggtcatggagcgatgattggtaatgcagtcgaagcacctgatgtagcggaagcaccagggattaatgacccaagcaaggcactcgacactaattggtatgacgcacgagccacgttctacggtgacatccatggtggcgacactcaaccttgtggatacggtaatctattcagacaaggctatggtctagccaccgcagcgttaagtacggcactcttcaacgacgggtacacatgtggggcttgttatgaaatcatgtgcacgcgtgatccacaatggtgtttacccggatccgtcaagatcacagcaacaaacttctgtcccgcaaattacagcaaaaccacagacctttggtgcaacccaccacagaaacactttgatctctccttagcaatgtttctcaagattgccaagtacaaagccggggttgtcccagttagatacagacgtattccttgtagcaaaactggtggtgtcaagtttgaaaccaaaggaaacccttatttcttaatggtcttgatatacaacgtaggaggagctggagatattaagtacgtgcaagttaaaggaaacaagaccgggtggataacaatgaaaaagaactgggggcagaattggaccactattacagtattgaccggccaaggtttatcgttcagggttacaacgagtgatgggattacaaaagatttttggaatgtgatgccaaaaaattgggggtttggacagacttttgatggtaggattaacttttag

SEQ ID NO: 72829 - protein, 261 aa, Arabidopsis thaliana
  peptide (1)..(261): Ceres Seq. ID no. 4949144
MVIWVVPMSYGHGAMIGNAVEAPDVAEAPGINDPSKALDTNWYDARATFYGDIHGGDTQPCGYGNLFRQGYGLATAALSTALFNDGYTCGACYEIMCTRDPQWCLPGSVKITATNFCPANYSKTTDLWCNPPQKHFDLSLAMFLKIAKYKAGVVPVRYRRIPCSKTGGVKFETKGNPYFLMVLIYNVGGAGDIKYVQVKGNKTGWITMKKNWGQNWTTITVLTGQGLSFRVTTSDGITKDFWNVMPKNWGFGQTFDGRINF

SEQ ID NO: 72830 - protein, 254 aa, Arabidopsis thaliana
  peptide (1)..(254): Ceres Seq. ID no. 4949145
MSYGHGAMIGNAVEAPDVAEAPGINDPSKALDTNWYDARATFYGDIHGGDTQPCGYGNLFRQGYGLATAALSTALFNDGYTCGACYEIMCTRDPQWCLPGSVKITATNFCPANYSKTTDLWCNPPQKHFDLSLAMFLKIAKYKAGVVPVRYRRIPCSKTGGVKFETKGNPYFLMVLIYNVGGAGDIKYVQVKGNKTGWITMKKNWGQNWTTITVLTGQGLSFRVTTSDGITKDFWNVMPKNWGFGQTFDGRINF

SEQ ID NO: 72831 - protein, 247 aa, Arabidopsis thaliana
  peptide (1)..(247): Ceres Seq. ID no. 4949146
MIGNAVEAPDVAEAPGINDPSKALDTNWYDARATFYGDIHGGDTQPCGYGNLFRQGYGLATAALSTALFNDGYTCGACYEIMCTRDPQWCLPGSVKITATNFCPANYSKTTDLWCNPPQKHFDLSLAMFLKIAKYKAGVVPVRYRRIPCSKTGGVKFETKGNPYFLMVLIYNVGGAGDIKYVQVKGNKTGWITMKKNWGQNWTTITVLTGQGLSFRVTTSDGITKDFWNVMPKNWGFGQTFDGRINF

SEQ ID NO: 72832 - DNA, 680 bp, Arabidopsis thaliana
  misc_feature (1)..(680): Ceres Seq. ID no. 4949237
  misc_feature (1)..(680): Ortholog of  Ceres SEQ ID NO 13598935 as cited in SEQ ID NO 1239
  misc_feature (1)..(680): Ortholog of  Ceres SEQ ID NO 13598171 as cited in SEQ ID NO 61357
acaaacaacgaacatggctaaacgttttctgcttcttcttcctcttttgtcatctattcttcttcttgccgtgtccgtcacagcttactccacaacaacgccgtatcaaggctacaagccggagaaattcacccacctccacttctacttccatgacgtcatctccggtgacaaacctaccgccgtcaaagttgccgaagcccgcccaacaaccaccctcaacgtcaagtttggcgtgattatgatcgctgatgatccgttgaccgaaggaccagacccgagctcaaaggaagtgggaagagctcaggggatgtacgcatcaacagccatgaaggacatagtcttcacaatggtctttaactatgttttcacggcaggagagtttaatggaagcaccatcgcggtgtatggacggaatgatatattttcgaaggtgagagagttgccgattattggaggaactggtgctttcaggtttgctagaggctatgcactgcccaagacttataagattgttggtctagatgccgtggtcgagtataatgtcttcatttggcattaatcatttgcatattgtctaatgtctttccgaaacaaattgtttcactttggttttcttatattgtttttggttcttttatatatatatatatatatatatatataacaattgttctgtt

SEQ ID NO: 72833 - protein, 186 aa, Arabidopsis thaliana
  peptide (1)..(186): Ceres Seq. ID no. 4949238
QTTNMAKRFLLLLPLLSSILLLAVSVTAYSTTTPYQGYKPEKFTHLHFYFHDVISGDKPTAVKVAEARPTTTLNVKFGVIMIADDPLTEGPDPSSKEVGRAQGMYASTAMKDIVFTMVFNYVFTAGEFNGSTIAVYGRNDIFSKVRELPIIGGTGAFRFARGYALPKTYKIVGLDAVVEYNVFIWH

SEQ ID NO: 72834 - protein, 182 aa, Arabidopsis thaliana
  peptide (1)..(182): Ceres Seq. ID no. 4949239
MAKRFLLLLPLLSSILLLAVSVTAYSTTTPYQGYKPEKFTHLHFYFHDVISGDKPTAVKVAEARPTTTLNVKFGVIMIADDPLTEGPDPSSKEVGRAQGMYASTAMKDIVFTMVFNYVFTAGEFNGSTIAVYGRNDIFSKVRELPIIGGTGAFRFARGYALPKTYKIVGLDAVVEYNVFIWH

SEQ ID NO: 72835 - protein, 106 aa, Arabidopsis thaliana
  peptide (1)..(106): Ceres Seq. ID no. 4949240
MIADDPLTEGPDPSSKEVGRAQGMYASTAMKDIVFTMVFNYVFTAGEFNGSTIAVYGRNDIFSKVRELPIIGGTGAFRFARGYALPKTYKIVGLDAVVEYNVFIWH

SEQ ID NO: 72836 - DNA, 1389 bp, Arabidopsis thaliana
  misc_feature (1)..(1389): Ceres Seq. ID no. 4949241
  misc_feature (1)..(1389): Ortholog of  Ceres SEQ ID NO 14309287 as cited in SEQ ID NO 0
ccacaaagatatttttctttattctctcgcagttcaattagggtttcaatctctctgctctgcttgtcatcaccaccaccaccaccaccgtcgtcgtctctctgtatctctccggcgggttctctctctacttcccccggaggattaaaagatggaccagtcttttattttgatattccgttagcttgttcagttattgtagaagctgtaccgtcaagacttttaatatctcaaatggatgatggtgggcatcgtgagaatggtcggcataaagcagcagttcagggccagcatcagccgtcgatgaaacaagtgatgtcgataatagcagagcgcgatgcagcgattcaggagagaaatctggcgatatcagagaaaaaagcagcagtagctgaaagggacatggcgtttcttcagagggacaccgccattgctgagcgcaacaatgcgataatggagagagacagtgctcttacagcactccaataccgtgagaactctatggttactgctcctgctgccaatatgtcagcatgtccaccaggatgtcaaatatcacgtggtgtaaaacacttgcaccatccgcacatgcatcatcatcatcaacaacatcacatacctcagttgactgaaaatgcatatgaaaccagagagatggagccaaatgatggtctcccaacatcaccacctgccggatccaccttggaatctgccaaaccaaaacgtggtaaaagagtgaacccaaaggcgacaacacaaactgctgctaataagagagggccaaaaaatcagaggaaggttaagaaagagagcgaggacgacttaaacaagataatgtttgtaaagacgacccatgactacacagacgaagattcaagtaagcatatcttaataggatcaaaatctgactggaaaagtcaagaaatggtggggctgaaccaagtggtttacgacgagacaacgatgccaccacctgtatgttcatgtacaggagttctcagacagtgctacaaatggggaaatggaggttggcaatcatcgtgttgcacaactacactatcaatgtatcctttacctgcactgcccaacaaaaggcatgctcgagttggtggacggaaaatgagcggaagcgcgttcaacaagcttctaagccggcttgctgcagaagggcatcatgatctttcaaacccggtcgatctgaaggaccattgggcaaagcacggtacaaaccgctacattacgattaaatgatatgtgcatttaggtgtgagttgttcttacgacattatctgattttaaatcatgtgtactaaattcaaataaactcgagaggaaaagaattgtatgtggagccaatgttatgttgtattatataattcgaaaattttt

SEQ ID NO: 72837 - protein, 416 aa, Arabidopsis thaliana
  peptide (1)..(416): Ceres Seq. ID no. 4949242
PQRYFSLFSRSSIRVSISLLCLSSPPPPPPSSSLCISPAGSLSTSPGGLKDGPVFYFDIPLACSVIVEAVPSRLLISQMDDGGHRENGRHKAAVQGQHQPSMKQVMSIIAERDAAIQERNLAISEKKAAVAERDMAFLQRDTAIAERNNAIMERDSALTALQYRENSMVTAPAANMSACPPGCQISRGVKHLHHPHMHHHHQQHHIPQLTENAYETREMEPNDGLPTSPPAGSTLESAKPKRGKRVNPKATTQTAANKRGPKNQRKVKKESEDDLNKIMFVKTTHDYTDEDSSKHILIGSKSDWKSQEMVGLNQVVYDETTMPPPVCSCTGVLRQCYKWGNGGWQSSCCTTTLSMYPLPALPNKRHARVGGRKMSGSAFNKLLSRLAAEGHHDLSNPVDLKDHWAKHGTNRYITIK

SEQ ID NO: 72838 - protein, 338 aa, Arabidopsis thaliana
  peptide (1)..(338): Ceres Seq. ID no. 4949243
MDDGGHRENGRHKAAVQGQHQPSMKQVMSIIAERDAAIQERNLAISEKKAAVAERDMAFLQRDTAIAERNNAIMERDSALTALQYRENSMVTAPAANMSACPPGCQISRGVKHLHHPHMHHHHQQHHIPQLTENAYETREMEPNDGLPTSPPAGSTLESAKPKRGKRVNPKATTQTAANKRGPKNQRKVKKESEDDLNKIMFVKTTHDYTDEDSSKHILIGSKSDWKSQEMVGLNQVVYDETTMPPPVCSCTGVLRQCYKWGNGGWQSSCCTTTLSMYPLPALPNKRHARVGGRKMSGSAFNKLLSRLAAEGHHDLSNPVDLKDHWAKHGTNRYITIK

SEQ ID NO: 72839 - protein, 315 aa, Arabidopsis thaliana
  peptide (1)..(315): Ceres Seq. ID no. 4949244
MKQVMSIIAERDAAIQERNLAISEKKAAVAERDMAFLQRDTAIAERNNAIMERDSALTALQYRENSMVTAPAANMSACPPGCQISRGVKHLHHPHMHHHHQQHHIPQLTENAYETREMEPNDGLPTSPPAGSTLESAKPKRGKRVNPKATTQTAANKRGPKNQRKVKKESEDDLNKIMFVKTTHDYTDEDSSKHILIGSKSDWKSQEMVGLNQVVYDETTMPPPVCSCTGVLRQCYKWGNGGWQSSCCTTTLSMYPLPALPNKRHARVGGRKMSGSAFNKLLSRLAAEGHHDLSNPVDLKDHWAKHGTNRYITIK

SEQ ID NO: 72840 - DNA, 1539 bp, Arabidopsis thaliana
  misc_feature (1)..(1539): Ceres Seq. ID no. 4949411
  misc_feature (1)..(1539): Ortholog of  Ceres SEQ ID NO 12607856 as cited in SEQ ID NO 55419
atgatgcaggggaagaaactgaaaggttgtgaaaatggtgttgtaaatcgaaaggcgttaaatcgagagaagataattactctgcaagaagatgttgaaaagttgagaaagaagctgagacttgaagaaaacattcaccgagcaatggaaagagcatttagtaggcctcttggagcacttccccgtcttcctccgtttctacctccatcggttttggagttacttgcggaagtggctgttttggaagaggaattggttcggttagaagaacatattgtgcattgtagacaagaattgtatcaagaagcagtttttacatcttcatcgatagagaatttaaaatgctctcctgcatttcctaagcattggcagaccaaatccaagtcagcttccactagtgctagagaatcagaatcacctctttcacgggcaccttgttctgtttcagtgtgtaggaagggtaaagaaaacaagttgagtgctacttctatcaaaacaccgatgaagaaaacgactattgctcatacacaactgaataagagtttagaagctcaaaaactaaaggatagtcatagatgtcgcaaaacaaatgcagagcggagctctcatggtggcggtgatgaaccaaataaaatttccgaggatttggttaaatgtctgtctaacattttcatgagaatgagctcaataaagagatccatggttacaaaatctcaagaaaacgataaagatacggcattcagggatccttatggaatttgctctagttttagaagaagggatattggtcgatataagaatttcagtgatgttgaagaagcctcacttaaccaaaacagaacgtcaagttcctctttgtttctcatccgccaactgaaacgattgcttggaagactttctttagtcaacatgcagaaacttaatcaacaagagaagttagctttctggataaacatttataacagctgcatgatgaatggtttccttgaacatggaataccggagagccctgatatggtgacattaatgcaaaaggcgactataaatgtaggaggccactttctcaatgcaatcacgatcgaacacttcatcctccgcttaccgcatcactcaaaatatatttctccaaagggttcaaagaaaaatgaaatggcagtgagaagtaaatttggattggaattgtcagagccacttgtaacatttgctctctcatgtggtagctggtcctcacccgcggtacgggtgtacactgcgagtaaagtagaggaggagttggaggtggcgaaaagagagtacctagaagcatcggtggggatatcggtggtgaaaatagggataccaaagctgatggattggtatagtcatgactttgcaaaggacattgaatcattgcttgattggattttccttcagttgcctactgagttgggtaaagatgctctcaactgtgttgaacaagggatgtctcagtccccttcttctactcttgtccatattatcccttatgacttcacttttagatatcttttttccatctga

SEQ ID NO: 72841 - protein, 512 aa, Arabidopsis thaliana
  peptide (1)..(512): Ceres Seq. ID no. 4949412
MMQGKKLKGCENGVVNRKALNREKIITLQEDVEKLRKKLRLEENIHRAMERAFSRPLGALPRLPPFLPPSVLELLAEVAVLEEELVRLEEHIVHCRQELYQEAVFTSSSIENLKCSPAFPKHWQTKSKSASTSARESESPLSRAPCSVSVCRKGKENKLSATSIKTPMKKTTIAHTQLNKSLEAQKLKDSHRCRKTNAERSSHGGGDEPNKISEDLVKCLSNIFMRMSSIKRSMVTKSQENDKDTAFRDPYGICSSFRRRDIGRYKNFSDVEEASLNQNRTSSSSLFLIRQLKRLLGRLSLVNMQKLNQQEKLAFWINIYNSCMMNGFLEHGIPESPDMVTLMQKATINVGGHFLNAITIEHFILRLPHHSKYISPKGSKKNEMAVRSKFGLELSEPLVTFALSCGSWSSPAVRVYTASKVEEELEVAKREYLEASVGISVVKIGIPKLMDWYSHDFAKDIESLLDWIFLQLPTELGKDALNCVEQGMSQSPSSTLVHIIPYDFTFRYLFSI

SEQ ID NO: 72842 - protein, 511 aa, Arabidopsis thaliana
  peptide (1)..(511): Ceres Seq. ID no. 4949413
MQGKKLKGCENGVVNRKALNREKIITLQEDVEKLRKKLRLEENIHRAMERAFSRPLGALPRLPPFLPPSVLELLAEVAVLEEELVRLEEHIVHCRQELYQEAVFTSSSIENLKCSPAFPKHWQTKSKSASTSARESESPLSRAPCSVSVCRKGKENKLSATSIKTPMKKTTIAHTQLNKSLEAQKLKDSHRCRKTNAERSSHGGGDEPNKISEDLVKCLSNIFMRMSSIKRSMVTKSQENDKDTAFRDPYGICSSFRRRDIGRYKNFSDVEEASLNQNRTSSSSLFLIRQLKRLLGRLSLVNMQKLNQQEKLAFWINIYNSCMMNGFLEHGIPESPDMVTLMQKATINVGGHFLNAITIEHFILRLPHHSKYISPKGSKKNEMAVRSKFGLELSEPLVTFALSCGSWSSPAVRVYTASKVEEELEVAKREYLEASVGISVVKIGIPKLMDWYSHDFAKDIESLLDWIFLQLPTELGKDALNCVEQGMSQSPSSTLVHIIPYDFTFRYLFSI

SEQ ID NO: 72843 - protein, 464 aa, Arabidopsis thaliana
  peptide (1)..(464): Ceres Seq. ID no. 4949414
MERAFSRPLGALPRLPPFLPPSVLELLAEVAVLEEELVRLEEHIVHCRQELYQEAVFTSSSIENLKCSPAFPKHWQTKSKSASTSARESESPLSRAPCSVSVCRKGKENKLSATSIKTPMKKTTIAHTQLNKSLEAQKLKDSHRCRKTNAERSSHGGGDEPNKISEDLVKCLSNIFMRMSSIKRSMVTKSQENDKDTAFRDPYGICSSFRRRDIGRYKNFSDVEEASLNQNRTSSSSLFLIRQLKRLLGRLSLVNMQKLNQQEKLAFWINIYNSCMMNGFLEHGIPESPDMVTLMQKATINVGGHFLNAITIEHFILRLPHHSKYISPKGSKKNEMAVRSKFGLELSEPLVTFALSCGSWSSPAVRVYTASKVEEELEVAKREYLEASVGISVVKIGIPKLMDWYSHDFAKDIESLLDWIFLQLPTELGKDALNCVEQGMSQSPSSTLVHIIPYDFTFRYLFSI

SEQ ID NO: 72844 - DNA, 1086 bp, Arabidopsis thaliana
  misc_feature (1)..(1086): Ceres Seq. ID no. 4949646
  misc_feature (1)..(1086): Ortholog of  Ceres SEQ ID NO 15170698 as cited in SEQ ID NO 58326
  misc_feature (1)..(1086): Ortholog of  Ceres SEQ ID NO 14302279 as cited in SEQ ID NO 68864
atggctatcccgaggctgagtcttcttcctaacaacgagcacaattctgataactacgaagatctggaacttgaatttagctcttccgtattaagatccctagagaggtacttaccgccggaaatactcacggcgaatagagaagagaaggccaaattcatgtcagacattttgcacaagtacatttcccgcgaagaatgtgccaaagctatacggttcaagaactatagggagtggataatgtccaattatcagccacgtttcagggagttgtataaacttgatcccgaatcgttattgcttccgtgtttccgcaaggcggtcagagaaaacaccgaggaaagcttcagacgtataatgtttgaaccgtttcctggtgtttacgtctttaaaatgtttcagcctgacttctttcagaaattgcttgttgaggtagagaatatgagaaagtggcttcatgaggcaaaattgatgatcaggaaaccaaacaataagagtaaatatggtgttgtgcttgacgactttggcatggatatcatgcttaagccactcgtggaggattttatctttcctatttgcaaagtattcttccctcaagtgtgtggaacaatgtttgacactcaacatggattcgttattgaaaattgtgaagatagggatgctgaattaggctttcatgtggaaaattcagacattacattgaatgtttgtttgagtaaacaaagtgagggaggggaaatattattcacaggcacacgatgcaataaacatttgaaagcaggtccaaagccagaggaaatttttgagtactgtcatgaaccgggtcaagctatacttcaccttggctgccacagccatggtgcaaaagccgccataacatcttgtagtcgggccaatatgattctttggtgcataaactctttgttcagagagatgcaaacttatgacaacgaattccgagactggtgcggtcaatgcgcccgtgaaaagaaagaaaagaaaagccagagtcttgcttccaaaagaaaggttaagaaaagaaaaaaggacatgattttgctcaagtttataagatgttttgtttga

SEQ ID NO: 72845 - protein, 361 aa, Arabidopsis thaliana
  peptide (1)..(361): Ceres Seq. ID no. 4949647
MAIPRLSLLPNNEHNSDNYEDLELEFSSSVLRSLERYLPPEILTANREEKAKFMSDILHKYISREECAKAIRFKNYREWIMSNYQPRFRELYKLDPESLLLPCFRKAVRENTEESFRRIMFEPFPGVYVFKMFQPDFFQKLLVEVENMRKWLHEAKLMIRKPNNKSKYGVVLDDFGMDIMLKPLVEDFIFPICKVFFPQVCGTMFDTQHGFVIENCEDRDAELGFHVENSDITLNVCLSKQSEGGEILFTGTRCNKHLKAGPKPEEIFEYCHEPGQAILHLGCHSHGAKAAITSCSRANMILWCINSLFREMQTYDNEFRDWCGQCAREKKEKKSQSLASKRKVKKRKKDMILLKFIRCFV

SEQ ID NO: 72846 - protein, 308 aa, Arabidopsis thaliana
  peptide (1)..(308): Ceres Seq. ID no. 4949648
MSDILHKYISREECAKAIRFKNYREWIMSNYQPRFRELYKLDPESLLLPCFRKAVRENTEESFRRIMFEPFPGVYVFKMFQPDFFQKLLVEVENMRKWLHEAKLMIRKPNNKSKYGVVLDDFGMDIMLKPLVEDFIFPICKVFFPQVCGTMFDTQHGFVIENCEDRDAELGFHVENSDITLNVCLSKQSEGGEILFTGTRCNKHLKAGPKPEEIFEYCHEPGQAILHLGCHSHGAKAAITSCSRANMILWCINSLFREMQTYDNEFRDWCGQCAREKKEKKSQSLASKRKVKKRKKDMILLKFIRCFV

SEQ ID NO: 72847 - protein, 281 aa, Arabidopsis thaliana
  peptide (1)..(281): Ceres Seq. ID no. 4949649
MSNYQPRFRELYKLDPESLLLPCFRKAVRENTEESFRRIMFEPFPGVYVFKMFQPDFFQKLLVEVENMRKWLHEAKLMIRKPNNKSKYGVVLDDFGMDIMLKPLVEDFIFPICKVFFPQVCGTMFDTQHGFVIENCEDRDAELGFHVENSDITLNVCLSKQSEGGEILFTGTRCNKHLKAGPKPEEIFEYCHEPGQAILHLGCHSHGAKAAITSCSRANMILWCINSLFREMQTYDNEFRDWCGQCAREKKEKKSQSLASKRKVKKRKKDMILLKFIRCFV

SEQ ID NO: 72848 - DNA, 783 bp, Arabidopsis thaliana
  misc_feature (1)..(783): Ceres Seq. ID no. 4949753
  misc_feature (1)..(783): Ortholog of  Ceres SEQ ID NO 15172464 as cited in SEQ ID NO 59111
atgaaactcacctatcaattcttcatcttctggttctttttaccattctttgcaatctccggtgatgatgattataaaaatctgatctttaaaggttgtgcaaatcagaaatctccagacccaactggtgttttctctcagaatctcaaaaacttattcacttctttagtttctcaatcatcacaaagctctttcgcttccgtaacctccggaactgataacaccaccgccgtgatcggtgtttttcagtgccgtggcgatctccaaaacgctcagtgttacgattgcgtctccaaaatccctaaactcgtttctaaactctgcggtggcggcagagatgacggtaatgtggtggcggctcgtgttcacctcgctggatgttatatccggtatgagagttcaggattccggcaaacttccggtacggagatgttgttccgtgtctgtgggaaaaaagattctaacgatcctgggtttgtcgggaaaagggagacggcgtttggtatggcggagaacggcgtgaaaactggatcatccggtggtggtggtggcggaggaggtttttacgcggggcagtatgagtcggtgtatgtgttgggacagtgtgagggtagtttgggaaattcagattgtggggaatgtgtgaaagatggatttgagaaagcaaagagtgagtgtggagagtcgaactcgggacaagtttaccttcagaagtgcttcgttagctatagttactactctcatggtgttcccaacatagagccattatcaggtatacactaa

SEQ ID NO: 72849 - protein, 260 aa, Arabidopsis thaliana
  peptide (1)..(260): Ceres Seq. ID no. 4949754
MKLTYQFFIFWFFLPFFAISGDDDYKNLIFKGCANQKSPDPTGVFSQNLKNLFTSLVSQSSQSSFASVTSGTDNTTAVIGVFQCRGDLQNAQCYDCVSKIPKLVSKLCGGGRDDGNVVAARVHLAGCYIRYESSGFRQTSGTEMLFRVCGKKDSNDPGFVGKRETAFGMAENGVKTGSSGGGGGGGGFYAGQYESVYVLGQCEGSLGNSDCGECVKDGFEKAKSECGESNSGQVYLQKCFVSYSYYSHGVPNIEPLSGIH

SEQ ID NO: 72850 - DNA, 927 bp, Arabidopsis thaliana
  misc_feature (1)..(927): Ceres Seq. ID no. 4950117
  misc_feature (1)..(927): Ortholog of  Ceres SEQ ID NO 15226227 as cited in SEQ ID NO 63433
  misc_feature (1)..(927): Ortholog of  Ceres SEQ ID NO 13599003 as cited in SEQ ID NO 0
atggaaagagtgaatctcggaggtttaggttacgataatggcggagttatgatgactagagatcccaaacctaggctcagatggacagccgatcttcatgatcgcttcgtcgacgccgtcgctaagctcggtggcgctgacaaagcaactcctaaatcggttctgaagctgatgggattaaaaggtttaacactgtaccatctcaagagccatttacagaagtatagacttggtcaacaacaaggcaaaaaacaaaatagaacagaacaaaacaaagaaaatgctggaagttcatatgtgcatttcgacaattgttctcaaggaggaatctccaatgattcaagatttgataaccatcaaaggtatattatatatgaatttgccttctctcgacataatggatttgtaaagcttgagtttgacataatgttaatgaacacacgtagacaaagcgggaatgtaccttttgctgaggcaatgagacatcaggtcgatgcgcaacaacggtttcaagaacaactcgaggtgcagaaaaaactgcagatgagaatggaggcacaaggaaaatatttgttgacattactagagaaagcacagaagagcttaccttgtggtaatgcaggggaaacagacaagggtcaattctcggatttcaatctcgcactttcgggacttgtaggaagtgatcgtaagaacgagaaggcgggtttggttactgatatctcacaccttaatggtggtgattcctctcaagagtttcggttatgtggagaacaagagaaaatagaaaccggagatgcatgtgttaaaccagaatccgggtttgtgcattttgatttgaactccaaaagtgggtatgatctcttgaattgtgggaaatatgggattgaagtgaagccaaatgtgattggagatagacttcaatag

SEQ ID NO: 72851 - protein, 308 aa, Arabidopsis thaliana
  peptide (1)..(308): Ceres Seq. ID no. 4950118
MERVNLGGLGYDNGGVMMTRDPKPRLRWTADLHDRFVDAVAKLGGADKATPKSVLKLMGLKGLTLYHLKSHLQKYRLGQQQGKKQNRTEQNKENAGSSYVHFDNCSQGGISNDSRFDNHQRYIIYEFAFSRHNGFVKLEFDIMLMNTRRQSGNVPFAEAMRHQVDAQQRFQEQLEVQKKLQMRMEAQGKYLLTLLEKAQKSLPCGNAGETDKGQFSDFNLALSGLVGSDRKNEKAGLVTDISHLNGGDSSQEFRLCGEQEKIETGDACVKPESGFVHFDLNSKSGYDLLNCGKYGIEVKPNVIGDRLQ

SEQ ID NO: 72852 - protein, 292 aa, Arabidopsis thaliana
  peptide (1)..(292): Ceres Seq. ID no. 4950119
MMTRDPKPRLRWTADLHDRFVDAVAKLGGADKATPKSVLKLMGLKGLTLYHLKSHLQKYRLGQQQGKKQNRTEQNKENAGSSYVHFDNCSQGGISNDSRFDNHQRYIIYEFAFSRHNGFVKLEFDIMLMNTRRQSGNVPFAEAMRHQVDAQQRFQEQLEVQKKLQMRMEAQGKYLLTLLEKAQKSLPCGNAGETDKGQFSDFNLALSGLVGSDRKNEKAGLVTDISHLNGGDSSQEFRLCGEQEKIETGDACVKPESGFVHFDLNSKSGYDLLNCGKYGIEVKPNVIGDRLQ

SEQ ID NO: 72853 - protein, 291 aa, Arabidopsis thaliana
  peptide (1)..(291): Ceres Seq. ID no. 4950120
MTRDPKPRLRWTADLHDRFVDAVAKLGGADKATPKSVLKLMGLKGLTLYHLKSHLQKYRLGQQQGKKQNRTEQNKENAGSSYVHFDNCSQGGISNDSRFDNHQRYIIYEFAFSRHNGFVKLEFDIMLMNTRRQSGNVPFAEAMRHQVDAQQRFQEQLEVQKKLQMRMEAQGKYLLTLLEKAQKSLPCGNAGETDKGQFSDFNLALSGLVGSDRKNEKAGLVTDISHLNGGDSSQEFRLCGEQEKIETGDACVKPESGFVHFDLNSKSGYDLLNCGKYGIEVKPNVIGDRLQ

SEQ ID NO: 72854 - DNA, 891 bp, Arabidopsis thaliana
  misc_feature (1)..(891): Ceres Seq. ID no. 4950275
  misc_feature (1)..(891): Ortholog of  Ceres SEQ ID NO 15178279 as cited in SEQ ID NO 52656
atgggcttctttcgtgctgcaactcatccagatgatctccggcgacgagtaccttcgccggcaataatggttggaacaaattatagagattctcatgaatttttcgattccgatacaatctgtatctctgatcaatacattatggagtcttatttcactacatacacttccttagacgactcagagtttcgaaacttcttgcttcttcaacaatgttctgacaaagttcctactcaagattcaaacattgttcctgcaacttcatttatacaacatagaaacattactggtgaaggttcacatcgtaatctcatcacatccatcaagcttcttcttcatcactcagagtctcagtttcgtgagctcgtgatcgttgaacggttgcctttgggtgtttttgctgatccttttgagcttcagagtcttcaacaacgcagagctttcagtgacgtatctgtgtttggtgacacaaatcttgagctgccttcgtttagatcgaacagatccgtcgttgagattcatgttgaaatcagctctagaaattatgaaaatggtgaaataagctttaagcttcctttacatgctcggtatcagcctctggacgacagtggatactctagagtggagtttggcgagccagacttgttcttgtgctcgagccatgtacaaaaccagcgacgtgaacggaggagatgtttggttttgtcgattggcagatcgaagactgaaaccaggtctgttttctgggatatccctgccggaatcaggggtcatacagagtatgtttccgccttgacattcgccgctgcggttttttctgcattttcaatactcgtggcatcggttttgagctcaaagggtgaatcttgtaaaaacttgaagcagtcatga

SEQ ID NO: 72855 - protein, 296 aa, Arabidopsis thaliana
  peptide (1)..(296): Ceres Seq. ID no. 4950276
MGFFRAATHPDDLRRRVPSPAIMVGTNYRDSHEFFDSDTICISDQYIMESYFTTYTSLDDSEFRNFLLLQQCSDKVPTQDSNIVPATSFIQHRNITGEGSHRNLITSIKLLLHHSESQFRELVIVERLPLGVFADPFELQSLQQRRAFSDVSVFGDTNLELPSFRSNRSVVEIHVEISSRNYENGEISFKLPLHARYQPLDDSGYSRVEFGEPDLFLCSSHVQNQRRERRRCLVLSIGRSKTETRSVFWDIPAGIRGHTEYVSALTFAAAVFSAFSILVASVLSSKGESCKNLKQS

SEQ ID NO: 72856 - protein, 274 aa, Arabidopsis thaliana
  peptide (1)..(274): Ceres Seq. ID no. 4950277
MVGTNYRDSHEFFDSDTICISDQYIMESYFTTYTSLDDSEFRNFLLLQQCSDKVPTQDSNIVPATSFIQHRNITGEGSHRNLITSIKLLLHHSESQFRELVIVERLPLGVFADPFELQSLQQRRAFSDVSVFGDTNLELPSFRSNRSVVEIHVEISSRNYENGEISFKLPLHARYQPLDDSGYSRVEFGEPDLFLCSSHVQNQRRERRRCLVLSIGRSKTETRSVFWDIPAGIRGHTEYVSALTFAAAVFSAFSILVASVLSSKGESCKNLKQS

SEQ ID NO: 72857 - protein, 249 aa, Arabidopsis thaliana
  peptide (1)..(249): Ceres Seq. ID no. 4950278
MESYFTTYTSLDDSEFRNFLLLQQCSDKVPTQDSNIVPATSFIQHRNITGEGSHRNLITSIKLLLHHSESQFRELVIVERLPLGVFADPFELQSLQQRRAFSDVSVFGDTNLELPSFRSNRSVVEIHVEISSRNYENGEISFKLPLHARYQPLDDSGYSRVEFGEPDLFLCSSHVQNQRRERRRCLVLSIGRSKTETRSVFWDIPAGIRGHTEYVSALTFAAAVFSAFSILVASVLSSKGESCKNLKQS

SEQ ID NO: 72858 - DNA, 1161 bp, Arabidopsis thaliana
  misc_feature (1)..(1161): Ceres Seq. ID no. 4950305
  misc_feature (1)..(1161): Ortholog of  Ceres SEQ ID NO 14311882 as cited in SEQ ID NO 51638
  misc_feature (1)..(1161): Ortholog of  Ceres SEQ ID NO 13595437 as cited in SEQ ID NO 56562
atggattccagagacatcccaccgtcacataaccagcttcaaccaccaccgggaatgttaatgtctcattaccgtaaccctaacgccgccgcttcaccattaatggttcccacttccacatctcaaccgattcaacaccctcgtcttccttttggcaatcaacaacaatctcaaacgtttcatcagcagcaacaacaacaaatggatcagaagactcttgaatctcttggatttggtgatggatcaccttcttctcaaccgatgcgattcgggatcgatgatcagaatcagcaactgcaagtgaagaagaagcgaggaaggccgagaaagtatactcctgatggtagcattgctttaggtttagctcctacgtctcctcttctctctgcagcttctaattcttacggtgagggtggtgttggagatagtggtggaaatggaaactctgttgatccacctgttaaacgtaacagaggaaggcctcctggttctagtaagaaacagcttgatgctttaggaggaacttcaggagttgggtttacacctcatgtcattgaagtgaacacaggagaggacatagcgtcaaaggtgatggctttttcggatcaagggtcaagaacaatttgtattctctctgcaagtggtgcagtttctagagtgatgcttcgtcaagcttctcattctagtggaatcgttacttatgagggacgatttgagatcattactctctcaggctcagtcttgaattatgaggtaaatggttccaccaacagaagtggtaacttgagtgtggctttggctggacctgatggcggcatcgtaggtggcagtgtagttggtaatctagtagctgcaacacaagtccaggtgatagtgggaagctttgttgcagaagcaaagaaaccgaaacaaagtagtgttaacattgctcgggggcagaatcctgaaccggcttcagcgccggctaacatgttgaactttggatcagtctctcaaggaccatcgagcgagtcatcagaagagaatgagagcggttctcctgcaatgcaccgtgacaataataatgggatatatggagctcaacaacaacaacaacaacaacctcttcatcctcatcagatgcaaatgtaccaacatctttggtctaatcatggtcaataa

SEQ ID NO: 72859 - protein, 386 aa, Arabidopsis thaliana
  peptide (1)..(386): Ceres Seq. ID no. 4950306
MDSRDIPPSHNQLQPPPGMLMSHYRNPNAAASPLMVPTSTSQPIQHPRLPFGNQQQSQTFHQQQQQQMDQKTLESLGFGDGSPSSQPMRFGIDDQNQQLQVKKKRGRPRKYTPDGSIALGLAPTSPLLSAASNSYGEGGVGDSGGNGNSVDPPVKRNRGRPPGSSKKQLDALGGTSGVGFTPHVIEVNTGEDIASKVMAFSDQGSRTICILSASGAVSRVMLRQASHSSGIVTYEGRFEIITLSGSVLNYEVNGSTNRSGNLSVALAGPDGGIVGGSVVGNLVAATQVQVIVGSFVAEAKKPKQSSVNIARGQNPEPASAPANMLNFGSVSQGPSSESSEENESGSPAMHRDNNNGIYGAQQQQQQQPLHPHQMQMYQHLWSNHGQ

SEQ ID NO: 72860 - protein, 368 aa, Arabidopsis thaliana
  peptide (1)..(368): Ceres Seq. ID no. 4950307
MLMSHYRNPNAAASPLMVPTSTSQPIQHPRLPFGNQQQSQTFHQQQQQQMDQKTLESLGFGDGSPSSQPMRFGIDDQNQQLQVKKKRGRPRKYTPDGSIALGLAPTSPLLSAASNSYGEGGVGDSGGNGNSVDPPVKRNRGRPPGSSKKQLDALGGTSGVGFTPHVIEVNTGEDIASKVMAFSDQGSRTICILSASGAVSRVMLRQASHSSGIVTYEGRFEIITLSGSVLNYEVNGSTNRSGNLSVALAGPDGGIVGGSVVGNLVAATQVQVIVGSFVAEAKKPKQSSVNIARGQNPEPASAPANMLNFGSVSQGPSSESSEENESGSPAMHRDNNNGIYGAQQQQQQQPLHPHQMQMYQHLWSNHGQ

SEQ ID NO: 72861 - protein, 366 aa, Arabidopsis thaliana
  peptide (1)..(366): Ceres Seq. ID no. 4950308
MSHYRNPNAAASPLMVPTSTSQPIQHPRLPFGNQQQSQTFHQQQQQQMDQKTLESLGFGDGSPSSQPMRFGIDDQNQQLQVKKKRGRPRKYTPDGSIALGLAPTSPLLSAASNSYGEGGVGDSGGNGNSVDPPVKRNRGRPPGSSKKQLDALGGTSGVGFTPHVIEVNTGEDIASKVMAFSDQGSRTICILSASGAVSRVMLRQASHSSGIVTYEGRFEIITLSGSVLNYEVNGSTNRSGNLSVALAGPDGGIVGGSVVGNLVAATQVQVIVGSFVAEAKKPKQSSVNIARGQNPEPASAPANMLNFGSVSQGPSSESSEENESGSPAMHRDNNNGIYGAQQQQQQQPLHPHQMQMYQHLWSNHGQ

SEQ ID NO: 72862 - DNA, 1059 bp, Arabidopsis thaliana
  misc_feature (1)..(1059): Ceres Seq. ID no. 4950335
  misc_feature (1)..(1059): Ortholog of  Ceres SEQ ID NO 13597334 as cited in SEQ ID NO 64244
atgccaaccgccagatatccaatggaaaggcctcaagaacctgagtacgaatgcgttgatatctacaaacaaccttcgctacaacaccctaaactccaaaatcaccaaatccaaatgagaccgagcgacgaagttctagccatgctatcaggagatacatcagcaaacgatgaaatggttgctgagtttgatataccagaagaaggatgtcctcaaggacaagtaccaatccataaaccaagaaatctcaaccacaccgagaaacctttaagcctattaatggatatggaactgttggctgcagtaatgaagaaaatcgatgccaccccatggcgtggagcatctgcatggtttagtatttaccaacctaaattgacaaataaagaccaatttagcatgagttttatgtggctcaatactgagtataatggcgaacgcaccaatgcccagtttggttgggctgtgattcctgcattatatggcgatgaccgtacaagacttacggcatactggagtccggataaaatcgaaaacggatgttacaatatacaatgtaaaggcttcgttcaaactgaccatagagtcgctcttggtaccggtttttcgaacacctctgtggtgggaggcaaccaatataaagctttctttgcaatcagtcaggatccaaaaacaaagaatttgtggctgacagtccagaagattaacatagggtattggccagaggaacttctaccttttttcaatgatggagcggagtcagttatatatggtggattcacgaatgctccatctgataacattcaactctttgaaatagttagcccacctatgggtaacgggaacaaaccgctggatgaggaagtggatctaaaacatacttgttatatgcactctcttaagtatgtgacaccagattacaagagtgtcgatgttgattccaacaaggtcgccgaagttgcggacgcaggtatatgttacgacgcgatttattttgataaacttgggcggtatggacaaacgtttaccttcggtggaccaggtggttattgtgatgtttga

SEQ ID NO: 72863 - protein, 352 aa, Arabidopsis thaliana
  peptide (1)..(352): Ceres Seq. ID no. 4950336
MPTARYPMERPQEPEYECVDIYKQPSLQHPKLQNHQIQMRPSDEVLAMLSGDTSANDEMVAEFDIPEEGCPQGQVPIHKPRNLNHTEKPLSLLMDMELLAAVMKKIDATPWRGASAWFSIYQPKLTNKDQFSMSFMWLNTEYNGERTNAQFGWAVIPALYGDDRTRLTAYWSPDKIENGCYNIQCKGFVQTDHRVALGTGFSNTSVVGGNQYKAFFAISQDPKTKNLWLTVQKINIGYWPEELLPFFNDGAESVIYGGFTNAPSDNIQLFEIVSPPMGNGNKPLDEEVDLKHTCYMHSLKYVTPDYKSVDVDSNKVAEVADAGICYDAIYFDKLGRYGQTFTFGGPGGYCDV

SEQ ID NO: 72864 - protein, 345 aa, Arabidopsis thaliana
  peptide (1)..(345): Ceres Seq. ID no. 4950337
MERPQEPEYECVDIYKQPSLQHPKLQNHQIQMRPSDEVLAMLSGDTSANDEMVAEFDIPEEGCPQGQVPIHKPRNLNHTEKPLSLLMDMELLAAVMKKIDATPWRGASAWFSIYQPKLTNKDQFSMSFMWLNTEYNGERTNAQFGWAVIPALYGDDRTRLTAYWSPDKIENGCYNIQCKGFVQTDHRVALGTGFSNTSVVGGNQYKAFFAISQDPKTKNLWLTVQKINIGYWPEELLPFFNDGAESVIYGGFTNAPSDNIQLFEIVSPPMGNGNKPLDEEVDLKHTCYMHSLKYVTPDYKSVDVDSNKVAEVADAGICYDAIYFDKLGRYGQTFTFGGPGGYCDV

SEQ ID NO: 72865 - protein, 314 aa, Arabidopsis thaliana
  peptide (1)..(314): Ceres Seq. ID no. 4950338
MRPSDEVLAMLSGDTSANDEMVAEFDIPEEGCPQGQVPIHKPRNLNHTEKPLSLLMDMELLAAVMKKIDATPWRGASAWFSIYQPKLTNKDQFSMSFMWLNTEYNGERTNAQFGWAVIPALYGDDRTRLTAYWSPDKIENGCYNIQCKGFVQTDHRVALGTGFSNTSVVGGNQYKAFFAISQDPKTKNLWLTVQKINIGYWPEELLPFFNDGAESVIYGGFTNAPSDNIQLFEIVSPPMGNGNKPLDEEVDLKHTCYMHSLKYVTPDYKSVDVDSNKVAEVADAGICYDAIYFDKLGRYGQTFTFGGPGGYCDV

SEQ ID NO: 72866 - DNA, 1065 bp, Arabidopsis thaliana
  misc_feature (1)..(1065): Ceres Seq. ID no. 4950339
  misc_feature (1)..(1065): Ortholog of  Ceres SEQ ID NO 14311862 as cited in SEQ ID NO 51654
  misc_feature (1)..(1065): Ortholog of  Ceres SEQ ID NO 13597334 as cited in SEQ ID NO 64244
atggggtcaaagcctcaagaacctgaatacgaatgcgttgatatctacaaacaaccttcgctacaacaccctaaactccaaaatcaccgaatccaaatgagaccgagcgatgaagccttagccatgctctcaggagatacatcatcagaaaacttatcaaacgatgaaatggttgctgagtttgatataccagaagaaggatgtcctcaaggacaagtaccaatccataaaccaagaaataatttcaaccacaccgagaaacattttcagcctattaatggatttggaactgttggtcaacatgctgcggtaatgaagaaaatcgatgccaccccgtggcgtggagcatcagcatggataagtatttaccaacctaaattgacaaataaagagcaattcagcatggctttcatttggctcaatactgagtatgaaggcgaacgcaccagtgcccactttggttgggctgtgattcctgcactatatggcgatagccgtacacgacttactgcatactggagtcaagatacattcgaaagcggatgttacaatataaaatgtaagggtttcgttcaaattgataggagactctttcttggagccggttttgcgaacacctctgtggtgggaggccaaaattttaaagctttttttgcaatcaatcaggatccaaaaacaaacaatttgctgctgacagtggggaagatttacttagggtattggccagaggaacttctaccttttttcactgaaggagcggagtcagttatatatggtggattgacgaatgctccatctgatggcattcaaccctttaatatagttagcccaccgatgggtaacgggaacaaaccgctggatgaggaagttgatctaaagcatacttgttatatgcactctcttaaatatgtgacacaagattacaagagtgtcgatgttgataccaacaaggtcgccgaagttgcggacgcaggtatatgttacgacgcgatttattttgataaacttggggggtatggacaaacgtttaccttcggtggaccaggtggtcattgtgatgtgtga

SEQ ID NO: 72867 - protein, 354 aa, Arabidopsis thaliana
  peptide (1)..(354): Ceres Seq. ID no. 4950340
MGSKPQEPEYECVDIYKQPSLQHPKLQNHRIQMRPSDEALAMLSGDTSSENLSNDEMVAEFDIPEEGCPQGQVPIHKPRNNFNHTEKHFQPINGFGTVGQHAAVMKKIDATPWRGASAWISIYQPKLTNKEQFSMAFIWLNTEYEGERTSAHFGWAVIPALYGDSRTRLTAYWSQDTFESGCYNIKCKGFVQIDRRLFLGAGFANTSVVGGQNFKAFFAINQDPKTNNLLLTVGKIYLGYWPEELLPFFTEGAESVIYGGLTNAPSDGIQPFNIVSPPMGNGNKPLDEEVDLKHTCYMHSLKYVTQDYKSVDVDTNKVAEVADAGICYDAIYFDKLGGYGQTFTFGGPGGHCDV

SEQ ID NO: 72868 - protein, 322 aa, Arabidopsis thaliana
  peptide (1)..(322): Ceres Seq. ID no. 4950341
MRPSDEALAMLSGDTSSENLSNDEMVAEFDIPEEGCPQGQVPIHKPRNNFNHTEKHFQPINGFGTVGQHAAVMKKIDATPWRGASAWISIYQPKLTNKEQFSMAFIWLNTEYEGERTSAHFGWAVIPALYGDSRTRLTAYWSQDTFESGCYNIKCKGFVQIDRRLFLGAGFANTSVVGGQNFKAFFAINQDPKTNNLLLTVGKIYLGYWPEELLPFFTEGAESVIYGGLTNAPSDGIQPFNIVSPPMGNGNKPLDEEVDLKHTCYMHSLKYVTQDYKSVDVDTNKVAEVADAGICYDAIYFDKLGGYGQTFTFGGPGGHCDV

SEQ ID NO: 72869 - protein, 313 aa, Arabidopsis thaliana
  peptide (1)..(313): Ceres Seq. ID no. 4950342
MLSGDTSSENLSNDEMVAEFDIPEEGCPQGQVPIHKPRNNFNHTEKHFQPINGFGTVGQHAAVMKKIDATPWRGASAWISIYQPKLTNKEQFSMAFIWLNTEYEGERTSAHFGWAVIPALYGDSRTRLTAYWSQDTFESGCYNIKCKGFVQIDRRLFLGAGFANTSVVGGQNFKAFFAINQDPKTNNLLLTVGKIYLGYWPEELLPFFTEGAESVIYGGLTNAPSDGIQPFNIVSPPMGNGNKPLDEEVDLKHTCYMHSLKYVTQDYKSVDVDTNKVAEVADAGICYDAIYFDKLGGYGQTFTFGGPGGHCDV

SEQ ID NO: 72870 - DNA, 1444 bp, Arabidopsis thaliana
  misc_feature (1)..(1444): Ceres Seq. ID no. 4950454
  misc_feature (1)..(1444): Ortholog of  Ceres SEQ ID NO 13599602 as cited in SEQ ID NO 0
aatcttaacacaagcttgatcgtcctcatctgccaccaaaccaaagacataatttcttcggtgacttccatggctccgcctgtctctgatgattccctacagcctcgagatgtttgtgttgtgggagtggcgcgaacgcctataggggacttccttggctccctctcgtctttgactgctacaagacttgggtccatagccatccaagccgcacttaagagagcacatgttgatccggcccttgtggaagaggtcttctttggcaatgtcttaactgccaatcttgggcaagcaccagcaagacaggctgcacttggtgctgggattccctattctgtgatctgcaccactatcaacaaagtttgtgctgcaggaatgaaatctgtaatgctagcgtctcaaagtatccagctcggcttgaatgatattgttgttgctggtgggatggagagcatgtcaaacgtacctaagtacctcccggacgcaagaaggggttctcgattaggtcatgatactgttgttgatggtatgatgaaagatggactttgggatgtctataatgactttggaatgggagtttgtggagaaatatgcgctgaccagtaccgtattacaagagaagaacaggatgcttatgctatccagagctttgagcgtggtattgctgcgcaaaacactcagttgttcgcttgggaaattgttccggtcgaagtttccactggaagagggaggccttcagttgttattgacaaggatgaaggattggggaagtttgatgcagccaagttaaaaaagcttagaccaagtttcaaggaggatgggggatcagtcactgctggaaatgcatcaagcataagtgatggtgcggcagcgttagtgctagtgagtggagagaaggctcttgagcttggactgcatgttatcgctaagattagaggatacgctgatgctgctcaggcaccagagttattcacaaccacgccagctcttgctattcctaaagctataaagcgggctggtttggatgcatctcaagtggattattatgaaataaacgaagcattttctgtggtagctctagccaatcagaaactactgggattagatcctgaacggctcaatgcgcatggaggggctgtttcactgggacatccattgggctgtagcggtgctcgtatcttggtcacattattgggggtgttgagagcaaagaagggaaagtatggagtggcatcaatatgcaacggaggaggaggagcatcagcacttgtccttgagttcatgtcggagaagacaatcggatattcggcactctgaagctaagagctgttgttttataacgcaaagcttatgtatatggttcatgtgtgtgtcacaagactgtaactttgtacttgagagagatgcaataaaagtgtgttagaaaatgagcggtagatttccc

SEQ ID NO: 72871 - protein, 438 aa, Arabidopsis thaliana; identical to SEQ ID NO: 38066
  peptide (1)..(438): Ceres Seq. ID no. 4950455

SEQ ID NO: 72872 - protein, 415 aa, Arabidopsis thaliana; identical to SEQ ID NO: 38067
  peptide (1)..(415): Ceres Seq. ID no. 4950456

SEQ ID NO: 72873 - protein, 313 aa, Arabidopsis thaliana; identical to SEQ ID NO: 38068
  peptide (1)..(313): Ceres Seq. ID no. 4950457

SEQ ID NO: 72874 - DNA, 853 bp, Arabidopsis thaliana
  misc_feature (1)..(853): Ceres Seq. ID no. 4950486
  misc_feature (1)..(853): Ortholog of  Ceres SEQ ID NO 14305944 as cited in SEQ ID NO 52294
  misc_feature (1)..(853): Ortholog of  Ceres SEQ ID NO 13596338 as cited in SEQ ID NO 68005
aaatttctcagtgaaacactgaaacttccttttcagttcgtaccgttcttcgctactttactcattctttagggtttcaaggttttctattggtcttgttgtagactcgagtagcttctgggttcaacccacaaagtttgagccttttttgatttgcagagtcctctgtgtttcttggtttgtctcttgatcaagaatctgagatgggcgagccactaggactgctccaggtgactgttattcaaggaaagaaactggtgatccgagatttcaagtcaagtgatccttatgtgattgtcaaattaggaaatgagtcagcgaagaccaaagtgatcaacaattgcctgaatccagtgtggaatgaggaactgaactttactctgaaagatcctgcagcagttctcgcattggaagtgtttgataaagataggttcaaggcagatgacaagatgggccatgcctctctcagccttcaaccgcttatctcagttgccagactaagacacgtagtccgcgtgtcctctggtgagacaacgcttaggaaagtattaccggatccagagaactgcgtatctcgagagagcacaatcagttgcatagacggagaggtggtgcagagtgtgtggctgaggctgtgtgctgttgaatcgggtgagattgagttgaagataaagttgattgatcctcctggaacaaacaagtagcaatagggtattttatgttagtttgtaacacgagacccgtttgtgactagtataattgcaacatcagtatggtcttgtcttgtttccaagtgtgcctttgtgactactcaccaatttattaggaatctttgagatacattgttctgctc

SEQ ID NO: 72875 - protein, 166 aa, Arabidopsis thaliana; identical to SEQ ID NO: 26630
  peptide (1)..(166): Ceres Seq. ID no. 4950487

SEQ ID NO: 72876 - protein, 84 aa, Arabidopsis thaliana; identical to SEQ ID NO: 26631
  peptide (1)..(84): Ceres Seq. ID no. 4950488

SEQ ID NO: 72877 - DNA, 618 bp, Arabidopsis thaliana
  misc_feature (1)..(618): Ceres Seq. ID no. 4950535
  misc_feature (1)..(618): Ortholog of  Ceres SEQ ID NO 14316060 as cited in SEQ ID NO 52465
  misc_feature (1)..(618): Ortholog of  Ceres SEQ ID NO 13664032 as cited in SEQ ID NO 67527
atggcagagggcagtatgcgtcctccagaattcaaccagcctaacaaaaccagtaatggtggtgaggaggagtgcacggtgagggagcaagacaggttcatgcctattgccaacgtgatacggatcatgcggaggatcttacctgctcacgccaagatctcagatgactccaaggagacgatccaagagtgtgtttcggagtacatcagcttcataacaggggaggctaatgagcggtgccagcgggaacagcgcaagaccatcactgctgaggacgtcttgtgggcaatgagcaagctcggttttgatgactacatcgaacccctcacgttgtacctccaccgctacagagagttggaaggtgaaagaggggttagctgcagtgctgggtccgttagtatgaccaacggcttggtggtcaagaggcctaatgggaccatgaccgagtatggagcctacgggcctgtgccagggattcacatggcgcagtaccattatcgtcatcagaacgggtttgttttcagtggtaacgaacctaattctaagatgagtggttcatcttcaggagcaagtggcgccagagttgaagtatttccgactcaacaacataagtactga

SEQ ID NO: 72878 - protein, 205 aa, Arabidopsis thaliana
  peptide (1)..(205): Ceres Seq. ID no. 4950536
MAEGSMRPPEFNQPNKTSNGGEEECTVREQDRFMPIANVIRIMRRILPAHAKISDDSKETIQECVSEYISFITGEANERCQREQRKTITAEDVLWAMSKLGFDDYIEPLTLYLHRYRELEGERGVSCSAGSVSMTNGLVVKRPNGTMTEYGAYGPVPGIHMAQYHYRHQNGFVFSGNEPNSKMSGSSSGASGARVEVFPTQQHKY

SEQ ID NO: 72879 - protein, 200 aa, Arabidopsis thaliana
  peptide (1)..(200): Ceres Seq. ID no. 4950537
MRPPEFNQPNKTSNGGEEECTVREQDRFMPIANVIRIMRRILPAHAKISDDSKETIQECVSEYISFITGEANERCQREQRKTITAEDVLWAMSKLGFDDYIEPLTLYLHRYRELEGERGVSCSAGSVSMTNGLVVKRPNGTMTEYGAYGPVPGIHMAQYHYRHQNGFVFSGNEPNSKMSGSSSGASGARVEVFPTQQHKY

SEQ ID NO: 72880 - protein, 172 aa, Arabidopsis thaliana
  peptide (1)..(172): Ceres Seq. ID no. 4950538
MPIANVIRIMRRILPAHAKISDDSKETIQECVSEYISFITGEANERCQREQRKTITAEDVLWAMSKLGFDDYIEPLTLYLHRYRELEGERGVSCSAGSVSMTNGLVVKRPNGTMTEYGAYGPVPGIHMAQYHYRHQNGFVFSGNEPNSKMSGSSSGASGARVEVFPTQQHKY

SEQ ID NO: 72881 - DNA, 1020 bp, Arabidopsis thaliana
  misc_feature (1)..(1020): Ceres Seq. ID no. 4950570
  misc_feature (1)..(1020): Ortholog of  Ceres SEQ ID NO 14314542 as cited in SEQ ID NO 52282
atgtctaccggagaagaaggtcacatggcgatggcagatagaggctctagaaagagaagagtcggcgttaagaaaggtactaaagcggcgaggaacaaaaagcaaaaatcaaaaccttctacttccgataggtttaaggttacaatgaagaatcaaaagctatttcagaagagagcacgagattacaattccgatgacgatgaagaagaagatgatgaatcgaagaaacaaccagaagtaacaattcgtgagaagatcttctctgatgctaacatgggaccaaattacgaagagattggagaagaagataatgatgagaattcagatggtgaagatcatggagagattgaatctggaatcactaagtttgctactgatggatgtaatgctttcaaaatcgcttttaaagctattatgaagaagactaaaggagatgatacattgggcccagttttatcagcacataagcatcttattggagagaagctagctgaagatgaagctgaaaagaaagctaaaggtcaagctagaaaggctaaacatttgattgctgagaagggacatgttaaacctggaagttatttggattctcatgaaaagattcttattggtgttgctactaaaggagtggtcaagcttttcaatgctgtcaacaaggctcaacatgctcagaagggtttgaatccttcaaggtctaaagacgctaaagtgctgaagaagcgaagaaaagaagcattcttgtctgagttagggaaaacaaaaacagacaccaagccttcaactttggatgaacatagaagcaagttagtattctgtcttgagctggcttctatagagaaaggatcaccttcagtagcgagagccgctcacaaatctgaagacgaagctcctgtttgggctcctctacgagataattacatgttagcaaacccaaaactgaaggactgggacaagaaacaggaaacaagcgagggagatgattttgccggtttgtcaggagatgaaagttatgaagactga

SEQ ID NO: 72882 - protein, 339 aa, Arabidopsis thaliana
  peptide (1)..(339): Ceres Seq. ID no. 4950571
MSTGEEGHMAMADRGSRKRRVGVKKGTKAARNKKQKSKPSTSDRFKVTMKNQKLFQKRARDYNSDDDEEEDDESKKQPEVTIREKIFSDANMGPNYEEIGEEDNDENSDGEDHGEIESGITKFATDGCNAFKIAFKAIMKKTKGDDTLGPVLSAHKHLIGEKLAEDEAEKKAKGQARKAKHLIAEKGHVKPGSYLDSHEKILIGVATKGVVKLFNAVNKAQHAQKGLNPSRSKDAKVLKKRRKEAFLSELGKTKTDTKPSTLDEHRSKLVFCLELASIEKGSPSVARAAHKSEDEAPVWAPLRDNYMLANPKLKDWDKKQETSEGDDFAGLSGDESYED

SEQ ID NO: 72883 - protein, 331 aa, Arabidopsis thaliana
  peptide (1)..(331): Ceres Seq. ID no. 4950572
MAMADRGSRKRRVGVKKGTKAARNKKQKSKPSTSDRFKVTMKNQKLFQKRARDYNSDDDEEEDDESKKQPEVTIREKIFSDANMGPNYEEIGEEDNDENSDGEDHGEIESGITKFATDGCNAFKIAFKAIMKKTKGDDTLGPVLSAHKHLIGEKLAEDEAEKKAKGQARKAKHLIAEKGHVKPGSYLDSHEKILIGVATKGVVKLFNAVNKAQHAQKGLNPSRSKDAKVLKKRRKEAFLSELGKTKTDTKPSTLDEHRSKLVFCLELASIEKGSPSVARAAHKSEDEAPVWAPLRDNYMLANPKLKDWDKKQETSEGDDFAGLSGDESYED

SEQ ID NO: 72884 - protein, 329 aa, Arabidopsis thaliana
  peptide (1)..(329): Ceres Seq. ID no. 4950573
MADRGSRKRRVGVKKGTKAARNKKQKSKPSTSDRFKVTMKNQKLFQKRARDYNSDDDEEEDDESKKQPEVTIREKIFSDANMGPNYEEIGEEDNDENSDGEDHGEIESGITKFATDGCNAFKIAFKAIMKKTKGDDTLGPVLSAHKHLIGEKLAEDEAEKKAKGQARKAKHLIAEKGHVKPGSYLDSHEKILIGVATKGVVKLFNAVNKAQHAQKGLNPSRSKDAKVLKKRRKEAFLSELGKTKTDTKPSTLDEHRSKLVFCLELASIEKGSPSVARAAHKSEDEAPVWAPLRDNYMLANPKLKDWDKKQETSEGDDFAGLSGDESYED

SEQ ID NO: 72885 - DNA, 969 bp, Arabidopsis thaliana
  misc_feature (1)..(969): Ceres Seq. ID no. 4950643
  misc_feature (1)..(969): Ortholog of  Ceres SEQ ID NO 14315989 as cited in SEQ ID NO 57571
atgttgtcatttcgaatgccgtctatcggaagccaacctacggcatttgctgcaaaaataacggacaatccaaagaccgtggcacaactcaagtcggctgcatcgccttcacctcatagtaccgtgacgtgcggttaccaagctcatgtggcagggttctttcgaaacgtcaccgttttatggtccaagaatctcatgaatcattccctcaccgtaatggtgtcgagtttagacaatgacatgaattattgttgtaagattgatctcgtgaagccatggcagttttggagcaaaagagggtcaaagtcattcgacgtagagggaaactttgtggaggtcttttgggatcttcgatcagcaaaattggctggaaacggtagccccgaacccgtgtcagactattacgtggcagtagtttctgatgaagaggttgttttattgttgggagatttaaagcaaaaggcttataagcggaccaagtcaagaccggcattggtggaagggttcatatactttaaaaaagaaagcatatttgggaagaaaacgttttcgactcgggcaaggtttgacgaacaaagaaaggaacatgaagtggtggtggagagctctaatggagcagcggagccagagatgtggataagcgttgatgggatcgtggttgtgaacgtgaagaatctacaatggaaatttaggggaaaccaaatggtgatggtggatagaacaccggtaatggtctactatgatgttcatgattggttgtttgcaagttcggagactgcagcgagttcagggttgtttttgtttaagcctgttccggttggagcgatggtagatgagagctttagcgatgcggaggaaggagatagcggaggagggagtagtcctttgagtcgttataattcagcatcaagtggttttggaccattgcatgacttttgtttgtttctttatgcttggaaacttgaatga

SEQ ID NO: 72886 - protein, 322 aa, Arabidopsis thaliana; identical to SEQ ID NO: 70129
  peptide (1)..(322): Ceres Seq. ID no. 4950644

SEQ ID NO: 72887 - protein, 317 aa, Arabidopsis thaliana
  peptide (1)..(317): Ceres Seq. ID no. 4950645
MPSIGSQPTAFAAKITDNPKTVAQLKSAASPSPHSTVTCGYQAHVAGFFRNVTVLWSKNLMNHSLTVMVSSLDNDMNYCCKIDLVKPWQFWSKRGSKSFDVEGNFVEVFWDLRSAKLAGNGSPEPVSDYYVAVVSDEEVVLLLGDLKQKAYKRTKSRPALVEGFIYFKKESIFGKKTFSTRARFDEQRKEHEVVVESSNGAAEPEMWISVDGIVVVNVKNLQWKFRGNQMVMVDRTPVMVYYDVHDWLFASSETAASSGLFLFKPVPVGAMVDESFSDAEEGDSGGGSSPLSRYNSASSGFGPLHDFCLFLYAWKLE

SEQ ID NO: 72888 - protein, 257 aa, Arabidopsis thaliana
  peptide (1)..(257): Ceres Seq. ID no. 4950646
MNHSLTVMVSSLDNDMNYCCKIDLVKPWQFWSKRGSKSFDVEGNFVEVFWDLRSAKLAGNGSPEPVSDYYVAVVSDEEVVLLLGDLKQKAYKRTKSRPALVEGFIYFKKESIFGKKTFSTRARFDEQRKEHEVVVESSNGAAEPEMWISVDGIVVVNVKNLQWKFRGNQMVMVDRTPVMVYYDVHDWLFASSETAASSGLFLFKPVPVGAMVDESFSDAEEGDSGGGSSPLSRYNSASSGFGPLHDFCLFLYAWKLE

SEQ ID NO: 72889 - DNA, 1461 bp, Arabidopsis thaliana
  misc_feature (1)..(1461): Ceres Seq. ID no. 4950651
  misc_feature (1)..(1461): Ortholog of  Ceres SEQ ID NO 13599602 as cited in SEQ ID NO 0
atgatgatttatgtagaagaaggggttgatacaacagatcatatagcagtcgtgttgctcttcatcgtagttatcgtcgctgattcaccaacaacaacaacatcacaagaaagcgtcctcttttataggaccctctgtccctgtttctctctccagttttattgtagaattcgctgtcattttcacaacgactcacttctttcagctctctccattcggcgctctcttctggaattgaagaatcaagcaatggcccatacatcagaatctgtgaatcctagagatgtttgcattgtgggtgttgcacgtactccaatgggtggctttctcggatctctttcatctttacctgccacaaagcttggatctttagctattgcagctgctttgaagagagcaaatgttgatccagctcttgttcaagaagttgtctttggcaatgttcttagtgctaatttgggtcaagctcctgctcgtcaagctgctttaggtgcaggaatccctaactctgttatctgtactacagttaacaaggtttgtgcatcaggcatgaaagcggtaatgattgctgctcaaagtatccagttagggatcaatgatgtagttgtggcgggtggtatggaaagcatgtctaatacaccaaaatatttggcagaagcaaggaagggatctcgttttggtcatgattctttagtagatggaatgttgaaggatggactatgggatgtctataacgactgtgggatgggaagctgtgcagaattatgcgctgagaagtttcagattacaagggagcagcaagatgactatgcagttcagagttttgagcgtggtattgctgcccaggaagctggcgccttcacatgggaaatcgtcccggttgaagtttctggaggaagaggtaggccatcaaccattgttgacaaggacgaaggtcttgggaagtttgatgctgcaaaattgaggaaactccgtcctagtttcaaagagaatggagggactgttacagctggaaatgcgtctagcataagtgatggtgcagctgcccttgtcctagtgagcggagagaaggctcttcagctaggacttctagtattagcaaaaattaaagggtatggtgacgcagctcaggaaccagagtttttcactactgctcctgctcttgctataccaaaagccattgcacatgctggtttggaatcttctcaagttgattactatgagatcaatgaagcatttgcagttgtagcacttgcaaatcaaaagctactcgggattgctccagagaaagtgaacgtaaatggaggagctgtctccttaggacaccctctaggctgcagtggcgcccgtattctaatcacgttgcttgggatactaaagaagagaaacggaaagtacggtgtgggaggagtgtgcaacggaggaggaggtgcttctgctctagttcttgagctcctttga

SEQ ID NO: 72890 - protein, 486 aa, Arabidopsis thaliana
  peptide (1)..(486): Ceres Seq. ID no. 4950652
MMIYVEEGVDTTDHIAVVLLFIVVIVADSPTTTTSQESVLFYRTLCPCFSLQFYCRIRCHFHNDSLLSALSIRRSLLELKNQAMAHTSESVNPRDVCIVGVARTPMGGFLGSLSSLPATKLGSLAIAAALKRANVDPALVQEVVFGNVLSANLGQAPARQAALGAGIPNSVICTTVNKVCASGMKAVMIAAQSIQLGINDVVVAGGMESMSNTPKYLAEARKGSRFGHDSLVDGMLKDGLWDVYNDCGMGSCAELCAEKFQITREQQDDYAVQSFERGIAAQEAGAFTWEIVPVEVSGGRGRPSTIVDKDEGLGKFDAAKLRKLRPSFKENGGTVTAGNASSISDGAAALVLVSGEKALQLGLLVLAKIKGYGDAAQEPEFFTTAPALAIPKAIAHAGLESSQVDYYEINEAFAVVALANQKLLGIAPEKVNVNGGAVSLGHPLGCSGARILITLLGILKKRNGKYGVGGVCNGGGGASALVLELL

SEQ ID NO: 72891 - protein, 485 aa, Arabidopsis thaliana
  peptide (1)..(485): Ceres Seq. ID no. 4950653
MIYVEEGVDTTDHIAVVLLFIVVIVADSPTTTTSQESVLFYRTLCPCFSLQFYCRIRCHFHNDSLLSALSIRRSLLELKNQAMAHTSESVNPRDVCIVGVARTPMGGFLGSLSSLPATKLGSLAIAAALKRANVDPALVQEVVFGNVLSANLGQAPARQAALGAGIPNSVICTTVNKVCASGMKAVMIAAQSIQLGINDVVVAGGMESMSNTPKYLAEARKGSRFGHDSLVDGMLKDGLWDVYNDCGMGSCAELCAEKFQITREQQDDYAVQSFERGIAAQEAGAFTWEIVPVEVSGGRGRPSTIVDKDEGLGKFDAAKLRKLRPSFKENGGTVTAGNASSISDGAAALVLVSGEKALQLGLLVLAKIKGYGDAAQEPEFFTTAPALAIPKAIAHAGLESSQVDYYEINEAFAVVALANQKLLGIAPEKVNVNGGAVSLGHPLGCSGARILITLLGILKKRNGKYGVGGVCNGGGGASALVLELL

SEQ ID NO: 72892 - protein, 403 aa, Arabidopsis thaliana; identical to SEQ ID NO: 41746
  peptide (1)..(403): Ceres Seq. ID no. 4950654

SEQ ID NO: 72893 - DNA, 1380 bp, Arabidopsis thaliana
  misc_feature (1)..(1380): Ceres Seq. ID no. 4950824
  misc_feature (1)..(1380): Ortholog of  Ceres SEQ ID NO 15226295 as cited in SEQ ID NO 58402
atggtttccattttccttcaatcacccacctttttaacaccactgagctacccattttcatctcggagctccaccaagagaacccaacatggagcttctctgtcactacgtgtcacagcttctcgtagctccttcgatgttgttgttgtaggtggtgggatcattgggttaaccatagcccgccaattccttaccgggtcggatctatctgttgctgttgtcgataaagccgtaccttgctccggcgccaccggtgccgggcagggatatatatggatgacacacaagaaaccaggcagtgatgtgtgggacttgaccttgaggagccatgaactctggcacaagcttgcagagagcttgactgatgatggtcttgatcctgaagagttgcttggctggaaaaagacaggaagcttgctcattggtaggaccactgaggaatgtgttgctctgaagcaaaaggttcatgagctatctgaagctgggttaagaactgaatatttgtctagtgctgagttgttgttaaaggagcctgcgatacttgtaaatgataatactggtgctgcatttcttcctgatgattcacagttggacgcccatcgtgcggttgcttatatcgagaagggtaatagagcgtttgcaacagcaggcagatatgccgagttctataatgaaccagttacaggtttaataaggtctgatggggatagcaaggtggttgctggcgttaagactttgaaacgcaacttgtatggtaagaaggctactatagtagctgctggttgctggagtggatctctgatgcatgaattgcttaaagactgcaacattccgctggacgttccggtgaagccaagaaaggggcatctgcttgtggtagagaactttgattcattccacttaaatcatgggataatggaggctggttactcgaatcatcaaagtgcttcagtttcaggattggatgtcgatgaacggatgctatctatttccatgacagccacaatggacacatcaggaaaccttgttcttgggagcagccgtgagtttgtcgggttcgacactgaagctgatgagtttatcatccgttgcatatgggagcgtgctgcagaattctttcctaagttacgtgatatttccctcgaagatttcatccgtaacaggaaagtgagagtcgggttgcgcccttacatgcctgacgggaagccagtgataggatccgtgcccggattacaaaacatgtacttagcagctgggcatgaaggaggtggactttccatggctctagcaacagcggaaatggtaacggacatggtactaggaaaaccatcacaagtggatacttcaacgtttggggttaaagggcgtcgttgttgctga

SEQ ID NO: 72894 - protein, 459 aa, Arabidopsis thaliana
  peptide (1)..(459): Ceres Seq. ID no. 4950825
MVSIFLQSPTFLTPLSYPFSSRSSTKRTQHGASLSLRVTASRSSFDVVVVGGGIIGLTIARQFLTGSDLSVAVVDKAVPCSGATGAGQGYIWMTHKKPGSDVWDLTLRSHELWHKLAESLTDDGLDPEELLGWKKTGSLLIGRTTEECVALKQKVHELSEAGLRTEYLSSAELLLKEPAILVNDNTGAAFLPDDSQLDAHRAVAYIEKGNRAFATAGRYAEFYNEPVTGLIRSDGDSKVVAGVKTLKRNLYGKKATIVAAGCWSGSLMHELLKDCNIPLDVPVKPRKGHLLVVENFDSFHLNHGIMEAGYSNHQSASVSGLDVDERMLSISMTATMDTSGNLVLGSSREFVGFDTEADEFIIRCIWERAAEFFPKLRDISLEDFIRNRKVRVGLRPYMPDGKPVIGSVPGLQNMYLAAGHEGGGLSMALATAEMVTDMVLGKPSQVDTSTFGVKGRRCC

SEQ ID NO: 72895 - protein, 367 aa, Arabidopsis thaliana
  peptide (1)..(367): Ceres Seq. ID no. 4950826
MTHKKPGSDVWDLTLRSHELWHKLAESLTDDGLDPEELLGWKKTGSLLIGRTTEECVALKQKVHELSEAGLRTEYLSSAELLLKEPAILVNDNTGAAFLPDDSQLDAHRAVAYIEKGNRAFATAGRYAEFYNEPVTGLIRSDGDSKVVAGVKTLKRNLYGKKATIVAAGCWSGSLMHELLKDCNIPLDVPVKPRKGHLLVVENFDSFHLNHGIMEAGYSNHQSASVSGLDVDERMLSISMTATMDTSGNLVLGSSREFVGFDTEADEFIIRCIWERAAEFFPKLRDISLEDFIRNRKVRVGLRPYMPDGKPVIGSVPGLQNMYLAAGHEGGGLSMALATAEMVTDMVLGKPSQVDTSTFGVKGRRCC

SEQ ID NO: 72896 - DNA, 3021 bp, Arabidopsis thaliana
  misc_feature (1)..(3021): Ceres Seq. ID no. 4951081
  misc_feature (1)..(3021): Ortholog of  Ceres SEQ ID NO 15168378 as cited in SEQ ID NO 59129
atgatccactgccaatttctattatttatatgtttacttttacattattcaaagtcttctccttcttgtttaacaatattatgtaaatgttttgttagcgaggaagctgtatttttgtattcaagactatgtcataacgtgtgcaaatcacatgctttctcattgaatgactttccgatacagtcagaagcagggaaagagaaaaagagattctttgtgggtctcaagatgagttcaagaattgaagtctttgtgctcttgatcttgctttcgttccaattttgttctgtatctgcgcagacaaatggtttcgatgctgatgctttacaatacctgaagagtagtttgaccatacctcctcggaattggaaaggctatgatccttgtggaaccaattgggttggaattgcatgtgaatatggccgcgttgttaacatatcactaggcaaccttaacttggaaggaaagcttcctgcctttattacgacgttgtctgaattgcataccctggatttgacatctaatcctaatttgaccggaccgcttccactaaatatcggtaaccttaaggagttgacgaacttaaatcttatgggatgtggtttcagtggtcaaatccctgagtccataggatctctagaacaacttgtaacactctccttgaattcaaataaatttaatggaacgattccggcttccattggcctgttatcgaaactatattggtttgatatagctgacaatcagatagaaggaaagcttccagtttctgatggggcttctttacctggacttgatatgcttcttcaaactaagcattttcattttggaaaaaacaagctttctggtgatatccctgaaaagctattcagtgccaacatgactttaaaacatttgctattcgatggaaacctactaaccggtgaaatcccacaaagcctcagccttgttaaaacattgacggtgttacgccttgataggaatagactaagtggagaaattcctccaagtcttaataatctcacaaatcttcaagaactgtacttgtccgacaacaaatttaccggtagtcttccaagtttaaccagcttgaccagtctctccacattaaggatggcagggctccaacttcaaggtccaataccaacctccctcttcagtcttcctgaattgcagactgttatcctaaagcgtaactggctaaacgaaacactagacttcggtaccaacaagagccaaaacctagattttgtggatttacaatataatgacataacagagtatattaaacaaccagctaataaaggaagcagcaggatagtaatcttggcaaataatccagtgtgccccgaggtagggaacccaccaaatgaatactgcatagaagtcgaacacaattcctcatattcttcccctaagaacacatgtggtcgttgtagtggtgaggacagggaacccattcccaccacgtgccgttgtgtgtatccaatcacaggaacactcacttttaggtcaccttccttctcagggtattccaacaacgatacattcgagaacctcaggctaaacctaactggtttctttgagaatagaaattatacagtggattctgtggccataagaaacataagagaagatgaagatgatcattatcttctaatagatctctctctctttccatataaacaagacagatttaatgagacgggaatggatagtgttatttccaggtttagcacacagacttataagcctcctaatacctttggcccttacatattcaaagccaataagtacaataagttccctgcaggaggttcaaactcgtcacacatcattggagctgtagttggttctactgtttttctgttaattctaatgatagctgggatctatgctcttaagcaaaagagaagagcagagaaagcaaatgatcaaattaatccttttgccaagtgggatgcgaatcagaacagtgtcgatgcaccacagcttatgggaacaaaagcatttacttttgaagagatgaggaaatgtgcaaacaacttttcagtggcaaatgatgtcggtggtggaggttatggccaagtatacaaagggattcttccttctggtcaactcatagcaattaaaagagctcaaccaggatctttgcaaggagcgttggagtttaaaactgagatcgagcttctttcaagggtccatcataaaaatgttgtcaaactcttaggcttttgctttgatcgaggagaacaaatgctcgtctacgagtatattccaaatggttctcttagagatagtctatcagggaaaagtgggattagacttgattggacgagaaggcttagaatagcacttggttcagggaagggtttggcttatcttcatgagcttgcagatcctccaattatacacagagacgttaaatcaagtaatgtattacttgatgaaagtttaactgcaaaagttgctgattttggcttatctcaacttgtggaagatgctgagaaagctaatgtaacggcacaagtgaagggaactatgggctacttggatcctgagtactacatgacgaatcaattgacagagaagagcgatgtatatgggtttggggttatgatgcttgagctactgactggtaagattcctatagagaatggaaaatatgtggtgaaagagatgaagatgaagatgaataaatcgaagaacttgtatgacctacaagattttctggacactacgatcagcgcaacgtccaacaggaatcttaagggatttgaaaagtatgtagatgtggctctaagatgcgtagatccagaaggagtgaagaggccatcaatgaatgaggttgtgaaagagattgagaacataatgcagtatgcaggattaaaccctaacgtagaatcatatgcgagttcaagaacgtatgatgaagcaagcaaagaatctggagatctttatggaaacaactcttttgagtatagtgcaagtttcccaactacaaacctcgaacctcaatga

SEQ ID NO: 72897 - protein, 1006 aa, Arabidopsis thaliana
  peptide (1)..(1006): Ceres Seq. ID no. 4951082
MIHCQFLLFICLLLHYSKSSPSCLTILCKCFVSEEAVFLYSRLCHNVCKSHAFSLNDFPIQSEAGKEKKRFFVGLKMSSRIEVFVLLILLSFQFCSVSAQTNGFDADALQYLKSSLTIPPRNWKGYDPCGTNWVGIACEYGRVVNISLGNLNLEGKLPAFITTLSELHTLDLTSNPNLTGPLPLNIGNLKELTNLNLMGCGFSGQIPESIGSLEQLVTLSLNSNKFNGTIPASIGLLSKLYWFDIADNQIEGKLPVSDGASLPGLDMLLQTKHFHFGKNKLSGDIPEKLFSANMTLKHLLFDGNLLTGEIPQSLSLVKTLTVLRLDRNRLSGEIPPSLNNLTNLQELYLSDNKFTGSLPSLTSLTSLSTLRMAGLQLQGPIPTSLFSLPELQTVILKRNWLNETLDFGTNKSQNLDFVDLQYNDITEYIKQPANKGSSRIVILANNPVCPEVGNPPNEYCIEVEHNSSYSSPKNTCGRCSGEDREPIPTTCRCVYPITGTLTFRSPSFSGYSNNDTFENLRLNLTGFFENRNYTVDSVAIRNIREDEDDHYLLIDLSLFPYKQDRFNETGMDSVISRFSTQTYKPPNTFGPYIFKANKYNKFPAGGSNSSHIIGAVVGSTVFLLILMIAGIYALKQKRRAEKANDQINPFAKWDANQNSVDAPQLMGTKAFTFEEMRKCANNFSVANDVGGGGYGQVYKGILPSGQLIAIKRAQPGSLQGALEFKTEIELLSRVHHKNVVKLLGFCFDRGEQMLVYEYIPNGSLRDSLSGKSGIRLDWTRRLRIALGSGKGLAYLHELADPPIIHRDVKSSNVLLDESLTAKVADFGLSQLVEDAEKANVTAQVKGTMGYLDPEYYMTNQLTEKSDVYGFGVMMLELLTGKIPIENGKYVVKEMKMKMNKSKNLYDLQDFLDTTISATSNRNLKGFEKYVDVALRCVDPEGVKRPSMNEVVKEIENIMQYAGLNPNVESYASSRTYDEASKESGDLYGNNSFEYSASFPTTNLEPQ

SEQ ID NO: 72898 - protein, 930 aa, Arabidopsis thaliana
  peptide (1)..(930): Ceres Seq. ID no. 4951083
MSSRIEVFVLLILLSFQFCSVSAQTNGFDADALQYLKSSLTIPPRNWKGYDPCGTNWVGIACEYGRVVNISLGNLNLEGKLPAFITTLSELHTLDLTSNPNLTGPLPLNIGNLKELTNLNLMGCGFSGQIPESIGSLEQLVTLSLNSNKFNGTIPASIGLLSKLYWFDIADNQIEGKLPVSDGASLPGLDMLLQTKHFHFGKNKLSGDIPEKLFSANMTLKHLLFDGNLLTGEIPQSLSLVKTLTVLRLDRNRLSGEIPPSLNNLTNLQELYLSDNKFTGSLPSLTSLTSLSTLRMAGLQLQGPIPTSLFSLPELQTVILKRNWLNETLDFGTNKSQNLDFVDLQYNDITEYIKQPANKGSSRIVILANNPVCPEVGNPPNEYCIEVEHNSSYSSPKNTCGRCSGEDREPIPTTCRCVYPITGTLTFRSPSFSGYSNNDTFENLRLNLTGFFENRNYTVDSVAIRNIREDEDDHYLLIDLSLFPYKQDRFNETGMDSVISRFSTQTYKPPNTFGPYIFKANKYNKFPAGGSNSSHIIGAVVGSTVFLLILMIAGIYALKQKRRAEKANDQINPFAKWDANQNSVDAPQLMGTKAFTFEEMRKCANNFSVANDVGGGGYGQVYKGILPSGQLIAIKRAQPGSLQGALEFKTEIELLSRVHHKNVVKLLGFCFDRGEQMLVYEYIPNGSLRDSLSGKSGIRLDWTRRLRIALGSGKGLAYLHELADPPIIHRDVKSSNVLLDESLTAKVADFGLSQLVEDAEKANVTAQVKGTMGYLDPEYYMTNQLTEKSDVYGFGVMMLELLTGKIPIENGKYVVKEMKMKMNKSKNLYDLQDFLDTTISATSNRNLKGFEKYVDVALRCVDPEGVKRPSMNEVVKEIENIMQYAGLNPNVESYASSRTYDEASKESGDLYGNNSFEYSASFPTTNLEPQ

SEQ ID NO: 72899 - protein, 809 aa, Arabidopsis thaliana
  peptide (1)..(809): Ceres Seq. ID no. 4951084
MGCGFSGQIPESIGSLEQLVTLSLNSNKFNGTIPASIGLLSKLYWFDIADNQIEGKLPVSDGASLPGLDMLLQTKHFHFGKNKLSGDIPEKLFSANMTLKHLLFDGNLLTGEIPQSLSLVKTLTVLRLDRNRLSGEIPPSLNNLTNLQELYLSDNKFTGSLPSLTSLTSLSTLRMAGLQLQGPIPTSLFSLPELQTVILKRNWLNETLDFGTNKSQNLDFVDLQYNDITEYIKQPANKGSSRIVILANNPVCPEVGNPPNEYCIEVEHNSSYSSPKNTCGRCSGEDREPIPTTCRCVYPITGTLTFRSPSFSGYSNNDTFENLRLNLTGFFENRNYTVDSVAIRNIREDEDDHYLLIDLSLFPYKQDRFNETGMDSVISRFSTQTYKPPNTFGPYIFKANKYNKFPAGGSNSSHIIGAVVGSTVFLLILMIAGIYALKQKRRAEKANDQINPFAKWDANQNSVDAPQLMGTKAFTFEEMRKCANNFSVANDVGGGGYGQVYKGILPSGQLIAIKRAQPGSLQGALEFKTEIELLSRVHHKNVVKLLGFCFDRGEQMLVYEYIPNGSLRDSLSGKSGIRLDWTRRLRIALGSGKGLAYLHELADPPIIHRDVKSSNVLLDESLTAKVADFGLSQLVEDAEKANVTAQVKGTMGYLDPEYYMTNQLTEKSDVYGFGVMMLELLTGKIPIENGKYVVKEMKMKMNKSKNLYDLQDFLDTTISATSNRNLKGFEKYVDVALRCVDPEGVKRPSMNEVVKEIENIMQYAGLNPNVESYASSRTYDEASKESGDLYGNNSFEYSASFPTTNLEPQ

SEQ ID NO: 72900 - DNA, 2826 bp, Arabidopsis thaliana
  misc_feature (1)..(2826): Ceres Seq. ID no. 4951156
  misc_feature (1)..(2826): Ortholog of  Ceres SEQ ID NO 15168378 as cited in SEQ ID NO 59129
atgagttcaagaactggagcctctttgctcctgatcttgtttttcttccaaatttgttctgtttcggcactcacgaatggtttagacgcttctgctttaaatgctctgaagagtgaatggaccactcctcctgatggttgggaaggctctgatccttgtggaaccaattgggttggaattacatgtcaaaatgaccgcgtcgtttcaatatcactaggtaaccttgacttggaaggaaagcttcctgccgatatatcgttcttgtccgagttgcggatcttggatttgtcatacaatcctaaattgtccggaccgcttccaccaaacatcggtaaccttgggaagttaaggaacttgatccttgtgggatgtagtttcagtggtcaaatccctgagtccattggaactctaaaagaacttatatatctctccctaaatttaaataaatttagtggaacaattccgccttcaattggcctgttatcaaaactatattggtttgatatagctgacaatcagattgaaggagagcttccagtttctaatgggacttctgcacctggacttgacatgcttcttcaaactaagcattttcattttggaaaaaacaagctttcaggcaatatcccaaaagaacttttcagctcaaacatgagtttaatacatgtcctcttcgatggaaaccaattcacgggcgaaattccagagaccctcagtctcgttaaaacgttgacggtgttacgccttgataggaacaaactcattggagatattccttcatatcttaacaatctcacaaatcttaacgaactgtacttggccaacaacagatttactggtactcttccaaatttaaccagcttgaccagtctctacacattaaggatggaagggatccaacttaatggtccaataccaatctcatttttcagccctcctcagttgcagactgttatcttaaagcgaaatagtatagtggaaagcttagactttggtacagacgttagcagccagttggagtttgtggatttacaatacaatgaaataactgattataaaccatcagctaataaagtcctccaagtaatattggcaaataatccagtgtgtctagaggcgggaaacgggccgagttactgttcagcaatccaacacaatacctcattttctacactcccaacaaactgttctccatgcgaaccgggcatggaagcgagtcccacgtgccgctgtgcgtatccattcatgggaacactctacttccggtctccttctttctcagggttgttcaactccaccaacttctcaattctacagaaggcaatcgcggatttctttaagaagttcaattatcctgtagactccgttggtgttcggaacataagagagaatccaactgatcatcagcttctaatagatctattggtctttccattgggaagagagagttttaatcagacaggaatgtcacttgttggttttgcatttagcaaccagacttataagcctcctccgatatttggcccttatattttcaaagctgatttgtacaaacagttctctgatgtagaagtttcatcaaagtcatcaaacaaaagcattctcattggagcagtagttggtgttgttgttcttctactattgttaacaatagctgggatttacgctcttaggcagaagaagagagctgaaagagcaactggtcaaaataatccttttgctaaatgggatacaagtaagagtagtattgatgctccgcagctaatgggagcaaaagcgtttacttttgaggagctgaagaaatgcactgacaacttttcagaggcaaatgatgttggcggtggaggttacggcaaggtttatagagggattcttcctaatgggcaactcatagcaatcaaaagggctcaacaaggatctttgcaaggagggttggagttcaaaactgagattgagcttctctcaagggtccatcataagaatgttgtcagactcttgggcttctgctttgaccggaatgaacaaatgctcgtatacgagtacatttcaaatgggtcacttaaagacagtctgtccgggaagagtgggattcgattggattggacaagaagacttaaaatagcacttggttcaggcaagggcttggcttatcttcatgaacttgctgatcctccaattatacatagagacatcaaatcaaataacatattacttgatgaaaatctaaccgcaaaggttgccgacttcggtctctccaaacttgtgggagaccctgagaaaactcatgtcacaacacaagtcaaaggaaccatgggctacttggatccagagtactacatgacgaatcaattaacggagaagagcgatgtgtatgggtttggtgtggttttactcgagctattaaccggtagaagtccgatagagagaggcaaatatgtggtgagagaggtgaagacaaagatgaataaatctcggagtttgtatgacctgcaggagttgttggacacaacgatcatagcaagcagtgggaatctaaaagggttcgagaagtatgtagacttggctttgagatgtgtggaggaggaaggagttaataggccatcaatgggtgaggttgtgaaagagattgagaacataatgcagcttgcgggattaaatcctaactcagattcagcaacgagttcaagaacgtatgaggacgcaatcaaaggatctgatgaatggagagccaaacgcagaatcaaaaaccaccagatctttggcaatgtcgacaccagtttcaaacataagaaaagtaatcaagctcaatgtatgatgaataattga

SEQ ID NO: 72901 - protein, 941 aa, Arabidopsis thaliana
  peptide (1)..(941): Ceres Seq. ID no. 4951157
MSSRTGASLLLILFFFQICSVSALTNGLDASALNALKSEWTTPPDGWEGSDPCGTNWVGITCQNDRVVSISLGNLDLEGKLPADISFLSELRILDLSYNPKLSGPLPPNIGNLGKLRNLILVGCSFSGQIPESIGTLKELIYLSLNLNKFSGTIPPSIGLLSKLYWFDIADNQIEGELPVSNGTSAPGLDMLLQTKHFHFGKNKLSGNIPKELFSSNMSLIHVLFDGNQFTGEIPETLSLVKTLTVLRLDRNKLIGDIPSYLNNLTNLNELYLANNRFTGTLPNLTSLTSLYTLRMEGIQLNGPIPISFFSPPQLQTVILKRNSIVESLDFGTDVSSQLEFVDLQYNEITDYKPSANKVLQVILANNPVCLEAGNGPSYCSAIQHNTSFSTLPTNCSPCEPGMEASPTCRCAYPFMGTLYFRSPSFSGLFNSTNFSILQKAIADFFKKFNYPVDSVGVRNIRENPTDHQLLIDLLVFPLGRESFNQTGMSLVGFAFSNQTYKPPPIFGPYIFKADLYKQFSDVEVSSKSSNKSILIGAVVGVVVLLLLLTIAGIYALRQKKRAERATGQNNPFAKWDTSKSSIDAPQLMGAKAFTFEELKKCTDNFSEANDVGGGGYGKVYRGILPNGQLIAIKRAQQGSLQGGLEFKTEIELLSRVHHKNVVRLLGFCFDRNEQMLVYEYISNGSLKDSLSGKSGIRLDWTRRLKIALGSGKGLAYLHELADPPIIHRDIKSNNILLDENLTAKVADFGLSKLVGDPEKTHVTTQVKGTMGYLDPEYYMTNQLTEKSDVYGFGVVLLELLTGRSPIERGKYVVREVKTKMNKSRSLYDLQELLDTTIIASSGNLKGFEKYVDLALRCVEEEGVNRPSMGEVVKEIENIMQLAGLNPNSDSATSSRTYEDAIKGSDEWRAKRRIKNHQIFGNVDTSFKHKKSNQAQCMMNN

SEQ ID NO: 72902 - protein, 751 aa, Arabidopsis thaliana
  peptide (1)..(751): Ceres Seq. ID no. 4951158
MLLQTKHFHFGKNKLSGNIPKELFSSNMSLIHVLFDGNQFTGEIPETLSLVKTLTVLRLDRNKLIGDIPSYLNNLTNLNELYLANNRFTGTLPNLTSLTSLYTLRMEGIQLNGPIPISFFSPPQLQTVILKRNSIVESLDFGTDVSSQLEFVDLQYNEITDYKPSANKVLQVILANNPVCLEAGNGPSYCSAIQHNTSFSTLPTNCSPCEPGMEASPTCRCAYPFMGTLYFRSPSFSGLFNSTNFSILQKAIADFFKKFNYPVDSVGVRNIRENPTDHQLLIDLLVFPLGRESFNQTGMSLVGFAFSNQTYKPPPIFGPYIFKADLYKQFSDVEVSSKSSNKSILIGAVVGVVVLLLLLTIAGIYALRQKKRAERATGQNNPFAKWDTSKSSIDAPQLMGAKAFTFEELKKCTDNFSEANDVGGGGYGKVYRGILPNGQLIAIKRAQQGSLQGGLEFKTEIELLSRVHHKNVVRLLGFCFDRNEQMLVYEYISNGSLKDSLSGKSGIRLDWTRRLKIALGSGKGLAYLHELADPPIIHRDIKSNNILLDENLTAKVADFGLSKLVGDPEKTHVTTQVKGTMGYLDPEYYMTNQLTEKSDVYGFGVVLLELLTGRSPIERGKYVVREVKTKMNKSRSLYDLQELLDTTIIASSGNLKGFEKYVDLALRCVEEEGVNRPSMGEVVKEIENIMQLAGLNPNSDSATSSRTYEDAIKGSDEWRAKRRIKNHQIFGNVDTSFKHKKSNQAQCMMNN

SEQ ID NO: 72903 - protein, 724 aa, Arabidopsis thaliana
  peptide (1)..(724): Ceres Seq. ID no. 4951159
MSLIHVLFDGNQFTGEIPETLSLVKTLTVLRLDRNKLIGDIPSYLNNLTNLNELYLANNRFTGTLPNLTSLTSLYTLRMEGIQLNGPIPISFFSPPQLQTVILKRNSIVESLDFGTDVSSQLEFVDLQYNEITDYKPSANKVLQVILANNPVCLEAGNGPSYCSAIQHNTSFSTLPTNCSPCEPGMEASPTCRCAYPFMGTLYFRSPSFSGLFNSTNFSILQKAIADFFKKFNYPVDSVGVRNIRENPTDHQLLIDLLVFPLGRESFNQTGMSLVGFAFSNQTYKPPPIFGPYIFKADLYKQFSDVEVSSKSSNKSILIGAVVGVVVLLLLLTIAGIYALRQKKRAERATGQNNPFAKWDTSKSSIDAPQLMGAKAFTFEELKKCTDNFSEANDVGGGGYGKVYRGILPNGQLIAIKRAQQGSLQGGLEFKTEIELLSRVHHKNVVRLLGFCFDRNEQMLVYEYISNGSLKDSLSGKSGIRLDWTRRLKIALGSGKGLAYLHELADPPIIHRDIKSNNILLDENLTAKVADFGLSKLVGDPEKTHVTTQVKGTMGYLDPEYYMTNQLTEKSDVYGFGVVLLELLTGRSPIERGKYVVREVKTKMNKSRSLYDLQELLDTTIIASSGNLKGFEKYVDLALRCVEEEGVNRPSMGEVVKEIENIMQLAGLNPNSDSATSSRTYEDAIKGSDEWRAKRRIKNHQIFGNVDTSFKHKKSNQAQCMMNN

SEQ ID NO: 72904 - DNA, 2688 bp, Arabidopsis thaliana
  misc_feature (1)..(2688): Ceres Seq. ID no. 4951225
  misc_feature (1)..(2688): Ortholog of  Ceres SEQ ID NO 14303870 as cited in SEQ ID NO 53632
atggcgtcttctaagcataataaactctgttctttcttttatctttgcctcttcttgactttagttgcagctgctgagcctcaaacagaatctcttctcactttaaaatctcaactcaccgacaatttcaacagcttaaaagactggttcatcaacactcctgaagtttccgacaatcttgtcgcttgttgttcttggtctggtgtccgatgtaaccaaaactcaacttctgttgtctccgtcgatctctcttccaagaatctcgctgggagtttatcaggcaaggagttcctcgtcttcaccgaactccttgaactcaacatcagtgacaactcgttttccggcgagtttccggctgagatcttcttcaacatgaccaatctcagaagccttgacattagcagaaacaacttctccggacgtttccctgacggtaacggtggtgactcaagtctcaagaatctgatctttctcgacgccttgagcaatagcttctccggtccattaccgatccatctctctcagttagagaatctcaaggtactgaatctcgctgggagttacttcactggctcgattccgagtcagtacggatctttcaagaatcttgagtttcttcatcttggtgggaatttactaagtggtcacatacctcaagagcttgggaatctcacaactttgactcacatggagattggatataactcatatgaaggagtaatcccttgggaaataggttacatgagtgagctcaagtacctcgacattgctggagctaatctctctggcttcttaccaaagcatttcagcaatctcacaaagcttgaatctttgtttctctttaggaaccatctttctagagaaatcccatgggagcttggagaaattacttctcttgttaacttagacctctcagacaaccatatctctggaaccataccagagagtttttcaggtttgaagaatctcaggcttttgaatcttatgttcaatgaaatgagtgggactctccctgaagtaattgctcagctaccttctttggatactctcttcatatggaacaattacttctctgggtcacttcccaaaagcttggggatgaattcaaagcttagatgggtggacgtttccaccaacagtttccaaggtgaaatcccacaaggtatttgctcaagaggtgttcttttcaagctcattcttttctccaataacttcactggaactctgtctccatctctctcaaattgttcaacgcttgttcgtatccggcttgaagataattcattctcaggtgtgatcccttttagctttagcgagattcctgatatctcatacatagacctctctagaaacaaactcacaggaggtattcctttagatatatccaaagctacaaaacttgactacttcaatatctccaataaccctgagctaggaggcaaacttccaccgcatatttggtctgcgcctagtcttcagaacttctctgcatcatcatgcagtatctctggtggtctccctgtgtttgaatcctgcaaatctatcactgttattgaattgagcaataacaatatatcagggatgttaacaccaactgtttccacttgtggctctcttaagaagatggatttgtcacacaataacttgagaggtgccataccatctgacaaagtgtttcaatcaatggggaaacatgcgtacgagagtaatgcaaacctatgtgggcttcctctgaagtcatgttcagcttacagctcaaggaagcttgtgtctgttctggtagcttgtctagtctctattctgctaatggtagttgcagctttggcattgtactatattcgtcaaagaagtcaaggacaatggaagatggtgtctttcgcgggactccctcatttcacagcagatgatgttttgaggagctttggttcacccgaacctagtgaagcagttccagcttcagtgagcaaagcagttctgccaacaggaataacagtcatagtgagaaaaattgagttgcatgacaagaagaagagtgttgtcctgaacgttttaacgcagatggggaatgcaagacatgtaaatctggtcagattgctcgggttttgttacaacaatcatcttgtgtatgtgttgtatgataataacctgcataccgggacgactctagctgagaaaatgaagacaaagaagaaagattggcaaactaagaagaggatcatcactggtgttgctaagggactttgctttcttcaccatgaatgtttgcctgcaattcctcatggagatgtgaagtcgtctaatatattattcgatgacgataagatagagccctgcttgggtgaatttgggttcaaatacatgctacatttgaacacagatcagatgaacgatgttataagagtggagaagcaaaaggacgtctacaactttggacaacttattttggaaatcttaacaaatggtaagctgatgaatgccggtggattgatgatacagaacaagccaaaggatggtcttctaagagaagtatacacagaaaacgaagtgagttcaagtgattttaaacaaggagaagttaaaagagttgttgaggtcgcacttctctgcataagaagtgaccagtctgaccgtccttgcatggaagatgcactcaggttattgtctgaagcagagaataggttcaaatag

SEQ ID NO: 72905 - protein, 895 aa, Arabidopsis thaliana
  peptide (1)..(895): Ceres Seq. ID no. 4951226
MASSKHNKLCSFFYLCLFLTLVAAAEPQTESLLTLKSQLTDNFNSLKDWFINTPEVSDNLVACCSWSGVRCNQNSTSVVSVDLSSKNLAGSLSGKEFLVFTELLELNISDNSFSGEFPAEIFFNMTNLRSLDISRNNFSGRFPDGNGGDSSLKNLIFLDALSNSFSGPLPIHLSQLENLKVLNLAGSYFTGSIPSQYGSFKNLEFLHLGGNLLSGHIPQELGNLTTLTHMEIGYNSYEGVIPWEIGYMSELKYLDIAGANLSGFLPKHFSNLTKLESLFLFRNHLSREIPWELGEITSLVNLDLSDNHISGTIPESFSGLKNLRLLNLMFNEMSGTLPEVIAQLPSLDTLFIWNNYFSGSLPKSLGMNSKLRWVDVSTNSFQGEIPQGICSRGVLFKLILFSNNFTGTLSPSLSNCSTLVRIRLEDNSFSGVIPFSFSEIPDISYIDLSRNKLTGGIPLDISKATKLDYFNISNNPELGGKLPPHIWSAPSLQNFSASSCSISGGLPVFESCKSITVIELSNNNISGMLTPTVSTCGSLKKMDLSHNNLRGAIPSDKVFQSMGKHAYESNANLCGLPLKSCSAYSSRKLVSVLVACLVSILLMVVAALALYYIRQRSQGQWKMVSFAGLPHFTADDVLRSFGSPEPSEAVPASVSKAVLPTGITVIVRKIELHDKKKSVVLNVLTQMGNARHVNLVRLLGFCYNNHLVYVLYDNNLHTGTTLAEKMKTKKKDWQTKKRIITGVAKGLCFLHHECLPAIPHGDVKSSNILFDDDKIEPCLGEFGFKYMLHLNTDQMNDVIRVEKQKDVYNFGQLILEILTNGKLMNAGGLMIQNKPKDGLLREVYTENEVSSSDFKQGEVKRVVEVALLCIRSDQSDRPCMEDALRLLSEAENRFK

SEQ ID NO: 72906 - protein, 771 aa, Arabidopsis thaliana
  peptide (1)..(771): Ceres Seq. ID no. 4951227
MTNLRSLDISRNNFSGRFPDGNGGDSSLKNLIFLDALSNSFSGPLPIHLSQLENLKVLNLAGSYFTGSIPSQYGSFKNLEFLHLGGNLLSGHIPQELGNLTTLTHMEIGYNSYEGVIPWEIGYMSELKYLDIAGANLSGFLPKHFSNLTKLESLFLFRNHLSREIPWELGEITSLVNLDLSDNHISGTIPESFSGLKNLRLLNLMFNEMSGTLPEVIAQLPSLDTLFIWNNYFSGSLPKSLGMNSKLRWVDVSTNSFQGEIPQGICSRGVLFKLILFSNNFTGTLSPSLSNCSTLVRIRLEDNSFSGVIPFSFSEIPDISYIDLSRNKLTGGIPLDISKATKLDYFNISNNPELGGKLPPHIWSAPSLQNFSASSCSISGGLPVFESCKSITVIELSNNNISGMLTPTVSTCGSLKKMDLSHNNLRGAIPSDKVFQSMGKHAYESNANLCGLPLKSCSAYSSRKLVSVLVACLVSILLMVVAALALYYIRQRSQGQWKMVSFAGLPHFTADDVLRSFGSPEPSEAVPASVSKAVLPTGITVIVRKIELHDKKKSVVLNVLTQMGNARHVNLVRLLGFCYNNHLVYVLYDNNLHTGTTLAEKMKTKKKDWQTKKRIITGVAKGLCFLHHECLPAIPHGDVKSSNILFDDDKIEPCLGEFGFKYMLHLNTDQMNDVIRVEKQKDVYNFGQLILEILTNGKLMNAGGLMIQNKPKDGLLREVYTENEVSSSDFKQGEVKRVVEVALLCIRSDQSDRPCMEDALRLLSEAENRFK

SEQ ID NO: 72907 - protein, 666 aa, Arabidopsis thaliana
  peptide (1)..(666): Ceres Seq. ID no. 4951228
MEIGYNSYEGVIPWEIGYMSELKYLDIAGANLSGFLPKHFSNLTKLESLFLFRNHLSREIPWELGEITSLVNLDLSDNHISGTIPESFSGLKNLRLLNLMFNEMSGTLPEVIAQLPSLDTLFIWNNYFSGSLPKSLGMNSKLRWVDVSTNSFQGEIPQGICSRGVLFKLILFSNNFTGTLSPSLSNCSTLVRIRLEDNSFSGVIPFSFSEIPDISYIDLSRNKLTGGIPLDISKATKLDYFNISNNPELGGKLPPHIWSAPSLQNFSASSCSISGGLPVFESCKSITVIELSNNNISGMLTPTVSTCGSLKKMDLSHNNLRGAIPSDKVFQSMGKHAYESNANLCGLPLKSCSAYSSRKLVSVLVACLVSILLMVVAALALYYIRQRSQGQWKMVSFAGLPHFTADDVLRSFGSPEPSEAVPASVSKAVLPTGITVIVRKIELHDKKKSVVLNVLTQMGNARHVNLVRLLGFCYNNHLVYVLYDNNLHTGTTLAEKMKTKKKDWQTKKRIITGVAKGLCFLHHECLPAIPHGDVKSSNILFDDDKIEPCLGEFGFKYMLHLNTDQMNDVIRVEKQKDVYNFGQLILEILTNGKLMNAGGLMIQNKPKDGLLREVYTENEVSSSDFKQGEVKRVVEVALLCIRSDQSDRPCMEDALRLLSEAENRFK

SEQ ID NO: 72908 - DNA, 723 bp, Arabidopsis thaliana
  misc_feature (1)..(723): Ceres Seq. ID no. 4951242
  misc_feature (1)..(723): Ortholog of  Ceres SEQ ID NO 14309169 as cited in SEQ ID NO 0
accctaacaccctactaacacctccctctttcaatctccgatcaaatacaaacgcatacttccaatttcgccggcgaagatgcagcagaggaagccgacggcgggtagacccagtggtaccgatggatccgatttctcataccgcatggtcgttgactctcgttacacgaaggtcactaaagaaaaagctcgtctccgtcctttgatctttgttcaggctgcgatttatgtaatcggattatcgtgtgcgtttctaacaacaactaaaaaggatgagaagaacacccttgctattgcagctgctgttgctggcttagtgtgttcattgataggagaattaggttgcagacgtagcagagtaaaccttttgaggctctacacggctgcatcaaccattgttatggttctttctgtgttttgtgctgttaggagcagattaaccatggaggaacgcaatagctctggaacaaccgcgaagcttgagctcgcaggtttcatttgtgctcaattaggagcggtggtgcagatattagcgatcatcgttacagggtcccttgtcaataatatgtctccacctacgaaagcagcatagaggaacataaaatttgggcactgtcgtgtgtgcttctcttaaatgaagaacttaggaatttgtaatttttgaaccatttttgttctctccaccaagtgattagtgttatacaacgttgtttacttcagctt

SEQ ID NO: 72909 - protein, 170 aa, Arabidopsis thaliana; identical to SEQ ID NO: 31072
  peptide (1)..(170): Ceres Seq. ID no. 4951243

SEQ ID NO: 72910 - protein, 148 aa, Arabidopsis thaliana; identical to SEQ ID NO: 31073
  peptide (1)..(148): Ceres Seq. ID no. 4951244

SEQ ID NO: 72911 - DNA, 1329 bp, Arabidopsis thaliana
  misc_feature (1)..(1329): Ceres Seq. ID no. 4951332
  misc_feature (1)..(1329): Ortholog of  Ceres SEQ ID NO 14313514 as cited in SEQ ID NO 65029
atgtcatggtacagaagaacaaaactcgtattcgattccctgcgacgcaacataaacccgaagattctacctcgatctcatgttacttcgagaatcaacaatccaattgggtcttctaatccctcagctaagttctcttcaatctcttcgcgagaagtaggattaagatcatggacatctctcggccgaaacacgaacagaatcgcgtataatccgtttctgagtcaacccaagagatattactacgttgatcgataccaagttcgtcatttcaagccacgaggaccaggacggtggtttcaaaaccctagaactgtgtttacggtggtgctcgttggttccgttggtctgatcactttgattgttgggaatacagaaacgattccgtacacaaagagaacacatttcattctcttatcgaaacctatggagaagcttcttggtgaaactcaatttgagcagattaagaaaacttaccaagggaaaattcttcctgcgactcatcctgagagtatcagggttagattgatagctaaagaggttattgatgcgttacagagaggtttgagtaatgagcgtgtatggagtgatttggggtatgcttctactgagagtagtttgggaggtggtagtgataaaggagttaaggaaatggaaatggctatgagtggtgaagatactatgactgatatgaaatggtctaaagaagatcaggttcttgatgatcaatggattcaaaagagtaggaagaaagattcaaaggctcatgcagcgactagtcatcttgaaggtattagttgggaggttcttgtggttaatgagcctattgttaacgcgttttgtttgcctgctgggaagattgtggtgttcactgggctgcttaatcatttcaagtcagatgctgaagttgccactgtgattgggcatgaggttggtcatgcggtggcccgacatgtagctgagggaataactaagaacttgtggtttgctatccttcaactggtcctatatcagtttgtcatgcctgatcttgtgaacactatgtccgcccttttcttgaggcttcctttctccagaaagatggagatagaagcagactacatcggtttgctgttacttgcatctgcgggctatgacccacgagtagctcccacagtgtatgagaagctgggaaagctcggtggagacgcactcggagattatctatcgacccatccgtcgggaaaaaagagatcaaaacttttggctcaagccaatgtgatggaagaagcactaatgatatatagagaagtccaagcaggtcgtactggcgttgaaggctttctttag

SEQ ID NO: 72912 - protein, 442 aa, Arabidopsis thaliana; identical to SEQ ID NO: 48030
  peptide (1)..(442): Ceres Seq. ID no. 4951333

SEQ ID NO: 72913 - protein, 300 aa, Arabidopsis thaliana; identical to SEQ ID NO: 48031
  peptide (1)..(300): Ceres Seq. ID no. 4951334

SEQ ID NO: 72914 - protein, 225 aa, Arabidopsis thaliana
  peptide (1)..(225): Ceres Seq. ID no. 4951335
MEMAMSGEDTMTDMKWSKEDQVLDDQWIQKSRKKDSKAHAATSHLEGISWEVLVVNEPIVNAFCLPAGKIVVFTGLLNHFKSDAEVATVIGHEVGHAVARHVAEGITKNLWFAILQLVLYQFVMPDLVNTMSALFLRLPFSRKMEIEADYIGLLLLASAGYDPRVAPTVYEKLGKLGGDALGDYLSTHPSGKKRSKLLAQANVMEEALMIYREVQAGRTGVEGFL

SEQ ID NO: 72915 - DNA, 1219 bp, Arabidopsis thaliana
  misc_feature (1)..(1219): Ceres Seq. ID no. 4951360
  misc_feature (1)..(1219): Ortholog of  Ceres SEQ ID NO 12618436 as cited in SEQ ID NO 64280
aaaatccgggacgataattctcgcacacgttctccatcactttccctcgatccaaaaccagagtgggaactacacgcgaatcgaatcataaatggaatgtgaattttgaaatcgaggaagaagacgaaatcggagcattattggattgagttttgaagtttttaggagaaggaaatgatggcgtcggatccaaaactgaaggctgagatcggagccgatggtcttgcaagagaagctcctgttattgcttacacagagaagataatcgaggaagagcaagttcagctgaggaaatacattgaggagaactatacaaaaattagggatgttgaaagggaatttggaaacctttcaatggaattgaaactcactgctggacctaagaaagcagcaatggaacacttgagaaagaaaatcgaagtctcaactgaaaggatccatgctgctaagttgaaagaagaagaagcgcgaaaggcatttgaagcagcatcaaaagttgtgaaggatgaagaagcaacaaaacagagtctttgcgaagatttaaacagtctggtacaacaaagcagcaatacgcagtacgccagacttgaggaattgaaaagaagactagaagcgttgaatccaaatcgatcatctacttctattcagcaagtgcaagaaccggagactaaatctgtagtagacagcgcaccagcagccaatgcgaaccaaactcacccgggaaaacctgaaaataaccacgggaacgaggaaggtggtaaagaacatggacagagaccagcaacagctgaaggagaatcaaaagcgaaaaagaaaccacagaatcaagggaggggaagaggaattggaataatgaacaaaggcagaggaggttggacaggtgctggattcgatgtcgatggtagaaattgagatacatatatctagataatccatataccgaaagcgtcatttcgaatcagaagtatgtcaaatatattgttaccaggtatgttctatcatcttttaacatcgatggaccagtacgtagccacaaagacttctcattttctcatacacttgtgttactgaaaagaaatccatccaatcatatttggactgttcattgatcatctcttgtgtatgtctccaattttgtgcaattgggtttgatgtaataatctgagaacagttaagtttgattgtctaagaggttagagtgaggcatgattcgttatgg

SEQ ID NO: 72916 - protein, 245 aa, Arabidopsis thaliana; identical to SEQ ID NO: 23394
  peptide (1)..(245): Ceres Seq. ID no. 4951361

SEQ ID NO: 72917 - protein, 244 aa, Arabidopsis thaliana; identical to SEQ ID NO: 23395
  peptide (1)..(244): Ceres Seq. ID no. 4951362

SEQ ID NO: 72918 - protein, 185 aa, Arabidopsis thaliana; identical to SEQ ID NO: 23396
  peptide (1)..(185): Ceres Seq. ID no. 4951363

SEQ ID NO: 72919 - DNA, 786 bp, Arabidopsis thaliana
  misc_feature (1)..(786): Ceres Seq. ID no. 4951576
  misc_feature (1)..(786): Ortholog of  Ceres SEQ ID NO 15169248 as cited in SEQ ID NO 55022
  misc_feature (1)..(786): Ortholog of  Ceres SEQ ID NO 14315042 as cited in SEQ ID NO 56959
  misc_feature (1)..(786): Ortholog of  Ceres SEQ ID NO 12608620 as cited in SEQ ID NO 60192
  misc_feature (1)..(786): Ortholog of  Ceres SEQ ID NO 13662898 as cited in SEQ ID NO 66199
  misc_feature (1)..(786): Ortholog of  Ceres SEQ ID NO 13654314 as cited in SEQ ID NO 67914
atgggtgataaacttcgattatccatcggaattttgggaaacggagcttctctgttgctatatacagctccaatagtaacattttcaagggtgtttaagaagaaaagcacagaggaattctcatgttttccttacgttatgacactctttaactgtttgatatatacttggtacggtttaccgattgtgagtcatctttgggagaatcttcctctcgtcaccattaatggagtcggcatccttctcgaatctatcttcattttcatatatttctactacgcatcaccaaaagaaaaggttggtgttacatttgttccggtgatcgttgggttcggcttaacgacagcaatctcagccttggtatttgacgaccatcgtcaccgaaaatcattcgtcggaagtgttggcctcgtggcttccatctctatgtatggttctcctctcgtcgttatgaagaaagtgatagagacaagaagtgtggaatacatgccgttttacttgtccttcttctcatttctggctagttccctttggttggcatatggcttactcagccatgatctctttcttgcgtcacctaatatggttgcgactccattgggaattctccaacttatcctctacttcaagtacaagaataagaaggatttagcaccaacaacaatggtgatcaccaaacgaaatgatcatgatgacaagaacaaagccacacttgagtttgttgttgacgttgatcgtaatagtgataccaatgagaagaattctaacaatgcctcatcgatctaa

SEQ ID NO: 72920 - protein, 261 aa, Arabidopsis thaliana
  peptide (1)..(261): Ceres Seq. ID no. 4951577
MGDKLRLSIGILGNGASLLLYTAPIVTFSRVFKKKSTEEFSCFPYVMTLFNCLIYTWYGLPIVSHLWENLPLVTINGVGILLESIFIFIYFYYASPKEKVGVTFVPVIVGFGLTTAISALVFDDHRHRKSFVGSVGLVASISMYGSPLVVMKKVIETRSVEYMPFYLSFFSFLASSLWLAYGLLSHDLFLASPNMVATPLGILQLILYFKYKNKKDLAPTTMVITKRNDHDDKNKATLEFVVDVDRNSDTNEKNSNNASSI

SEQ ID NO: 72921 - protein, 215 aa, Arabidopsis thaliana
  peptide (1)..(215): Ceres Seq. ID no. 4951578
MTLFNCLIYTWYGLPIVSHLWENLPLVTINGVGILLESIFIFIYFYYASPKEKVGVTFVPVIVGFGLTTAISALVFDDHRHRKSFVGSVGLVASISMYGSPLVVMKKVIETRSVEYMPFYLSFFSFLASSLWLAYGLLSHDLFLASPNMVATPLGILQLILYFKYKNKKDLAPTTMVITKRNDHDDKNKATLEFVVDVDRNSDTNEKNSNNASSI

SEQ ID NO: 72922 - DNA, 1115 bp, Arabidopsis thaliana
  misc_feature (1)..(1115): Ceres Seq. ID no. 4951602
  misc_feature (1)..(1115): Ortholog of  Ceres SEQ ID NO 13599448 as cited in SEQ ID NO 521
  misc_feature (1)..(1115): Ortholog of  Ceres SEQ ID NO 14311918 as cited in SEQ ID NO 51684
  misc_feature (1)..(1115): Ortholog of  Ceres SEQ ID NO 14307472 as cited in SEQ ID NO 54559
  misc_feature (1)..(1115): Ortholog of  Ceres SEQ ID NO 13596408 as cited in SEQ ID NO 62028
aaagtttgttggaggattcgtctctctctctctctctttctctttctctcatcttcttcttatctccctccaaagacggcgactgtataatctatcatttcttcacagtaacgctttcatcggaagatctcgccggaaaaaaacttctctctgagatcagatctcttacgattctcagctcaatcttatcttttcctttgttgtgctgcttttcactctcttctgcgcgacgaatttggccttgttttttgtttgtttgtcgtatccgacgcggaggtattgagaaaccgtggcttaagacggaggaagaagatggaagctaacgggattgagaacttgacgaatccgaatcaggaaagagagtttataaggagacatcataagcatgagcttgtggataatcagtgtagctctacgcttgttaaacatatcaacgctcctgttcatattgtgtggtcacttgtgagaagatttgatcagccacagaagtataagccgtttatcagtagatgtgtggtgaaaggaaacatggagattggtacagtaagagaagttgatgtgaaatctggactaccagcaactagaagcactgagagattggagttacttgatgacaatgagcatattctcagtatcagaatcgttggtggtgatcatagacttaagaactattcttcaatcatctctcttcaccccgagactatagaaggaagaataggaacacttgtgattgagtcatttgtggttgatgtaccagaaggaaacacaaaggatgagacttgttactttgttgaagctttaatcaaatgcaatcttaaatctttagctgatatctctgaacgtcttgcggttcaagacacgacagaatcgagagtctaaagatcaaaggagtaagaaactattgaatcagagagattttggttgccatggatgaagctctcaaagggaaaaagagagagtgggtgagtttctttgaggatggacaaggcaaaaaaagtatcatcatttatccagttacataataagtttctcatttgctatttttggggtcatttcactttcaaaccctctttttaatttcatgtgtctaatttaatgaatgtgtttttggtttc

SEQ ID NO: 72923 - protein, 188 aa, Arabidopsis thaliana; identical to SEQ ID NO: 25988
  peptide (1)..(188): Ceres Seq. ID no. 4951603

SEQ ID NO: 72924 - protein, 116 aa, Arabidopsis thaliana
  peptide (1)..(116): Ceres Seq. ID no. 4951604
MEIGTVREVDVKSGLPATRSTERLELLDDNEHILSIRIVGGDHRLKNYSSIISLHPETIEGRIGTLVIESFVVDVPEGNTKDETCYFVEALIKCNLKSLADISERLAVQDTTESRV

SEQ ID NO: 72925 - protein, 106 aa, Arabidopsis thaliana
  peptide (1)..(106): Ceres Seq. ID no. 4951605
SLLEDSSLSLSLSLSLIFFLSPSKDGDCIIYHFFTVTLSSEDLAGKKLLSEIRSLTILSSILSFPLLCCFSLSSARRIWPCFLFVCRIRRGGIEKPWLKTEEEDGS

SEQ ID NO: 72926 - DNA, 1458 bp, Arabidopsis thaliana
  misc_feature (1)..(1458): Ceres Seq. ID no. 4951622
  misc_feature (1)..(1458): Ortholog of  Ceres SEQ ID NO 14311313 as cited in SEQ ID NO 53503
  misc_feature (1)..(1458): Ortholog of  Ceres SEQ ID NO 14311625 as cited in SEQ ID NO 55184
  misc_feature (1)..(1458): Ortholog of  Ceres SEQ ID NO 14310588 as cited in SEQ ID NO 58770
atgggtgaagacaagaagacggcaagggagacggtggaggaggaaccacttagcccatgttcacggctgttcaattcgccggattttaactgtgcaataatcgttacaatgggatctaaagttaaaggagacacaccagccatcatccacggccttgaacacaccctcgtaaaccaccctcgcttctctagcattttaatgaacaatgggaagaagccgcgttgggttcggacaaaagttaaagtagaagagcatgtgattgttcctgatgtggatcccgacattgaaaatccggatcagtatcttgaagactatatctctaagttaacgaccattcctatggatttgtctaaaccattatgggaaatgcacttactaggcgtcaaaacatcgaacgctgaatcctatgctattctcaagatccatcattctttgggtgatggaatgtctctcatgtctcttttactggcttgtacccgcaaaacatcagaccccgaggctttgcctaccgttgcggttcataaaaaacgctttggaccgagctgcaacagcgggtttttcaacaagatttggtggttatttgtagggctctggttcatcctaagattgctattcaacacttttgttgatatcttaatgtttgctcttacaatatttgtcttgagggatacggagactcctctcttggccaaacccggtagtgaacttatccctaagaggttcgtccaccggattatcagttttgacgatgttaagctggtgaaaaacgcaatgaaaatgacggtgaacgatgttcttcttggagtaacgcaagccggactttcgcgttaccttagtcgaaaatatgatcaagaagcaacaccgaaatcgaaagagtccatgaggagaatccgacttcgttcagccattatgattaacttgagaccaaacgcaggaattgaggctctagcggatatgatggccaagaaatcaaaatgcagatggggaaatctcttcggctacattctcctaccgttctccgttgggctagagaccgatcctctagaatacgtgcgccaagctaaagccacgattgaccgcaagaaacactctctagaagccgtattctccatggcattctttaaattgatactaaaagttcttgggctcaaggcaagtgtagttcttgtaaggaaagtgatccatagcacaacgttatcattttcaaatgtggtcggtccaaaggaagaaattacattccatggtcacccactgaattatatctccccatgtgtttttggccacccacatgctcttactctacatttccagacctacgcgaacaaggtcataatatcggtaacggctgatccaacggtcattcctgaccctcacaagatgtgtgatgatttggtggagtctctcaagatgattaaagccgctgttcttgaaagagggttatatgagattgaggtctaa

SEQ ID NO: 72927 - protein, 485 aa, Arabidopsis thaliana
  peptide (1)..(485): Ceres Seq. ID no. 4951623
MGEDKKTARETVEEEPLSPCSRLFNSPDFNCAIIVTMGSKVKGDTPAIIHGLEHTLVNHPRFSSILMNNGKKPRWVRTKVKVEEHVIVPDVDPDIENPDQYLEDYISKLTTIPMDLSKPLWEMHLLGVKTSNAESYAILKIHHSLGDGMSLMSLLLACTRKTSDPEALPTVAVHKKRFGPSCNSGFFNKIWWLFVGLWFILRLLFNTFVDILMFALTIFVLRDTETPLLAKPGSELIPKRFVHRIISFDDVKLVKNAMKMTVNDVLLGVTQAGLSRYLSRKYDQEATPKSKESMRRIRLRSAIMINLRPNAGIEALADMMAKKSKCRWGNLFGYILLPFSVGLETDPLEYVRQAKATIDRKKHSLEAVFSMAFFKLILKVLGLKASVVLVRKVIHSTTLSFSNVVGPKEEITFHGHPLNYISPCVFGHPHALTLHFQTYANKVIISVTADPTVIPDPHKMCDDLVESLKMIKAAVLERGLYEIEV

SEQ ID NO: 72928 - protein, 449 aa, Arabidopsis thaliana
  peptide (1)..(449): Ceres Seq. ID no. 4951624
MGSKVKGDTPAIIHGLEHTLVNHPRFSSILMNNGKKPRWVRTKVKVEEHVIVPDVDPDIENPDQYLEDYISKLTTIPMDLSKPLWEMHLLGVKTSNAESYAILKIHHSLGDGMSLMSLLLACTRKTSDPEALPTVAVHKKRFGPSCNSGFFNKIWWLFVGLWFILRLLFNTFVDILMFALTIFVLRDTETPLLAKPGSELIPKRFVHRIISFDDVKLVKNAMKMTVNDVLLGVTQAGLSRYLSRKYDQEATPKSKESMRRIRLRSAIMINLRPNAGIEALADMMAKKSKCRWGNLFGYILLPFSVGLETDPLEYVRQAKATIDRKKHSLEAVFSMAFFKLILKVLGLKASVVLVRKVIHSTTLSFSNVVGPKEEITFHGHPLNYISPCVFGHPHALTLHFQTYANKVIISVTADPTVIPDPHKMCDDLVESLKMIKAAVLERGLYEIEV

SEQ ID NO: 72929 - protein, 419 aa, Arabidopsis thaliana
  peptide (1)..(419): Ceres Seq. ID no. 4951625
MNNGKKPRWVRTKVKVEEHVIVPDVDPDIENPDQYLEDYISKLTTIPMDLSKPLWEMHLLGVKTSNAESYAILKIHHSLGDGMSLMSLLLACTRKTSDPEALPTVAVHKKRFGPSCNSGFFNKIWWLFVGLWFILRLLFNTFVDILMFALTIFVLRDTETPLLAKPGSELIPKRFVHRIISFDDVKLVKNAMKMTVNDVLLGVTQAGLSRYLSRKYDQEATPKSKESMRRIRLRSAIMINLRPNAGIEALADMMAKKSKCRWGNLFGYILLPFSVGLETDPLEYVRQAKATIDRKKHSLEAVFSMAFFKLILKVLGLKASVVLVRKVIHSTTLSFSNVVGPKEEITFHGHPLNYISPCVFGHPHALTLHFQTYANKVIISVTADPTVIPDPHKMCDDLVESLKMIKAAVLERGLYEIEV

SEQ ID NO: 72930 - DNA, 1326 bp, Arabidopsis thaliana
  misc_feature (1)..(1326): Ceres Seq. ID no. 4951649
  misc_feature (1)..(1326): Ortholog of  Ceres SEQ ID NO 13663734 as cited in SEQ ID NO 67061
atggaggtgaattcgatgggactaaattgtcggtgtcttgagttagaagaaagggttttaaaaggtgaagaaaggtacactcacttagaaacagagttgcagaaacgaaacaatgagtttgaatcacttgaattgaagtttaaagaattggaatcagagaagttagtagttgaagaagagtcaaggaatcttaaagaatctgaggaaggctcaccttgtatgaccacaccggttaaagactatatattagggagagacagagatagagacagagacaccatgtcttctcggagacgagtgaataagatgttgtcgtttgaagatgatggtcacaaattgactgatgtagttgatttatgtgatagtgaaacagagcagagaagtgaggaggaggaatttgctgatgttatggatactatagaggaggcaaatattggtgagaattatgaagatgaagatgtggaagcttgtgatgctaacacaagtagtcctctttctaggcgtaagaggaagcgggttattgccagcgatgatgatgatgatgctgatgatgatgatgaagataatataccgatttcaatactcaagaatttgaaaccaactaaccaagagatgtcagatttgtttgatacacctaacaaaggagagagtgagtctagaagattgagtggacaacgtcgagtgtcgtcaagactgaataaaaagagagtttctgaagaggtatctgcttcaacagagagacttgtgggaatcccaacaaccgataatgccgaggatgatgagacagaagaagaaggttcagagagtgagggtgagagtttagatgggtttattatcgatgatgatgatagtcaggagtctgtcagtgaaaagtctgatgaaatcggggtagaggaatccgatggagaagttggttatgctgatgttatgtcaaggttaaggagggagaagaaacccgagaagcgtaaatgggagtatgaggcagatatgttggcagatttcggtaaagatcctgagctttgtatgagagcggtttgtgttctgtttaggtttcaaacagaagatgaaaaagtggaaagatcaagtcatgtctctaatggtcgcggtttcagcaaggttgacgctgtaaggggcactagcattgcactgtttctgacggatggagattccgcaggcgatatgaagaaatccgttgaggaattgaaagtttttgactttaaaggcgtagagaaatgcgaagaattagcacgcaaatactctaaacaactcttccagatctataacaacagagaagatccattctttactcttcctccatctccatga

SEQ ID NO: 72931 - protein, 441 aa, Arabidopsis thaliana
  peptide (1)..(441): Ceres Seq. ID no. 4951650
MEVNSMGLNCRCLELEERVLKGEERYTHLETELQKRNNEFESLELKFKELESEKLVVEEESRNLKESEEGSPCMTTPVKDYILGRDRDRDRDTMSSRRRVNKMLSFEDDGHKLTDVVDLCDSETEQRSEEEEFADVMDTIEEANIGENYEDEDVEACDANTSSPLSRRKRKRVIASDDDDDADDDDEDNIPISILKNLKPTNQEMSDLFDTPNKGESESRRLSGQRRVSSRLNKKRVSEEVSASTERLVGIPTTDNAEDDETEEEGSESEGESLDGFIIDDDDSQESVSEKSDEIGVEESDGEVGYADVMSRLRREKKPEKRKWEYEADMLADFGKDPELCMRAVCVLFRFQTEDEKVERSSHVSNGRGFSKVDAVRGTSIALFLTDGDSAGDMKKSVEELKVFDFKGVEKCEELARKYSKQLFQIYNNREDPFFTLPPSP

SEQ ID NO: 72932 - protein, 436 aa, Arabidopsis thaliana
  peptide (1)..(436): Ceres Seq. ID no. 4951651
MGLNCRCLELEERVLKGEERYTHLETELQKRNNEFESLELKFKELESEKLVVEEESRNLKESEEGSPCMTTPVKDYILGRDRDRDRDTMSSRRRVNKMLSFEDDGHKLTDVVDLCDSETEQRSEEEEFADVMDTIEEANIGENYEDEDVEACDANTSSPLSRRKRKRVIASDDDDDADDDDEDNIPISILKNLKPTNQEMSDLFDTPNKGESESRRLSGQRRVSSRLNKKRVSEEVSASTERLVGIPTTDNAEDDETEEEGSESEGESLDGFIIDDDDSQESVSEKSDEIGVEESDGEVGYADVMSRLRREKKPEKRKWEYEADMLADFGKDPELCMRAVCVLFRFQTEDEKVERSSHVSNGRGFSKVDAVRGTSIALFLTDGDSAGDMKKSVEELKVFDFKGVEKCEELARKYSKQLFQIYNNREDPFFTLPPSP

SEQ ID NO: 72933 - protein, 368 aa, Arabidopsis thaliana
  peptide (1)..(368): Ceres Seq. ID no. 4951652
MTTPVKDYILGRDRDRDRDTMSSRRRVNKMLSFEDDGHKLTDVVDLCDSETEQRSEEEEFADVMDTIEEANIGENYEDEDVEACDANTSSPLSRRKRKRVIASDDDDDADDDDEDNIPISILKNLKPTNQEMSDLFDTPNKGESESRRLSGQRRVSSRLNKKRVSEEVSASTERLVGIPTTDNAEDDETEEEGSESEGESLDGFIIDDDDSQESVSEKSDEIGVEESDGEVGYADVMSRLRREKKPEKRKWEYEADMLADFGKDPELCMRAVCVLFRFQTEDEKVERSSHVSNGRGFSKVDAVRGTSIALFLTDGDSAGDMKKSVEELKVFDFKGVEKCEELARKYSKQLFQIYNNREDPFFTLPPSP

SEQ ID NO: 72934 - DNA, 885 bp, Arabidopsis thaliana
  misc_feature (1)..(885): Ceres Seq. ID no. 4951653
  misc_feature (1)..(885): Ortholog of  Ceres SEQ ID NO 13584275 as cited in SEQ ID NO 63905
atgcaggagataataccggattttcttgaagagtgtgaatttgtcgacacttcactagccggagatgatctatttgccatcttagagagtcttgaaggtgccggagagatatctccgacagctgcatctacacctaaagatggaaccacaagttccaaggagttagttaaggatcaagattatgaaaactcatctcctaagaggaaaaagcaaagactagaaaccaggaaagaagaggacgaagaagaagaagacggagacggagaagcagaagaagataataagcaagatgggcaacaaaagatgtctcatgtaaccgtggaacgtaaccggagaaagcaaatgaacgagcacttaaccgttttgcgttctcttatgccttgtttctacgtcaaacggggggaccaagcatcgatcataggaggagttgtggagtacataagcgagttacaacaagttctccaatctttggaagccaagaaacaacgtaaaacctacgccgaagtcctaagcccgagagttgtcccgagccctcgtccttcaccgcctgttctaagcccaagaaaaccgcctcttagcccgcttagtagtaaccatgagagtagtgtgatcaatgagcttgttgctaactcaaaatcggctttggctgatgtggaagtgaagttttcaggagctaacgtgctgctcaaaacggtgtcgcataagatcccgggacaagttatgaagataattgctgctcttgaagatttggctcttgagattcttcaggttaatattaacaccgtcgacgaaaccatgcttaattctttcaccatcaagattggaattgagtgccaactaagtgcagaagaactggctcaacaaattcagcaaacattctgctag

SEQ ID NO: 72935 - protein, 294 aa, Arabidopsis thaliana
  peptide (1)..(294): Ceres Seq. ID no. 4951654
MQEIIPDFLEECEFVDTSLAGDDLFAILESLEGAGEISPTAASTPKDGTTSSKELVKDQDYENSSPKRKKQRLETRKEEDEEEEDGDGEAEEDNKQDGQQKMSHVTVERNRRKQMNEHLTVLRSLMPCFYVKRGDQASIIGGVVEYISELQQVLQSLEAKKQRKTYAEVLSPRVVPSPRPSPPVLSPRKPPLSPLSSNHESSVINELVANSKSALADVEVKFSGANVLLKTVSHKIPGQVMKIIAALEDLALEILQVNINTVDETMLNSFTIKIGIECQLSAEELAQQIQQTFC

SEQ ID NO: 72936 - protein, 193 aa, Arabidopsis thaliana
  peptide (1)..(193): Ceres Seq. ID no. 4951655
MSHVTVERNRRKQMNEHLTVLRSLMPCFYVKRGDQASIIGGVVEYISELQQVLQSLEAKKQRKTYAEVLSPRVVPSPRPSPPVLSPRKPPLSPLSSNHESSVINELVANSKSALADVEVKFSGANVLLKTVSHKIPGQVMKIIAALEDLALEILQVNINTVDETMLNSFTIKIGIECQLSAEELAQQIQQTFC

SEQ ID NO: 72937 - protein, 180 aa, Arabidopsis thaliana
  peptide (1)..(180): Ceres Seq. ID no. 4951656
MNEHLTVLRSLMPCFYVKRGDQASIIGGVVEYISELQQVLQSLEAKKQRKTYAEVLSPRVVPSPRPSPPVLSPRKPPLSPLSSNHESSVINELVANSKSALADVEVKFSGANVLLKTVSHKIPGQVMKIIAALEDLALEILQVNINTVDETMLNSFTIKIGIECQLSAEELAQQIQQTFC

SEQ ID NO: 72938 - DNA, 1608 bp, Arabidopsis thaliana
  misc_feature (1)..(1608): Ceres Seq. ID no. 4951733
  misc_feature (1)..(1608): Ortholog of  Ceres SEQ ID NO 14315469 as cited in SEQ ID NO 57169
  misc_feature (1)..(1608): Ortholog of  Ceres SEQ ID NO 13657008 as cited in SEQ ID NO 69164
atgcagttacatatatctccgagcttgagacatgtgactgtggtcacagggaaaggattgagagagttcataaaagttaaggttggttctagaagattctcttatcaaatggtgttttactctctactcttcttcacttttcttctccgattcgtctttgttctctccaccgttgatactatcgacggcgatccctctccttgctcctctcttgcttgcttggggaaaagactaaagccaaagcttttaggaagaagggttgattctggtaatgttccagaagctatgtaccaagttttagaacagcctttaagcgaacaagaactcaaaggaagatcagatatacctcaaacacttcaagatttcatgtctgaagtcaaaagaagcaaatcagacgcaagagaatttgctcaaaagctaaaagaaatggtgacattgatggaacagagaacaagaacggctaagattcaagagtatttatatcgacatgtcgcatcaagcagcataccgaaacaacttcactgtttagctcttaaactagccaacgaacactcgataaacgcagcggcgcgtctccagcttccagaagctgagcttgtccctatgttggtagacaacaactactttcactttgtcttggcttcagacaatattcttgcagcttcggttgtggctaagtcgttggttcaaaatgctttaagacctcataagatcgttcttcacatcataacggataggaaaacttatttcccaatgcaagcttggttctcattgcatcctctgtctccagcaataattgaggtcaaggctttgcatcatttcgattggttatcgaaaggtaaagtacccgttttggaagctatggagaaagatcagagagtgaggtctcaattcagaggtggatcatcggttattgtggctaataacaaagagaacccggttgttgttgctgctaagttacaagctctcagccctaaatacaactccttgatgaatcacatccgtattcatctaccagagttgtttccaagcttaaacaaggttgtgtttctagacgatgacattgtgatccaaactgatctttcacctctttgggacattgacatgaatggaaaagtaaatggagcagtggaaacatgtagaggagaagacaagtttgtgatgtcaaagaagttcaagagttacctcaacttctcgaatccgacaattgccaaaaacttcaatccagaggaatgtgcatgggcttatggaatgaatgttttcgacctagcggcttggaggaggactaacataagctccacttactatcattggcttgacgagaacttaaaatcagacctgagtttgtggcagctgggaactttgcctcctgggctgattgctttccacggtcatgtccaaaccatagatccgttctggcatatgcttggtctcggataccaagagaccacgagctatgccgatgctgaaagtgccgctgttgttcatttcaatggaagagctaagccttggctggatatagcatttcctcatctacgtcctctctgggctaagtatcttgattcttctgacagatttatcaagagctgtcacattagagcatcatga

SEQ ID NO: 72939 - protein, 535 aa, Arabidopsis thaliana
  peptide (1)..(535): Ceres Seq. ID no. 4951734
MQLHISPSLRHVTVVTGKGLREFIKVKVGSRRFSYQMVFYSLLFFTFLLRFVFVLSTVDTIDGDPSPCSSLACLGKRLKPKLLGRRVDSGNVPEAMYQVLEQPLSEQELKGRSDIPQTLQDFMSEVKRSKSDAREFAQKLKEMVTLMEQRTRTAKIQEYLYRHVASSSIPKQLHCLALKLANEHSINAAARLQLPEAELVPMLVDNNYFHFVLASDNILAASVVAKSLVQNALRPHKIVLHIITDRKTYFPMQAWFSLHPLSPAIIEVKALHHFDWLSKGKVPVLEAMEKDQRVRSQFRGGSSVIVANNKENPVVVAAKLQALSPKYNSLMNHIRIHLPELFPSLNKVVFLDDDIVIQTDLSPLWDIDMNGKVNGAVETCRGEDKFVMSKKFKSYLNFSNPTIAKNFNPEECAWAYGMNVFDLAAWRRTNISSTYYHWLDENLKSDLSLWQLGTLPPGLIAFHGHVQTIDPFWHMLGLGYQETTSYADAESAAVVHFNGRAKPWLDIAFPHLRPLWAKYLDSSDRFIKSCHIRAS

SEQ ID NO: 72940 - protein, 499 aa, Arabidopsis thaliana; identical to SEQ ID NO: 70111
  peptide (1)..(499): Ceres Seq. ID no. 4951735

SEQ ID NO: 72941 - protein, 440 aa, Arabidopsis thaliana; identical to SEQ ID NO: 70112
  peptide (1)..(440): Ceres Seq. ID no. 4951736

SEQ ID NO: 72942 - DNA, 2493 bp, Arabidopsis thaliana
  misc_feature (1)..(2493): Ceres Seq. ID no. 4951811
  misc_feature (1)..(2493): Ortholog of  Ceres SEQ ID NO 12586556 as cited in SEQ ID NO 64667
  misc_feature (1)..(2493): Ortholog of  Ceres SEQ ID NO 13660894 as cited in SEQ ID NO 67475
atggcttctcttcctttcaacactatcccgaataaagttccattttcagtatcatcgaaaccttcttctaaacaccacgatgaacaagctcattctccttcttccacatcttactttcatcgcgtttcgtctctttgtaagaacggtgagatcaaagaagctctgagtttagttacagagatggatttcagaaacttacgcattggtcctgagatatacggtgaaatcctccaaggatgcgtttacgagagagatttaagtacagggaagcaaattcatgctcggattttaaagaacggtgatttctacgcgaggaatgagtacatcgagactaaattggtgatattctacgccaagtgcgatgctttggagattgctgaagttcttttctcgaaattgagggttcgtaatgttttctcttgggcagctattattggtgtgaaatgtaggattgggttatgtgaaggagctttaatgggttttgttgagatgcttgaaaatgagatttttcctgataattttgtggttccgaatgtttgtaaagcgtgtggtgcgttgaaatggagtagatttgggagaggggttcatgggtatgtggtaaaatctggtcttgaggattgtgtgtttgtggctagtagtttagctgatatgtatgggaaatgtggtgttttggatgatgcgagtaaggtgtttgatgaaattcctgacagaaatgctgttgcttggaatgcgttgatggttggttatgtacaaaatggtaagaatgaggaagcgattcggcttttttctgatatgaggaagcaaggtgttgagcctactcgtgtcactgtctcgacttgcttatctgcttctgctaatatgggtggggttgaagaggggaaacagtcgcatgccattgctattgtaaatggaatggagctggataatatcttggggacatctttattgaatttctattgcaaagtgggtttgatagagtatgctgagatggtttttgatcggatgtttgaaaaggatgtggttacatggaatctgattatttctgggtatgttcaacaagggctagttgaagatgctatctacatgtgtcaattaatgagactagagaagctgaaatatgattgtgtcactttagcgacattaatgtctgctgctgcacgtactgagaatctaaagctcgggaaagaggtgcagtgttattgcattagacatagttttgaatctgatatcgttttagccagcactgtgatggatatgtatgccaagtgtggcagcattgttgatgctaagaaagtgtttgattctacagtagagaaagacttgatactgtggaatacgttacttgcagcctatgcagaatctggtcttagtggagaggctttgagattgttctatgggatgcagctagaaggtgtacctccaaatgtgataacatggaatttgatcattctaagtcttctaaggaatggtcaggtagatgaggccaaggatatgttcttgcagatgcaatcctcagggataattccaaatcttatctcatggacgactatgatgaatggtatggttcaaaatggttgcagtgaggaggcaattctgtttcttagaaagatgcaagaatcgggcctgagaccaaatgcatttagcatcactgtcgctctctctgcttgcgcacatctagcatcattgcatatcggaagaacaatccacggatacatcataagaaatctacagcattcctctttggtttctattgaaacttctttggttgacatgtatgctaaatgtggagatataaacaaagcagagaaggttttcggaagtaagctatacagcgagttgcctctctccaatgccatgatctcggcgtatgcattatatggtaacttaaaagaagcaatcgctctatacagaagcttagaaggtgtaggtcttaaaccagacaacatcacaatcacaaatgtcttatcagcatgtaaccacgcaggggatattaaccaggctatcgagattttcactgatatcgtttcaaagcgtagtatgaaaccatgcttggaacattatggacttatggtagatcttcttgcatcagctggagaaacagaaaaagctttaaggttaatcgaggaaatgccattcaagccagatgcacgaatgatccaatctttggttgcttcttgcaacaaacagcgtaagactgagcttgtggactacttatcaaggaaattgcttgaatccgagcctgaaaactccggtaactatgtgacgatatcgaatgcttatgcggttgaaggaagttgggatgaagttgtgaagatgagagagatgatgaaagctaagggtttgaagaaaaaacctggatgtagttggatacagattacaggagaagaaggagtccatgtgtttgttgccaatgataagacacatactaggatcaatgagatacaaatgatgttagcattgttattatatgatatgggtacaggttccaaatga

SEQ ID NO: 72943 - protein, 830 aa, Arabidopsis thaliana
  peptide (1)..(830): Ceres Seq. ID no. 4951812
MASLPFNTIPNKVPFSVSSKPSSKHHDEQAHSPSSTSYFHRVSSLCKNGEIKEALSLVTEMDFRNLRIGPEIYGEILQGCVYERDLSTGKQIHARILKNGDFYARNEYIETKLVIFYAKCDALEIAEVLFSKLRVRNVFSWAAIIGVKCRIGLCEGALMGFVEMLENEIFPDNFVVPNVCKACGALKWSRFGRGVHGYVVKSGLEDCVFVASSLADMYGKCGVLDDASKVFDEIPDRNAVAWNALMVGYVQNGKNEEAIRLFSDMRKQGVEPTRVTVSTCLSASANMGGVEEGKQSHAIAIVNGMELDNILGTSLLNFYCKVGLIEYAEMVFDRMFEKDVVTWNLIISGYVQQGLVEDAIYMCQLMRLEKLKYDCVTLATLMSAAARTENLKLGKEVQCYCIRHSFESDIVLASTVMDMYAKCGSIVDAKKVFDSTVEKDLILWNTLLAAYAESGLSGEALRLFYGMQLEGVPPNVITWNLIILSLLRNGQVDEAKDMFLQMQSSGIIPNLISWTTMMNGMVQNGCSEEAILFLRKMQESGLRPNAFSITVALSACAHLASLHIGRTIHGYIIRNLQHSSLVSIETSLVDMYAKCGDINKAEKVFGSKLYSELPLSNAMISAYALYGNLKEAIALYRSLEGVGLKPDNITITNVLSACNHAGDINQAIEIFTDIVSKRSMKPCLEHYGLMVDLLASAGETEKALRLIEEMPFKPDARMIQSLVASCNKQRKTELVDYLSRKLLESEPENSGNYVTISNAYAVEGSWDEVVKMREMMKAKGLKKKPGCSWIQITGEEGVHVFVANDKTHTRINEIQMMLALLLYDMGTGSK

SEQ ID NO: 72944 - protein, 770 aa, Arabidopsis thaliana
  peptide (1)..(770): Ceres Seq. ID no. 4951813
MDFRNLRIGPEIYGEILQGCVYERDLSTGKQIHARILKNGDFYARNEYIETKLVIFYAKCDALEIAEVLFSKLRVRNVFSWAAIIGVKCRIGLCEGALMGFVEMLENEIFPDNFVVPNVCKACGALKWSRFGRGVHGYVVKSGLEDCVFVASSLADMYGKCGVLDDASKVFDEIPDRNAVAWNALMVGYVQNGKNEEAIRLFSDMRKQGVEPTRVTVSTCLSASANMGGVEEGKQSHAIAIVNGMELDNILGTSLLNFYCKVGLIEYAEMVFDRMFEKDVVTWNLIISGYVQQGLVEDAIYMCQLMRLEKLKYDCVTLATLMSAAARTENLKLGKEVQCYCIRHSFESDIVLASTVMDMYAKCGSIVDAKKVFDSTVEKDLILWNTLLAAYAESGLSGEALRLFYGMQLEGVPPNVITWNLIILSLLRNGQVDEAKDMFLQMQSSGIIPNLISWTTMMNGMVQNGCSEEAILFLRKMQESGLRPNAFSITVALSACAHLASLHIGRTIHGYIIRNLQHSSLVSIETSLVDMYAKCGDINKAEKVFGSKLYSELPLSNAMISAYALYGNLKEAIALYRSLEGVGLKPDNITITNVLSACNHAGDINQAIEIFTDIVSKRSMKPCLEHYGLMVDLLASAGETEKALRLIEEMPFKPDARMIQSLVASCNKQRKTELVDYLSRKLLESEPENSGNYVTISNAYAVEGSWDEVVKMREMMKAKGLKKKPGCSWIQITGEEGVHVFVANDKTHTRINEIQMMLALLLYDMGTGSK

SEQ ID NO: 72945 - protein, 672 aa, Arabidopsis thaliana
  peptide (1)..(672): Ceres Seq. ID no. 4951814
MGFVEMLENEIFPDNFVVPNVCKACGALKWSRFGRGVHGYVVKSGLEDCVFVASSLADMYGKCGVLDDASKVFDEIPDRNAVAWNALMVGYVQNGKNEEAIRLFSDMRKQGVEPTRVTVSTCLSASANMGGVEEGKQSHAIAIVNGMELDNILGTSLLNFYCKVGLIEYAEMVFDRMFEKDVVTWNLIISGYVQQGLVEDAIYMCQLMRLEKLKYDCVTLATLMSAAARTENLKLGKEVQCYCIRHSFESDIVLASTVMDMYAKCGSIVDAKKVFDSTVEKDLILWNTLLAAYAESGLSGEALRLFYGMQLEGVPPNVITWNLIILSLLRNGQVDEAKDMFLQMQSSGIIPNLISWTTMMNGMVQNGCSEEAILFLRKMQESGLRPNAFSITVALSACAHLASLHIGRTIHGYIIRNLQHSSLVSIETSLVDMYAKCGDINKAEKVFGSKLYSELPLSNAMISAYALYGNLKEAIALYRSLEGVGLKPDNITITNVLSACNHAGDINQAIEIFTDIVSKRSMKPCLEHYGLMVDLLASAGETEKALRLIEEMPFKPDARMIQSLVASCNKQRKTELVDYLSRKLLESEPENSGNYVTISNAYAVEGSWDEVVKMREMMKAKGLKKKPGCSWIQITGEEGVHVFVANDKTHTRINEIQMMLALLLYDMGTGSK

SEQ ID NO: 72946 - DNA, 1289 bp, Arabidopsis thaliana
  misc_feature (1)..(1289): Ceres Seq. ID no. 4952061
  misc_feature (1)..(1289): Ortholog of  Ceres SEQ ID NO 12782785 as cited in SEQ ID NO 0
tttgtatcatgagtaatgttgatatgtttagtgatgaaaagttctcagatgtcagaaacagaatttaaagtgttgcttgagacattcacatttcctgctgattctgctcccttcaagagttgtcatgcctctaccatagttgaggttgttaaagatcatttcttggctgcgtatttcggaggcaccagggaaggagcacctgatgtcaaaatctggttgcagcatttcaaggatggtcaatgggattcaccggttattgttgatgaagagccaggagttccaatgtataaccctgtcttgttcaaacttccatctcatgagctcttattgttctacaaaatcggccaggaggttcaaaaatggagtggttgcatgaaacgatcatatgataaaggtataacttggactgaaagagaacagcttcctcctgggattctcggtcctatcaaaaacaagcccattttgcttgaagacggtactctcctttgcggatcatctgttgagagttggaattcttggggagcatggatggaggtcacttcagatgcgggtagaacatggagaaagaaagggccaatatacattcaaggcaagagtcttagcgtgatccaaccagttccataccaaaccgcagctgggaacttacggattttactcagatcctttactggcattgacagaatctgtatctcagagtctttggatggcggtgagaactggagttttgcagtaccaacggttctcccaaacccaaattcaggtattgatggagtcaagcttaaggatggtaggctagtgcttgcttacaacacagactcaagaggtgtgctcaaattaggagtttctttagacgacggtgattcatggaccgatattttaacgttggaggaatctccgggaatggagtattcgtacccggctgttatacaagccggagacggcaatgtccacgtcacctatacatataacaggacacaaattaagcatgtggtgctcaagactgcgacagatatcgattcgaagccataccgacatggtgaagcaggaggaggacacgtgaacttggatttgtacgaaccaaacattaattaattagctatttgtctcttgaaccatcgatgtggagtgtgacttccttcttacggaagaacaaagaatgttctctttcttgtcttgtaagttattgattgatcgattcttgagtttgtaaaagttgccactagttgatgaatattattgagattgtttataatatatttattgtaatcatataagttagagatttactt

SEQ ID NO: 72947 - protein, 358 aa, Arabidopsis thaliana; identical to SEQ ID NO: 43662
  peptide (1)..(358): Ceres Seq. ID no. 4952062

SEQ ID NO: 72948 - protein, 352 aa, Arabidopsis thaliana; identical to SEQ ID NO: 43663
  peptide (1)..(352): Ceres Seq. ID no. 4952063

SEQ ID NO: 72949 - protein, 347 aa, Arabidopsis thaliana; identical to SEQ ID NO: 35320
  peptide (1)..(347): Ceres Seq. ID no. 4952064

SEQ ID NO: 72950 - DNA, 1770 bp, Arabidopsis thaliana
  misc_feature (1)..(1770): Ceres Seq. ID no. 4952322
  misc_feature (1)..(1770): Ortholog of  Ceres SEQ ID NO 13663328 as cited in SEQ ID NO 66678
  misc_feature (1)..(1770): Ortholog of  Ceres SEQ ID NO 13624495 as cited in SEQ ID NO 0
atggattatgatctggtacataccaaaaccatcaaaagtttgtctttcttcataccaaaaacaaccgaattctcattcttgattcttgtttttttttttttttgccagcttcgttccaagaagagtatcaaacgcgtagaatccaccaaatcaaatccatggtggtgggatagtcatatcggtctcaaaaattctaagtggcttgagaataatctcgatgagatggaccggagcgtgaaacggatggtgaagttgatagaggaggatgcagattcttttgctaagaaggcagagatgtattaccagtcaagacctgagcttattgctcttgtggatgagtttcaccgtatgtaccgtgctttggcagagcggtacgagaacatcaccggagagttgagaaaaggctctcctttagagcttcagtcacagggctctggtctttctgacatctctgcttctgacctctctgctttatggacctctaatgaggttaataggttaggtcgtcctccttctggtcgacgtgctcctggttttgaatacttccttggcaatggaggacttccttctgatctttatcacaaagatggagatgattctgcttccattactgattctgaacttgaatctgatgattcttctgtgactaattaccctggttatgtgagtataggctctgactttcagtccctaagcaagaggatcatggatcttgagattgagctacgtgaagccaaagaaagacttaggatgcaacttgaagggaacactgagagcttgttgccgagggtgaaaagtgagactaaatttgttgatttcccggcaaaacttgctgcttgtgagcaagaactgaaagatgtaaatgagaagttacagaattcagaagaccaaatctatattttaaagagtcagcttgctagatacttgccatctgggttggatgatgaacagagcgaaggggcagcttcaactcaagaactggacattgagactttgtctgaagagctgagaattacaagcctgaggcttcgggaggcagaaaaacaaaacggtatcatgagaaaagaagtcgagaaaagcaagtctgatgatgcaaaactcaagagtctgcaagacatgcttgagtcggcacagaaagaagctgcagcatggaaaagcaaggctagtgcagataaaagagaggtggtgaagctgcttgatagaatctcaatgttgaagtcgagtttagcaggtagagatcatgagatcagggatttaaagacagcattgtctgacgcagaagagaagattttcccggagaaagcacaggtcaaagccgatatagcaaagctgttggaagaaaaaatacaccgggatgaccaattcaaagagctggaagccaatgtgcgttatcttgaagatgagagaagaaaggtgaacaatgagaaaatagaagaggaggaaaagctgaagagcgaaatcgaggtgctgacactggaaaaggtagagaaagggagatgcatagagacgttaagcagaaaggtgagtgagctagagtcggagataagtcgacttggaagtgaaataaaagcgagagacgataggactatggagatggagaaggaggtggagaagcagaggagggaactagaagaagtagcagaagagaagagggaagtgataagacagctctgtttttcactagactactccagagacgaatacaagagactacgcatagccttttcagggcatccaccaacaagaccatcatccattcttgcttcttaa

SEQ ID NO: 72951 - protein, 589 aa, Arabidopsis thaliana
  peptide (1)..(589): Ceres Seq. ID no. 4952323
MDYDLVHTKTIKSLSFFIPKTTEFSFLILVFFFFCQLRSKKSIKRVESTKSNPWWWDSHIGLKNSKWLENNLDEMDRSVKRMVKLIEEDADSFAKKAEMYYQSRPELIALVDEFHRMYRALAERYENITGELRKGSPLELQSQGSGLSDISASDLSALWTSNEVNRLGRPPSGRRAPGFEYFLGNGGLPSDLYHKDGDDSASITDSELESDDSSVTNYPGYVSIGSDFQSLSKRIMDLEIELREAKERLRMQLEGNTESLLPRVKSETKFVDFPAKLAACEQELKDVNEKLQNSEDQIYILKSQLARYLPSGLDDEQSEGAASTQELDIETLSEELRITSLRLREAEKQNGIMRKEVEKSKSDDAKLKSLQDMLESAQKEAAAWKSKASADKREVVKLLDRISMLKSSLAGRDHEIRDLKTALSDAEEKIFPEKAQVKADIAKLLEEKIHRDDQFKELEANVRYLEDERRKVNNEKIEEEEKLKSEIEVLTLEKVEKGRCIETLSRKVSELESEISRLGSEIKARDDRTMEMEKEVEKQRRELEEVAEEKREVIRQLCFSLDYSRDEYKRLRIAFSGHPPTRPSSILAS

SEQ ID NO: 72952 - protein, 515 aa, Arabidopsis thaliana; identical to SEQ ID NO: 48338
  peptide (1)..(515): Ceres Seq. ID no. 4952324

SEQ ID NO: 72953 - protein, 508 aa, Arabidopsis thaliana; identical to SEQ ID NO: 48339
  peptide (1)..(508): Ceres Seq. ID no. 4952325

SEQ ID NO: 72954 - DNA, 822 bp, Arabidopsis thaliana
  misc_feature (1)..(822): Ceres Seq. ID no. 4952329
  misc_feature (1)..(822): Ortholog of  Ceres SEQ ID NO 14307431 as cited in SEQ ID NO 54422
atggccatggcctatgaggaagctcgcaagctccgtcttcaagagaatcacaagcgatttcaatccaattttgtagctttaccacaatttcagcttcttcagcagcgtaatcacaaacccatcgataaagccctcttagctactgctgaaccaagacgctcttcccgtgttcgtaccgtaatttcttcctatcgcgatgatgtcgtcgtagacactggtcgtacttcgaatctgaggagatcgcgacatagctctacatgggcgacctacatttctcgacctctccatgagtgcaagtttgcatcttatgaagaaaaggttggagcattcaaggctgcagagaagttccagaggagccttaaatctccacatccttactttgtgaaatctatggttcgctcccatgtttacagttgcttttggctggggcttccttcaagattctgtgcagacaattttcctgaggaaactatggaaatagaactagaggatgaagaaggcgaagtgtatgaagcagtgtacattggtagaagagctggactcagtggtggttggaaaaggtttgctcttgatcataaattggatgatggtgatgctctactctttgaattggttgaaccaaagaagttcaagatctatgtgtttaaaggaaatgagaacgctaatcttacaagcgccagaaagagaggcagagcaacgacgccaagtgaagaagaagaagaagaagaagataaggatgttgaagaatcaggtgatgaggaacacagctcaagagccactaagagatcatccgtaaggttactaaggaagaggaaagcataa

SEQ ID NO: 72955 - protein, 273 aa, Arabidopsis thaliana
  peptide (1)..(273): Ceres Seq. ID no. 4952330
MAMAYEEARKLRLQENHKRFQSNFVALPQFQLLQQRNHKPIDKALLATAEPRRSSRVRTVISSYRDDVVVDTGRTSNLRRSRHSSTWATYISRPLHECKFASYEEKVGAFKAAEKFQRSLKSPHPYFVKSMVRSHVYSCFWLGLPSRFCADNFPEETMEIELEDEEGEVYEAVYIGRRAGLSGGWKRFALDHKLDDGDALLFELVEPKKFKIYVFKGNENANLTSARKRGRATTPSEEEEEEEDKDVEESGDEEHSSRATKRSSVRLLRKRKA

SEQ ID NO: 72956 - protein, 271 aa, Arabidopsis thaliana
  peptide (1)..(271): Ceres Seq. ID no. 4952331
MAYEEARKLRLQENHKRFQSNFVALPQFQLLQQRNHKPIDKALLATAEPRRSSRVRTVISSYRDDVVVDTGRTSNLRRSRHSSTWATYISRPLHECKFASYEEKVGAFKAAEKFQRSLKSPHPYFVKSMVRSHVYSCFWLGLPSRFCADNFPEETMEIELEDEEGEVYEAVYIGRRAGLSGGWKRFALDHKLDDGDALLFELVEPKKFKIYVFKGNENANLTSARKRGRATTPSEEEEEEEDKDVEESGDEEHSSRATKRSSVRLLRKRKA

SEQ ID NO: 72957 - protein, 143 aa, Arabidopsis thaliana
  peptide (1)..(143): Ceres Seq. ID no. 4952332
MVRSHVYSCFWLGLPSRFCADNFPEETMEIELEDEEGEVYEAVYIGRRAGLSGGWKRFALDHKLDDGDALLFELVEPKKFKIYVFKGNENANLTSARKRGRATTPSEEEEEEEDKDVEESGDEEHSSRATKRSSVRLLRKRKA

SEQ ID NO: 72958 - DNA, 1275 bp, Arabidopsis thaliana
  misc_feature (1)..(1275): Ceres Seq. ID no. 4952333
  misc_feature (1)..(1275): Ortholog of  Ceres SEQ ID NO 12465151 as cited in SEQ ID NO 67782
atggggaaagacgaagaggaaatgcgaggtgagatcgaggagcgactaatcaatgaagagtacaagatctggaagaagaacactcctttcctctacgatctcgttattactcacgctctcgagtggccttcacttactgttgaatggcttcctgaccgtgaagaaccttccggtaaagactactccgttcagaagatgattctcggtacccatacctccgagagcgagcccaattacttgatgctagcccaagttcagcttcctcttgacgataccgagagtgaagctcgtcagtacgatgatgaccgctctgaatttggtggctttggctgtgcaactggaaaggtacaaattatccagcagataaatcatgatggtgaggttaatcgagctcgctatatgcctcaaaaccctttcataattgctaccaagacagttaatgcggaggtctatgttttcgattacagtaagcatccatctaagcctcctcttgatggggcttgtaatcctgatttaaagcttagaggtcacagctctgagggatatggtctctcttggagtaagttcaagcagggtcatttgcttagtggctctgatgatgctcagatctgcttgtgggatattaacgctactcctaaaaacaaatctctggacgctcagcagatttttaaggctcatgaaggggttgtggaagatgttgcatggcatctgagacatgagtacctgtttggatcagttggagatgaccaataccttctcatatgggatctgcgttctccatctgccagtaaaccagtacagtctgtggttgctcattcgatggaggttaactgcttagccttcaatccatttaatgagtgggttgtggcaacaggatcaactgacaagactgttaaattattcgatctacggaagctaagcaccgctcttcacacatttgatagccacaaagaggaggtttttcaagttggttggaacccaaagaacgagactattttagcttcatgttgccttggtagaagacttatggtttgggaccttagcaggatcgatgaggaacagacagtggaggacgcagaagacggcccacctgagctgctgtttattcacggtggtcacactagcaaaatttcagatttctcgtggaacccttgtgaagattgggttatttccagtgttgctgaggacaacatactccaaatatggcaaatggctgaaaacatctatcatgatgaggatgacgctccaggggaagaaccatcaaaagcttcttag

SEQ ID NO: 72959 - protein, 424 aa, Arabidopsis thaliana; identical to SEQ ID NO: 23265
  peptide (1)..(424): Ceres Seq. ID no. 4952334

SEQ ID NO: 72960 - protein, 417 aa, Arabidopsis thaliana; identical to SEQ ID NO: 23266
  peptide (1)..(417): Ceres Seq. ID no. 4952335

SEQ ID NO: 72961 - protein, 359 aa, Arabidopsis thaliana
  peptide (1)..(359): Ceres Seq. ID no. 4952336
MILGTHTSESEPNYLMLAQVQLPLDDTESEARQYDDDRSEFGGFGCATGKVQIIQQINHDGEVNRARYMPQNPFIIATKTVNAEVYVFDYSKHPSKPPLDGACNPDLKLRGHSSEGYGLSWSKFKQGHLLSGSDDAQICLWDINATPKNKSLDAQQIFKAHEGVVEDVAWHLRHEYLFGSVGDDQYLLIWDLRSPSASKPVQSVVAHSMEVNCLAFNPFNEWVVATGSTDKTVKLFDLRKLSTALHTFDSHKEEVFQVGWNPKNETILASCCLGRRLMVWDLSRIDEEQTVEDAEDGPPELLFIHGGHTSKISDFSWNPCEDWVISSVAEDNILQIWQMAENIYHDEDDAPGEEPSKAS

SEQ ID NO: 72962 - DNA, 1082 bp, Arabidopsis thaliana
  misc_feature (1)..(1082): Ceres Seq. ID no. 4952511
  misc_feature (1)..(1082): Ortholog of  Ceres SEQ ID NO 13581848 as cited in SEQ ID NO 51340
  misc_feature (1)..(1082): Ortholog of  Ceres SEQ ID NO 13595392 as cited in SEQ ID NO 56164
  misc_feature (1)..(1082): Ortholog of  Ceres SEQ ID NO 14316412 as cited in SEQ ID NO 59209
  misc_feature (1)..(1082): Ortholog of  Ceres SEQ ID NO 12618341 as cited in SEQ ID NO 64256
tctctctctctctctctctctctctctctctctctctctcttgtattatttctatctcccccgccgtcgaaagagaaacgtcgatcggagaacctttgaaatgtcgactggattagatatgtctctcgacgacatgatcgccaagaaccgtaagtctcgtggtggagccggccccgctcgtggaaccggatccggatccggaccgggtccgactcgccgcaacaaccctaatcggaaatcaacccgatctgctccataccaatcagccaaggcgccggagtccacctggggtcacgacatgttctccgatagatctgaagatcaccgatcgggacgttcctccgccggaatcgaaactggaaccaagctctacatttccaatttggattacggtgtcatgaacgaagacatcaaggaactgtttgctgaagttggagaacttaaacgctacacagttcattttgatagaagtggaagatcaaagggaactgctgaagtagtgtattctcggcgtggcgatgcactcgcagctgtgaagaagtataatgatgttcagctggatggaaaacccatgaagatagagattgtgggcactaatcttcaaactgctgcagccccgtctggtagacctgcgaatggaaactccaatggtgctccatggagaggaggacaagggagaggaggtcaacaacgaggtggtggacgaggaggcggtggccgaggtggtggtggtcgtggtaggcgtcctggtaagggccctgcagagaagatttctgcggaagatcttgatgcggatcttgataagtaccattctggagatatggagacaaactaaggaacgtgactgatcttctcaaaccggtaggggttttaggaggaagagaatcgagaaaatgtttgccagaggctttaccacttagcgcctttttggctgtgttgttcatttgtttcattagaatgactttacagaattgagaatatgtgttatttaaagttgttgtctatcttaataccctcaagtgaaaggcagaggaaggaataccaatttcgtttacagatcatatgcaggcaaaagagttttc

SEQ ID NO: 72963 - protein, 277 aa, Arabidopsis thaliana
  peptide (1)..(277): Ceres Seq. ID no. 4952512
LSLSLSLSLSLSLLYYFYLPRRRKRNVDRRTFEMSTGLDMSLDDMIAKNRKSRGGAGPARGTGSGSGPGPTRRNNPNRKSTRSAPYQSAKAPESTWGHDMFSDRSEDHRSGRSSAGIETGTKLYISNLDYGVMNEDIKELFAEVGELKRYTVHFDRSGRSKGTAEVVYSRRGDALAAVKKYNDVQLDGKPMKIEIVGTNLQTAAAPSGRPANGNSNGAPWRGGQGRGGQQRGGGRGGGGRGGGGRGRRPGKGPAEKISAEDLDADLDKYHSGDMETN

SEQ ID NO: 72964 - protein, 244 aa, Arabidopsis thaliana; identical to SEQ ID NO: 20888
  peptide (1)..(244): Ceres Seq. ID no. 4952513

SEQ ID NO: 72965 - protein, 238 aa, Arabidopsis thaliana; identical to SEQ ID NO: 20889
  peptide (1)..(238): Ceres Seq. ID no. 4952514

SEQ ID NO: 72966 - DNA, 600 bp, Arabidopsis thaliana
  misc_feature (1)..(600): Ceres Seq. ID no. 4952626
  misc_feature (1)..(600): Ortholog of  Ceres SEQ ID NO 14309248 as cited in SEQ ID NO 0
atggccacacaaagttgttacgtcactcgaaatcttaaatccgccgtcaaaaatgctattcagacgaagcagccaccaaccactactcgagccgccgtagatccagattccttaacagtagatgtcgccgtttgtgaagttttatctcttcagttacaattttctccaagcttctgcatggttcatcagatttgtgttgttgttctccgcagggcgatttcgcttctgattattcttaacagctttttatcgaacaagacgatcatttctgcttacgcttctgctggattcctgattagtctgtttcaaactgctgctattcttgaagttcttcatggagctattggaattgtcccgagtggattcttgtctccactgatgcaatggagtggaagaactcacttcatattggctattgttggacagatcaaggaggattcgccgtggctgtctataacacttgtggcttggtgtatcggtgaggccgtcctcttggtctacccattcctttggttgaagctttatctccagcttttcaaacaaagaaagtctaagcttggaaaatcgaagaagcttcacggcaagagaaagagaatgtga

SEQ ID NO: 72967 - protein, 199 aa, Arabidopsis thaliana
  peptide (1)..(199): Ceres Seq. ID no. 4952627
MATQSCYVTRNLKSAVKNAIQTKQPPTTTRAAVDPDSLTVDVAVCEVLSLQLQFSPSFCMVHQICVVVLRRAISLLIILNSFLSNKTIISAYASAGFLISLFQTAAILEVLHGAIGIVPSGFLSPLMQWSGRTHFILAIVGQIKEDSPWLSITLVAWCIGEAVLLVYPFLWLKLYLQLFKQRKSKLGKSKKLHGKRKRM

SEQ ID NO: 72968 - protein, 140 aa, Arabidopsis thaliana
  peptide (1)..(140): Ceres Seq. ID no. 4952628
MVHQICVVVLRRAISLLIILNSFLSNKTIISAYASAGFLISLFQTAAILEVLHGAIGIVPSGFLSPLMQWSGRTHFILAIVGQIKEDSPWLSITLVAWCIGEAVLLVYPFLWLKLYLQLFKQRKSKLGKSKKLHGKRKRM

SEQ ID NO: 72969 - DNA, 1182 bp, Arabidopsis thaliana
  misc_feature (1)..(1182): Ceres Seq. ID no. 4952653
  misc_feature (1)..(1182): Ortholog of  Ceres SEQ ID NO 14307288 as cited in SEQ ID NO 54318
  misc_feature (1)..(1182): Ortholog of  Ceres SEQ ID NO 13597393 as cited in SEQ ID NO 63453
atggcggctttacttctcctcaatcgtgtttctcgaagtactagctcaatctctctccaccgggtcgcaggaactctgggtttcaattccttcaatgctcaaattcacggtgacagaatctccggaacactctttcgagtgagatcattagctactcttgctgaaggagcttctcattttaatgagatggtatctgtgaatcagcggaagtattatcttctgggtggtaaaggaggtgttgggaaaacgagctgtgctgcttctcttgcggttaagtttgctagccacggtcatcctaccattgtggtttctactgaccctgctcactccttgagcgattctttttcccaggacttgtcaggaggagtcctaaagcccgttcaaggtgttgattctccacttcttgctcttgagatcacacctgagataatgaaggacgagataaaacgtcagacgggcgataaaagtgtgaaaaatatgatggatagcatggggctcggaatgtttgccggcgagttaggggacttaaatcttgaagatatgctcaacgctgcctctcctggtattgacgaaatagcagctatttccaaggcacttatccctctcagaattcccctgaaaaaatacagtaggttcactcgtatagtttttgatactgctcccacggggcatactctgcggcttctttccctcccagacttctatgattcatccattagcaaaataactaagctcaagaagaaaatcactgcagcagcttcagcctttaagttggtctttggcaaaaaagagatacaacaaaaagaacttcctaacgagttagatcaactgaaagagaggatggagaaagttcgaaatgttttccgtgatgtggacactaccgagtttgttattgtaaccatcccaacggttatggcaataaacgagtcttcaaggttacatgcatctttaagaaaagaaaatgtgccagtccaccggcttattgttaatcagcttctacctcaatctgaatccgattgcaaattttgctcaataagacgaaaggaacaaacgcgtgtgcttggacttattcagaatgatacagaactttcggggttaaaattgatccaatcgccattgctagacgcagagataagaggggttcccgcacttaagttcatgggtgatctcatttggaaataa

SEQ ID NO: 72970 - protein, 393 aa, Arabidopsis thaliana
  peptide (1)..(393): Ceres Seq. ID no. 4952654
MAALLLLNRVSRSTSSISLHRVAGTLGFNSFNAQIHGDRISGTLFRVRSLATLAEGASHFNEMVSVNQRKYYLLGGKGGVGKTSCAASLAVKFASHGHPTIVVSTDPAHSLSDSFSQDLSGGVLKPVQGVDSPLLALEITPEIMKDEIKRQTGDKSVKNMMDSMGLGMFAGELGDLNLEDMLNAASPGIDEIAAISKALIPLRIPLKKYSRFTRIVFDTAPTGHTLRLLSLPDFYDSSISKITKLKKKITAAASAFKLVFGKKEIQQKELPNELDQLKERMEKVRNVFRDVDTTEFVIVTIPTVMAINESSRLHASLRKENVPVHRLIVNQLLPQSESDCKFCSIRRKEQTRVLGLIQNDTELSGLKLIQSPLLDAEIRGVPALKFMGDLIWK

SEQ ID NO: 72971 - protein, 331 aa, Arabidopsis thaliana
  peptide (1)..(331): Ceres Seq. ID no. 4952655
MVSVNQRKYYLLGGKGGVGKTSCAASLAVKFASHGHPTIVVSTDPAHSLSDSFSQDLSGGVLKPVQGVDSPLLALEITPEIMKDEIKRQTGDKSVKNMMDSMGLGMFAGELGDLNLEDMLNAASPGIDEIAAISKALIPLRIPLKKYSRFTRIVFDTAPTGHTLRLLSLPDFYDSSISKITKLKKKITAAASAFKLVFGKKEIQQKELPNELDQLKERMEKVRNVFRDVDTTEFVIVTIPTVMAINESSRLHASLRKENVPVHRLIVNQLLPQSESDCKFCSIRRKEQTRVLGLIQNDTELSGLKLIQSPLLDAEIRGVPALKFMGDLIWK

SEQ ID NO: 72972 - protein, 250 aa, Arabidopsis thaliana
  peptide (1)..(250): Ceres Seq. ID no. 4952656
MKDEIKRQTGDKSVKNMMDSMGLGMFAGELGDLNLEDMLNAASPGIDEIAAISKALIPLRIPLKKYSRFTRIVFDTAPTGHTLRLLSLPDFYDSSISKITKLKKKITAAASAFKLVFGKKEIQQKELPNELDQLKERMEKVRNVFRDVDTTEFVIVTIPTVMAINESSRLHASLRKENVPVHRLIVNQLLPQSESDCKFCSIRRKEQTRVLGLIQNDTELSGLKLIQSPLLDAEIRGVPALKFMGDLIWK

SEQ ID NO: 72973 - DNA, 1215 bp, Arabidopsis thaliana
  misc_feature (1)..(1215): Ceres Seq. ID no. 4952950
  misc_feature (1)..(1215): Ortholog of  Ceres SEQ ID NO 14315915 as cited in SEQ ID NO 57583
atgtataaccttagtaggatcatttatcgtttctcctcggtttcacttaaccctagcacgagagcatctgggtttctacttgagaacgcttcatcaaaaatcttacaatctgctacgaatcgagcattttctgcaaaatcaggatctgatggagttggaggcgatgataacggctggaatatttcaacaggaggatcatttggtggtacaggatctgctgatcttgattgggacaataaatctatgtggtctactggtttaactaaggagcatttcgatggtgtctccgttggtcgtcagaagaacgcggcgaatccttcttctgataacaccccttctgattcgggtgatgtaatgagcaaattgggtccaaaggaggtagctttggttaatgaaatgaatgagtatgatgatttgcttaaagagattgagcaagataataggcaaggcagggcttttgttgatgggattaaacagagaatgatggagatcagtgtgttgttgaagcaagttaaagagccaggtgctagagggtcttatcttaaggactctgagaagactgagatgtatagattgcacaaagagaatcctgaggtgtatactattgagaggcttgctaaggattataggattatgaggcagcgtgttcacgccattctttttcttaaagaagatgaagaagaagaggagaggaagcttggtcgtcctttggatgattctgttgaccgtttgcttgatgagtaccctgagttcttcatttcgcatgaccgggaatttcatgtggcctcacttaattacaaacccgacttcaaggtcatgccagaaggatgggatggtacaatcaaagatatggatgaagtccattatgagatctcaaagaaagaggatgacatgctttacgaagaatttgtccgaaggtttgagttcaacaaaatgaaatggagaggagaagtgatgtgccacaagtacagcaggagacgttcatcagagggatggaaaatcacggttgagaaattgggtgctaagggcaaacgtggagccggaggtggctggaagtttatgagtcttccagatggatcaagccgaccactcaacgaaatggagaagcattatatcaacggaggtgatgcgttactcgcccgcgaaccagaagcggaggtcgaagcggaaacagaagcggaaggagaggcgcatagcatgtctcaaagccggtaa

SEQ ID NO: 72974 - protein, 404 aa, Arabidopsis thaliana
  peptide (1)..(404): Ceres Seq. ID no. 4952951
MYNLSRIIYRFSSVSLNPSTRASGFLLENASSKILQSATNRAFSAKSGSDGVGGDDNGWNISTGGSFGGTGSADLDWDNKSMWSTGLTKEHFDGVSVGRQKNAANPSSDNTPSDSGDVMSKLGPKEVALVNEMNEYDDLLKEIEQDNRQGRAFVDGIKQRMMEISVLLKQVKEPGARGSYLKDSEKTEMYRLHKENPEVYTIERLAKDYRIMRQRVHAILFLKEDEEEEERKLGRPLDDSVDRLLDEYPEFFISHDREFHVASLNYKPDFKVMPEGWDGTIKDMDEVHYEISKKEDDMLYEEFVRRFEFNKMKWRGEVMCHKYSRRRSSEGWKITVEKLGAKGKRGAGGGWKFMSLPDGSSRPLNEMEKHYINGGDALLAREPEAEVEAETEAEGEAHSMSQSR

SEQ ID NO: 72975 - protein, 323 aa, Arabidopsis thaliana
  peptide (1)..(323): Ceres Seq. ID no. 4952952
MWSTGLTKEHFDGVSVGRQKNAANPSSDNTPSDSGDVMSKLGPKEVALVNEMNEYDDLLKEIEQDNRQGRAFVDGIKQRMMEISVLLKQVKEPGARGSYLKDSEKTEMYRLHKENPEVYTIERLAKDYRIMRQRVHAILFLKEDEEEEERKLGRPLDDSVDRLLDEYPEFFISHDREFHVASLNYKPDFKVMPEGWDGTIKDMDEVHYEISKKEDDMLYEEFVRRFEFNKMKWRGEVMCHKYSRRRSSEGWKITVEKLGAKGKRGAGGGWKFMSLPDGSSRPLNEMEKHYINGGDALLAREPEAEVEAETEAEGEAHSMSQSR

SEQ ID NO: 72976 - protein, 286 aa, Arabidopsis thaliana
  peptide (1)..(286): Ceres Seq. ID no. 4952953
MSKLGPKEVALVNEMNEYDDLLKEIEQDNRQGRAFVDGIKQRMMEISVLLKQVKEPGARGSYLKDSEKTEMYRLHKENPEVYTIERLAKDYRIMRQRVHAILFLKEDEEEEERKLGRPLDDSVDRLLDEYPEFFISHDREFHVASLNYKPDFKVMPEGWDGTIKDMDEVHYEISKKEDDMLYEEFVRRFEFNKMKWRGEVMCHKYSRRRSSEGWKITVEKLGAKGKRGAGGGWKFMSLPDGSSRPLNEMEKHYINGGDALLAREPEAEVEAETEAEGEAHSMSQSR

SEQ ID NO: 72977 - DNA, 1326 bp, Arabidopsis thaliana
  misc_feature (1)..(1326): Ceres Seq. ID no. 4952954
  misc_feature (1)..(1326): Ortholog of  Ceres SEQ ID NO 14314567 as cited in SEQ ID NO 52335
  misc_feature (1)..(1326): Ortholog of  Ceres SEQ ID NO 14315985 as cited in SEQ ID NO 57720
atggaggagaaaggtgaaataagtccaagtggggtcgtcacagttaagggagatgaagctttggttccaagaacagagtttcaacaaaaccctagttttctccaattcgtgagtcccacaacggtagtgactcctctccctcctccaccagctccgtcttcggctccggtaccaaccaccgtgactcctggctcagccacagcatcaaccggatcagatccgacgaaaaagaagagaggaagaccgaggaagtacgcaccagacggaagcctgaaccctaggtttttgcgaccaactctgtctccaactccaatctcatcttcgattccattgtctggagattatcaatggaaacgaggcaaagctcagcagcagcatcagcctcttgagttcgtcaagaaatctcacaaattcgagtatggaagcccagatgttgggaagtgggaccaacataactggattttgctgggtacacttttgtctgaagaagctattacactcagaccaactaatgcaaactctgttttactatctcttgcagctcctactcctcctcttcctgggctctcatgctatgtgggtgcaaattttacgacccatcaatttactgtcaatggcggtgaggatgtgacaatgaaggttatgccgtattcgcaacaaggatctcgagctatctgcattctttctgcaactggttcgatctctaatgtcactcttggtcaacctaccaatgcaggtggcactcttacatatgagggtcggtttgagatactatcgctatctggttcctttatgcctactgaaaatggaggaacaaaaggtcgggctggtgggatgagcatttctttagccggaccaaatggcaatatatttggtggtggccttgccggtatgcttatagcagctggtcctgttcaggtggtaatgggaagtttcattgtgatgcatcaagcagaacaaaatcagaagaagaaacctagagttatggaggcttttgctccaccacaaccacaagcaccaccacaactgcaacaacaacaacctcctacttttaccataacaaccgtgaattcaacttctccttcggtgaacaccgtagaggagcagaaaccacaagcttatggtggtggtatagtgagaccgatggctcaaatgccttcttctttccaaaacgacaattcaactatgaacaatttcacaccggcctatcatggatacgggaatatgaacactggtactactcacaaagaagaacatgaagacgaagatggtggtgatgatgatgatgattcaggcgatactaggagccaatctcatagtggttga

SEQ ID NO: 72978 - protein, 441 aa, Arabidopsis thaliana
  peptide (1)..(441): Ceres Seq. ID no. 4952955
MEEKGEISPSGVVTVKGDEALVPRTEFQQNPSFLQFVSPTTVVTPLPPPPAPSSAPVPTTVTPGSATASTGSDPTKKKRGRPRKYAPDGSLNPRFLRPTLSPTPISSSIPLSGDYQWKRGKAQQQHQPLEFVKKSHKFEYGSPDVGKWDQHNWILLGTLLSEEAITLRPTNANSVLLSLAAPTPPLPGLSCYVGANFTTHQFTVNGGEDVTMKVMPYSQQGSRAICILSATGSISNVTLGQPTNAGGTLTYEGRFEILSLSGSFMPTENGGTKGRAGGMSISLAGPNGNIFGGGLAGMLIAAGPVQVVMGSFIVMHQAEQNQKKKPRVMEAFAPPQPQAPPQLQQQQPPTFTITTVNSTSPSVNTVEEQKPQAYGGGIVRPMAQMPSSFQNDNSTMNNFTPAYHGYGNMNTGTTHKEEHEDEDGGDDDDDSGDTRSQSHSG

SEQ ID NO: 72979 - protein, 230 aa, Arabidopsis thaliana
  peptide (1)..(230): Ceres Seq. ID no. 4952956
MKVMPYSQQGSRAICILSATGSISNVTLGQPTNAGGTLTYEGRFEILSLSGSFMPTENGGTKGRAGGMSISLAGPNGNIFGGGLAGMLIAAGPVQVVMGSFIVMHQAEQNQKKKPRVMEAFAPPQPQAPPQLQQQQPPTFTITTVNSTSPSVNTVEEQKPQAYGGGIVRPMAQMPSSFQNDNSTMNNFTPAYHGYGNMNTGTTHKEEHEDEDGGDDDDDSGDTRSQSHSG

SEQ ID NO: 72980 - protein, 227 aa, Arabidopsis thaliana
  peptide (1)..(227): Ceres Seq. ID no. 4952957
MPYSQQGSRAICILSATGSISNVTLGQPTNAGGTLTYEGRFEILSLSGSFMPTENGGTKGRAGGMSISLAGPNGNIFGGGLAGMLIAAGPVQVVMGSFIVMHQAEQNQKKKPRVMEAFAPPQPQAPPQLQQQQPPTFTITTVNSTSPSVNTVEEQKPQAYGGGIVRPMAQMPSSFQNDNSTMNNFTPAYHGYGNMNTGTTHKEEHEDEDGGDDDDDSGDTRSQSHSG

SEQ ID NO: 72981 - DNA, 1770 bp, Arabidopsis thaliana
  misc_feature (1)..(1770): Ceres Seq. ID no. 4953063
  misc_feature (1)..(1770): Ortholog of  Ceres SEQ ID NO 12613725 as cited in SEQ ID NO 68196
atgtccacaaactatactgccattaatcatatacttcactttcattctccaaacagctgtttcttgatgatcatgtctctggagtttgaacaaatggatgaagcaaacaggttaagcgcgtggaatggttacgtagactggcgaagtagacctgcgttgcgtggccgccatggcggtatgcttgctgcctcgttcgtcttggttgtggaagtgttggagaaccttgcgtttttagcaaacgcgagcaacctagtgctgtatttgtcaacaaagatgggattttcgccgtccggagccgcaaatgccgtaaccgcttttatgggaacggcatttttcttggcccttctcggagggtttttggcagacgccttcttcactactttccatatctatttagtcagcgccgccatagaattcttgggcttgatggtactgacggtccaagcccacgagcactctaccgagccatggtctcgtgtatttctatttgtgggtctatatttagtagctcttggtgtcggaggaataaaaggctcgttgccaccgcacggagcggaacagttcgacgaagaaacatcgagtgggaggagacaaagatctttcttctttaactacttcatatttagcctctcgtgcggtgccttgatagccgtcacggtcgtggtctggctcgaagacaacaaaggctggtcttatggcttcggtgtctccacagccgcgatcctgatctcggtcccggttttcttggccggttctcgcgtttatcgcctcaaggttcctagtggaagtccaatcacgactctgttcaaagtgttaaccgctgctttatacgctaaatataagaaaagaagaacttcaagaattgttgtaacgtgtcacacaagaaatgattgtgatgacagcgtaaccaaacaaaactgtgacggagatgatggatttctcggatctttcctaggtgaagttgtgagagagcgtgaatcactaccacgtccactccgttgtacggaagagcaagtcaaagatgtgaagatagtcatcaagatcctacctattttcatgtctaccattatgcttaactgttgtctagctcagctctcgacgttttccgttcaacaagcttccacaatgaacacaaagctcgggtcctttactgtcccacccgcggcattaccagtttttccagtggtcttcatgatgatcttagctccgacctataaccacctcctcctccctctagcgagaaaatcaacaaaaaccgaaaccggcataacccaccttcaacgcatcggaacagggctagtcctttccatagtcgcaatggcggtggcagccttagtggaaacaaaacgcaagcacgtcgttgttagttgctgctcaaacaacaactcatcttcttattcttcttcgccgcttcctataacgtttctttgggtggctattcaatatgtgtttctcggatcagccgatctattcactctagccggtatgatggagtttttcttcaccgaagctccttctaccatgcgttcccttgcaacctcgctctcatgggcgtctcttgcgatgggatattactttagctctgttctcgtctcggctgttaatttcgtaacaggcttaaaccatcacaatccatggcttttgggggagaatctaaatcagtaccatctcgagagattctactggctcatgtgtgtgcttagtgggattaatttcttgcattatctcttttgggctagtcgttatgtgtaccggtcgaaccaagggtaa

SEQ ID NO: 72982 - protein, 589 aa, Arabidopsis thaliana
  peptide (1)..(589): Ceres Seq. ID no. 4953064
MSTNYTAINHILHFHSPNSCFLMIMSLEFEQMDEANRLSAWNGYVDWRSRPALRGRHGGMLAASFVLVVEVLENLAFLANASNLVLYLSTKMGFSPSGAANAVTAFMGTAFFLALLGGFLADAFFTTFHIYLVSAAIEFLGLMVLTVQAHEHSTEPWSRVFLFVGLYLVALGVGGIKGSLPPHGAEQFDEETSSGRRQRSFFFNYFIFSLSCGALIAVTVVVWLEDNKGWSYGFGVSTAAILISVPVFLAGSRVYRLKVPSGSPITTLFKVLTAALYAKYKKRRTSRIVVTCHTRNDCDDSVTKQNCDGDDGFLGSFLGEVVRERESLPRPLRCTEEQVKDVKIVIKILPIFMSTIMLNCCLAQLSTFSVQQASTMNTKLGSFTVPPAALPVFPVVFMMILAPTYNHLLLPLARKSTKTETGITHLQRIGTGLVLSIVAMAVAALVETKRKHVVVSCCSNNNSSSYSSSPLPITFLWVAIQYVFLGSADLFTLAGMMEFFFTEAPSTMRSLATSLSWASLAMGYYFSSVLVSAVNFVTGLNHHNPWLLGENLNQYHLERFYWLMCVLSGINFLHYLFWASRYVYRSNQG

SEQ ID NO: 72983 - protein, 567 aa, Arabidopsis thaliana
  peptide (1)..(567): Ceres Seq. ID no. 4953065
MIMSLEFEQMDEANRLSAWNGYVDWRSRPALRGRHGGMLAASFVLVVEVLENLAFLANASNLVLYLSTKMGFSPSGAANAVTAFMGTAFFLALLGGFLADAFFTTFHIYLVSAAIEFLGLMVLTVQAHEHSTEPWSRVFLFVGLYLVALGVGGIKGSLPPHGAEQFDEETSSGRRQRSFFFNYFIFSLSCGALIAVTVVVWLEDNKGWSYGFGVSTAAILISVPVFLAGSRVYRLKVPSGSPITTLFKVLTAALYAKYKKRRTSRIVVTCHTRNDCDDSVTKQNCDGDDGFLGSFLGEVVRERESLPRPLRCTEEQVKDVKIVIKILPIFMSTIMLNCCLAQLSTFSVQQASTMNTKLGSFTVPPAALPVFPVVFMMILAPTYNHLLLPLARKSTKTETGITHLQRIGTGLVLSIVAMAVAALVETKRKHVVVSCCSNNNSSSYSSSPLPITFLWVAIQYVFLGSADLFTLAGMMEFFFTEAPSTMRSLATSLSWASLAMGYYFSSVLVSAVNFVTGLNHHNPWLLGENLNQYHLERFYWLMCVLSGINFLHYLFWASRYVYRSNQG

SEQ ID NO: 72984 - protein, 565 aa, Arabidopsis thaliana
  peptide (1)..(565): Ceres Seq. ID no. 4953066
MSLEFEQMDEANRLSAWNGYVDWRSRPALRGRHGGMLAASFVLVVEVLENLAFLANASNLVLYLSTKMGFSPSGAANAVTAFMGTAFFLALLGGFLADAFFTTFHIYLVSAAIEFLGLMVLTVQAHEHSTEPWSRVFLFVGLYLVALGVGGIKGSLPPHGAEQFDEETSSGRRQRSFFFNYFIFSLSCGALIAVTVVVWLEDNKGWSYGFGVSTAAILISVPVFLAGSRVYRLKVPSGSPITTLFKVLTAALYAKYKKRRTSRIVVTCHTRNDCDDSVTKQNCDGDDGFLGSFLGEVVRERESLPRPLRCTEEQVKDVKIVIKILPIFMSTIMLNCCLAQLSTFSVQQASTMNTKLGSFTVPPAALPVFPVVFMMILAPTYNHLLLPLARKSTKTETGITHLQRIGTGLVLSIVAMAVAALVETKRKHVVVSCCSNNNSSSYSSSPLPITFLWVAIQYVFLGSADLFTLAGMMEFFFTEAPSTMRSLATSLSWASLAMGYYFSSVLVSAVNFVTGLNHHNPWLLGENLNQYHLERFYWLMCVLSGINFLHYLFWASRYVYRSNQG

SEQ ID NO: 72985 - DNA, 993 bp, Arabidopsis thaliana
  misc_feature (1)..(993): Ceres Seq. ID no. 4953277
  misc_feature (1)..(993): Ortholog of  Ceres SEQ ID NO 15224454 as cited in SEQ ID NO 0
atggagatcatgcgtccaggggtctcagaaaacactttgaaaggaaaaataagaatcacaacgcggtgcatgtggcttgacaaaggaagacttttagatgcacttcacaaagcagctcatgctgctctatcaagttgtcctgtgacatgtcccttgtctcacatggaaagaacagtctccgaagtcctgaggaagattgtaaggaagtacagtggtaaaaggcctgaagtcatcgctatagccactgagaatccaatggctgtccgagctgatgaggtcagtgcgagactgtctggtgatccaagtgttggttctggagttgcagctttaaggaaagttgttgaaggaaatgacaaaagaagtcgggcgaagaaagcaccttcacaagaagcttcccccaaagaagtagatcgcactttggaagatgatatcattgatagtgcaagactactggctgaagaagaaactgcggcatcaacatacacggaagaagttgatacgcccgttgggagttcttcagaagagtcagacgatttttggaaatcattcatcaatccatcatcgtcaccttcaccgagtgaaacagaaaatatgaataaggtagctgatacggagcctaaagcagagggtaaggaaaacagcagagacgacgatgaattagctgatgcttcagattctgaaaccaagtcatcaccaaaacgtgtgaggaagaacaaatggaaaccggaggagataaagaaggtaatcagaatgcgaggagagctgcacagtagatttcaagtggtgaaaggtagaatggcattgtgggaagagatctcttcaaatctatcagctgaaggaatcaatcgaagcccgggacaatgcaaatctctctgggcatcacttattcagaaatacgaggagagcaaggctgatgagagaagcaagacgagttggccacattttgaggatatgaacaacattttgtcagagctaggcacacctgcgtcttaa

SEQ ID NO: 72986 - protein, 330 aa, Arabidopsis thaliana
  peptide (1)..(330): Ceres Seq. ID no. 4953278
MEIMRPGVSENTLKGKIRITTRCMWLDKGRLLDALHKAAHAALSSCPVTCPLSHMERTVSEVLRKIVRKYSGKRPEVIAIATENPMAVRADEVSARLSGDPSVGSGVAALRKVVEGNDKRSRAKKAPSQEASPKEVDRTLEDDIIDSARLLAEEETAASTYTEEVDTPVGSSSEESDDFWKSFINPSSSPSPSETENMNKVADTEPKAEGKENSRDDDELADASDSETKSSPKRVRKNKWKPEEIKKVIRMRGELHSRFQVVKGRMALWEEISSNLSAEGINRSPGQCKSLWASLIQKYEESKADERSKTSWPHFEDMNNILSELGTPAS

SEQ ID NO: 72987 - protein, 327 aa, Arabidopsis thaliana
  peptide (1)..(327): Ceres Seq. ID no. 4953279
MRPGVSENTLKGKIRITTRCMWLDKGRLLDALHKAAHAALSSCPVTCPLSHMERTVSEVLRKIVRKYSGKRPEVIAIATENPMAVRADEVSARLSGDPSVGSGVAALRKVVEGNDKRSRAKKAPSQEASPKEVDRTLEDDIIDSARLLAEEETAASTYTEEVDTPVGSSSEESDDFWKSFINPSSSPSPSETENMNKVADTEPKAEGKENSRDDDELADASDSETKSSPKRVRKNKWKPEEIKKVIRMRGELHSRFQVVKGRMALWEEISSNLSAEGINRSPGQCKSLWASLIQKYEESKADERSKTSWPHFEDMNNILSELGTPAS

SEQ ID NO: 72988 - protein, 307 aa, Arabidopsis thaliana
  peptide (1)..(307): Ceres Seq. ID no. 4953280
MWLDKGRLLDALHKAAHAALSSCPVTCPLSHMERTVSEVLRKIVRKYSGKRPEVIAIATENPMAVRADEVSARLSGDPSVGSGVAALRKVVEGNDKRSRAKKAPSQEASPKEVDRTLEDDIIDSARLLAEEETAASTYTEEVDTPVGSSSEESDDFWKSFINPSSSPSPSETENMNKVADTEPKAEGKENSRDDDELADASDSETKSSPKRVRKNKWKPEEIKKVIRMRGELHSRFQVVKGRMALWEEISSNLSAEGINRSPGQCKSLWASLIQKYEESKADERSKTSWPHFEDMNNILSELGTPAS

SEQ ID NO: 72989 - DNA, 1032 bp, Arabidopsis thaliana
  misc_feature (1)..(1032): Ceres Seq. ID no. 4953346
  misc_feature (1)..(1032): Ortholog of  Ceres SEQ ID NO 15170945 as cited in SEQ ID NO 55162
atgagagataatgtaaacgatgaattgaagcaagttcgatctgatgatcaaacgaaaaggaagatgctcgaaattttgaaaaggtttcacgaagaagaagaggaagatgatgggggaattgatagcatcacggatgatgaaggtttgagcttaccggaggagattattcagaagataatgaacggagatgaagtgagtcttgatgatttgagcttagaagagagaaaaggattccaaagagccttagcttctggagaattaagcaaaatgatccaaccatgggatccttggtggttacttgcttcagctcgaacgatcaatcttggactcggaggtacacaacttgttcaatgcgttgaagacgaagaagagaccacagttgtgagtgaaatcccacgagggcctgatacacctttgatctcactaagcaagcttacctccacgaatccatctcctctcttaccaatccatttgattgacattgcatatagttattgctttacgctccgtatctataatggagagtggcaatctgattcgcttggtgcagcaacaatggtgttgactgtttcatcagttttgggtcacaatggacaaccagagaccataaaggaagtgttgtccttttgcttggaacagacatgctcttcagcttataaaaaccttggtggtggtctgaagttcggattgaatctggtggatgatgtgatttgttttctttctcttggctctggagctatggtatgtctgctcggtgatctccaaaggttgattcttggtgcaataaaggaagtaaaatcatcatcagggcgtgatctgaagaagaaactaaagcttgcagagaggaaagtgttctacatgatgtgttgggtcaatgagcagaattctgaagtatgggaagctctggaaccatctgtaagggcagagaagaactcggtggttgagctcaacgattacagagggtttccagaaatgaagaagaaagatcaatttcgaaaaggtggtggcgtggtgattgaggagatagaatga

SEQ ID NO: 72990 - protein, 343 aa, Arabidopsis thaliana
  peptide (1)..(343): Ceres Seq. ID no. 4953347
MRDNVNDELKQVRSDDQTKRKMLEILKRFHEEEEEDDGGIDSITDDEGLSLPEEIIQKIMNGDEVSLDDLSLEERKGFQRALASGELSKMIQPWDPWWLLASARTINLGLGGTQLVQCVEDEEETTVVSEIPRGPDTPLISLSKLTSTNPSPLLPIHLIDIAYSYCFTLRIYNGEWQSDSLGAATMVLTVSSVLGHNGQPETIKEVLSFCLEQTCSSAYKNLGGGLKFGLNLVDDVICFLSLGSGAMVCLLGDLQRLILGAIKEVKSSSGRDLKKKLKLAERKVFYMMCWVNEQNSEVWEALEPSVRAEKNSVVELNDYRGFPEMKKKDQFRKGGGVVIEEIE

SEQ ID NO: 72991 - protein, 322 aa, Arabidopsis thaliana
  peptide (1)..(322): Ceres Seq. ID no. 4953348
MLEILKRFHEEEEEDDGGIDSITDDEGLSLPEEIIQKIMNGDEVSLDDLSLEERKGFQRALASGELSKMIQPWDPWWLLASARTINLGLGGTQLVQCVEDEEETTVVSEIPRGPDTPLISLSKLTSTNPSPLLPIHLIDIAYSYCFTLRIYNGEWQSDSLGAATMVLTVSSVLGHNGQPETIKEVLSFCLEQTCSSAYKNLGGGLKFGLNLVDDVICFLSLGSGAMVCLLGDLQRLILGAIKEVKSSSGRDLKKKLKLAERKVFYMMCWVNEQNSEVWEALEPSVRAEKNSVVELNDYRGFPEMKKKDQFRKGGGVVIEEIE

SEQ ID NO: 72992 - protein, 284 aa, Arabidopsis thaliana
  peptide (1)..(284): Ceres Seq. ID no. 4953349
MNGDEVSLDDLSLEERKGFQRALASGELSKMIQPWDPWWLLASARTINLGLGGTQLVQCVEDEEETTVVSEIPRGPDTPLISLSKLTSTNPSPLLPIHLIDIAYSYCFTLRIYNGEWQSDSLGAATMVLTVSSVLGHNGQPETIKEVLSFCLEQTCSSAYKNLGGGLKFGLNLVDDVICFLSLGSGAMVCLLGDLQRLILGAIKEVKSSSGRDLKKKLKLAERKVFYMMCWVNEQNSEVWEALEPSVRAEKNSVVELNDYRGFPEMKKKDQFRKGGGVVIEEIE

SEQ ID NO: 72993 - DNA, 1221 bp, Arabidopsis thaliana
  misc_feature (1)..(1221): Ceres Seq. ID no. 4953444
  misc_feature (1)..(1221): Ortholog of  Ceres SEQ ID NO 15170945 as cited in SEQ ID NO 55162
atgatgccggagaagacgattatttcgtcggagagttcaaattcgtctccgttaaacccttcttctacgcggattatctgccatgtatgtaataagcagttctcgcagtacacttgtcctcgctgcaacttccggtactgttcccttccttgttacaaatctcacagtgtccaatgtactgaatcattcatgagagataatgtaaacgatgaattgaagcaagttcgatctgatgatcaaacgaaaaggaagatgctcgaaattttgaaaaggtttcacgaagaagaagaggaagatgatgggggaattgatagcatcacggatgatgaaggtttgagcttaccggaggagattattcagaagataatgaacggagatgaagtgagtcttgatgatttgagcttagaagagagaaaaggattccaaagagccttagcttctggagaattaagcaaaatgatccaaccatgggatccttggtggttacttgcttcagctcgaacgatcaatcttggactcggaggtacacaacttgttcaatgcgttgaagacgaagaagagaccacagttgtgagtgaaatcccacgagggcctgatacacctttgatctcactaagcaagcttacctccacgaatccatctcctctcttaccaatccatttgattgacattgcatatagttattgctttacgctccgtatctataatggagagtggcaatctgattcgcttggtgcagcaacaatggtgttgactgtttcatcagttttgggtcacaatggacaaccagagaccataaaggaagtgttgtccttttgcttggaacagacatgctcttcagcttataaaaaccttggtggtggtctgaagttcggattgaatctggtggatgatgtgatttgttttctttctcttggctctggagctatggtatgtctgctcggtgatctccaaaggttgattcttggtgcaataaaggaagtaaaatcatcatcagggcgtgatctgaagaagaaactaaagcttgcagagaggaaagtgttctacatgatgtgttgggtcaatgagcagaattctgaagtatgggaagctctggaaccatctgtaagggcagagaagaactcggtggttgagctcaacgattacagagggtttccagaaatgaagaagaaagatcaatttcgaaaaggtggtggcgtggtgattgaggagatagaatga

SEQ ID NO: 72994 - protein, 406 aa, Arabidopsis thaliana
  peptide (1)..(406): Ceres Seq. ID no. 4953445
MMPEKTIISSESSNSSPLNPSSTRIICHVCNKQFSQYTCPRCNFRYCSLPCYKSHSVQCTESFMRDNVNDELKQVRSDDQTKRKMLEILKRFHEEEEEDDGGIDSITDDEGLSLPEEIIQKIMNGDEVSLDDLSLEERKGFQRALASGELSKMIQPWDPWWLLASARTINLGLGGTQLVQCVEDEEETTVVSEIPRGPDTPLISLSKLTSTNPSPLLPIHLIDIAYSYCFTLRIYNGEWQSDSLGAATMVLTVSSVLGHNGQPETIKEVLSFCLEQTCSSAYKNLGGGLKFGLNLVDDVICFLSLGSGAMVCLLGDLQRLILGAIKEVKSSSGRDLKKKLKLAERKVFYMMCWVNEQNSEVWEALEPSVRAEKNSVVELNDYRGFPEMKKKDQFRKGGGVVIEEIE

SEQ ID NO: 72995 - protein, 405 aa, Arabidopsis thaliana
  peptide (1)..(405): Ceres Seq. ID no. 4953446
MPEKTIISSESSNSSPLNPSSTRIICHVCNKQFSQYTCPRCNFRYCSLPCYKSHSVQCTESFMRDNVNDELKQVRSDDQTKRKMLEILKRFHEEEEEDDGGIDSITDDEGLSLPEEIIQKIMNGDEVSLDDLSLEERKGFQRALASGELSKMIQPWDPWWLLASARTINLGLGGTQLVQCVEDEEETTVVSEIPRGPDTPLISLSKLTSTNPSPLLPIHLIDIAYSYCFTLRIYNGEWQSDSLGAATMVLTVSSVLGHNGQPETIKEVLSFCLEQTCSSAYKNLGGGLKFGLNLVDDVICFLSLGSGAMVCLLGDLQRLILGAIKEVKSSSGRDLKKKLKLAERKVFYMMCWVNEQNSEVWEALEPSVRAEKNSVVELNDYRGFPEMKKKDQFRKGGGVVIEEIE

SEQ ID NO: 72996 - protein, 343 aa, Arabidopsis thaliana; identical to SEQ ID NO: 72990
  peptide (1)..(343): Ceres Seq. ID no. 4953447

SEQ ID NO: 72997 - DNA, 1098 bp, Arabidopsis thaliana
  misc_feature (1)..(1098): Ceres Seq. ID no. 4953452
  misc_feature (1)..(1098): Ortholog of  Ceres SEQ ID NO 13596216 as cited in SEQ ID NO 68515
atgggtaaagagaatcagttggagacaacaaattgtggagtcaatgatcacgattgtccacccgtcaagaacgaggaactagcagctgaggcgcgttatagtacagacagtgactcgggtttgccaacctgtcgtgtatgccattctgcagaatccgacagacgaggagataccgccttggggtttttggggattacccctccggttccagaagctcgtaaaagcaatgtagatggaaccgctgatgatgtcagcaaagctacagagtctgagctgaagaattctgttgtcaaaagcaatggaagggaatctggcttcatcgaattaacaagtcctgatgcggaagttttcatttgcacaaatgatatagaaatgggaatccagcagcatcaggatgcattgcttgagcttggatgttcttgcaaaaacgagcttgctttggtacactacgcttgcgcgctcaagtggtttctcaaccatggatccaccgtgtgtgaaatctgtggacatcctgcagaaaatataaagactgctgatttcaacaaagtggtcattgccttgagagattacacagcaataagagaaagaactgctgatggaggagatcaaatccctgtattaccggtgaatacagattcaaccattgattcagatgaagttgctgtcattcgaaggcaacgacttagtgagataacgtcatggtttggtccccattccctgaacaacaacaacaacaacaatagttctgttgcggctatccctgaccaacctttaggtgttgtgaacttcgacatcttacctatggaaaaccgtgcaactaaatgggctgtggaaggtactgggattctacttgctacaggtttactcactgttactttggtctggctcattgcccctcgtgttggaaaggtatgccatcgatctaaccttgtatatctaagcctctctgactggtatatcgataacgtttatttggttaacggttgttttgaatttgtacagaaaactgctaggagcggacttcacatacttcttggtggtctctgtgctttaacaatagtcatcttcttcagatttgtaagtaaatctctcaagtga

SEQ ID NO: 72998 - protein, 365 aa, Arabidopsis thaliana
  peptide (1)..(365): Ceres Seq. ID no. 4953453
MGKENQLETTNCGVNDHDCPPVKNEELAAEARYSTDSDSGLPTCRVCHSAESDRRGDTALGFLGITPPVPEARKSNVDGTADDVSKATESELKNSVVKSNGRESGFIELTSPDAEVFICTNDIEMGIQQHQDALLELGCSCKNELALVHYACALKWFLNHGSTVCEICGHPAENIKTADFNKVVIALRDYTAIRERTADGGDQIPVLPVNTDSTIDSDEVAVIRRQRLSEITSWFGPHSLNNNNNNNSSVAAIPDQPLGVVNFDILPMENRATKWAVEGTGILLATGLLTVTLVWLIAPRVGKVCHRSNLVYLSLSDWYIDNVYLVNGCFEFVQKTARSGLHILLGGLCALTIVIFFRFVSKSLK

SEQ ID NO: 72999 - protein, 241 aa, Arabidopsis thaliana
  peptide (1)..(241): Ceres Seq. ID no. 4953454
MGIQQHQDALLELGCSCKNELALVHYACALKWFLNHGSTVCEICGHPAENIKTADFNKVVIALRDYTAIRERTADGGDQIPVLPVNTDSTIDSDEVAVIRRQRLSEITSWFGPHSLNNNNNNNSSVAAIPDQPLGVVNFDILPMENRATKWAVEGTGILLATGLLTVTLVWLIAPRVGKVCHRSNLVYLSLSDWYIDNVYLVNGCFEFVQKTARSGLHILLGGLCALTIVIFFRFVSKSLK

SEQ ID NO: 73000 - DNA, 2616 bp, Arabidopsis thaliana
  misc_feature (1)..(2616): Ceres Seq. ID no. 4953518
  misc_feature (1)..(2616): Ortholog of  Ceres SEQ ID NO 13595870 as cited in SEQ ID NO 62101
  misc_feature (1)..(2616): Ortholog of  Ceres SEQ ID NO 13590241 as cited in SEQ ID NO 63878
  misc_feature (1)..(2616): Ortholog of  Ceres SEQ ID NO 13657939 as cited in SEQ ID NO 66349
atgacgttttatatctcgagctcgttaactccaacccatttctcgaaacccttaaacccttctaataccctcttccccagtcaatttcgaggttctctgtctagtttcgtccgtcgaagaaaaccaacggaagctaaattaagctccaaattcaatctttttccttcacgaagaaatggtttgattacttgttgcagtacatcgagctttgagtctactgagtcttcagtttcacaggaagaagatgctgagtccaatcgtctatttgagaagttacgagaaactgaaagagaacgacttagcaacatggaagagctcgagagaaaggctaatgtacaattagaaaggcagcttgttatggcatcagattggagtagaacattgttaaccatgcgtggcaagttaaaaggaacagaatgggatcctgaaacctctcaccgtatcaattttagtgattttatgaagctcttagattccaacagtgttcaatacatggaatattcaaattacggacagacgatatcagtgatattgccttattataaagatggggagcccctaggagaagaagaagattcgaaaaaggagataattttccgtcgtcacattgtggaccgaatgccaattgatggttggaatgatgtatggaagaagttgcatcagcagatagtaaacgtagaggttttcaatgtagatgtggttccagctgaagtctatactacagttgccacttttgtggtttggtctatgagacttgccctctttgtttcgctttatgtttggatcgacagtatcacgaggccaatctatgccaaactaatcccttgtgatctcggaacccctaccaaaaagataaggcagcccctcaagcgccaagcactcggttccctaggcaagagtcgggcaaaatttatatcagcagaggagaaaactggtgttacttttgatgattttgcgggtcaggagtatataaagagggaattacaagaaattgtgcgaattttaaagaatgatgaggaatttcagaataaaggcatttattgtccgaaaggtgttctgcttcatggacctcccggaacggggaaaactttgttagccaaagctattgctggagaagctggtttacctttcttcgcggcaaatggaaccgactttgttgagatgtttgtaggagtggctgcatctcgtgttaaagatctttttgctagctctcggtcatatgcgccatctataatcttcattgatgagattgatgcaattggaagtaagcgaggtggacccgatattggcgggggaggagcagagagagaacaaggtttgcttcaaatattgactgagatggatggatttaaagttactacatcacaagtattagtcataggtgcaacaaatagattagatatccttgatcctgctctattgagaaaaggtcgttttgacaaaatcataagagttggtttaccgtcaaaagatggtagattggcgatattaaaggtacatgctagaaataaattctttcgatctgaggatgagaaggaggagttgctgcaagaagtagctgagaacacggaagattttaccggagcagaactgcaaaacgttctaaatgaagctggaatcttgacagctagaaaagatttggattacattggaagagaagaactccttgaggcgcttaagcggcaaaaagggacatttgagactggacaagaagatagtactgaagttccagaggaactgaagttgagattggcttaccgagaagcagctgttgctgttcttgcttgttatctcccagatcaatatcgtccaatcagcgagactgacataaactcgattagaagccaaccaaatatgcgttactctgaaacttcaggaagagtttttgcgagaaagtcagattatgtgaactcaataatccgtgcatgtgctcctagagtagttgaagaagagatgtttggaatagaaaacctgtgttggatctctgctaagtctactttagaagcttcacagcgagcggaatttctgattcttcagacgggaatgactgcttttggaaaagcttattaccgaaaccaaagagacctcgttcctaatcttgttccgaaacttgaggcattacgcgatgagtacatgaggtttgctgttgagaaatgctcatcaatcttacaagagtatcaatcagcccttgaagaaatcacagatatcaccatacactcaacaatcttaaagagtgtaataatattttcagatgtgcttcttgagaaaggagaaatcaaagccgatgaaatctggaacatttacaacacagctccaaggattcctcaaaaacccgtgagacctgtcgatgagtatggagctttaatctatgcgggaagatggggaattcacggtgtatcgcttcctggaagagtaacattttcaccaggaaacattggttttgcaacatttggagctcctcgtcccatggagacacaaatcatcagcgatgacacatggaaactagtggatgagatttgggataaaaaggttgaagaaatcaaagcagaagctgttattcaaattgaagaagaaaagaagaaacctcagattttgatggcaacccatttcttttaa

SEQ ID NO: 73001 - protein, 871 aa, Arabidopsis thaliana
  peptide (1)..(871): Ceres Seq. ID no. 4953519
MTFYISSSLTPTHFSKPLNPSNTLFPSQFRGSLSSFVRRRKPTEAKLSSKFNLFPSRRNGLITCCSTSSFESTESSVSQEEDAESNRLFEKLRETERERLSNMEELERKANVQLERQLVMASDWSRTLLTMRGKLKGTEWDPETSHRINFSDFMKLLDSNSVQYMEYSNYGQTISVILPYYKDGEPLGEEEDSKKEIIFRRHIVDRMPIDGWNDVWKKLHQQIVNVEVFNVDVVPAEVYTTVATFVVWSMRLALFVSLYVWIDSITRPIYAKLIPCDLGTPTKKIRQPLKRQALGSLGKSRAKFISAEEKTGVTFDDFAGQEYIKRELQEIVRILKNDEEFQNKGIYCPKGVLLHGPPGTGKTLLAKAIAGEAGLPFFAANGTDFVEMFVGVAASRVKDLFASSRSYAPSIIFIDEIDAIGSKRGGPDIGGGGAEREQGLLQILTEMDGFKVTTSQVLVIGATNRLDILDPALLRKGRFDKIIRVGLPSKDGRLAILKVHARNKFFRSEDEKEELLQEVAENTEDFTGAELQNVLNEAGILTARKDLDYIGREELLEALKRQKGTFETGQEDSTEVPEELKLRLAYREAAVAVLACYLPDQYRPISETDINSIRSQPNMRYSETSGRVFARKSDYVNSIIRACAPRVVEEEMFGIENLCWISAKSTLEASQRAEFLILQTGMTAFGKAYYRNQRDLVPNLVPKLEALRDEYMRFAVEKCSSILQEYQSALEEITDITIHSTILKSVIIFSDVLLEKGEIKADEIWNIYNTAPRIPQKPVRPVDEYGALIYAGRWGIHGVSLPGRVTFSPGNIGFATFGAPRPMETQIISDDTWKLVDEIWDKKVEEIKAEAVIQIEEEKKKPQILMATHFF

SEQ ID NO: 73002 - protein, 769 aa, Arabidopsis thaliana
  peptide (1)..(769): Ceres Seq. ID no. 4953520
MEELERKANVQLERQLVMASDWSRTLLTMRGKLKGTEWDPETSHRINFSDFMKLLDSNSVQYMEYSNYGQTISVILPYYKDGEPLGEEEDSKKEIIFRRHIVDRMPIDGWNDVWKKLHQQIVNVEVFNVDVVPAEVYTTVATFVVWSMRLALFVSLYVWIDSITRPIYAKLIPCDLGTPTKKIRQPLKRQALGSLGKSRAKFISAEEKTGVTFDDFAGQEYIKRELQEIVRILKNDEEFQNKGIYCPKGVLLHGPPGTGKTLLAKAIAGEAGLPFFAANGTDFVEMFVGVAASRVKDLFASSRSYAPSIIFIDEIDAIGSKRGGPDIGGGGAEREQGLLQILTEMDGFKVTTSQVLVIGATNRLDILDPALLRKGRFDKIIRVGLPSKDGRLAILKVHARNKFFRSEDEKEELLQEVAENTEDFTGAELQNVLNEAGILTARKDLDYIGREELLEALKRQKGTFETGQEDSTEVPEELKLRLAYREAAVAVLACYLPDQYRPISETDINSIRSQPNMRYSETSGRVFARKSDYVNSIIRACAPRVVEEEMFGIENLCWISAKSTLEASQRAEFLILQTGMTAFGKAYYRNQRDLVPNLVPKLEALRDEYMRFAVEKCSSILQEYQSALEEITDITIHSTILKSVIIFSDVLLEKGEIKADEIWNIYNTAPRIPQKPVRPVDEYGALIYAGRWGIHGVSLPGRVTFSPGNIGFATFGAPRPMETQIISDDTWKLVDEIWDKKVEEIKAEAVIQIEEEKKKPQILMATHFF

SEQ ID NO: 73003 - protein, 752 aa, Arabidopsis thaliana
  peptide (1)..(752): Ceres Seq. ID no. 4953521
MASDWSRTLLTMRGKLKGTEWDPETSHRINFSDFMKLLDSNSVQYMEYSNYGQTISVILPYYKDGEPLGEEEDSKKEIIFRRHIVDRMPIDGWNDVWKKLHQQIVNVEVFNVDVVPAEVYTTVATFVVWSMRLALFVSLYVWIDSITRPIYAKLIPCDLGTPTKKIRQPLKRQALGSLGKSRAKFISAEEKTGVTFDDFAGQEYIKRELQEIVRILKNDEEFQNKGIYCPKGVLLHGPPGTGKTLLAKAIAGEAGLPFFAANGTDFVEMFVGVAASRVKDLFASSRSYAPSIIFIDEIDAIGSKRGGPDIGGGGAEREQGLLQILTEMDGFKVTTSQVLVIGATNRLDILDPALLRKGRFDKIIRVGLPSKDGRLAILKVHARNKFFRSEDEKEELLQEVAENTEDFTGAELQNVLNEAGILTARKDLDYIGREELLEALKRQKGTFETGQEDSTEVPEELKLRLAYREAAVAVLACYLPDQYRPISETDINSIRSQPNMRYSETSGRVFARKSDYVNSIIRACAPRVVEEEMFGIENLCWISAKSTLEASQRAEFLILQTGMTAFGKAYYRNQRDLVPNLVPKLEALRDEYMRFAVEKCSSILQEYQSALEEITDITIHSTILKSVIIFSDVLLEKGEIKADEIWNIYNTAPRIPQKPVRPVDEYGALIYAGRWGIHGVSLPGRVTFSPGNIGFATFGAPRPMETQIISDDTWKLVDEIWDKKVEEIKAEAVIQIEEEKKKPQILMATHFF

SEQ ID NO: 73004 - DNA, 2028 bp, Arabidopsis thaliana
  misc_feature (1)..(2028): Ceres Seq. ID no. 4953705
  misc_feature (1)..(2028): Ortholog of  Ceres SEQ ID NO 13655640 as cited in SEQ ID NO 63844
atgctttatttcattttctgtcaaaatctttcttcttcctcctctatgtctaattcaatcttgttcctttcccttttcctcttcctcccttttgttgttgattcactttacttcaactttacaagttttcgacaaggtgatcccggggacatattttaccacggggatgcaactcccgatgaagatggaacagtgaacttcaacaacgctgaacaaacatctcaggttggttggattacttattcaaagaaggtgcctatatggagtcataaaactggtaaggcttcagatttcagcaccagtttctccttcaaaatcgatgctcgtaatctttcagcagatggtcatggaatctgtttctttcttgctcctatgggagctcaactacctgcatactcagttggtggtttcttgaatttgttcactcggaagaataattactcatcttcgtttccgctagttcatgttgaatttgacacgtttaacaatccaggatgggatcctaatgatgttggatctcatgttgggatcaataacaactctcttgtttcttccaactacacttcttggaatgcaagctctcacagccaagatatttgtcatgcaaagatctcttatgattccgtgaccaagaatttaagtgtgacttgggcttatgagctaacagcaacctctgatcctaaggagagttcaagcctttcttacatcatcgacctcgctaaggttctgccatcagatgttatgttcgggtttatagctgccgctgggacaaacacagaggaacatagacttttatcatgggagctcagttcaagtttggacagcgacaaagccgatagcaggataggactagtaattggcatttcggcttccgggtttgtttttctgacgtttatggtcatcacaaccgtggtggtttggtcacggaagcaaagaaagaagaaagaaagagatatagaaaacatgatatcgataaacaaagaccttgaaagggaagcaggaccaagaaagttttcttataaggatcttgtgtcagcaaccaacagattctcaagccatagaaagctaggtgaaggaggatttggagcagtttatgaaggaaacttgaaagaaatcaatacaatggttgcggtgaagaaactatccggtgattcaaggcagggaaagaacgagtttttaaacgaagttaagatcatcagcaaactgagacatcgaaacctcgtgcagctcatcggttggtgtaatgagaaaaatgagttcttgctgatatatgagttagttccaaatggtagcttgaactctcacctctttgggaaaagacccaatttactttcttgggacataaggtacaagataggtcttggtttagcctctgctctgctttatcttcatgaagaatgggatcaatgtgtactgcacagagacatcaaggcaagtaatataatgcttgacagtgaattcaatgtaaagttaggtgatttcgggttggctcggctaatgaaccatgaacttggttcccatacaacggggttggctggaacttttgggtacatggcacctgaatatgtaatgaaaggaagtgcgagtaaagaatctgatatatatagctttggaattgttttactagagattgtcacagggagaaaatcgctggaacgtacacaagaagataacagtgatacagagagtgatgatgagaagagtctagtggagaaagtttgggagctttatggaaaacaagaactgatcacttcatgtgttgatgacaaattgggtgaggatttcgacaagaaagaagctgaatgtcttctggttttagggttatggtgtgctcatcctgataaaaactcgagaccttcgataaaacaagggatccaagtcatgaattttgagtcaccattgcctgatcttccattgaagaggcctgttgctatgtattacatctcgactactacttcttcttcttctccctcagttaactcaaatggagtttctgtaacgttctcaggcatcgagtatggtcgttaa

SEQ ID NO: 73005 - protein, 675 aa, Arabidopsis thaliana
  peptide (1)..(675): Ceres Seq. ID no. 4953706
MLYFIFCQNLSSSSSMSNSILFLSLFLFLPFVVDSLYFNFTSFRQGDPGDIFYHGDATPDEDGTVNFNNAEQTSQVGWITYSKKVPIWSHKTGKASDFSTSFSFKIDARNLSADGHGICFFLAPMGAQLPAYSVGGFLNLFTRKNNYSSSFPLVHVEFDTFNNPGWDPNDVGSHVGINNNSLVSSNYTSWNASSHSQDICHAKISYDSVTKNLSVTWAYELTATSDPKESSSLSYIIDLAKVLPSDVMFGFIAAAGTNTEEHRLLSWELSSSLDSDKADSRIGLVIGISASGFVFLTFMVITTVVVWSRKQRKKKERDIENMISINKDLEREAGPRKFSYKDLVSATNRFSSHRKLGEGGFGAVYEGNLKEINTMVAVKKLSGDSRQGKNEFLNEVKIISKLRHRNLVQLIGWCNEKNEFLLIYELVPNGSLNSHLFGKRPNLLSWDIRYKIGLGLASALLYLHEEWDQCVLHRDIKASNIMLDSEFNVKLGDFGLARLMNHELGSHTTGLAGTFGYMAPEYVMKGSASKESDIYSFGIVLLEIVTGRKSLERTQEDNSDTESDDEKSLVEKVWELYGKQELITSCVDDKLGEDFDKKEAECLLVLGLWCAHPDKNSRPSIKQGIQVMNFESPLPDLPLKRPVAMYYISTTTSSSSPSVNSNGVSVTFSGIEYGR

SEQ ID NO: 73006 - protein, 660 aa, Arabidopsis thaliana
  peptide (1)..(660): Ceres Seq. ID no. 4953707
MSNSILFLSLFLFLPFVVDSLYFNFTSFRQGDPGDIFYHGDATPDEDGTVNFNNAEQTSQVGWITYSKKVPIWSHKTGKASDFSTSFSFKIDARNLSADGHGICFFLAPMGAQLPAYSVGGFLNLFTRKNNYSSSFPLVHVEFDTFNNPGWDPNDVGSHVGINNNSLVSSNYTSWNASSHSQDICHAKISYDSVTKNLSVTWAYELTATSDPKESSSLSYIIDLAKVLPSDVMFGFIAAAGTNTEEHRLLSWELSSSLDSDKADSRIGLVIGISASGFVFLTFMVITTVVVWSRKQRKKKERDIENMISINKDLEREAGPRKFSYKDLVSATNRFSSHRKLGEGGFGAVYEGNLKEINTMVAVKKLSGDSRQGKNEFLNEVKIISKLRHRNLVQLIGWCNEKNEFLLIYELVPNGSLNSHLFGKRPNLLSWDIRYKIGLGLASALLYLHEEWDQCVLHRDIKASNIMLDSEFNVKLGDFGLARLMNHELGSHTTGLAGTFGYMAPEYVMKGSASKESDIYSFGIVLLEIVTGRKSLERTQEDNSDTESDDEKSLVEKVWELYGKQELITSCVDDKLGEDFDKKEAECLLVLGLWCAHPDKNSRPSIKQGIQVMNFESPLPDLPLKRPVAMYYISTTTSSSSPSVNSNGVSVTFSGIEYGR

SEQ ID NO: 73007 - protein, 551 aa, Arabidopsis thaliana
  peptide (1)..(551): Ceres Seq. ID no. 4953708
MGAQLPAYSVGGFLNLFTRKNNYSSSFPLVHVEFDTFNNPGWDPNDVGSHVGINNNSLVSSNYTSWNASSHSQDICHAKISYDSVTKNLSVTWAYELTATSDPKESSSLSYIIDLAKVLPSDVMFGFIAAAGTNTEEHRLLSWELSSSLDSDKADSRIGLVIGISASGFVFLTFMVITTVVVWSRKQRKKKERDIENMISINKDLEREAGPRKFSYKDLVSATNRFSSHRKLGEGGFGAVYEGNLKEINTMVAVKKLSGDSRQGKNEFLNEVKIISKLRHRNLVQLIGWCNEKNEFLLIYELVPNGSLNSHLFGKRPNLLSWDIRYKIGLGLASALLYLHEEWDQCVLHRDIKASNIMLDSEFNVKLGDFGLARLMNHELGSHTTGLAGTFGYMAPEYVMKGSASKESDIYSFGIVLLEIVTGRKSLERTQEDNSDTESDDEKSLVEKVWELYGKQELITSCVDDKLGEDFDKKEAECLLVLGLWCAHPDKNSRPSIKQGIQVMNFESPLPDLPLKRPVAMYYISTTTSSSSPSVNSNGVSVTFSGIEYGR

SEQ ID NO: 73008 - DNA, 868 bp, Arabidopsis thaliana
  misc_feature (1)..(868): Ceres Seq. ID no. 4953740
  misc_feature (1)..(868): Ortholog of  Ceres SEQ ID NO 14307654 as cited in SEQ ID NO 54606
  misc_feature (1)..(868): Ortholog of  Ceres SEQ ID NO 15168370 as cited in SEQ ID NO 55687
  misc_feature (1)..(868): Ortholog of  Ceres SEQ ID NO 12620302 as cited in SEQ ID NO 65999
atctccgatttagatagaaacaacaatcctccggtggtcactcgctaatctccgtttgatctcgccgacactcgagccttttaccgatgaaggatggagattccttaccaataagcacttcttccgtcgcggcgacgacggtgaccggaaagaaggaaaccggttattccgctctcttctcgaaaggccggtacaagttttgggccttagctgcgattctgttactcgctttctggtcaatgctcactggcacggtcaatctccgttggtctgccggtaacattaaccatttcaccgacgatctcgtctttcccatccacgaggatctcgatgttcttgaaatggaggagagggagaaagtggtgaagcacatgtgggatgtgtataacaatggccgtcgtatcagattacctaggttttggcaagaggccttcgaggctgcttacgaggagcttaccagtgatgtacctgatgtggttgaggctgccatttccgagatcgctaggatgtctattcgctccattgttatagatccgcctccgcttcattccacgaatgtacgagaattgacaaagactctaaaacttgcggacaaaggaagagcaactcaaatatcaaaaccaagcagccgtcgattgaaatagctatggaggctttacgaaaaaggtagtgtagcagtcagccgtcgtggcgtgaccatacatatacttgatgtcagaaagatcaatcaacctcatccctagaatatatgtccatcattagtgttattttttcttccactaggggcattaatcctttcactatcatcatcatctcttctataaacaaaattttgaggaagctttttatccacaccttattagctctg

SEQ ID NO: 73009 - protein, 185 aa, Arabidopsis thaliana; identical to SEQ ID NO: 41028
  peptide (1)..(185): Ceres Seq. ID no. 4953741

SEQ ID NO: 73010 - protein, 134 aa, Arabidopsis thaliana; identical to SEQ ID NO: 41029
  peptide (1)..(134): Ceres Seq. ID no. 4953742

SEQ ID NO: 73011 - protein, 100 aa, Arabidopsis thaliana; identical to SEQ ID NO: 37003
  peptide (1)..(100): Ceres Seq. ID no. 4953743

SEQ ID NO: 73012 - DNA, 1314 bp, Arabidopsis thaliana
  misc_feature (1)..(1314): Ceres Seq. ID no. 4953786
  misc_feature (1)..(1314): Ortholog of  Ceres SEQ ID NO 14315275 as cited in SEQ ID NO 52556
  misc_feature (1)..(1314): Ortholog of  Ceres SEQ ID NO 13597260 as cited in SEQ ID NO 63885
atggcggattcaacaaccttatctacttttttcgatcattctcagactcagattccaaagctggaagatttcctcggtgattcctttgtccgttactctgataaccaaacagagacccaagactcttcttctctcactccattctacgatccacgtcaccgcaccgttgccgaaggagttacagggttcttctctgatcatcatcagccagatttcaagacgataaactcgggaccagaaatcttcgatgactcaacaacttccaacatcggtggtactcatctctccagtcacgtggtggagtcatcaacgacggcgaagttagggtttaacggtgattgcaccaccaccggaggagttttgtctctaggggttaacaacacatcagatcaacctttgagctgtaacaatggcgagagaggtggaaacagtaacaagaagaaaacagtttctaagaaggaaacatcagatgattcaaagaagaagattgtcgaaacattgggacaaagaacttcaatttatcgtggagtcacccgacatagatggactggaagatacgaagcgcatctatgggataacagctgtaggagggaaggtcaagccagaaaaggacgtcaaggtggatatgacaaggaagatagagcagctagagcctatgacttggcagctttaaaatactggggttctactgctactacaaattttccggtctcgagttattcaaaagaacttgaggaaatgaatcacatgaccaagcaagagtttattgcatctcttaggaggaaaagtagcggtttttcgagaggagcttcaatatatagaggtgtcacaaggcatcatcaacaaggtcgctggcaagcaagaatcggccgtgtcgcaggaaacaaagatctttacctcggaacctttgcaaccgaagaggaagcagcagaggcttatgacattgcagccataaagttcagaggaatcaacgcagtaactaactttgagatgaacaggtatgacattgaagctgtcatgaatagttctttacctgtaggaggagcagctgcgaaacgccacaaactcaaactcgctcttgaatctccttcttcatcatcctctgaccataacctccaacaacaacagttgcttccgtcctcttctccctcggatcaaaaccctaactcaatcccatgtggcattccatttgagccttcagttctctattaccaccagaacttctttcagcattatcctttggtctctgactctacaattcaagctcctatgaaccaagctgagtttttcttgtggcctaaccagtcttactaa

SEQ ID NO: 73013 - protein, 437 aa, Arabidopsis thaliana
  peptide (1)..(437): Ceres Seq. ID no. 4953787
MADSTTLSTFFDHSQTQIPKLEDFLGDSFVRYSDNQTETQDSSSLTPFYDPRHRTVAEGVTGFFSDHHQPDFKTINSGPEIFDDSTTSNIGGTHLSSHVVESSTTAKLGFNGDCTTTGGVLSLGVNNTSDQPLSCNNGERGGNSNKKKTVSKKETSDDSKKKIVETLGQRTSIYRGVTRHRWTGRYEAHLWDNSCRREGQARKGRQGGYDKEDRAARAYDLAALKYWGSTATTNFPVSSYSKELEEMNHMTKQEFIASLRRKSSGFSRGASIYRGVTRHHQQGRWQARIGRVAGNKDLYLGTFATEEEAAEAYDIAAIKFRGINAVTNFEMNRYDIEAVMNSSLPVGGAAAKRHKLKLALESPSSSSSDHNLQQQQLLPSSSPSDQNPNSIPCGIPFEPSVLYYHQNFFQHYPLVSDSTIQAPMNQAEFFLWPNQSY

SEQ ID NO: 73014 - DNA, 3192 bp, Arabidopsis thaliana
  misc_feature (1)..(3192): Ceres Seq. ID no. 4953852
  misc_feature (1)..(3192): Ortholog of  Ceres SEQ ID NO 13600310 as cited in SEQ ID NO 5086
  misc_feature (1)..(3192): Ortholog of  Ceres SEQ ID NO 14313863 as cited in SEQ ID NO 54791
atgactacagaagatgatgatcagatgctaggaccaagcggcacccaggaaaagatctatgtttctgttcgtatgcgacctttaaacgacaaggaaaagtttaggaatgatgtccctgactgggagtgcatcaacaatactaccatcatttacaggagtcatctttctatctccgagcgttccatgtatccttctgcttacacatttgacagagtgtttagccctgagtgttgtacaaggcaggtgtatgaacaaggggcaaaggaagtcgctttctctgttgtcagtggcgttaatgctagtgtattcgcatatgggcaaacaagcagtggaaagacgtacactatgagcggaattactgactgcgccttggttgatatatatggctacattgacaagcacaaggaaagagaattcattcttaagttctctgctatggagatctacaatgagtctgtaagagatctcttaagtacagatactagtccactcagacttttagatgaccctgagaaagggacagttgttgagaaactcacagaggaaactctgcgagactggaatcatttcaaggagctcctatctgtctgcaaagcacaaaggcaaattggtgagacagctctaaatgaagttagctcccggtctcatcagattttgagattgacagtagaaagcatagctcgtgaattttctaccaatgataagtttagtactctaacagcgacagtgaacttcattgatcttgctggaagtgaacgtgcgtctcaatcattatcagccggcacaaggttaaaagaaggttgtcatataaaccgaagtttgttaacactgggaactgtgatccgtaagctaagtaaagaaaaaactgggcacattccattcagagattcaaaactgacacgcatacttcagtcttctttgggaggaaatgcaagaactgccataatttgcactatgagtcctgcgagaatccatgttgaacaatcaagaaacacactgttatttgcaagctgcgcaaaggaggtgacaacaaatgcacaagtcaatgttgtcatgtctgataaagctttagtaaagcacttgcagagggagttggctaaactggaaagtgagttgagaagccctagtcaggcttcaattgtttctgacacaactgcattactgacggagaaagaccttgaggttgaaaagcttaagaaagaggtattccaactagcacaacaactagagcaagctcgttccgagattaaggatcttcgacgaatggttgaagaagaaaaaaaccaagaaaaagagacgctatcaacagaaacagaagggttaaatgttctgatggaacatcaataccccaagctgcgggtgcgcaggacatgggactctgagaatacaacaccactgagccctatatcagctcaccgttccagtatatctccacgatcaactgaatatagttatgaagagaatgtctttcagctatcagatttcaggatagattctgcatcaagtagtccgcaacagcttgcgtttgtaactcctttccttaaggttccacttgatgatattcacgtgacagatactgtagaccaatctcatgttcacaaagaggaagctatagaagaacctcatgttcaggaggaacggttttatgaaatggctgaacacactgacggaaattctgaggataactgcagggaagttcggtgcatagaaacagagaagtcagatattagtataggtccagtggaaaatatgccggagagcagtccagacaaatacgaggctgtaactgcagaagaaccagtatctgtgacagagccaaagaacttacaacatccgacagaagaagcagtatgtgtgacagagacaaagaacttacaacatcccacagaagctgaaaacgaagaagaagaagaagaagaaagagtaaaggaagtcagtggtgcttctcctgaaccaaaacaagaaagcaacctcacaaaaaatcctgcattgtgtgatttggaatgttcacctgatgagtttgatacaagcatgtctaacctgagtagaatctcaacacctccagcccttatcactccctctcctgaaaagcctttctcttggattatggagagagattcacaacttttcagaggaatgaagctgactagaagtcgaagctgccgaccaagcttattatcgagcccttcctcctcttggttagagaaagatgctgatacaccgccaagctggtacgacaaagaatttatcaaaacagctgagagaaacttgacaatgtgcgacatcaagaaccagagattgttgcaggatgagtttagtgggaggagcatgccaacaacttggttcgagagaagcttgagtgacactcaaacggtggatgctgcttcacatggtgtcagcaacgaaatgtcgccaaatgaatcaccatttcggccatctgatgcttctgtgtttgagctccagacaagtggtagagcttcaataagccaggacagaacagaggagactgctgctcaaaaagacaagcaaatcattcatcgatcgatggaggaaagggaacagaagttcttggcctcgaattcaacgaagagtttcaaggacgcagcaatggacccaatacaagactacttagacacggccttgaattggccagtggagttcaagaggctacagagggagataatagagctatggcacgtgtgtaaagtctcaatggcacacagaagctacttcttccttctgttcagaggagatcagaaagattgcttgtacttggaggtagagctccgtagacttaagtacatcagagaatctttcgcccaaaatagcaacgatggcaacaatatgaccctaatctcctgcacgagggcattgacgagggagaggtataagctgagcaagctgatgcagaggaaactgtcgaaagaagagagagagaacttgttcttgagatggggcattgggctcaacacgaatcacagacgggtccagctggcgcgtcgtctctggtcggattacaaagacatgggtcatgtccgagagagcgcctccctcgttggtaagctcaatgggttcgtggacatgaagttgacttccacagagatgtttggcgtcaactatgctttcagaccaccacgtcccaagaaatctagtctttggaaacgcagcgttttgtccctctcctttttgtaa

SEQ ID NO: 73015 - protein, 1063 aa, Arabidopsis thaliana
  peptide (1)..(1063): Ceres Seq. ID no. 4953853
MTTEDDDQMLGPSGTQEKIYVSVRMRPLNDKEKFRNDVPDWECINNTTIIYRSHLSISERSMYPSAYTFDRVFSPECCTRQVYEQGAKEVAFSVVSGVNASVFAYGQTSSGKTYTMSGITDCALVDIYGYIDKHKEREFILKFSAMEIYNESVRDLLSTDTSPLRLLDDPEKGTVVEKLTEETLRDWNHFKELLSVCKAQRQIGETALNEVSSRSHQILRLTVESIAREFSTNDKFSTLTATVNFIDLAGSERASQSLSAGTRLKEGCHINRSLLTLGTVIRKLSKEKTGHIPFRDSKLTRILQSSLGGNARTAIICTMSPARIHVEQSRNTLLFASCAKEVTTNAQVNVVMSDKALVKHLQRELAKLESELRSPSQASIVSDTTALLTEKDLEVEKLKKEVFQLAQQLEQARSEIKDLRRMVEEEKNQEKETLSTETEGLNVLMEHQYPKLRVRRTWDSENTTPLSPISAHRSSISPRSTEYSYEENVFQLSDFRIDSASSSPQQLAFVTPFLKVPLDDIHVTDTVDQSHVHKEEAIEEPHVQEERFYEMAEHTDGNSEDNCREVRCIETEKSDISIGPVENMPESSPDKYEAVTAEEPVSVTEPKNLQHPTEEAVCVTETKNLQHPTEAENEEEEEEERVKEVSGASPEPKQESNLTKNPALCDLECSPDEFDTSMSNLSRISTPPALITPSPEKPFSWIMERDSQLFRGMKLTRSRSCRPSLLSSPSSSWLEKDADTPPSWYDKEFIKTAERNLTMCDIKNQRLLQDEFSGRSMPTTWFERSLSDTQTVDAASHGVSNEMSPNESPFRPSDASVFELQTSGRASISQDRTEETAAQKDKQIIHRSMEEREQKFLASNSTKSFKDAAMDPIQDYLDTALNWPVEFKRLQREIIELWHVCKVSMAHRSYFFLLFRGDQKDCLYLEVELRRLKYIRESFAQNSNDGNNMTLISCTRALTRERYKLSKLMQRKLSKEERENLFLRWGIGLNTNHRRVQLARRLWSDYKDMGHVRESASLVGKLNGFVDMKLTSTEMFGVNYAFRPPRPKKSSLWKRSVLSLSFL

SEQ ID NO: 73016 - protein, 1055 aa, Arabidopsis thaliana
  peptide (1)..(1055): Ceres Seq. ID no. 4953854
MLGPSGTQEKIYVSVRMRPLNDKEKFRNDVPDWECINNTTIIYRSHLSISERSMYPSAYTFDRVFSPECCTRQVYEQGAKEVAFSVVSGVNASVFAYGQTSSGKTYTMSGITDCALVDIYGYIDKHKEREFILKFSAMEIYNESVRDLLSTDTSPLRLLDDPEKGTVVEKLTEETLRDWNHFKELLSVCKAQRQIGETALNEVSSRSHQILRLTVESIAREFSTNDKFSTLTATVNFIDLAGSERASQSLSAGTRLKEGCHINRSLLTLGTVIRKLSKEKTGHIPFRDSKLTRILQSSLGGNARTAIICTMSPARIHVEQSRNTLLFASCAKEVTTNAQVNVVMSDKALVKHLQRELAKLESELRSPSQASIVSDTTALLTEKDLEVEKLKKEVFQLAQQLEQARSEIKDLRRMVEEEKNQEKETLSTETEGLNVLMEHQYPKLRVRRTWDSENTTPLSPISAHRSSISPRSTEYSYEENVFQLSDFRIDSASSSPQQLAFVTPFLKVPLDDIHVTDTVDQSHVHKEEAIEEPHVQEERFYEMAEHTDGNSEDNCREVRCIETEKSDISIGPVENMPESSPDKYEAVTAEEPVSVTEPKNLQHPTEEAVCVTETKNLQHPTEAENEEEEEEERVKEVSGASPEPKQESNLTKNPALCDLECSPDEFDTSMSNLSRISTPPALITPSPEKPFSWIMERDSQLFRGMKLTRSRSCRPSLLSSPSSSWLEKDADTPPSWYDKEFIKTAERNLTMCDIKNQRLLQDEFSGRSMPTTWFERSLSDTQTVDAASHGVSNEMSPNESPFRPSDASVFELQTSGRASISQDRTEETAAQKDKQIIHRSMEEREQKFLASNSTKSFKDAAMDPIQDYLDTALNWPVEFKRLQREIIELWHVCKVSMAHRSYFFLLFRGDQKDCLYLEVELRRLKYIRESFAQNSNDGNNMTLISCTRALTRERYKLSKLMQRKLSKEERENLFLRWGIGLNTNHRRVQLARRLWSDYKDMGHVRESASLVGKLNGFVDMKLTSTEMFGVNYAFRPPRPKKSSLWKRSVLSLSFL

SEQ ID NO: 73017 - protein, 1039 aa, Arabidopsis thaliana
  peptide (1)..(1039): Ceres Seq. ID no. 4953855
MRPLNDKEKFRNDVPDWECINNTTIIYRSHLSISERSMYPSAYTFDRVFSPECCTRQVYEQGAKEVAFSVVSGVNASVFAYGQTSSGKTYTMSGITDCALVDIYGYIDKHKEREFILKFSAMEIYNESVRDLLSTDTSPLRLLDDPEKGTVVEKLTEETLRDWNHFKELLSVCKAQRQIGETALNEVSSRSHQILRLTVESIAREFSTNDKFSTLTATVNFIDLAGSERASQSLSAGTRLKEGCHINRSLLTLGTVIRKLSKEKTGHIPFRDSKLTRILQSSLGGNARTAIICTMSPARIHVEQSRNTLLFASCAKEVTTNAQVNVVMSDKALVKHLQRELAKLESELRSPSQASIVSDTTALLTEKDLEVEKLKKEVFQLAQQLEQARSEIKDLRRMVEEEKNQEKETLSTETEGLNVLMEHQYPKLRVRRTWDSENTTPLSPISAHRSSISPRSTEYSYEENVFQLSDFRIDSASSSPQQLAFVTPFLKVPLDDIHVTDTVDQSHVHKEEAIEEPHVQEERFYEMAEHTDGNSEDNCREVRCIETEKSDISIGPVENMPESSPDKYEAVTAEEPVSVTEPKNLQHPTEEAVCVTETKNLQHPTEAENEEEEEEERVKEVSGASPEPKQESNLTKNPALCDLECSPDEFDTSMSNLSRISTPPALITPSPEKPFSWIMERDSQLFRGMKLTRSRSCRPSLLSSPSSSWLEKDADTPPSWYDKEFIKTAERNLTMCDIKNQRLLQDEFSGRSMPTTWFERSLSDTQTVDAASHGVSNEMSPNESPFRPSDASVFELQTSGRASISQDRTEETAAQKDKQIIHRSMEEREQKFLASNSTKSFKDAAMDPIQDYLDTALNWPVEFKRLQREIIELWHVCKVSMAHRSYFFLLFRGDQKDCLYLEVELRRLKYIRESFAQNSNDGNNMTLISCTRALTRERYKLSKLMQRKLSKEERENLFLRWGIGLNTNHRRVQLARRLWSDYKDMGHVRESASLVGKLNGFVDMKLTSTEMFGVNYAFRPPRPKKSSLWKRSVLSLSFL

SEQ ID NO: 73018 - DNA, 879 bp, Arabidopsis thaliana
  misc_feature (1)..(879): Ceres Seq. ID no. 4953856
  misc_feature (1)..(879): Ortholog of  Ceres SEQ ID NO 13582619 as cited in SEQ ID NO 56520
  misc_feature (1)..(879): Ortholog of  Ceres SEQ ID NO 13660872 as cited in SEQ ID NO 60830
  misc_feature (1)..(879): Ortholog of  Ceres SEQ ID NO 12616221 as cited in SEQ ID NO 63291
atgatgaaggttgatcaagattattcgtgtagtataccgcctggatttaggtttcatccgacagatgaagaacttgtcggatattatctcaagaagaaaatcgcctcccagaggattgatctcgacgttatcagagaaattgatctttacaagatcgaaccatgggatctacaagagagatgtaggatagggtacgaggagcaaacggagtggtatttcttcagccatagagacaagaagtatccgactgggactaggacaaaccgagccaccgtggccggtttctggaaagcaacgggccgggacaaggcggtttacctcaactccaaacttatcggtatgagaaaaacgcttgtcttttaccgaggtcgagcgcctaatggccaaaagtccgattggatcattcacgaatactacagcctcgagtcacaccagaactctcctccacaggaagaaggatgggtagtgtgtagagcatttaagaaacgaacgaccatcccaacaaaaaggaggcaactttgggatccgaactgcttattctacgacgacgccactctcttggaacctctcgacaagcgagccagacataatcctgattttaccgccacaccgttcaagcaagaactactctccgaggccagtcacgtccaggatggagatttcggatctatgtaccttcaatgcatcgatgatgatcaattctcccagcttcctcagctcgagagcccctctcttccgtcggaaataactccccatagtactactttttctgagaacagtagccggaaagatgacatgagctccgagaagaggatcactgactggagatatctagataagttcgtggcgtctcaatttttgatgagtggagaagactaa

SEQ ID NO: 73019 - protein, 292 aa, Arabidopsis thaliana
  peptide (1)..(292): Ceres Seq. ID no. 4953857
MMKVDQDYSCSIPPGFRFHPTDEELVGYYLKKKIASQRIDLDVIREIDLYKIEPWDLQERCRIGYEEQTEWYFFSHRDKKYPTGTRTNRATVAGFWKATGRDKAVYLNSKLIGMRKTLVFYRGRAPNGQKSDWIIHEYYSLESHQNSPPQEEGWVVCRAFKKRTTIPTKRRQLWDPNCLFYDDATLLEPLDKRARHNPDFTATPFKQELLSEASHVQDGDFGSMYLQCIDDDQFSQLPQLESPSLPSEITPHSTTFSENSSRKDDMSSEKRITDWRYLDKFVASQFLMSGED

SEQ ID NO: 73020 - protein, 291 aa, Arabidopsis thaliana
  peptide (1)..(291): Ceres Seq. ID no. 4953858
MKVDQDYSCSIPPGFRFHPTDEELVGYYLKKKIASQRIDLDVIREIDLYKIEPWDLQERCRIGYEEQTEWYFFSHRDKKYPTGTRTNRATVAGFWKATGRDKAVYLNSKLIGMRKTLVFYRGRAPNGQKSDWIIHEYYSLESHQNSPPQEEGWVVCRAFKKRTTIPTKRRQLWDPNCLFYDDATLLEPLDKRARHNPDFTATPFKQELLSEASHVQDGDFGSMYLQCIDDDQFSQLPQLESPSLPSEITPHSTTFSENSSRKDDMSSEKRITDWRYLDKFVASQFLMSGED

SEQ ID NO: 73021 - protein, 179 aa, Arabidopsis thaliana
  peptide (1)..(179): Ceres Seq. ID no. 4953859
MRKTLVFYRGRAPNGQKSDWIIHEYYSLESHQNSPPQEEGWVVCRAFKKRTTIPTKRRQLWDPNCLFYDDATLLEPLDKRARHNPDFTATPFKQELLSEASHVQDGDFGSMYLQCIDDDQFSQLPQLESPSLPSEITPHSTTFSENSSRKDDMSSEKRITDWRYLDKFVASQFLMSGED

SEQ ID NO: 73022 - DNA, 1216 bp, Arabidopsis thaliana
  misc_feature (1)..(1216): Ceres Seq. ID no. 4953911
  misc_feature (1)..(1216): Ortholog of  Ceres SEQ ID NO 14314331 as cited in SEQ ID NO 57390
atcaccggcgatattggtttacgcgtcggagagatggttgagagagaggaccgagtttctttggaactcagcgaagaaattatacagagcatggaacctggcgccgttttcagagactataattgcaggatcagctcaattgactttcacaaaacttcgacttgtatggtgacagctagcgacgatgactcaattcgtctctatgatgttgccagcgccacatgtctgaagacaattaatagcaaaaagtatggtgttgatcttgtttgcttcacttctcatcctactactgtcatctactcttccagaaacggatgggacgactctctgaggcttctctctttgcacgataataagtacttgcgctacttcaaaggacatcatgacagagttgtttcgcttagcttgtgttctggtggggaatgcttcatctccggttcccttgatcgtactgttttgctttgggatcaaagggtcgagaaatgccagggtctcttacgagtccaaggaaggcctgctgcagcatatgatgatcaagggttaatttttgcaattgcctttggtggctacataagaatgtttgatgcccgtatgtacgaaaagggtccttttgaaatattttccgttggtggtgatctttctgaggcaaacgttgtgaaatttagtaatgatggaaggctcatgctgcttacaaccatggatggttttattcatgtgcttgactcgtttcgtggaactcttctgtccacatttagtgtgaaaccagtagctggagaatctacattggatgcagcctttagtcctgaagggatgtttgttgtttcaggttcaggtgatggtagtacccatgcatggggtgtaaggagcggaaaacaggtacatagttggatgggtttagggagtgagcccccagtcattaaatggggtccaggaagtcccatgtttgtgacaggctcttccgaacttgcttttgttatacccgacttatcgaaattgccagcttatgccattcggaaataggacgactatcacgtctgtgccatgtaaatgaggcctcatttggccttttggtttcagactttgttgtgggttatgccggtaacttatcccttgcactctgattaatatatatttgggtcttgtaacatgaagataaaccccaagtctttctaatgttgtaattcgtgtaatttacaagtttgactgtttctgactg

SEQ ID NO: 73023 - protein, 339 aa, Arabidopsis thaliana; identical to SEQ ID NO: 43146
  peptide (1)..(339): Ceres Seq. ID no. 4953912

SEQ ID NO: 73024 - protein, 328 aa, Arabidopsis thaliana; identical to SEQ ID NO: 43147
  peptide (1)..(328): Ceres Seq. ID no. 4953913

SEQ ID NO: 73025 - protein, 309 aa, Arabidopsis thaliana; identical to SEQ ID NO: 28628
  peptide (1)..(309): Ceres Seq. ID no. 4953914

SEQ ID NO: 73026 - DNA, 987 bp, Arabidopsis thaliana
  misc_feature (1)..(987): Ceres Seq. ID no. 4953985
  misc_feature (1)..(987): Ortholog of  Ceres SEQ ID NO 14314331 as cited in SEQ ID NO 57390
atggttgagagagaggaccgagtttctttggaactcagcgaagaaattatacagagcatggaacctggcgccgttttcagagactataattgcaggatcagctcaattgactttcacaaaacttcgacttgtatggtgacagctagcgacgatgactcaattcgtctctatgatgttgccagcgccacatgtctgaagacaattaatagcaaaaagtatggtgttgatcttgtttgcttcacttctcatcctactactgtcatctactcttccagaaacggatgggacgactctctgaggcttctctctttgcacgataataagtacttgcgctacttcaaaggacatcatgacagagttgtttcgcttagcttgtgttctggtggggaatgcttcatctccggttcccttgatcgtactgttttgctttgggatcaaagggtcgagaaatgccagggtctcttacgagtccaaggaaggcctgctgcagcatatgatgatcaagggttaatttttgcaattgcctttggtggctacataagaatgtttgatgcccgtatgtacgaaaagggtccttttgaaatattttccgttggtggtgatctttctgaggcaaacgttgtgaaatttagtaatgatggaaggctcatgctgcttacaaccatggatggttttattcatgtgcttgactcgtttcgtggaactcttctgtccacatttagtgtgaaaccagtagctggagaatctacattggatgcagcctttagtcctgaagggatgtttgttgtttcaggttcaggtgatggtagtacccatgcatggggtgtaaggagcggaaaacaggtacatagttggatgggtttagggagtgagcccccagtcattaaatggggtccaggaagtcccatgtttgtgacaggctcttccgaacttgcttttgttatacccgacttatcgaaattgccagcttatgccattcggaaatag

SEQ ID NO: 73027 - protein, 328 aa, Arabidopsis thaliana; identical to SEQ ID NO: 43147
  peptide (1)..(328): Ceres Seq. ID no. 4953986

SEQ ID NO: 73028 - protein, 309 aa, Arabidopsis thaliana; identical to SEQ ID NO: 28628
  peptide (1)..(309): Ceres Seq. ID no. 4953987

SEQ ID NO: 73029 - protein, 284 aa, Arabidopsis thaliana; identical to SEQ ID NO: 28629
  peptide (1)..(284): Ceres Seq. ID no. 4953988

SEQ ID NO: 73030 - DNA, 456 bp, Arabidopsis thaliana
  misc_feature (1)..(456): Ceres Seq. ID no. 4954302
  misc_feature (1)..(456): Ortholog of  Ceres SEQ ID NO 15179062 as cited in SEQ ID NO 0
atggcgtcaatttctctctcttcttctacggttccgtcgctgaattcgaaagaatcgtcaggtgtttctgctttcgcttctcgttctatctcggccgtcaaatttcagtttccggttcgtcggattgaagccaagaagcagacatttgactcatttgaggatctgcttgtgaactctgataaaccagttctagttgactattatgcaacctggtgtggtccttgccagttcatggttccaatactcaatgaagtgagtgaaaccctgaaagacaagatacaggtggtgaagattgataccgaaaaataccccagtattgctaataaatacaagattgaggcacttcctactttcatcctattcaaagatggggaaccttgtgatcgctttgagggtgctttgacggccaaacaactcattcaacgaattgaggattctctaaaagtgaagccatag

SEQ ID NO: 73031 - protein, 151 aa, Arabidopsis thaliana
  peptide (1)..(151): Ceres Seq. ID no. 4954303
MASISLSSSTVPSLNSKESSGVSAFASRSISAVKFQFPVRRIEAKKQTFDSFEDLLVNSDKPVLVDYYATWCGPCQFMVPILNEVSETLKDKIQVVKIDTEKYPSIANKYKIEALPTFILFKDGEPCDRFEGALTAKQLIQRIEDSLKVKP

SEQ ID NO: 73032 - DNA, 1443 bp, Arabidopsis thaliana
  misc_feature (1)..(1443): Ceres Seq. ID no. 4954349
  misc_feature (1)..(1443): Ortholog of  Ceres SEQ ID NO 14311367 as cited in SEQ ID NO 53834
atggcggatactgaaatgcaagagcaagatgtgccgtctggtaccaaaggtgttgtagaggagccttcagaactagagaaagacctaaactctattgaaagacctaagtcccctgttccagaggatacgactcatactttggatagtgatgttcatttatctgatgctcccattgctaatcaaattgaggctaatgaagaggttggtggtcagaacagtgttgatgggaggaatggtgatgttgatcagtctgaaaagaagattactagtgatggcggtcaagaggagacaacacttggggaatcaaatcctttgaagggggatccgtcgagtcctcatgttcctgaagaaagtgttaagaagtggaagacatggttgttgagtgatgctgaggccagggaagttgatgaagcaggggcaccacaggatcaagaggcgtttattaaagaagtggaggccttcaacaaggagaatttcctggaatttaaagccccaaagttttacggacagcccttaaattgtctcaagctttggagagccgttatcaagttaggtggctacgatgtggtcaccacatctaagctatggcggcaagttggagaatcgttccatcctccaaaaacatgcactacagtctcctggacattccgcattttctatgaaaaggcacttttggagtatgagaagcatttaaggcaaaatggtgagcttaaccttcctggttcagcttctcttccgtcttcaggcattgaaaaggaggcaagtagccatcaagcttcagggtcaggcagaacaagaagagatgctgcagctcgtgctatgcaaggttggcattctcagcgccttcttggatctggggaggttactgagcctattgttaaggagaaaggcttgaattcaaccccaaagcaaaagaacctcaaaaacattggtgtgcagaaacaaaaaacaacaaccggcatggaccttgttttttcacacgaatcagaaaaacagttacgaaagataatcatctcctgtatttttgtgttgcttatgcaagattgctttaccatgtgcaattccatacaatcttatccatcgaaaaaccctgcattgtcaatgtttggtagatcacaagcactgttttctgggtggtcaactgccgaggttatagatgttggaccccctgcagactgggtgaagatcaatgtcagagaaactaaagactgctttgagatatttgccctggtacctggacttcttcgcgaagaggtccgtgttcagtcagaccctgcagggcggctagttatagcaggccaacctgagcaacttgacaatccttggggaatcacacccttcaaaaaggttgtgaactttcccgcaagaatcgatccgctgcacacgtcagcggttgtgagcctgcatggtcgactgtttgtgcgagtcccatttgagcagtga

SEQ ID NO: 73033 - protein, 480 aa, Arabidopsis thaliana
  peptide (1)..(480): Ceres Seq. ID no. 4954350
MADTEMQEQDVPSGTKGVVEEPSELEKDLNSIERPKSPVPEDTTHTLDSDVHLSDAPIANQIEANEEVGGQNSVDGRNGDVDQSEKKITSDGGQEETTLGESNPLKGDPSSPHVPEESVKKWKTWLLSDAEAREVDEAGAPQDQEAFIKEVEAFNKENFLEFKAPKFYGQPLNCLKLWRAVIKLGGYDVVTTSKLWRQVGESFHPPKTCTTVSWTFRIFYEKALLEYEKHLRQNGELNLPGSASLPSSGIEKEASSHQASGSGRTRRDAAARAMQGWHSQRLLGSGEVTEPIVKEKGLNSTPKQKNLKNIGVQKQKTTTGMDLVFSHESEKQLRKIIISCIFVLLMQDCFTMCNSIQSYPSKNPALSMFGRSQALFSGWSTAEVIDVGPPADWVKINVRETKDCFEIFALVPGLLREEVRVQSDPAGRLVIAGQPEQLDNPWGITPFKKVVNFPARIDPLHTSAVVSLHGRLFVRVPFEQ

SEQ ID NO: 73034 - protein, 475 aa, Arabidopsis thaliana
  peptide (1)..(475): Ceres Seq. ID no. 4954351
MQEQDVPSGTKGVVEEPSELEKDLNSIERPKSPVPEDTTHTLDSDVHLSDAPIANQIEANEEVGGQNSVDGRNGDVDQSEKKITSDGGQEETTLGESNPLKGDPSSPHVPEESVKKWKTWLLSDAEAREVDEAGAPQDQEAFIKEVEAFNKENFLEFKAPKFYGQPLNCLKLWRAVIKLGGYDVVTTSKLWRQVGESFHPPKTCTTVSWTFRIFYEKALLEYEKHLRQNGELNLPGSASLPSSGIEKEASSHQASGSGRTRRDAAARAMQGWHSQRLLGSGEVTEPIVKEKGLNSTPKQKNLKNIGVQKQKTTTGMDLVFSHESEKQLRKIIISCIFVLLMQDCFTMCNSIQSYPSKNPALSMFGRSQALFSGWSTAEVIDVGPPADWVKINVRETKDCFEIFALVPGLLREEVRVQSDPAGRLVIAGQPEQLDNPWGITPFKKVVNFPARIDPLHTSAVVSLHGRLFVRVPFEQ

SEQ ID NO: 73035 - DNA, 810 bp, Arabidopsis thaliana
  misc_feature (1)..(810): Ceres Seq. ID no. 4954469
  misc_feature (1)..(810): Ortholog of  Ceres SEQ ID NO 15171426 as cited in SEQ ID NO 51543
atggcggatgggtactggaaccagcagcgacagcaacatcatcctcctggtggtcctatgaaacgtccccgttccgatttcggtaagctcctgagtcctttcacgtttcctcaacacatagatagttatgctcctagtttgcttgaaataaacaatgcttgtcgtcttgtagaagctccatcatcaacaatgactatagggcacggtggtggttattatccgcgagatgaggatctcgatgttcccgatactagaactatcggttcagcttacgatcgctatctccagagcgtgcaatcaggagaaggtggttctgtttccatgggaagatcaggaggaggaggaggaggaggaggaggtaacgttcaaaccatagatgattttatgttgagacgtggtggagttctccctttagaccatggtccaaatggtcacaccattggttttgatcccccagaacctgttggtaggcgtaacctaccttcagatgcatccaacactttatatgttgaaggacttccttctaattgctctaggagggaagtagctcgatacagagaagtgagacttgtgaccaaagactccaaacatcggaacggagatcctattgttctttgctttgttgattttacaaaccctgcctgtgctgcgactgctctgagcgccttacaaggaaaccaggttcaagaccaggacaaagaggaagaaggtgatgactcagggacattgtggaaatatacatcctccctttccaagtataatctcaatgaaatcgcacattacatcacttatgtccttgaagcaacctga

SEQ ID NO: 73036 - protein, 269 aa, Arabidopsis thaliana
  peptide (1)..(269): Ceres Seq. ID no. 4954470
MADGYWNQQRQQHHPPGGPMKRPRSDFGKLLSPFTFPQHIDSYAPSLLEINNACRLVEAPSSTMTIGHGGGYYPRDEDLDVPDTRTIGSAYDRYLQSVQSGEGGSVSMGRSGGGGGGGGGNVQTIDDFMLRRGGVLPLDHGPNGHTIGFDPPEPVGRRNLPSDASNTLYVEGLPSNCSRREVARYREVRLVTKDSKHRNGDPIVLCFVDFTNPACAATALSALQGNQVQDQDKEEEGDDSGTLWKYTSSLSKYNLNEIAHYITYVLEAT

SEQ ID NO: 73037 - protein, 250 aa, Arabidopsis thaliana
  peptide (1)..(250): Ceres Seq. ID no. 4954471
MKRPRSDFGKLLSPFTFPQHIDSYAPSLLEINNACRLVEAPSSTMTIGHGGGYYPRDEDLDVPDTRTIGSAYDRYLQSVQSGEGGSVSMGRSGGGGGGGGGNVQTIDDFMLRRGGVLPLDHGPNGHTIGFDPPEPVGRRNLPSDASNTLYVEGLPSNCSRREVARYREVRLVTKDSKHRNGDPIVLCFVDFTNPACAATALSALQGNQVQDQDKEEEGDDSGTLWKYTSSLSKYNLNEIAHYITYVLEAT

SEQ ID NO: 73038 - protein, 206 aa, Arabidopsis thaliana
  peptide (1)..(206): Ceres Seq. ID no. 4954472
MTIGHGGGYYPRDEDLDVPDTRTIGSAYDRYLQSVQSGEGGSVSMGRSGGGGGGGGGNVQTIDDFMLRRGGVLPLDHGPNGHTIGFDPPEPVGRRNLPSDASNTLYVEGLPSNCSRREVARYREVRLVTKDSKHRNGDPIVLCFVDFTNPACAATALSALQGNQVQDQDKEEEGDDSGTLWKYTSSLSKYNLNEIAHYITYVLEAT

SEQ ID NO: 73039 - DNA, 1404 bp, Arabidopsis thaliana
  misc_feature (1)..(1404): Ceres Seq. ID no. 4954572
  misc_feature (1)..(1404): Ortholog of  Ceres SEQ ID NO 12586556 as cited in SEQ ID NO 64667
  misc_feature (1)..(1404): Ortholog of  Ceres SEQ ID NO 13660894 as cited in SEQ ID NO 67475
atgttcttctctggtcttatctccaagcttcatgttcatggtactaagagaacaaatcacttcacgatctttcaccgtttgaatcatttcgtcactacatcatcttcctcggttacgcctctttcgcctcaagatcgaaacaaactcttagctactctgttatcaaactgcactagcctagctcgtgttcgtcggatccatggtgacatcttccgttcacgaatcctcgatcaatatccgatcgctttcttatggaacaacatcatgcgatcttacattcgccatgagtctcctctcgatgcaattcaagtatatctcggtatggtgagatcgactgttttacccgatcgatattctcttccgattgtaatcaaagcagccgttcaaattcatgattttacgttgggaaaggagcttcattccgtcgccgttaggttagggttcgtcggagatgagttctgcgagagtgggttcattacattgtattgtaaagcaggggaatttgagaacgcacgtaaggtgttcgatgaaaatcctgagagaaagctggggtcttggaacgccattatcggagggttgaatcacgctggtcgagctaacgaggcggtggaaatgtttgtggatatgaaaaggagtggacttgagcctgatgatttcactatggttagtgtgactgcttcttgtggaggattaggtgacttgagcttggcttttcagttgcataaatgcgttctacaagctaagaccgaagagaagtctgatatcatgatgctgaattcgctcattgatatgtatggaaaatgtgggcgtatggatttagcgagtcacatattcgaggaaatgcgacagagaaacgttgtctcttggagttctatgatcgtgggttacgcagctaacgggaatacattagaggctttagaatgctttcgtcagatgagagaattcggtgtcagaccaaacaagatcacgttcgttggagttctcagtgcttgcgtccatggaggtcttgtggaggaaggaaaaacatattttgcgatgatgaagtcagagttcgagctagaaccgggattatcgcattacggatgcatagttgatctattgagccgtgacgggcagcttaaggaggcaaagaaagttgttgaggagatgccgatgaagcctaacgtgatggtttggggttgtttgatgggagggtgtgagaagtttggggatgttgagatggctgagtgggtggctccatacatggttgagcttgagccgtggaacgatggtgtttatgttgtcttggctaatgtgtatgcactcagagggatgtggaaagatgttgagagagttaggaagttgatgaagacgaagaaggttgctaagattcctgcctatagctatgcttcaacgacattttga

SEQ ID NO: 73040 - protein, 467 aa, Arabidopsis thaliana
  peptide (1)..(467): Ceres Seq. ID no. 4954573
MFFSGLISKLHVHGTKRTNHFTIFHRLNHFVTTSSSSVTPLSPQDRNKLLATLLSNCTSLARVRRIHGDIFRSRILDQYPIAFLWNNIMRSYIRHESPLDAIQVYLGMVRSTVLPDRYSLPIVIKAAVQIHDFTLGKELHSVAVRLGFVGDEFCESGFITLYCKAGEFENARKVFDENPERKLGSWNAIIGGLNHAGRANEAVEMFVDMKRSGLEPDDFTMVSVTASCGGLGDLSLAFQLHKCVLQAKTEEKSDIMMLNSLIDMYGKCGRMDLASHIFEEMRQRNVVSWSSMIVGYAANGNTLEALECFRQMREFGVRPNKITFVGVLSACVHGGLVEEGKTYFAMMKSEFELEPGLSHYGCIVDLLSRDGQLKEAKKVVEEMPMKPNVMVWGCLMGGCEKFGDVEMAEWVAPYMVELEPWNDGVYVVLANVYALRGMWKDVERVRKLMKTKKVAKIPAYSYASTTF

SEQ ID NO: 73041 - protein, 379 aa, Arabidopsis thaliana
  peptide (1)..(379): Ceres Seq. ID no. 4954574
MRSYIRHESPLDAIQVYLGMVRSTVLPDRYSLPIVIKAAVQIHDFTLGKELHSVAVRLGFVGDEFCESGFITLYCKAGEFENARKVFDENPERKLGSWNAIIGGLNHAGRANEAVEMFVDMKRSGLEPDDFTMVSVTASCGGLGDLSLAFQLHKCVLQAKTEEKSDIMMLNSLIDMYGKCGRMDLASHIFEEMRQRNVVSWSSMIVGYAANGNTLEALECFRQMREFGVRPNKITFVGVLSACVHGGLVEEGKTYFAMMKSEFELEPGLSHYGCIVDLLSRDGQLKEAKKVVEEMPMKPNVMVWGCLMGGCEKFGDVEMAEWVAPYMVELEPWNDGVYVVLANVYALRGMWKDVERVRKLMKTKKVAKIPAYSYASTTF

SEQ ID NO: 73042 - protein, 360 aa, Arabidopsis thaliana
  peptide (1)..(360): Ceres Seq. ID no. 4954575
MVRSTVLPDRYSLPIVIKAAVQIHDFTLGKELHSVAVRLGFVGDEFCESGFITLYCKAGEFENARKVFDENPERKLGSWNAIIGGLNHAGRANEAVEMFVDMKRSGLEPDDFTMVSVTASCGGLGDLSLAFQLHKCVLQAKTEEKSDIMMLNSLIDMYGKCGRMDLASHIFEEMRQRNVVSWSSMIVGYAANGNTLEALECFRQMREFGVRPNKITFVGVLSACVHGGLVEEGKTYFAMMKSEFELEPGLSHYGCIVDLLSRDGQLKEAKKVVEEMPMKPNVMVWGCLMGGCEKFGDVEMAEWVAPYMVELEPWNDGVYVVLANVYALRGMWKDVERVRKLMKTKKVAKIPAYSYASTTF

SEQ ID NO: 73043 - DNA, 1385 bp, Arabidopsis thaliana
  misc_feature (1)..(1385): Ceres Seq. ID no. 4954706
  misc_feature (1)..(1385): Ortholog of  Ceres SEQ ID NO 13597805 as cited in SEQ ID NO 64186
taggatctgttcttcccaaaacgactcatgccgtccattcgattcggaatatagttgtagaggagatttcatttctaatcaatttcttcggtgatgagttccaccgcggcatcttccaccgtcggaggaggcggatcgtctgagatttccggtgtcaaaaaaacctccaagcgaccaaaatattctaggtttactcagcaagagcttccagcgtgcaagccaattcttactccaagatgggtgatcttgacatttcttgtcgctggggttgtcttcattccccttggagtgatctgcttatttgcttctcagggagtagtcgagattgttgatcgatatgacacagactgtattccaacatcttctagaaacaacatggtcgcttacatacagggtgaaggagataagatctgtaagagaacaataacggtgacaaaagctatgaagcatcctgtctatgtatactaccaacttgagaatttctaccaaaaccatagacggtatgtgaaaagtcgaaacgatgcacaactaagaagtccaaaagaagagcatgatgtgaagacctgtgcacctgaggataatgtgggtggagaaccaattgtgccatgtggtcttgttgcttggagtttgttcaacgatacttatagcttttcaagaaatagccaacaacttcttgtgaataagaaaggtatctcatggaagagtgacagagaaaacaagtttgggaaaaatgtcttccctaaaaattttcagaaaggagcaccaataggcggtggaactcttaatatttctaaaccgttgagtgagcaagaagacctcatagtctggatgcgaaccgcggctttgccaacgtttaggaagctgtatgggaagattgagacagacctacacgcgggtgataccataacggtcttgttgcagaacaactacaacacttacagcttcaatgggcagaagaagctagtgctgtcaacaactagctggctcggcggaaggaatgatttcctcgggattgcttatctgactgtaggcagtatttgcttgttcttggctgttacatttgccgtattgtatctagttaagccaaggcaactcggagacccctcgtacctttcgtggaacagaagtgctggaggtttacagtaatagagcccttcgagcatcaggcgttgatccctccatcgtcaaacggcgtagttttggcttagctaacaaaagagaaaaaacgaaaataagtatatagttcgtttataattttgatattgttgaaaacaaacgtttgtgttttgtcctgttgttgttaagatactagccagtaaatggtgtttagaaaataatgtaaatgaattacagttggaaattgcaaaataagcagagaattttgt

SEQ ID NO: 73044 - protein, 350 aa, Arabidopsis thaliana; identical to SEQ ID NO: 38176
  peptide (1)..(350): Ceres Seq. ID no. 4954707

SEQ ID NO: 73045 - protein, 256 aa, Arabidopsis thaliana; identical to SEQ ID NO: 38177
  peptide (1)..(256): Ceres Seq. ID no. 4954708

SEQ ID NO: 73046 - protein, 234 aa, Arabidopsis thaliana; identical to SEQ ID NO: 38178
  peptide (1)..(234): Ceres Seq. ID no. 4954709

SEQ ID NO: 73047 - DNA, 849 bp, Arabidopsis thaliana
  misc_feature (1)..(849): Ceres Seq. ID no. 4955096
  misc_feature (1)..(849): Ortholog of  Ceres SEQ ID NO 13579918 as cited in SEQ ID NO 64644
  misc_feature (1)..(849): Ortholog of  Ceres SEQ ID NO 13654122 as cited in SEQ ID NO 68192
atggcttattctaaagcttgttataaactcatcaccaccattacaatcctccttctatacttcacatttgcctctcttgccaaaaacgtagatgtaagtgaatgcagagctgaatctggagatccatcatgtcacaacaacaaagaagctaaaaagcttaaaatgattgcaatcccatctatcttagtggcgagcatgatcggtgtttctttacagttcctttctcgttacattcctgctttaggacccgaccgagttatatttgggatcataaagactttaacttcgggtgtaattttggcaaccgcttttatgcatgtgttaccggactctttcgatgatctcacatccaaatgtttgcctgaagacccgtggaggaagtttcctttcaccactttcatcgcgatgaactcggcttttctcgttttaatgattgctttggtgcacttacaagaaaaggtcaacgatgataagacaaataaccaatgtaccatacgatcacttatcgcagcgttttgtttccatgaactcgctgaaggaatgagactcggtggtcccattttacatcaaaatgaattggaaaatggtgttgtcacaatgcaatttgggattgctttagggatgcaaatacaaaagatatatggtgagacaagtccgacagcgttgatcttgatggggatgttgaatgcgtgttctgcaggattattgattgatctggcccttgttaatctcttggctcatgaattatacggaccaaagatacaagggaatatgaaacttcatgtcctcggttatgttgctaccttcataggtgccgcgggaatgtctttgatggctaagtgggcatag

SEQ ID NO: 73048 - protein, 282 aa, Arabidopsis thaliana
  peptide (1)..(282): Ceres Seq. ID no. 4955097
MAYSKACYKLITTITILLLYFTFASLAKNVDVSECRAESGDPSCHNNKEAKKLKMIAIPSILVASMIGVSLQFLSRYIPALGPDRVIFGIIKTLTSGVILATAFMHVLPDSFDDLTSKCLPEDPWRKFPFTTFIAMNSAFLVLMIALVHLQEKVNDDKTNNQCTIRSLIAAFCFHELAEGMRLGGPILHQNELENGVVTMQFGIALGMQIQKIYGETSPTALILMGMLNACSAGLLIDLALVNLLAHELYGPKIQGNMKLHVLGYVATFIGAAGMSLMAKWA

SEQ ID NO: 73049 - protein, 228 aa, Arabidopsis thaliana
  peptide (1)..(228): Ceres Seq. ID no. 4955098
MIAIPSILVASMIGVSLQFLSRYIPALGPDRVIFGIIKTLTSGVILATAFMHVLPDSFDDLTSKCLPEDPWRKFPFTTFIAMNSAFLVLMIALVHLQEKVNDDKTNNQCTIRSLIAAFCFHELAEGMRLGGPILHQNELENGVVTMQFGIALGMQIQKIYGETSPTALILMGMLNACSAGLLIDLALVNLLAHELYGPKIQGNMKLHVLGYVATFIGAAGMSLMAKWA

SEQ ID NO: 73050 - protein, 217 aa, Arabidopsis thaliana
  peptide (1)..(217): Ceres Seq. ID no. 4955099
MIGVSLQFLSRYIPALGPDRVIFGIIKTLTSGVILATAFMHVLPDSFDDLTSKCLPEDPWRKFPFTTFIAMNSAFLVLMIALVHLQEKVNDDKTNNQCTIRSLIAAFCFHELAEGMRLGGPILHQNELENGVVTMQFGIALGMQIQKIYGETSPTALILMGMLNACSAGLLIDLALVNLLAHELYGPKIQGNMKLHVLGYVATFIGAAGMSLMAKWA

SEQ ID NO: 73051 - DNA, 1267 bp, Arabidopsis thaliana
  misc_feature (1)..(1267): Ceres Seq. ID no. 4955187
  misc_feature (1)..(1267): Ortholog of  Ceres SEQ ID NO 12364737 as cited in SEQ ID NO 51089
  misc_feature (1)..(1267): Ortholog of  Ceres SEQ ID NO 13593955 as cited in SEQ ID NO 54278
  misc_feature (1)..(1267): Ortholog of  Ceres SEQ ID NO 13595567 as cited in SEQ ID NO 56760
  misc_feature (1)..(1267): Ortholog of  Ceres SEQ ID NO 13597380 as cited in SEQ ID NO 64054
  misc_feature (1)..(1267): Ortholog of  Ceres SEQ ID NO 12625474 as cited in SEQ ID NO 64169
  misc_feature (1)..(1267): Ortholog of  Ceres SEQ ID NO 13597502 as cited in SEQ ID NO 64681
aatttgcagggttcttcttcttcttcttcttttttctctaaactggaaaataaagaagaaaagaacatggatttgcattcttgtctaaactcatactttcttttgctcctcctctgtcttcttaatattaccaccattaactcaacgaagccattagaacaagaaacagtgctttttggcggcaactttccggctttttatgttattggagattcattggttgattcaggaaacaataatcatcttacaacgatggtcaaatcgaattttccaccttatggttcggactttgaaggtggcaaagccaccggccgtttcagcaatggcaaaacaattgctgattacattgctatctactatggtcttcctttggttcctgcttatttgggattatctcaagaagaaaagaatagtatctcaactggtattaactatgcttctgctggctgtgggattcttcctcagacaggaaggcaaataggaacatgtctctcgttaagtgtccaagtcgatatgttccaggagaccatcacaaacaatctgaagaagaacttcaagaagtccgagctccgtgaacacttggctgaatcgttgtttatgatcgccattggggttaacgactacacattcttatttaatgaaacaaccgatgcgaatgagtttgcaaacaagcttcttcatgattacttgcttcaaatagaaagattgcacaagttaggagcaaggaagttcttcatcaacaacattaaaccattaggatgttacccaaatgttgtagctaagaccgtgccacgtggaagctgcaacgatgctttgaactttgcggtcagcattttcaacactaagcttagaaaaagtctgtctcgtatgacgcaaaaattcatcaaaacgtcctttttatactcggattactacaactacatgttgggactaagaggaccttcaagcaatcaagttggttcgagtctattgaacgtgacaagcccatgttgtcctaacgtttatgatggaggtcaattgacaagttgcaagcctggttcgatcgcgtgtaaggcacccgatactcatattttctttgatccgtttcatccgactcaattggcgaattacatgtatgcgattgcgtgtttccacgagagaagtatttgccatgtgatattggaagattaacttttgtcggcaacaatcttttttgtttgttttaaacaccaatttggttgttgtttgttgctttcaacttttcaatatcatcagaacttttaagatt

SEQ ID NO: 73052 - protein, 389 aa, Arabidopsis thaliana
  peptide (1)..(389): Ceres Seq. ID no. 4955188
NLQGSSSSSSFFSKLENKEEKNMDLHSCLNSYFLLLLLCLLNITTINSTKPLEQETVLFGGNFPAFYVIGDSLVDSGNNNHLTTMVKSNFPPYGSDFEGGKATGRFSNGKTIADYIAIYYGLPLVPAYLGLSQEEKNSISTGINYASAGCGILPQTGRQIGTCLSLSVQVDMFQETITNNLKKNFKKSELREHLAESLFMIAIGVNDYTFLFNETTDANEFANKLLHDYLLQIERLHKLGARKFFINNIKPLGCYPNVVAKTVPRGSCNDALNFAVSIFNTKLRKSLSRMTQKFIKTSFLYSDYYNYMLGLRGPSSNQVGSSLLNVTSPCCPNVYDGGQLTSCKPGSIACKAPDTHIFFDPFHPTQLANYMYAIACFHERSICHVILED

SEQ ID NO: 73053 - protein, 367 aa, Arabidopsis thaliana; identical to SEQ ID NO: 41528
  peptide (1)..(367): Ceres Seq. ID no. 4955189

SEQ ID NO: 73054 - protein, 305 aa, Arabidopsis thaliana; identical to SEQ ID NO: 37441
  peptide (1)..(305): Ceres Seq. ID no. 4955190

SEQ ID NO: 73055 - DNA, 1749 bp, Arabidopsis thaliana
  misc_feature (1)..(1749): Ceres Seq. ID no. 4955327
  misc_feature (1)..(1749): Ortholog of  Ceres SEQ ID NO 12586556 as cited in SEQ ID NO 64667
  misc_feature (1)..(1749): Ortholog of  Ceres SEQ ID NO 13660894 as cited in SEQ ID NO 67475
atgcctgagagagatacagttgtttggaatgcattgatttgtgggtattcacgaaatggttatgagtgtgatgcgtggaagctttttatcgtaatgcttcagcaagggttttctccatctgctactacacttgtgaatttgttacctttttgtggacaatgtggttttgtatctcaagggagatctgttcatggtgttgctgcaaagtctggccttgagttggattctcaggtgaagaatgcgttgatttcgttttactcaaagtgtgcagagttgggttcagcagaagtcttgtttagagaaatgaaagataaaagcacagtttcttggaatacaatgattggtgcctatagccagagtggtttacaggaagaagccatcactgttttcaagaatatgtttgagaagaatgtggaaattagtccagtcactatcatcaatcttctttctgctcatgttagtcacgagccactacattgtcttgttgttaaatgtggaatggtgaatgatatatctgtggttacttctttggtctgtgcatattcaaggtgtgggtgtttggtttcagcagagcgtctttatgcgtctgctaaacaagatagtattgtcggcttaacttcgattgtttcatgctatgcggagaaaggagatatggatatagcagttgtgtatttttctaaaacgcgtcagttgtgtatgaaaattgatgctgtagctttagttggaattctccatggatgtaaaaagtcttcccatattgacataggaatgtcgttacatggttatgcgatcaaaagcggattgtgcacaaaaacactggttgtgaatggactgataactatgtactctaagtttgatgatgtagagactgtcctgtttttgtttgagcaactgcaggagactcctttaattagctggaactcagtgatatccgggtgtgtacagtctggaagggcaagtacagcttttgaggtgttccatcagatgatgttaactggtggacttttgccggatgccattacgatagccagtttgcttgctggctgttcccagctttgttgcttgaatttggggaaggagcttcatggctatactcttaggaacaattttgaaaatgagaactttgtttgcactgctctgatagatatgtatgccaaatgtggaaacgaagtacaagcggaaagtgtgttcaagagtataaaagctccgtgtacagcaacatggaactcaatgatatcaggatacagcttatcggggttacaacatcgagctctttcttgttacttggaaatgcgagagaaggggttgaaacctgacgagatcacctttttgggggttctgtctgcatgtaaccatggaggctttgtcgatgaaggaaaaatatgtttcagagcaatgatcaaagagtttggaatatctccaactttacagcattatgcacttatggttggcttgttgggaagagcatgtttatttactgaggcattgtatttaatttggaagatggatataaagccggattctgcagtatggggtgctctacttagcgcgtgcattattcacagagagttggaggttggggaatatgtagctaggaaaatgtttatgctggattacaagaatggagggctgtatgtattgatgtcaaacctatatgcaacagaagcaatgtgggacgacgtagttagagtcaggaatatgatgaaagataatggatacgatggttatttgggagttagccaaatataa

SEQ ID NO: 73056 - protein, 582 aa, Arabidopsis thaliana; identical to SEQ ID NO: 70979
  peptide (1)..(582): Ceres Seq. ID no. 4955328

SEQ ID NO: 73057 - protein, 551 aa, Arabidopsis thaliana
  peptide (1)..(551): Ceres Seq. ID no. 4955329
MLQQGFSPSATTLVNLLPFCGQCGFVSQGRSVHGVAAKSGLELDSQVKNALISFYSKCAELGSAEVLFREMKDKSTVSWNTMIGAYSQSGLQEEAITVFKNMFEKNVEISPVTIINLLSAHVSHEPLHCLVVKCGMVNDISVVTSLVCAYSRCGCLVSAERLYASAKQDSIVGLTSIVSCYAEKGDMDIAVVYFSKTRQLCMKIDAVALVGILHGCKKSSHIDIGMSLHGYAIKSGLCTKTLVVNGLITMYSKFDDVETVLFLFEQLQETPLISWNSVISGCVQSGRASTAFEVFHQMMLTGGLLPDAITIASLLAGCSQLCCLNLGKELHGYTLRNNFENENFVCTALIDMYAKCGNEVQAESVFKSIKAPCTATWNSMISGYSLSGLQHRALSCYLEMREKGLKPDEITFLGVLSACNHGGFVDEGKICFRAMIKEFGISPTLQHYALMVGLLGRACLFTEALYLIWKMDIKPDSAVWGALLSACIIHRELEVGEYVARKMFMLDYKNGGLYVLMSNLYATEAMWDDVVRVRNMMKDNGYDGYLGVSQI

SEQ ID NO: 73058 - protein, 481 aa, Arabidopsis thaliana
  peptide (1)..(481): Ceres Seq. ID no. 4955330
MKDKSTVSWNTMIGAYSQSGLQEEAITVFKNMFEKNVEISPVTIINLLSAHVSHEPLHCLVVKCGMVNDISVVTSLVCAYSRCGCLVSAERLYASAKQDSIVGLTSIVSCYAEKGDMDIAVVYFSKTRQLCMKIDAVALVGILHGCKKSSHIDIGMSLHGYAIKSGLCTKTLVVNGLITMYSKFDDVETVLFLFEQLQETPLISWNSVISGCVQSGRASTAFEVFHQMMLTGGLLPDAITIASLLAGCSQLCCLNLGKELHGYTLRNNFENENFVCTALIDMYAKCGNEVQAESVFKSIKAPCTATWNSMISGYSLSGLQHRALSCYLEMREKGLKPDEITFLGVLSACNHGGFVDEGKICFRAMIKEFGISPTLQHYALMVGLLGRACLFTEALYLIWKMDIKPDSAVWGALLSACIIHRELEVGEYVARKMFMLDYKNGGLYVLMSNLYATEAMWDDVVRVRNMMKDNGYDGYLGVSQI

SEQ ID NO: 73059 - DNA, 1044 bp, Arabidopsis thaliana
  misc_feature (1)..(1044): Ceres Seq. ID no. 4956354
  misc_feature (1)..(1044): Ortholog of  Ceres SEQ ID NO 13660094 as cited in SEQ ID NO 60820
aaaaaacgataagggatctctctctaattggcgctcctttactaattgccctttaattccatccatcttcggattcttttcaaatcaacaaaaaaagtacaaatcggatccctacaatatcctctccactcttcacaaatccttctccgagatctacaaacgctgtttcattcttccgattacaatggcgacgagaagacgtactttgctcaaggtcattgtcctcggtgacagtggggttggaaaaacctccttgatgaatcaatatgtgcataagaagtttagtatgcagtataaagcaacgattggtgctgattttgtaaccaaggagcttcagattggggaaaagcttgttactttacagatttgggatactgctggacaagagagattccagagtcttggtgctgctttttatagaggagctgattgttgtgctttggtttatgatgttaatgtgttgaggtcttttgataatctcgaaacttggcatgaggagtttcttaaacaggcaagtccatcagatccaaagacatttccgtttatagtgcttggaaacaagattgacgtagatggagggagcagtagagtggtctctgataagaaagcagctgactggtgtgcttcaaatggtaacataccctatttcgagacatcagcaaaagatgacttcaatgtcgatgaggcattcttaaccattgccaaaaccgcccttgctaacgaacatgaacaggatatatacttccaaggcataccagatgcagtgactgaaaacgagccaaaaggcggtggttgcgcttgctgaaccacagatttgaggattcaatgacattcgtttttttgatgcattcatttgaaggttggtgtactcttgagttgcagaacgataagcttgtagaagcaattttttgtcattccatcatatattaattgattggagaagtctgtgtatgatcaatcgattctgctggatacaaattttatttttgtaagaagaaccattattgctcttaatccctatggcgatataaagttgcatgctac

SEQ ID NO: 73060 - protein, 267 aa, Arabidopsis thaliana
  peptide (1)..(267): Ceres Seq. ID no. 4956355
KNDKGSLSNWRSFTNCPLIPSIFGFFSNQQKKYKSDPYNILSTLHKSFSEIYKRCFILPITMATRRRTLLKVIVLGDSGVGKTSLMNQYVHKKFSMQYKATIGADFVTKELQIGEKLVTLQIWDTAGQERFQSLGAAFYRGADCCALVYDVNVLRSFDNLETWHEEFLKQASPSDPKTFPFIVLGNKIDVDGGSSRVVSDKKAADWCASNGNIPYFETSAKDDFNVDEAFLTIAKTALANEHEQDIYFQGIPDAVTENEPKGGGCAC

SEQ ID NO: 73061 - protein, 206 aa, Arabidopsis thaliana; identical to SEQ ID NO: 37351
  peptide (1)..(206): Ceres Seq. ID no. 4956356

SEQ ID NO: 73062 - protein, 182 aa, Arabidopsis thaliana; identical to SEQ ID NO: 37352
  peptide (1)..(182): Ceres Seq. ID no. 4956357

SEQ ID NO: 73063 - DNA, 1197 bp, Arabidopsis thaliana
  misc_feature (1)..(1197): Ceres Seq. ID no. 4956534
  misc_feature (1)..(1197): Ortholog of  Ceres SEQ ID NO 13647395 as cited in SEQ ID NO 20370
atgaaattggggtgtgcacttccaatgacgtgcatgattttggcatgctatattatttgtgggagccttctaatgagtcattgccatggtgttataaaagaagcaaagacattaaaaagtaatgaagatcttgaaatagagcacaaacttaagcttatcaacaaacctgcatttaaaatcgtaaagactattaatggtgaacgatatgggtgtgtggatttctacaaacaaccaggacttgaccactcatccatgaagaaccacacatttcaccataagatgcgtatgtcatactctgaaggatcaaaaatgaaaagaaagacacatagaaacacaacatttggccacttttgggagaatggcgtaggttgtcccattggtaccgttcctatacctcgagtcactaaagacgctcttttgagaatgaaatccttcgatagcgataattctaatccgcaaagttcgtggagcaaaacctataaacctgcatcttctattgacgatcatcattttgctgtggtgcgaactactaaaggaactaggagttacaatggtgcatctatgaatattaatacattcactccttcagttggacctatgcaattcagcgcttctcggatgcattttcaaattggaaatgaattcatccaagttggttggatcgtacacccacaattataccatgacttcaactctcggatattcgtatttacaaaatcgggaggaaatgcgtgttataatctcttctgtcctgacggatccggaatgatactagttcgtcaagacttaactcctggtctacttgccgagcaaaaaagtattgacttcgccataatgaaggacaaaatcaacgggaattggtggttgttgatgggtacatcttgggaagaagttgggttttggccatcaagcagattcaaagaaagttctggtacaatggtcgaatggggtggtgaagtctatagcccttcgcctccaaatcctccaatggggaatagtcattatccgaaggggagccccaaagtagactcatatgtccgtttaattacgactgtggacgaaaattataatactgacaaaacagtgaaaaacacagagaggtattcagacagttgttataaagtgagagatgcaacggagacgttttggagccatgtcggtcatcttattatatatggaggccctgggtgtaaataa

SEQ ID NO: 73064 - protein, 398 aa, Arabidopsis thaliana
  peptide (1)..(398): Ceres Seq. ID no. 4956535
MKLGCALPMTCMILACYIICGSLLMSHCHGVIKEAKTLKSNEDLEIEHKLKLINKPAFKIVKTINGERYGCVDFYKQPGLDHSSMKNHTFHHKMRMSYSEGSKMKRKTHRNTTFGHFWENGVGCPIGTVPIPRVTKDALLRMKSFDSDNSNPQSSWSKTYKPASSIDDHHFAVVRTTKGTRSYNGASMNINTFTPSVGPMQFSASRMHFQIGNEFIQVGWIVHPQLYHDFNSRIFVFTKSGGNACYNLFCPDGSGMILVRQDLTPGLLAEQKSIDFAIMKDKINGNWWLLMGTSWEEVGFWPSSRFKESSGTMVEWGGEVYSPSPPNPPMGNSHYPKGSPKVDSYVRLITTVDENYNTDKTVKNTERYSDSCYKVRDATETFWSHVGHLIIYGGPGCK

SEQ ID NO: 73065 - protein, 390 aa, Arabidopsis thaliana
  peptide (1)..(390): Ceres Seq. ID no. 4956536
MTCMILACYIICGSLLMSHCHGVIKEAKTLKSNEDLEIEHKLKLINKPAFKIVKTINGERYGCVDFYKQPGLDHSSMKNHTFHHKMRMSYSEGSKMKRKTHRNTTFGHFWENGVGCPIGTVPIPRVTKDALLRMKSFDSDNSNPQSSWSKTYKPASSIDDHHFAVVRTTKGTRSYNGASMNINTFTPSVGPMQFSASRMHFQIGNEFIQVGWIVHPQLYHDFNSRIFVFTKSGGNACYNLFCPDGSGMILVRQDLTPGLLAEQKSIDFAIMKDKINGNWWLLMGTSWEEVGFWPSSRFKESSGTMVEWGGEVYSPSPPNPPMGNSHYPKGSPKVDSYVRLITTVDENYNTDKTVKNTERYSDSCYKVRDATETFWSHVGHLIIYGGPGCK

SEQ ID NO: 73066 - protein, 387 aa, Arabidopsis thaliana
  peptide (1)..(387): Ceres Seq. ID no. 4956537
MILACYIICGSLLMSHCHGVIKEAKTLKSNEDLEIEHKLKLINKPAFKIVKTINGERYGCVDFYKQPGLDHSSMKNHTFHHKMRMSYSEGSKMKRKTHRNTTFGHFWENGVGCPIGTVPIPRVTKDALLRMKSFDSDNSNPQSSWSKTYKPASSIDDHHFAVVRTTKGTRSYNGASMNINTFTPSVGPMQFSASRMHFQIGNEFIQVGWIVHPQLYHDFNSRIFVFTKSGGNACYNLFCPDGSGMILVRQDLTPGLLAEQKSIDFAIMKDKINGNWWLLMGTSWEEVGFWPSSRFKESSGTMVEWGGEVYSPSPPNPPMGNSHYPKGSPKVDSYVRLITTVDENYNTDKTVKNTERYSDSCYKVRDATETFWSHVGHLIIYGGPGCK

SEQ ID NO: 73067 - DNA, 1175 bp, Arabidopsis thaliana
  misc_feature (1)..(1175): Ceres Seq. ID no. 4956558
  misc_feature (1)..(1175): Ortholog of  Ceres SEQ ID NO 14301430 as cited in SEQ ID NO 56553
  misc_feature (1)..(1175): Ortholog of  Ceres SEQ ID NO 13639124 as cited in SEQ ID NO 56718
  misc_feature (1)..(1175): Ortholog of  Ceres SEQ ID NO 15175700 as cited in SEQ ID NO 58584
  misc_feature (1)..(1175): Ortholog of  Ceres SEQ ID NO 13596474 as cited in SEQ ID NO 62169
  misc_feature (1)..(1175): Ortholog of  Ceres SEQ ID NO 13598714 as cited in SEQ ID NO 62656
  misc_feature (1)..(1175): Ortholog of  Ceres SEQ ID NO 13596969 as cited in SEQ ID NO 63375
  misc_feature (1)..(1175): Ortholog of  Ceres SEQ ID NO 13597519 as cited in SEQ ID NO 64759
  misc_feature (1)..(1175): Ortholog of  Ceres SEQ ID NO 13597870 as cited in SEQ ID NO 64982
  misc_feature (1)..(1175): Ortholog of  Ceres SEQ ID NO 13656123 as cited in SEQ ID NO 65212
  misc_feature (1)..(1175): Ortholog of  Ceres SEQ ID NO 13595926 as cited in SEQ ID NO 67778
  misc_feature (1)..(1175): Ortholog of  Ceres SEQ ID NO 13662323 as cited in SEQ ID NO 68305
aaacatagttaaaccaaattttctaagtgtctcataaaaaatgacgagattcggattagctcttttgatgattcttgtgattcaagggcttgtgaccttttcagaagcacaattgaagatgggattctacgaccaaacgtgcccttacgcagagaagatcgtacaagatgttgtcaaccaacatataaacaatgcaccctctttggctgctggcctaattaggatgcattttcatgactgcttcgttcggggttgtgatggttccatcttgatcaacgcgacatcgagcaaccaacaagtggagaagcttgctcctccgaatctaactgtgagaggtttcgattttatcgataaagtaaagtctgctctagaatcaaagtgccctggaatcgtctcttgcgctgatatcatcacacttgctactagagactctattgttgctattgcttagggtggaccgacatggaacgttccaacggggcgcagagacggacgtatctctaactttgccgaggctatgaacaatattcctcctcctttcggaaacttcacgactctgataaccctctttggaaaccaaggacttgatgttaaagacctcgtcttgttatccggtgcccacacgattggagtgtctcattgctcctccttctcaaaccgtctcttcaatttcaccggcgttggagaccaagatccatcgctcgacagcgaatatgccgacaatctcaaatcacggagatgtttatctatcgctgacaataccacaaaagtcgaaatggatcccggtagtcgaaacaccttcgatcttagctactaccgtcttgtcctaaaacgtcgtggactttttgagtctgacgctgcattgactatgaatcctgcggcattggctcaggtcaaacgcttcgccggaggatcggagcaagagttctttgctgagttctccaactccatggagaaaatgggaaggattggggtcaaaacagggtcggatggggagattcgaagaacatgtgcatttgttaactaaaagtgtttcttactttttctttcgcaacttttttgttttgttttaaatatcttttatattggtttttatgttccttttgtcaacttttttgggtgtttggaagaatttcgagatatgtattattgtatgtggtgaatatgtgattttc

SEQ ID NO: 73068 - protein, 169 aa, Arabidopsis thaliana; identical to SEQ ID NO: 23987
  peptide (1)..(169): Ceres Seq. ID no. 4956559

SEQ ID NO: 73069 - protein, 136 aa, Arabidopsis thaliana
  peptide (1)..(136): Ceres Seq. ID no. 4956560
MTRFGLALLMILVIQGLVTFSEAQLKMGFYDQTCPYAEKIVQDVVNQHINNAPSLAAGLIRMHFHDCFVRGCDGSILINATSSNQQVEKLAPPNLTVRGFDFIDKVKSALESKCPGIVSCADIITLATRDSIVAIA

SEQ ID NO: 73070 - protein, 127 aa, Arabidopsis thaliana
  peptide (1)..(127): Ceres Seq. ID no. 4956561
MILVIQGLVTFSEAQLKMGFYDQTCPYAEKIVQDVVNQHINNAPSLAAGLIRMHFHDCFVRGCDGSILINATSSNQQVEKLAPPNLTVRGFDFIDKVKSALESKCPGIVSCADIITLATRDSIVAIA

SEQ ID NO: 73071 - DNA, 1282 bp, Arabidopsis thaliana
  misc_feature (1)..(1282): Ceres Seq. ID no. 4956562
  misc_feature (1)..(1282): Ortholog of  Ceres SEQ ID NO 13596392 as cited in SEQ ID NO 62136
  misc_feature (1)..(1282): Ortholog of  Ceres SEQ ID NO 13654360 as cited in SEQ ID NO 67980
  misc_feature (1)..(1282): Ortholog of  Ceres SEQ ID NO 13596394 as cited in SEQ ID NO 68561
aacgatacgaacccagagacgtcggcggttaaaacaatcgtcggatctctctggattcgttagacgagaagtttccggtatctaatttctgtgcgttagagagaaattagggttgttgctacgatggatgagactttacttgacgatataatacgacggcttttggcgacgaataatggaaggacggtgaagcaagcacagattactgagacggagatacgtcagctatgtttagcttcaaaagaggtttttctcagtcagcctaatctcctcgagctcgaggctcctatcaagatttgcggagatgttcatggtcagtttccagacctcttgcggttgtttgagtatggtggttatccaccagctgcgaactacttgtttcttggggattatgttgatcgtggtaagcagagcatagagacgatatgccttcttcttgcctataaggtcaaatacaagttcaacttctttcttctcagaggcaatcacgaatgtgcttcaatcaaccgtgtatatggattctacgatgaatgcaaaagaagatataatgttcgcttatggaaaacattcaccgagtgcttcaactgtctgcctgtttctgctctcattgatgataagatcctctgcatgcatggtggactatcgcctgatattaagagcttagatgacatcaggagaattcctcgtcctattgacgttcctgatcagggcattctttgtgatttgttgtgggctgatcctgacagagagattcaaggctggggggagaatgacagaggtgtctcttatacatttggggctgacaaagtagctgagttccttcaaactcatgaccttgatcttatatgccgagctcatcaggttgtagaagatggatacgagttctttgcaaagagacaactagtgacaatattctctgcacccaattactgtggcgagtttgacaatgctggtgcattgatgagtgttgatgatagcttaacatgttcattccaaatccttaaggcatctgagaagaaaggaagatttggattcaacaacaatgttcctagaccaggaaccccacctcataagggtggaaaaggtcgttaactcgtcgtcgatgggttcaagaaacgagtgaaaccgacgggttcgaattttgtaaggcaaacagtttgttttgttagattgttatctgttttcttatggttgaggcaacattatgttttgtttagattttttttgtaaaaattgtggaagatgttcacagcattttcaactgaagaaagttgggttttat

SEQ ID NO: 73072 - protein, 322 aa, Arabidopsis thaliana; identical to SEQ ID NO: 34859
  peptide (1)..(322): Ceres Seq. ID no. 4956563

SEQ ID NO: 73073 - DNA, 1170 bp, Arabidopsis thaliana
  misc_feature (1)..(1170): Ceres Seq. ID no. 4957067
  misc_feature (1)..(1170): Ortholog of  Ceres SEQ ID NO 14306797 as cited in SEQ ID NO 53354
  misc_feature (1)..(1170): Ortholog of  Ceres SEQ ID NO 15176525 as cited in SEQ ID NO 54495
  misc_feature (1)..(1170): Ortholog of  Ceres SEQ ID NO 15169519 as cited in SEQ ID NO 67237
aaacgcatttggtaggctgagagaaagaaagaaaaagataaagatggatcacgcagcagatgctcaccgtacggatttgatgaccattacaagattcgtgttgaatgaacaatcaaagtatccagaatctcgtggtgatttcaccattttgcttagtcacatcgttttgggttgcaaattcgtttgcagtgctgttaataaggctggtttggctaagttaattggacttgcaggggaaacaaacattcagggtgaagagcaaaagaaacttgatgtgctctctaatgatgtctttgtcaacgctttggttagcagtggtagaacttctgttcttgtctcggaggaagatgaggaagctacgtttgtggagccatccaagcgtggaaagtactgtgttgtttttgatccgcttgatggatcttcaaacattgactgtggtgtttccattggcacaatgttctgaaacctgggaatgaaatggtggctgcaggttattgtatgtacggaagctcctgcatgcttgtgttgagcactggaaccggtgtccacggatttacactggacccatctctaggagagttcattctaactcacccggacattaagattccaaataagggaaacatttattcggtgaatgaaggcaatgcgcagaactgggatggtccaactacaaagtatgtagagaaatgcaagtttcctaaagatggttctcctgcaaagtctctgagatacgtaggaagtatggtagctgatgttcatcgtacactactttatggaggaatcttcttgtacccggctgacaagaaaagccccaatggaaaattgcgtgtcttgtatgaagttttcccgatgtcgtttttgatggagcaagccggaggtcaggcctttacgggaaagaaaagggcgctagaccttgtcccggagaagatccatgagcgttctccgatatttcttggtagctacgatgatgtagaagagattaaagctctctatgctgaggaggaaaagaagaactaagcttctcattcttcttttattctcttactgtctctgtctctcttatttctatatacagtatcttcttctgatgagaagaacaatataactcatttacaaaaggaagatctttctttatcattaaatgcacataaaaatcttctttctttc

SEQ ID NO: 73074 - protein, 180 aa, Arabidopsis thaliana
  peptide (1)..(180): Ceres Seq. ID no. 4957068
MVAAGYCMYGSSCMLVLSTGTGVHGFTLDPSLGEFILTHPDIKIPNKGNIYSVNEGNAQNWDGPTTKYVEKCKFPKDGSPAKSLRYVGSMVADVHRTLLYGGIFLYPADKKSPNGKLRVLYEVFPMSFLMEQAGGQAFTGKKRALDLVPEKIHERSPIFLGSYDDVEEIKALYAEEEKKN

SEQ ID NO: 73075 - protein, 173 aa, Arabidopsis thaliana
  peptide (1)..(173): Ceres Seq. ID no. 4957069
MYGSSCMLVLSTGTGVHGFTLDPSLGEFILTHPDIKIPNKGNIYSVNEGNAQNWDGPTTKYVEKCKFPKDGSPAKSLRYVGSMVADVHRTLLYGGIFLYPADKKSPNGKLRVLYEVFPMSFLMEQAGGQAFTGKKRALDLVPEKIHERSPIFLGSYDDVEEIKALYAEEEKKN

SEQ ID NO: 73076 - protein, 167 aa, Arabidopsis thaliana
  peptide (1)..(167): Ceres Seq. ID no. 4957070
MLVLSTGTGVHGFTLDPSLGEFILTHPDIKIPNKGNIYSVNEGNAQNWDGPTTKYVEKCKFPKDGSPAKSLRYVGSMVADVHRTLLYGGIFLYPADKKSPNGKLRVLYEVFPMSFLMEQAGGQAFTGKKRALDLVPEKIHERSPIFLGSYDDVEEIKALYAEEEKKN

SEQ ID NO: 73077 - DNA, 1902 bp, Arabidopsis thaliana
  misc_feature (1)..(1902): Ceres Seq. ID no. 4957173
  misc_feature (1)..(1902): Ortholog of  Ceres SEQ ID NO 12586556 as cited in SEQ ID NO 64667
  misc_feature (1)..(1902): Ortholog of  Ceres SEQ ID NO 13660894 as cited in SEQ ID NO 67475
atgttccaactgctccgacgagctcatggactttgcatgccgtcctctctctacttctcgcgtctcgtaaaccgctctttactctcaaagtctccaactttagccaaaatcgtccatgcccagctcctggaagctggattcgtacgcactacttattggggaaatcgctgccttcagctctacttcaaatccggatccgtcatcaatgccctccaactgttcgacgatattcctgataagaacaccataacctggaacgtttgcttaaagggtttgtttaaaaatggttatctcaataacgcacttgacctgttcgacgaaatgcctgaacgagatgttgttagctggaatacaatgatttcagggttggtttcttgtgggtttcatgaatatgggattagggttttcttcgatatgcagagatgggagattagaccaacggagtttactttttcgattctagcttctcttgttacttgtgttcgacatggggaacagattcatggtaatgctatttgtagtggtgtgagtaggtataatttggttgtgtggaactctgttatggatatgtatagaagattaggagtttttgattacgcgttatcggtgtttttaactatggaggatagagatgttgtctcgtggaactgtttgattttgtcttgttccgattctggtaataaggaagtggctttggatcagttttggttgatgagagaaatggagattcaacctgatgaatatacagtttcgatggttgtgtctatttgctctgatttacgagaactgagtaagggtaagcaggctcttgctctttgtatcaagatggggtttttatctaacagtattgttttaggagctgggattgatatgttttccaaatgtaacagattggatgattcggttaaactttttagagagttggagaaatgggattcagtgttgtgcaattccatgatcggtagctattcgtggcattgttgtggagaagatgctcttcggctctttatccttgccatgacgcagagtgttaggcctgataagttcacgttcagtagcgttctgagctcaatgaatgctgtgatgctagatcacggagcagacgttcattctttggttattaagttagggtttgatttggatacggcagtagctacctcactcatggagatgtacttcaaaaccggttcagttgatttagcaatgggagtgtttgccaaaacagatggaaaagatttgatcttttggaacacagtgataatgggcttggcgagaaacagtagagcagttgagtcccttgccattttcaatcaattgctgatgaaccaaagtctgaaacccgatagagtgacgttaatgggtatcttagtagcttgttgttatgctggctttgttaatgaaggaattcagatattctcttcaatggaaaaggctcatggagttaatcccgggaacgagcattacgcctgtataatcgaattgctttgcagagtcggtatgatcaatgaagcaaaggacattgctgacaagataccttttgaaccaagctctcatatctgggaaccgattctctgtgcatctcttgatcttggagacacaagactcgctgagactgtagcgaaaactatgttagaatctgaaccaaagtcatcttttccttacctggttctgattaagatatacgagatgacatggcgctgggaaaattcagtgaagttaagatacgccatgaatgaacataagttgaaatcggctcaaggatcgagcaagatcagtatagagagcagtgtgttcagcttcgaggctgaccagttgcaaattcatggaggtcatgatacttgcgcactcttggacttattgtcttgggattcttttgatcagaaaattcattggtctgcataa

SEQ ID NO: 73078 - protein, 633 aa, Arabidopsis thaliana
  peptide (1)..(633): Ceres Seq. ID no. 4957174
MFQLLRRAHGLCMPSSLYFSRLVNRSLLSKSPTLAKIVHAQLLEAGFVRTTYWGNRCLQLYFKSGSVINALQLFDDIPDKNTITWNVCLKGLFKNGYLNNALDLFDEMPERDVVSWNTMISGLVSCGFHEYGIRVFFDMQRWEIRPTEFTFSILASLVTCVRHGEQIHGNAICSGVSRYNLVVWNSVMDMYRRLGVFDYALSVFLTMEDRDVVSWNCLILSCSDSGNKEVALDQFWLMREMEIQPDEYTVSMVVSICSDLRELSKGKQALALCIKMGFLSNSIVLGAGIDMFSKCNRLDDSVKLFRELEKWDSVLCNSMIGSYSWHCCGEDALRLFILAMTQSVRPDKFTFSSVLSSMNAVMLDHGADVHSLVIKLGFDLDTAVATSLMEMYFKTGSVDLAMGVFAKTDGKDLIFWNTVIMGLARNSRAVESLAIFNQLLMNQSLKPDRVTLMGILVACCYAGFVNEGIQIFSSMEKAHGVNPGNEHYACIIELLCRVGMINEAKDIADKIPFEPSSHIWEPILCASLDLGDTRLAETVAKTMLESEPKSSFPYLVLIKIYEMTWRWENSVKLRYAMNEHKLKSAQGSSKISIESSVFSFEADQLQIHGGHDTCALLDLLSWDSFDQKIHWSA

SEQ ID NO: 73079 - protein, 621 aa, Arabidopsis thaliana
  peptide (1)..(621): Ceres Seq. ID no. 4957175
MPSSLYFSRLVNRSLLSKSPTLAKIVHAQLLEAGFVRTTYWGNRCLQLYFKSGSVINALQLFDDIPDKNTITWNVCLKGLFKNGYLNNALDLFDEMPERDVVSWNTMISGLVSCGFHEYGIRVFFDMQRWEIRPTEFTFSILASLVTCVRHGEQIHGNAICSGVSRYNLVVWNSVMDMYRRLGVFDYALSVFLTMEDRDVVSWNCLILSCSDSGNKEVALDQFWLMREMEIQPDEYTVSMVVSICSDLRELSKGKQALALCIKMGFLSNSIVLGAGIDMFSKCNRLDDSVKLFRELEKWDSVLCNSMIGSYSWHCCGEDALRLFILAMTQSVRPDKFTFSSVLSSMNAVMLDHGADVHSLVIKLGFDLDTAVATSLMEMYFKTGSVDLAMGVFAKTDGKDLIFWNTVIMGLARNSRAVESLAIFNQLLMNQSLKPDRVTLMGILVACCYAGFVNEGIQIFSSMEKAHGVNPGNEHYACIIELLCRVGMINEAKDIADKIPFEPSSHIWEPILCASLDLGDTRLAETVAKTMLESEPKSSFPYLVLIKIYEMTWRWENSVKLRYAMNEHKLKSAQGSSKISIESSVFSFEADQLQIHGGHDTCALLDLLSWDSFDQKIHWSA

SEQ ID NO: 73080 - protein, 526 aa, Arabidopsis thaliana
  peptide (1)..(526): Ceres Seq. ID no. 4957176
MPERDVVSWNTMISGLVSCGFHEYGIRVFFDMQRWEIRPTEFTFSILASLVTCVRHGEQIHGNAICSGVSRYNLVVWNSVMDMYRRLGVFDYALSVFLTMEDRDVVSWNCLILSCSDSGNKEVALDQFWLMREMEIQPDEYTVSMVVSICSDLRELSKGKQALALCIKMGFLSNSIVLGAGIDMFSKCNRLDDSVKLFRELEKWDSVLCNSMIGSYSWHCCGEDALRLFILAMTQSVRPDKFTFSSVLSSMNAVMLDHGADVHSLVIKLGFDLDTAVATSLMEMYFKTGSVDLAMGVFAKTDGKDLIFWNTVIMGLARNSRAVESLAIFNQLLMNQSLKPDRVTLMGILVACCYAGFVNEGIQIFSSMEKAHGVNPGNEHYACIIELLCRVGMINEAKDIADKIPFEPSSHIWEPILCASLDLGDTRLAETVAKTMLESEPKSSFPYLVLIKIYEMTWRWENSVKLRYAMNEHKLKSAQGSSKISIESSVFSFEADQLQIHGGHDTCALLDLLSWDSFDQKIHWSA

SEQ ID NO: 73081 - DNA, 1032 bp, Arabidopsis thaliana
  misc_feature (1)..(1032): Ceres Seq. ID no. 4957285
  misc_feature (1)..(1032): Ortholog of  Ceres SEQ ID NO 15176387 as cited in SEQ ID NO 53372
atggcgagagtttgtcttccttgttctttccttcgtacctctactctctcgattctcttccgttcaccgattctctccacaaccgccgcaatttcattttgctcgtcgtcggagttcgccgactctgtagccaaggatgattcaaaacgcggtcctctcaagcctgggctttacctcgtcggaactccaatcggaaacctcgaagatatcactttacgtgcgattcgtgtattgagatctgcggatgtgatactctctgaggatacaagacactctgggaagttgctacagtattacaatattaaagctcagcttcttagttatcacaagttcaacgaggctcagagagaacaagcggtgttgacacggttgaaacaaggagagattgttgcacttatcagcgatgctggcacaccgggaattagtgatcccggtactcaacttgctaaaatgtgtgcgaaagaaaatatagatgtgattccaatccctggggcttgtgctgtagttgctgctctttctgcatctggtttggagacagatgagttcacattcgttggatttcttcctaagcattctggaacaaggaaggagaggctgattgtttcatcaaatgagacaagaacacagatcttttatgttccccctcataagttgtcacagtttcttgaagaaacaaccccttactttggtgaatcaaggcaatgtgtaatagctcgagagattacaaagctgcatgaagagttttggaggggttcgatagcggaagccaagcaagagtttctgatccgccaaccaaaaggagaaatcacgcttttgatagaaggaaaggaagaaaccaaagctgaaaatccaacagagtctcaacttgaagaagagttgagaggcctgatctctgatgggcatagcctttccacggcggtgaaaacggttgcagaaagaacatcaatgagaaagaaagaagtatattctctggcattgaagaaattcgggaagcagattcgggtagaagaagaagatgaagctgatgagtaa

SEQ ID NO: 73082 - protein, 343 aa, Arabidopsis thaliana
  peptide (1)..(343): Ceres Seq. ID no. 4957286
MARVCLPCSFLRTSTLSILFRSPILSTTAAISFCSSSEFADSVAKDDSKRGPLKPGLYLVGTPIGNLEDITLRAIRVLRSADVILSEDTRHSGKLLQYYNIKAQLLSYHKFNEAQREQAVLTRLKQGEIVALISDAGTPGISDPGTQLAKMCAKENIDVIPIPGACAVVAALSASGLETDEFTFVGFLPKHSGTRKERLIVSSNETRTQIFYVPPHKLSQFLEETTPYFGESRQCVIAREITKLHEEFWRGSIAEAKQEFLIRQPKGEITLLIEGKEETKAENPTESQLEEELRGLISDGHSLSTAVKTVAERTSMRKKEVYSLALKKFGKQIRVEEEDEADE

SEQ ID NO: 73083 - protein, 193 aa, Arabidopsis thaliana
  peptide (1)..(193): Ceres Seq. ID no. 4957287
MCAKENIDVIPIPGACAVVAALSASGLETDEFTFVGFLPKHSGTRKERLIVSSNETRTQIFYVPPHKLSQFLEETTPYFGESRQCVIAREITKLHEEFWRGSIAEAKQEFLIRQPKGEITLLIEGKEETKAENPTESQLEEELRGLISDGHSLSTAVKTVAERTSMRKKEVYSLALKKFGKQIRVEEEDEADE

SEQ ID NO: 73084 - DNA, 1014 bp, Arabidopsis thaliana
  misc_feature (1)..(1014): Ceres Seq. ID no. 4957360
  misc_feature (1)..(1014): Ortholog of  Ceres SEQ ID NO 15176387 as cited in SEQ ID NO 53372
atggcgagagtttgtcttccttgttctttccttcgtacctctactctctcgattctcttccgttcaccgattctctccacaaccgccgcaatttcattttgctcgtcgtcggagttcgccgactctgtagccaaggatgattcaaaacgcggtcctctcaagcctgggctttacctcgtcggaactccaatcggaaacctcgaagatatcactttacgatctgcggatgtgatactctctgaggatacaagacactctgggaagttgctacagtattacaatattaaagctcagcttcttagttatcacaagttcaacgaggctcagagagaacaagcggtgttgacacggttgaaacaaggagagattgttgcacttatcagcgatgctggcacaccgggaattagtgatcccggtactcaacttgctaaaatgtgtgcgaaagaaaatatagatgtgattccaatccctggggcttgtgctgtagttgctgctctttctgcatctggtttggagacagatgagttcacattcgttggatttcttcctaagcattctggaacaaggaaggagaggctgattgtttcatcaaatgagacaagaacacagatcttttatgttccccctcataagttgtcacagtttcttgaagaaacaaccccttactttggtgaatcaaggcaatgtgtaatagctcgagagattacaaagctgcatgaagagttttggaggggttcgatagcggaagccaagcaagagtttctgatccgccaaccaaaaggagaaatcacgcttttgatagaaggaaaggaagaaaccaaagctgaaaatccaacagagtctcaacttgaagaagagttgagaggcctgatctctgatgggcatagcctttccacggcggtgaaaacggttgcagaaagaacatcaatgagaaagaaagaagtatattctctggcattgaagaaattcgggaagcagattcgggtagaagaagaagatgaagctgatgagtaa

SEQ ID NO: 73085 - protein, 337 aa, Arabidopsis thaliana
  peptide (1)..(337): Ceres Seq. ID no. 4957361
MARVCLPCSFLRTSTLSILFRSPILSTTAAISFCSSSEFADSVAKDDSKRGPLKPGLYLVGTPIGNLEDITLRSADVILSEDTRHSGKLLQYYNIKAQLLSYHKFNEAQREQAVLTRLKQGEIVALISDAGTPGISDPGTQLAKMCAKENIDVIPIPGACAVVAALSASGLETDEFTFVGFLPKHSGTRKERLIVSSNETRTQIFYVPPHKLSQFLEETTPYFGESRQCVIAREITKLHEEFWRGSIAEAKQEFLIRQPKGEITLLIEGKEETKAENPTESQLEEELRGLISDGHSLSTAVKTVAERTSMRKKEVYSLALKKFGKQIRVEEEDEADE

SEQ ID NO: 73086 - protein, 193 aa, Arabidopsis thaliana; identical to SEQ ID NO: 73083
  peptide (1)..(193): Ceres Seq. ID no. 4957362

SEQ ID NO: 73087 - DNA, 786 bp, Arabidopsis thaliana
  misc_feature (1)..(786): Ceres Seq. ID no. 4957382
  misc_feature (1)..(786): Ortholog of  Ceres SEQ ID NO 13639033 as cited in SEQ ID NO 55960
atgagaatgttagttcttcgcactcccaccggacctgtctccgccgtcagattcatcaccaaatccaaaccttctcctttctcttctcccgattcatggctcctccctgcaccaaacactcaccggagtcgtccccgcgtcgtcctcgctctctctaaccccgacggaagcgtcaactcaaaaccctcaacctcagcttctcaaatcccttcttcaggagatgaaacagttttcgtgggtcaagataatgttcctctcgagggcgtgattcaattcgataaaccgtcatctacttcatcttctaacattaccaaatggggtcgtgtggctttacttgcgggtggtgatgttttagctctgcttatcttctctgccattgggagatttagccatggtttccctgttttttctcttgatactctccacacagctgaccctttcattgcgggatggtttctgagtgcttatttcttggggggttatgcggaggaaggacgaggaatgaagggaaagtctaaagctgtggttgcagctgcgaaatcttggattgtcggaactccgcttggaattatcattaggtcagcttcatcaggtcacattccggcatatagctttgtgttggtgacaatgggaagtactgctgttttacttataggatggagagcattgttattcagtgtgcttcctacagagtccaagaagaaagatgatacgtatcggaagggtagtgcattcgagctatttgagtatttaccgtgtttgttcaaaggtgatgctaatgaatga

SEQ ID NO: 73088 - protein, 261 aa, Arabidopsis thaliana
  peptide (1)..(261): Ceres Seq. ID no. 4957383
MRMLVLRTPTGPVSAVRFITKSKPSPFSSPDSWLLPAPNTHRSRPRVVLALSNPDGSVNSKPSTSASQIPSSGDETVFVGQDNVPLEGVIQFDKPSSTSSSNITKWGRVALLAGGDVLALLIFSAIGRFSHGFPVFSLDTLHTADPFIAGWFLSAYFLGGYAEEGRGMKGKSKAVVAAAKSWIVGTPLGIIIRSASSGHIPAYSFVLVTMGSTAVLLIGWRALLFSVLPTESKKKDDTYRKGSAFELFEYLPCLFKGDANE

SEQ ID NO: 73089 - protein, 259 aa, Arabidopsis thaliana
  peptide (1)..(259): Ceres Seq. ID no. 4957384
MLVLRTPTGPVSAVRFITKSKPSPFSSPDSWLLPAPNTHRSRPRVVLALSNPDGSVNSKPSTSASQIPSSGDETVFVGQDNVPLEGVIQFDKPSSTSSSNITKWGRVALLAGGDVLALLIFSAIGRFSHGFPVFSLDTLHTADPFIAGWFLSAYFLGGYAEEGRGMKGKSKAVVAAAKSWIVGTPLGIIIRSASSGHIPAYSFVLVTMGSTAVLLIGWRALLFSVLPTESKKKDDTYRKGSAFELFEYLPCLFKGDANE

SEQ ID NO: 73090 - DNA, 1179 bp, Arabidopsis thaliana
  misc_feature (1)..(1179): Ceres Seq. ID no. 4957757
  misc_feature (1)..(1179): Ortholog of  Ceres SEQ ID NO 13599900 as cited in SEQ ID NO 531
  misc_feature (1)..(1179): Ortholog of  Ceres SEQ ID NO 15171402 as cited in SEQ ID NO 51174
  misc_feature (1)..(1179): Ortholog of  Ceres SEQ ID NO 13659971 as cited in SEQ ID NO 67565
atgcttgatgattacatagcgaaatcgaagctcagtgagagtttaacctctacggtttggttagcgaagcacaagttaaccggcgaagaagcagtgatgaagtgtttcgacctctcgaagctcaatcgcaatctccgagactgtttaaacaacgaactggagtttctatcttctgttgatcatcccaatatcattcgtctcctccatgtttctcaagatgatgattttctcgttatggttttggaatattgtgatggaggaactttatcatcgtatattcaacgttatggtagagttgaagaagatatcgccaagagatttatgaagcaaattggagctggtttggaaattattcatgataatcacattatccatagagacttgaaacctgagaatattttaattgacggatctggtgatgatttggtgttgaagattgccgattttagtcttgcaagaaaactacatccgggcaagtatcttgaaacagtgtgtggttctccgttttacatggctcctgaagttcttcagtttcagagatacaatgaaaaggctgatatgtggagtgtaggagcaatccttttcgagctacttcacgggtatccaccattccgtggtaataacaatgttcaggttctaaggaacatcaaatctagtacagctcttccattctctcggcttattcttcaacagatgcatcctgattgcatcgacgtctgctcaagattgctttctattaacccagctgccacactgggcatagaagattttccttttcttggccgtataaagaacagtagggtttgggtcaaggacacaacattttcttcaagacaacatggaacaagggaaagaaaagtggctacaattaacggaagacttcaatttgacctttcacaggatgcatacctcccacagaggcttcttgaaaacctgatgtatatttacaatactattgaaatggctcgtgtaactggagtccctacctcctaccttatttcaagaggagagagcatcaaggttctatctcaactacttaggaaagctaaacagaaaacctggttcttccaaatgctgagaagttggaacctgaacaaggaacttatgaaggttttagaagcaagaactggtttctacgagccaattgctactctggattttgcttcgttgtactcgtaa

SEQ ID NO: 73091 - protein, 392 aa, Arabidopsis thaliana
  peptide (1)..(392): Ceres Seq. ID no. 4957758
MLDDYIAKSKLSESLTSTVWLAKHKLTGEEAVMKCFDLSKLNRNLRDCLNNELEFLSSVDHPNIIRLLHVSQDDDFLVMVLEYCDGGTLSSYIQRYGRVEEDIAKRFMKQIGAGLEIIHDNHIIHRDLKPENILIDGSGDDLVLKIADFSLARKLHPGKYLETVCGSPFYMAPEVLQFQRYNEKADMWSVGAILFELLHGYPPFRGNNNVQVLRNIKSSTALPFSRLILQQMHPDCIDVCSRLLSINPAATLGIEDFPFLGRIKNSRVWVKDTTFSSRQHGTRERKVATINGRLQFDLSQDAYLPQRLLENLMYIYNTIEMARVTGVPTSYLISRGESIKVLSQLLRKAKQKTWFFQMLRSWNLNKELMKVLEARTGFYEPIATLDFASLYS

SEQ ID NO: 73092 - protein, 360 aa, Arabidopsis thaliana
  peptide (1)..(360): Ceres Seq. ID no. 4957759
MKCFDLSKLNRNLRDCLNNELEFLSSVDHPNIIRLLHVSQDDDFLVMVLEYCDGGTLSSYIQRYGRVEEDIAKRFMKQIGAGLEIIHDNHIIHRDLKPENILIDGSGDDLVLKIADFSLARKLHPGKYLETVCGSPFYMAPEVLQFQRYNEKADMWSVGAILFELLHGYPPFRGNNNVQVLRNIKSSTALPFSRLILQQMHPDCIDVCSRLLSINPAATLGIEDFPFLGRIKNSRVWVKDTTFSSRQHGTRERKVATINGRLQFDLSQDAYLPQRLLENLMYIYNTIEMARVTGVPTSYLISRGESIKVLSQLLRKAKQKTWFFQMLRSWNLNKELMKVLEARTGFYEPIATLDFASLYS

SEQ ID NO: 73093 - protein, 314 aa, Arabidopsis thaliana
  peptide (1)..(314): Ceres Seq. ID no. 4957760
MVLEYCDGGTLSSYIQRYGRVEEDIAKRFMKQIGAGLEIIHDNHIIHRDLKPENILIDGSGDDLVLKIADFSLARKLHPGKYLETVCGSPFYMAPEVLQFQRYNEKADMWSVGAILFELLHGYPPFRGNNNVQVLRNIKSSTALPFSRLILQQMHPDCIDVCSRLLSINPAATLGIEDFPFLGRIKNSRVWVKDTTFSSRQHGTRERKVATINGRLQFDLSQDAYLPQRLLENLMYIYNTIEMARVTGVPTSYLISRGESIKVLSQLLRKAKQKTWFFQMLRSWNLNKELMKVLEARTGFYEPIATLDFASLYS

SEQ ID NO: 73094 - DNA, 2097 bp, Arabidopsis thaliana
  misc_feature (1)..(2097): Ceres Seq. ID no. 4957791
  misc_feature (1)..(2097): Ortholog of  Ceres SEQ ID NO 14305750 as cited in SEQ ID NO 52458
  misc_feature (1)..(2097): Ortholog of  Ceres SEQ ID NO 14314252 as cited in SEQ ID NO 57492
  misc_feature (1)..(2097): Ortholog of  Ceres SEQ ID NO 12608276 as cited in SEQ ID NO 57871
  misc_feature (1)..(2097): Ortholog of  Ceres SEQ ID NO 13598492 as cited in SEQ ID NO 63882
  misc_feature (1)..(2097): Ortholog of  Ceres SEQ ID NO 13657914 as cited in SEQ ID NO 66230
  misc_feature (1)..(2097): Ortholog of  Ceres SEQ ID NO 13595877 as cited in SEQ ID NO 67702
  misc_feature (1)..(2097): Ortholog of  Ceres SEQ ID NO 13622667 as cited in SEQ ID NO 0
atggaatctgaaatcgcctccgagtttcttcctttctgccggatttacaaagacggtcgtgtagaacgactcatcggcaccgataccatcccggcctctctagatccaacatacgacgtcgtttcaaaagacgttatatactcaccggagaataacctctccgttcgtctcttcctccctcacaaatcaacaaaactcaccgccggtaacaagctccctctacttatctacatccacggcggagcttggatcatcgagtcacctttctccccactctaccacaattacctcactgaagtagtcaaatccgctaactgcctcgctgtctctgttcagtatcgccgtgcaccggaagatcctgttccggcggcttatgaagatgtatggtccgcgattcagtggatttttgctcattctaatggatctggtcctgtagattggattaacaaacacgccgatttcggtaaagttttcctcggcggagatagcgcaggcggtaacatatcgcatcacatggcgatgaaagctggtaaagagaagaagctagatctcaaaatcaaaggtattgctgttgttcatccagctttctggggaacagatccggttgatgaatacgatgtgcaagataaagaaacgagaagcggaatcgcggaaatttgggagaagattgcgagtccgaatagtgttaatgggacggatgatccgttgtttaatgtaaacggatccgggtcggatttttctgggttgggatgtgataaggttttggttgcggtagctgggaaagatgtgtttgttaggcaaggattggcttatgcggcgaagctggagaagtgtgagtgggaaggtactgttgaggtggttgaggaagaaggtgaggaccatgtgtttcatttgcagaatcctaaatctgataaggctttgaaattcttgaagaagtttgtcgagtttattattgaaaatattccgggaaccatgctccgaagaatcacttgttcttcttcacttgcttcaccctctctcttcctccgcttctttcgccaactccctcgctcttactcctcaccgaccaccatcgccgtctcaggccgcaacattcgccgactatcaactccaaccactcttcgttgcatttgttcacactcttcatctgaaatcatctccgagcatcctccgttcgtcagggtttacaaagacggtcgtatcgaacgtctttccggcaccgaaacagtcccggcttctctaaacccacgaaacgacgtcgtttcaaaagacgttgtctactcaccggggcataacctctccgttcgtctctttctccctcacaaatcaacacaactcgccgccggtaacaaactccctctacttatctacttccacggcggagcttggataaacgaatcccctttctccccaatctaccacaatttcctcacggaggtagttaaatccgctaactgcctcgccgtctcggttcaataccgccgtgcaccggaagatccggttccggctgcctatgaagatacatggtctgctattcaatggattttctcacattcctgtggatctggtgaagaagattggattaacaaatacgctgatttcgaaagagtttttctcgccggagatagtgccggtggtaatatatctcatcacatggctatgagagctggtaaagagaagcttaagcctagaatcaaagggactgtgattgtgcatccagcgatttgggggaaagatccggtcgatgagcacgatgtgcaagatagagagatcagagacggagttgcagaagtttgggagaaaattgtgagtccgaatagtgttgatggagcggatgatccgtggtttaatgtggttggatccgggtcgaatttttccgggatgggatgtgacaaggttttggttgaggtggctgggaaagatgtgttttggcggcaaggattagcttacgcggcgaagctaaagaagagtgggtggaaaggagaggtggaggtgattgaggaagaagatgaagagcattgcttccatctcttaaatccaagttctgaaaatgctcccagcttcatgaagagatttgtggagtttatcactggttaa

SEQ ID NO: 73095 - protein, 698 aa, Arabidopsis thaliana
  peptide (1)..(698): Ceres Seq. ID no. 4957792
MESEIASEFLPFCRIYKDGRVERLIGTDTIPASLDPTYDVVSKDVIYSPENNLSVRLFLPHKSTKLTAGNKLPLLIYIHGGAWIIESPFSPLYHNYLTEVVKSANCLAVSVQYRRAPEDPVPAAYEDVWSAIQWIFAHSNGSGPVDWINKHADFGKVFLGGDSAGGNISHHMAMKAGKEKKLDLKIKGIAVVHPAFWGTDPVDEYDVQDKETRSGIAEIWEKIASPNSVNGTDDPLFNVNGSGSDFSGLGCDKVLVAVAGKDVFVRQGLAYAAKLEKCEWEGTVEVVEEEGEDHVFHLQNPKSDKALKFLKKFVEFIIENIPGTMLRRITCSSSLASPSLFLRFFRQLPRSYSSPTTIAVSGRNIRRLSTPTTLRCICSHSSSEIISEHPPFVRVYKDGRIERLSGTETVPASLNPRNDVVSKDVVYSPGHNLSVRLFLPHKSTQLAAGNKLPLLIYFHGGAWINESPFSPIYHNFLTEVVKSANCLAVSVQYRRAPEDPVPAAYEDTWSAIQWIFSHSCGSGEEDWINKYADFERVFLAGDSAGGNISHHMAMRAGKEKLKPRIKGTVIVHPAIWGKDPVDEHDVQDREIRDGVAEVWEKIVSPNSVDGADDPWFNVVGSGSNFSGMGCDKVLVEVAGKDVFWRQGLAYAAKLKKSGWKGEVEVIEEEDEEHCFHLLNPSSENAPSFMKRFVEFITG

SEQ ID NO: 73096 - protein, 527 aa, Arabidopsis thaliana
  peptide (1)..(527): Ceres Seq. ID no. 4957793
MAMKAGKEKKLDLKIKGIAVVHPAFWGTDPVDEYDVQDKETRSGIAEIWEKIASPNSVNGTDDPLFNVNGSGSDFSGLGCDKVLVAVAGKDVFVRQGLAYAAKLEKCEWEGTVEVVEEEGEDHVFHLQNPKSDKALKFLKKFVEFIIENIPGTMLRRITCSSSLASPSLFLRFFRQLPRSYSSPTTIAVSGRNIRRLSTPTTLRCICSHSSSEIISEHPPFVRVYKDGRIERLSGTETVPASLNPRNDVVSKDVVYSPGHNLSVRLFLPHKSTQLAAGNKLPLLIYFHGGAWINESPFSPIYHNFLTEVVKSANCLAVSVQYRRAPEDPVPAAYEDTWSAIQWIFSHSCGSGEEDWINKYADFERVFLAGDSAGGNISHHMAMRAGKEKLKPRIKGTVIVHPAIWGKDPVDEHDVQDREIRDGVAEVWEKIVSPNSVDGADDPWFNVVGSGSNFSGMGCDKVLVEVAGKDVFWRQGLAYAAKLKKSGWKGEVEVIEEEDEEHCFHLLNPSSENAPSFMKRFVEFITG

SEQ ID NO: 73097 - protein, 525 aa, Arabidopsis thaliana
  peptide (1)..(525): Ceres Seq. ID no. 4957794
MKAGKEKKLDLKIKGIAVVHPAFWGTDPVDEYDVQDKETRSGIAEIWEKIASPNSVNGTDDPLFNVNGSGSDFSGLGCDKVLVAVAGKDVFVRQGLAYAAKLEKCEWEGTVEVVEEEGEDHVFHLQNPKSDKALKFLKKFVEFIIENIPGTMLRRITCSSSLASPSLFLRFFRQLPRSYSSPTTIAVSGRNIRRLSTPTTLRCICSHSSSEIISEHPPFVRVYKDGRIERLSGTETVPASLNPRNDVVSKDVVYSPGHNLSVRLFLPHKSTQLAAGNKLPLLIYFHGGAWINESPFSPIYHNFLTEVVKSANCLAVSVQYRRAPEDPVPAAYEDTWSAIQWIFSHSCGSGEEDWINKYADFERVFLAGDSAGGNISHHMAMRAGKEKLKPRIKGTVIVHPAIWGKDPVDEHDVQDREIRDGVAEVWEKIVSPNSVDGADDPWFNVVGSGSNFSGMGCDKVLVEVAGKDVFWRQGLAYAAKLKKSGWKGEVEVIEEEDEEHCFHLLNPSSENAPSFMKRFVEFITG

SEQ ID NO: 73098 - DNA, 1378 bp, Arabidopsis thaliana
  misc_feature (1)..(1378): Ceres Seq. ID no. 4957818
  misc_feature (1)..(1378): Ortholog of  Ceres SEQ ID NO 13638160 as cited in SEQ ID NO 58847
gtttcttcttcacactctgattctcttactatttgactctgttgttgttgttattgttgtgatatcaagagagtgggtttgagatcatgccaaattctggaaaaagtttgagtttttaattcgaatcgagaaaaaataaaaatgggttctttaggtgatgagcttagtttgggatcgatctttgggagaggagtttcgatgaatgttgtggcggttgagaaagttgatgaacatgttaagaagcttgaagaagagaagagaaagctcgaaagttgtcaacttgagcttcctctgtctttgcagattttaaacgatgcgattttgtatctgaaggataagagatgttcagagatggagactcaaccattgttgaaagatttcatttctgttaataaacctattcaaggagaaagaggaatagaattgctgaaaagagaggagctaatgagggagaagaagtttcagcaatggaaagctaatgatgatcacactagtaagatcaagagcaagcttgagattaagagaaatgaggagaaatctcctatgttgttgattccaaaggtggaaactggtttaggcctcggtttaagttcgagttcgataagaagaaaagggattgttgcctcatgtggctttacttctaactctatgccacaaccaccaacaccagcagtaccacaacaaccagcatttcttaagcagcaagctttacggaagcaaagaaggtgttggaatccagagttgcatcgccgatttgtcgatgcattgcaacagctaggtggaccgggagtggcaactcctaaacaaattagagaacatatgcaagaagaaggcttaaccaatgatgaagtcaagagtcatttacagaaatacaggttacacatcaggaagccaaattcgaatgcggagaaacaatcagcagttgttttagggtttaacttgtggaattcttcagcacaagatgaagaagagacatgtgaaggaggagaatcattgaagagaagcaatgcgcaatcagattctcctcaaggtcctttgcagttaccgtctacaacaacaacaactggtggagatagtagcatggaagatgttgaagatgctaagtctgagagctttcaactggagagattgagatcaccataaatctcaagaaaccaaactcttgatcacggttttgttattttggattcattactatatctattagtagtgaatgagaacaataattatagaaaggtttatagatatatatatagagaaaaagagagagtgaggatggttcaaattatttgcagagattatacttagccttgtttttgtaaacggctttttttggttgggtttttatttttcttgaggcattatccaatattcaagt

SEQ ID NO: 73099 - protein, 333 aa, Arabidopsis thaliana
  peptide (1)..(333): Ceres Seq. ID no. 4957819
MGSLGDELSLGSIFGRGVSMNVVAVEKVDEHVKKLEEEKRKLESCQLELPLSLQILNDAILYLKDKRCSEMETQPLLKDFISVNKPIQGERGIELLKREELMREKKFQQWKANDDHTSKIKSKLEIKRNEEKSPMLLIPKVETGLGLGLSSSSIRRKGIVASCGFTSNSMPQPPTPAVPQQPAFLKQQALRKQRRCWNPELHRRFVDALQQLGGPGVATPKQIREHMQEEGLTNDEVKSHLQKYRLHIRKPNSNAEKQSAVVLGFNLWNSSAQDEEETCEGGESLKRSNAQSDSPQGPLQLPSTTTTTGGDSSMEDVEDAKSESFQLERLRSP

SEQ ID NO: 73100 - protein, 314 aa, Arabidopsis thaliana
  peptide (1)..(314): Ceres Seq. ID no. 4957820
MNVVAVEKVDEHVKKLEEEKRKLESCQLELPLSLQILNDAILYLKDKRCSEMETQPLLKDFISVNKPIQGERGIELLKREELMREKKFQQWKANDDHTSKIKSKLEIKRNEEKSPMLLIPKVETGLGLGLSSSSIRRKGIVASCGFTSNSMPQPPTPAVPQQPAFLKQQALRKQRRCWNPELHRRFVDALQQLGGPGVATPKQIREHMQEEGLTNDEVKSHLQKYRLHIRKPNSNAEKQSAVVLGFNLWNSSAQDEEETCEGGESLKRSNAQSDSPQGPLQLPSTTTTTGGDSSMEDVEDAKSESFQLERLRSP

SEQ ID NO: 73101 - protein, 263 aa, Arabidopsis thaliana
  peptide (1)..(263): Ceres Seq. ID no. 4957821
METQPLLKDFISVNKPIQGERGIELLKREELMREKKFQQWKANDDHTSKIKSKLEIKRNEEKSPMLLIPKVETGLGLGLSSSSIRRKGIVASCGFTSNSMPQPPTPAVPQQPAFLKQQALRKQRRCWNPELHRRFVDALQQLGGPGVATPKQIREHMQEEGLTNDEVKSHLQKYRLHIRKPNSNAEKQSAVVLGFNLWNSSAQDEEETCEGGESLKRSNAQSDSPQGPLQLPSTTTTTGGDSSMEDVEDAKSESFQLERLRSP

SEQ ID NO: 73102 - DNA, 1193 bp, Arabidopsis thaliana
  misc_feature (1)..(1193): Ceres Seq. ID no. 4957947
  misc_feature (1)..(1193): Ortholog of  Ceres SEQ ID NO 14311407 as cited in SEQ ID NO 54067
  misc_feature (1)..(1193): Ortholog of  Ceres SEQ ID NO 14313107 as cited in SEQ ID NO 58915
  misc_feature (1)..(1193): Ortholog of  Ceres SEQ ID NO 15226556 as cited in SEQ ID NO 67908
ttcttagcttcttctctctcaaccctcaaaagatcttcgtcatctctgtattcaacacatagtgatgaatcgagactaacaaaatcaaattctcttcactctgattcgcagtcatagtttaccaatttcttctaactcgcaagcaatggcttgccttggaagaaaattctccagaattggttgaattcgtttttttttcatttccagaaattttagtatgtttaagagatgcaattagtgcctagtgatgatgatgatgatagaaaggaacagattttattcgacgaatcaacatcctcaaacgaaatcgtagcagcggaaagaggagatcgtgttgtggaggaaggacaagtttcagaaatagctgagactgatgatgacgaaaccacacttcttgtttctggagatcaaccacaatgtcgaatttgccttgatgttggaggggaagatctgattgctccgtgcaattgtaaaggtactcaaaagcacgttcacagatcttgtctcgataattggcgctccaccaaggaaggttttgcattttcgcattgtacagagtgtagagcctttttcaaactccgagccaatgtgcctgctgatagatggtggttgagattgagatttcagctgctggttgctagagatcatgccttcatcttcatttctgtccagatgattgtagcattcttggggttactagtttacaagttctacggtgaagaactacgagaaatgtttggttatgaggaacatccttatgggttctacacattggctgttttggccattgtcttggtaggactgctatatggattcttcatcgccataatatgtggccaaaagatcaacgagcggcattaccatgttctcgccaaacaagaactcacaaaggaatatatagtggaagaccgcgactgcaagaatgttcctgagcttgatcagagtcatgtgatggaactaaaaatgttgggactttattgaacatatactacaagaaaagagcttgttggatctttactcttcatgtcacctgtaaattatattcttcattgatttatatggttgcttcaacgaacgattgtgtcatctccaagtggttttttgatttttttttttttttaagttgtatatcttctgatgaacatgtttatctgttcgagtatacatatcagaagtaaattggtttacaaagt

SEQ ID NO: 73103 - protein, 250 aa, Arabidopsis thaliana; identical to SEQ ID NO: 42070
  peptide (1)..(250): Ceres Seq. ID no. 4957948

SEQ ID NO: 73104 - DNA, 771 bp, Arabidopsis thaliana
  misc_feature (1)..(771): Ceres Seq. ID no. 4958296
  misc_feature (1)..(771): Ortholog of  Ceres SEQ ID NO 14315973 as cited in SEQ ID NO 57637
atgggttcgtcttcttctttctcctcttcttcctcgaagcttctctttcgtcaactctttgagaacgaatcttccacctttacttatcttctcgccgacgtttctcatcctgataaacctgctttgttgattgatccggtggacaagactgtggatagagacttgaaactgattgatgagttaggactaaagcttatctatgctatgaacactcatgttcatgctgatcatgtcactggtactggacttcttaagacgaagctcccgggtgtgaaatccgttatttcgaaagcaagtggttccaaagctgatttgtttcttgaacctggtgacaaagtatctattggtgatatataccttgaggttcgtgctacacctggacacactgcaggatgtgttacatatgtgactggtgaaggagctgatcagccccaaccaagaatggcttttaccggggatgctgtactcatccgtggttgtgggaggactgactttcaggaaggaagctcagatcaactctacgagtctgtacattcacagatatttacattgccaaaggacacattgatctatcctgctcacgactacaaaggtttcgaggtaagtacagttggagaagagatgcaacacaacccgcgtctaactaaagataaagaaacattcaaaaccattatgtcaaatctgaatctgtcgtatccgaagatgattgatgttgcagtaccagcaaatatggtctgtgggttacaagatgtgccttctcaagccaactaa

SEQ ID NO: 73105 - protein, 256 aa, Arabidopsis thaliana; identical to SEQ ID NO: 28790
  peptide (1)..(256): Ceres Seq. ID no. 4958297

SEQ ID NO: 73106 - protein, 188 aa, Arabidopsis thaliana
  peptide (1)..(188): Ceres Seq. ID no. 4958298
MNTHVHADHVTGTGLLKTKLPGVKSVISKASGSKADLFLEPGDKVSIGDIYLEVRATPGHTAGCVTYVTGEGADQPQPRMAFTGDAVLIRGCGRTDFQEGSSDQLYESVHSQIFTLPKDTLIYPAHDYKGFEVSTVGEEMQHNPRLTKDKETFKTIMSNLNLSYPKMIDVAVPANMVCGLQDVPSQAN

SEQ ID NO: 73107 - DNA, 1395 bp, Arabidopsis thaliana
  misc_feature (1)..(1395): Ceres Seq. ID no. 4958420
  misc_feature (1)..(1395): Ortholog of  Ceres SEQ ID NO 13595870 as cited in SEQ ID NO 62101
  misc_feature (1)..(1395): Ortholog of  Ceres SEQ ID NO 13590241 as cited in SEQ ID NO 63878
  misc_feature (1)..(1395): Ortholog of  Ceres SEQ ID NO 13657939 as cited in SEQ ID NO 66349
atgatcataagagatattatggaggatcctgagaatgagggcccccacaatatgcgttcagactttgaacctctcttatcagtgctccgcctccgggattacgagacaggtgacatcatagagtttgatagtacagaggcaagtgaagaagcgctttctgacattacagagtttgggagtacggaggcaagtgaagcacattttgaggagccttactctgcacgcataaagaaagtagagaaagaaatcaatgagctcgccgagaagatctgcaatcttggtatcaaggagtccgatactggtttagctcctcccaatcaatgggatcttgtatctgataagcaaatgatgcaagaggagcaacctctgcttgttgcgacatgcacacagataatcagtccaaacactgaagatgcaaagtatgtcgttgatatcaaaaagataggcaagtatgttgttggacttggcgataaagcttctcccactgacatagaagcaggaatgcgtgtgggagttgatcagaagaaatatcagatacagattcctctacctccaaagattgatcctagtgtgaccatgatgacggttgaagagaaacctgatgcaacttacagtgatatcggtggctgcaaggagcagattgagaagattagagaggtcgttgaactgccaatgcttcatccagagaaatttgtgaggcttggaatagatcctcccaagggtgttctttgctatggtcctcctggtagcggaaaaacccttgtcgctagagctgtggcgaatagaactggtgcttgctttatcagggttgttggcagtgagctcgttcagaagtacattggtgaaggagctaggatggttcgtgaactgtttcagatggcacggtcaaagaaagcttgcattttgttctttgacgaaattgatgccattggcggtgcaagatttgatgacggtgtaggcagtgataatgaagtccaacgtaccatgcttgagattttgtatcagcttgatgggtttgacgcacgtggtaacatcaaggttcttatggcaacaaacaggcctgacatactagacccagctcttttacgtcctggacgtcttgaccgcaaggttgagttttgtctgcctgatctggagggcagaacacagatcttcaagattcacacacgaacaatgagttgtgaaagagacatccggtttgaactccttgctggcctctgcccaaactcaaccggagctgatatcagaagtgtatgcatagaagccggaatgtatgcaatcggagctaggagaaagtctgtgactgagaaggactttctggacgcagtgaacaaagttgttaaaggttatcaaaagttcagtgcaacacccaagtatatggcctactacatttag

SEQ ID NO: 73108 - protein, 464 aa, Arabidopsis thaliana
  peptide (1)..(464): Ceres Seq. ID no. 4958421
MIIRDIMEDPENEGPHNMRSDFEPLLSVLRLRDYETGDIIEFDSTEASEEALSDITEFGSTEASEAHFEEPYSARIKKVEKEINELAEKICNLGIKESDTGLAPPNQWDLVSDKQMMQEEQPLLVATCTQIISPNTEDAKYVVDIKKIGKYVVGLGDKASPTDIEAGMRVGVDQKKYQIQIPLPPKIDPSVTMMTVEEKPDATYSDIGGCKEQIEKIREVVELPMLHPEKFVRLGIDPPKGVLCYGPPGSGKTLVARAVANRTGACFIRVVGSELVQKYIGEGARMVRELFQMARSKKACILFFDEIDAIGGARFDDGVGSDNEVQRTMLEILYQLDGFDARGNIKVLMATNRPDILDPALLRPGRLDRKVEFCLPDLEGRTQIFKIHTRTMSCERDIRFELLAGLCPNSTGADIRSVCIEAGMYAIGARRKSVTEKDFLDAVNKVVKGYQKFSATPKYMAYYI

SEQ ID NO: 73109 - protein, 458 aa, Arabidopsis thaliana
  peptide (1)..(458): Ceres Seq. ID no. 4958422
MEDPENEGPHNMRSDFEPLLSVLRLRDYETGDIIEFDSTEASEEALSDITEFGSTEASEAHFEEPYSARIKKVEKEINELAEKICNLGIKESDTGLAPPNQWDLVSDKQMMQEEQPLLVATCTQIISPNTEDAKYVVDIKKIGKYVVGLGDKASPTDIEAGMRVGVDQKKYQIQIPLPPKIDPSVTMMTVEEKPDATYSDIGGCKEQIEKIREVVELPMLHPEKFVRLGIDPPKGVLCYGPPGSGKTLVARAVANRTGACFIRVVGSELVQKYIGEGARMVRELFQMARSKKACILFFDEIDAIGGARFDDGVGSDNEVQRTMLEILYQLDGFDARGNIKVLMATNRPDILDPALLRPGRLDRKVEFCLPDLEGRTQIFKIHTRTMSCERDIRFELLAGLCPNSTGADIRSVCIEAGMYAIGARRKSVTEKDFLDAVNKVVKGYQKFSATPKYMAYYI

SEQ ID NO: 73110 - protein, 447 aa, Arabidopsis thaliana
  peptide (1)..(447): Ceres Seq. ID no. 4958423
MRSDFEPLLSVLRLRDYETGDIIEFDSTEASEEALSDITEFGSTEASEAHFEEPYSARIKKVEKEINELAEKICNLGIKESDTGLAPPNQWDLVSDKQMMQEEQPLLVATCTQIISPNTEDAKYVVDIKKIGKYVVGLGDKASPTDIEAGMRVGVDQKKYQIQIPLPPKIDPSVTMMTVEEKPDATYSDIGGCKEQIEKIREVVELPMLHPEKFVRLGIDPPKGVLCYGPPGSGKTLVARAVANRTGACFIRVVGSELVQKYIGEGARMVRELFQMARSKKACILFFDEIDAIGGARFDDGVGSDNEVQRTMLEILYQLDGFDARGNIKVLMATNRPDILDPALLRPGRLDRKVEFCLPDLEGRTQIFKIHTRTMSCERDIRFELLAGLCPNSTGADIRSVCIEAGMYAIGARRKSVTEKDFLDAVNKVVKGYQKFSATPKYMAYYI

SEQ ID NO: 73111 - DNA, 2265 bp, Arabidopsis thaliana
  misc_feature (1)..(2265): Ceres Seq. ID no. 4958676
  misc_feature (1)..(2265): Ortholog of  Ceres SEQ ID NO 14310206 as cited in SEQ ID NO 20650
atgaccgttggtgccggaatcagcgtcaccgactcagatttggtggtgctaggtcaccgtgttcttcacggcgttccggagaatgtcttagttaccccagcttcgggaaacgccttaatcgacggcgcgttcatcggcgtcacgtcagatcaaaccggaagccaccgtgtcttctcccttggcaaactcgaagacctaaggtttatgtgtgtcttccggtttaaattatggtggatgactcaaagaatggggactaatgggaaagagattccttgtgagactcagtttctaatcgtagaagcaaaccaaggttctgatttaggaggaagagatcaatcttcttcgtacgttgtattcttacctatacttgaaggagattttagagctgttcttcaagggaacgaggctaatgagctagagatttgtcttgaaagtggtgatccaaccgttgaccaattcgaagggagtcatttggtttttgtggctgctggctccgacccttttgatgtcattaccaaagctgtcaaggctgttgaacaacatcttcaaacattttcacaccgagagagaaagaaaatgccagatatgttgaattggtttggttggtgcacttgggatgcattctataccaatgtcacagccaaagacgtcaagcaaggacttgagagcctcaaagctggtggggttaccccaaagtttgtcataattgatgatggatggcaatctgttggcatggatgagaccagtgtagaattcaacgctgataatgctgccaattttgcaaaccggttaactcacatcaaggagaatcataagtttcaaaaggatggcaaagaaggccaccgggtggatgacccttcattgagtcttggacatgttatcacagacattaagagtaataattcgctcaagtatgtttatgtttggcatgcgataacaggatattggggaggagtcaaaccaggtgtttctggtatggaacactacgaatccaaggttgcgtatccagtttcttcaccaggagttatgtccagtgagaattgtggatgtttagaaagcataactaagaatggacttggtttggtgaatcctgagaaagtctttagcttctataatgatcttcactcataccttgcatccgttggggtcgatggtgtcaaagtagacgtccaaaacattcttgaaactcttggagctggacatggtggtcgtgtcaaacttgcaaagaagtatcaccaggctttggaagcttctatttcaagaaacttccctgacaatggtattatctcttgcatgagtcataacacagatggtctctacagcgcaaaaaagactgctgttataagagcatcagacgatttctggcctagagaccccgcttcacacacgatccacattgcttctgttgcatataacacacttttccttggagagtttatgcagccggactgggacatgtttcatagtttgcatccgatggctgaatatcatgctgcagctcgcgcggttggaggatgtgccatatatgtcagcgacaaaccgggacaacatgacttcaaccttttaagaaagctagtacttcgagacggttccatactcagagcaaagcttcccggaagaccaaccagtgattgcttcttcagtgatccagtcagagacaataaaagtcttctgaaaatatggaacctgaacgaattcactggcgttattggagttttcaactgccaaggcgctggatggtgtaagaacgagaagagatacctaatccatgaccaagaacctgggaccatttctggttgtgtccgaaccaatgatgttcattatcttcataaagtagcagcctttgaatggacaggagattccattgtctattcccatctcagaggagagttagtgtatctcccaaaagatacatctttaccagtgacattgatgccacgtgaatacgaagttttcacggtggttccggtgaaggaattttccgatggaagtaaatttgcaccggtggggcttatggagatgtttaattctggaggagccattgtgagtttaagatacgatgacgaggggactaaatttgtcgttaggatgaaacttcgaggcagtggtttggttggtgtttactcgtccgttcgacgaccacgaagtgttacggtggattcagacgacgtggagtaccggtatgaaccggaatccggtttagttacgtttactttaggagttccggagaaagaattgtatctgtgggacgtggtcatccaataa

SEQ ID NO: 73112 - protein, 754 aa, Arabidopsis thaliana
  peptide (1)..(754): Ceres Seq. ID no. 4958677
MTVGAGISVTDSDLVVLGHRVLHGVPENVLVTPASGNALIDGAFIGVTSDQTGSHRVFSLGKLEDLRFMCVFRFKLWWMTQRMGTNGKEIPCETQFLIVEANQGSDLGGRDQSSSYVVFLPILEGDFRAVLQGNEANELEICLESGDPTVDQFEGSHLVFVAAGSDPFDVITKAVKAVEQHLQTFSHRERKKMPDMLNWFGWCTWDAFYTNVTAKDVKQGLESLKAGGVTPKFVIIDDGWQSVGMDETSVEFNADNAANFANRLTHIKENHKFQKDGKEGHRVDDPSLSLGHVITDIKSNNSLKYVYVWHAITGYWGGVKPGVSGMEHYESKVAYPVSSPGVMSSENCGCLESITKNGLGLVNPEKVFSFYNDLHSYLASVGVDGVKVDVQNILETLGAGHGGRVKLAKKYHQALEASISRNFPDNGIISCMSHNTDGLYSAKKTAVIRASDDFWPRDPASHTIHIASVAYNTLFLGEFMQPDWDMFHSLHPMAEYHAAARAVGGCAIYVSDKPGQHDFNLLRKLVLRDGSILRAKLPGRPTSDCFFSDPVRDNKSLLKIWNLNEFTGVIGVFNCQGAGWCKNEKRYLIHDQEPGTISGCVRTNDVHYLHKVAAFEWTGDSIVYSHLRGELVYLPKDTSLPVTLMPREYEVFTVVPVKEFSDGSKFAPVGLMEMFNSGGAIVSLRYDDEGTKFVVRMKLRGSGLVGVYSSVRRPRSVTVDSDDVEYRYEPESGLVTFTLGVPEKELYLWDVVIQ

SEQ ID NO: 73113 - protein, 686 aa, Arabidopsis thaliana
  peptide (1)..(686): Ceres Seq. ID no. 4958678
MCVFRFKLWWMTQRMGTNGKEIPCETQFLIVEANQGSDLGGRDQSSSYVVFLPILEGDFRAVLQGNEANELEICLESGDPTVDQFEGSHLVFVAAGSDPFDVITKAVKAVEQHLQTFSHRERKKMPDMLNWFGWCTWDAFYTNVTAKDVKQGLESLKAGGVTPKFVIIDDGWQSVGMDETSVEFNADNAANFANRLTHIKENHKFQKDGKEGHRVDDPSLSLGHVITDIKSNNSLKYVYVWHAITGYWGGVKPGVSGMEHYESKVAYPVSSPGVMSSENCGCLESITKNGLGLVNPEKVFSFYNDLHSYLASVGVDGVKVDVQNILETLGAGHGGRVKLAKKYHQALEASISRNFPDNGIISCMSHNTDGLYSAKKTAVIRASDDFWPRDPASHTIHIASVAYNTLFLGEFMQPDWDMFHSLHPMAEYHAAARAVGGCAIYVSDKPGQHDFNLLRKLVLRDGSILRAKLPGRPTSDCFFSDPVRDNKSLLKIWNLNEFTGVIGVFNCQGAGWCKNEKRYLIHDQEPGTISGCVRTNDVHYLHKVAAFEWTGDSIVYSHLRGELVYLPKDTSLPVTLMPREYEVFTVVPVKEFSDGSKFAPVGLMEMFNSGGAIVSLRYDDEGTKFVVRMKLRGSGLVGVYSSVRRPRSVTVDSDDVEYRYEPESGLVTFTLGVPEKELYLWDVVIQ

SEQ ID NO: 73114 - protein, 676 aa, Arabidopsis thaliana
  peptide (1)..(676): Ceres Seq. ID no. 4958679
MTQRMGTNGKEIPCETQFLIVEANQGSDLGGRDQSSSYVVFLPILEGDFRAVLQGNEANELEICLESGDPTVDQFEGSHLVFVAAGSDPFDVITKAVKAVEQHLQTFSHRERKKMPDMLNWFGWCTWDAFYTNVTAKDVKQGLESLKAGGVTPKFVIIDDGWQSVGMDETSVEFNADNAANFANRLTHIKENHKFQKDGKEGHRVDDPSLSLGHVITDIKSNNSLKYVYVWHAITGYWGGVKPGVSGMEHYESKVAYPVSSPGVMSSENCGCLESITKNGLGLVNPEKVFSFYNDLHSYLASVGVDGVKVDVQNILETLGAGHGGRVKLAKKYHQALEASISRNFPDNGIISCMSHNTDGLYSAKKTAVIRASDDFWPRDPASHTIHIASVAYNTLFLGEFMQPDWDMFHSLHPMAEYHAAARAVGGCAIYVSDKPGQHDFNLLRKLVLRDGSILRAKLPGRPTSDCFFSDPVRDNKSLLKIWNLNEFTGVIGVFNCQGAGWCKNEKRYLIHDQEPGTISGCVRTNDVHYLHKVAAFEWTGDSIVYSHLRGELVYLPKDTSLPVTLMPREYEVFTVVPVKEFSDGSKFAPVGLMEMFNSGGAIVSLRYDDEGTKFVVRMKLRGSGLVGVYSSVRRPRSVTVDSDDVEYRYEPESGLVTFTLGVPEKELYLWDVVIQ

SEQ ID NO: 73115 - DNA, 984 bp, Arabidopsis thaliana
  misc_feature (1)..(984): Ceres Seq. ID no. 4958714
  misc_feature (1)..(984): Ortholog of  Ceres SEQ ID NO 13654431 as cited in SEQ ID NO 67761
atgtctcaaagcggcggtgacttcaacctctccgacgagattctcgccgtgattcccaccgacccttatgatcaactcgacctcgccaggaagatcacttccatggctatcgcttcaagggtttcgaatctggaatctcaagtctccggcttgagacagaagcttcttgagaaggatcggcttgttcatgaacttgaagacagagtctcttcctttgaaagactttaccatgaagctgactcgagtttgaagaatgttgtcgatgaaaatatgaaactgactcaagaacgagattcactggcaatcactgcgaagaaactcggtcgtgattatgcaaagttggaagcattcaagagacaattgatgcagtcattgaatgatgataatccatctcaaactgagactgctgatgtcagaatggttcctcgaggcaaagtctcttcaagagttgcttgttctgatgttatttactctgtatgcattgtagatgagaattcaaatggatcctactcaaacaatgaaggtttaagtgaagcgaggcaaagacagtctatgactccgcagttctctcccgcgtttacaccaagcggaacaccaaagatcttatctactgctgcttctccgagaagctactctgctgcttcatcgccaaagctattctctggagctgcatctccaacatcttcacattatgatatacgtatgtggtcttcaactagccagcaatcttcagtagcaaactctcctccacgctcgcattctgtttcagctcggcatccgcggattgatgggaaagagttctttagacaagccaggagccgtttgtcttacgaacagttcagtgcattcctggctaacatcaaggaacttaacgcccggaagcagggccgcgaggaaacattacagaaagcagaggaaatatttggaaaggaaaacaatgatctttacatatcctttaagggacttctcacaagtgggcgttga

SEQ ID NO: 73116 - protein, 327 aa, Arabidopsis thaliana
  peptide (1)..(327): Ceres Seq. ID no. 4958715
MSQSGGDFNLSDEILAVIPTDPYDQLDLARKITSMAIASRVSNLESQVSGLRQKLLEKDRLVHELEDRVSSFERLYHEADSSLKNVVDENMKLTQERDSLAITAKKLGRDYAKLEAFKRQLMQSLNDDNPSQTETADVRMVPRGKVSSRVACSDVIYSVCIVDENSNGSYSNNEGLSEARQRQSMTPQFSPAFTPSGTPKILSTAASPRSYSAASSPKLFSGAASPTSSHYDIRMWSSTSQQSSVANSPPRSHSVSARHPRIDGKEFFRQARSRLSYEQFSAFLANIKELNARKQGREETLQKAEEIFGKENNDLYISFKGLLTSGR

SEQ ID NO: 73117 - protein, 293 aa, Arabidopsis thaliana
  peptide (1)..(293): Ceres Seq. ID no. 4958716
MAIASRVSNLESQVSGLRQKLLEKDRLVHELEDRVSSFERLYHEADSSLKNVVDENMKLTQERDSLAITAKKLGRDYAKLEAFKRQLMQSLNDDNPSQTETADVRMVPRGKVSSRVACSDVIYSVCIVDENSNGSYSNNEGLSEARQRQSMTPQFSPAFTPSGTPKILSTAASPRSYSAASSPKLFSGAASPTSSHYDIRMWSSTSQQSSVANSPPRSHSVSARHPRIDGKEFFRQARSRLSYEQFSAFLANIKELNARKQGREETLQKAEEIFGKENNDLYISFKGLLTSGR

SEQ ID NO: 73118 - protein, 237 aa, Arabidopsis thaliana
  peptide (1)..(237): Ceres Seq. ID no. 4958717
MKLTQERDSLAITAKKLGRDYAKLEAFKRQLMQSLNDDNPSQTETADVRMVPRGKVSSRVACSDVIYSVCIVDENSNGSYSNNEGLSEARQRQSMTPQFSPAFTPSGTPKILSTAASPRSYSAASSPKLFSGAASPTSSHYDIRMWSSTSQQSSVANSPPRSHSVSARHPRIDGKEFFRQARSRLSYEQFSAFLANIKELNARKQGREETLQKAEEIFGKENNDLYISFKGLLTSGR

SEQ ID NO: 73119 - DNA, 3138 bp, Arabidopsis thaliana
  misc_feature (1)..(3138): Ceres Seq. ID no. 4958718
  misc_feature (1)..(3138): Ortholog of  Ceres SEQ ID NO 15174879 as cited in SEQ ID NO 53786
atggttcgagcccaaaaccgaaccagacccactactcatcccgacgatgcgcgagctttgaactccatcttcgcggcttggaagattcgggcgccgagggaatggaacatcagcggcgaactttgctccggcgtcgccatcgacgccagtgtactcgactcaaaccatgcctacaatcctctcatcaaatgcgactgtagtttccaaaactccacaatctgccgcataaataacataaaggtttatgcgatagatgttgtaggacctatacctccagagctctggaccttaacatacctcaccaatctgctcactgtctcctgctattgggaatttgactcggatgcagtggatgtaaaagcctctgaaaccttgacttttggaatcaacgcgttgtctggccctattcctaaggaaatcggtttgcttacggatttaagattacttggtattagttcaaataacttttccggttccttaccagctgagattgggagttgtacaaaactacagcaaatgtacatcgatagttctggactcagcggaggaatacctttatcatttgctaattttgtggagttggaagtcgcttggattatggatgtggaacttacaggtcggataccagactttataggattctggaccaaacttactaccttgaggatcctcggaactggtttgagcggcccaataccgtcgtcattttccaacttaattgctttgacagaactgaggcttggtgatatatccaatggaagctcttctcttgatttcatcaaagacatgaaatctctaagtgtattagtattgaggaacaacaatctcactgggacaataccgtctactattggaggatacacaagtttgcaacaagttgatttgagcttcaacaaattacatggaccaattccggcttcacttttcaacttaagtcgacttactcacttgtttctgggaaacaacacgttgaatggatccttgcccactctaaaggggcagtctctgagcaatttagatgtgtcgtacaatgatttgtctggaagtcttccttcatgggtcagcttaccagatttgaagctcaatctagttgctaacaacttcacactggaaggtcttgacaacagggttttatcaggactacattgcctgcagaagaacttcccctgcaatcgaggcgaaggaatctgtaagtgtaacaaaaagataccctcacaaattatgttctccatgttgaatgtgcaaacatatggacagggctccaatgtcttattggaaaaaaattgttttaagactttcgctattgactggtgtctagattataacttttcgatcaactgcggaggcccagagataaggtctgttagtggagcactatttgaaaaggaggacgcggatcttggaccagcttcgtttgttgtgagtgctgcaaagagatgggcagccagtagtgtaggaaattttgctggcagtagcaacaatatatacatagctacttcactagcacaatttatcaacactatggactcagagctttttcagtcagcacgactttctgcatcttccctaaggtattatgggttggggctagaaaatggagggtacaccgtaacacttcagtttgctgaagtacaaattgaaggttctaactcttggaaaggtattggaagacgacgttttaacatttatgtccagggaagacttgttgaaaaggattttgatatacgcagaacagctggtggctcttcggttcgagcagttcagagagaatataaaacaaatgtatcagaaaatcatctcgaagtccatcttttctgggctggaaaaggaacatgttgtattcctatccaaggggcttatgggccattaatagcggccgtcagtgcgacaccagatttcacaccaactgtggctaataggccaccatcaaagggaaagagcaggactggtactattgtgggtgtcattgttggtgttggacttttgagcatctttgcgggtgtggttatcctcgtcattcgaaaaagaagaaaaccgtacacagatgatgaagagatacttagtatggacgtaaagccttacacctttacttactcggaacttaagaatgcaacacaagattttgatctctcaaacaagcttggagagggagggtttggggctgtttataagggaaacctcaatgatggaagagaggtggcggtgaagcagttgtcaattggatcacggcaagggaagggacaatttgttgcagaaattattgcaatttcttcagttctacatcgcaacctagtaaaactttacgggtgctgctttgaaggagatcatcgtttgctcgtatatgagtatctccctaatggaagtctcgatcaggcattatttggggataagagtttgcatcttgattggtcaacccgttatgagatatgtctgggagtagccagaggtctagtttatctccacgaggaagcaagtgttcgcataatacacagagatgtgaaggccagcaacattttactggactctgaactggtcccaaaagtttctgattttgggcttgcaaaactatatgatgacaagaaaacccatattagtaccagagtggcagggacgattgggtatcttgcgccagagtatgccatgcgtggacatctaacagagaaaacagatgtgtatgcctttggtgttgtggctcttgagctagtgagtggaaggaaaaactctgatgagaacctggaagagggaaaaaaatatcttcttgaatgggcatggaatctacacgagaaaaaccgtgacgttgaactaatagatgatgagctaagtgaatacaacatggaagaagtgaaacgcatgattggcattgctctgctttgcactcagtcatcttatgcgttgagaccaccaatgtcacgagtagtagccatgttgtcaggagatgctgaggtcaatgatgccacctctaagccaggctacctaaccgactgtacatttgatgacaccacaagctcctcattcagcaactttcaaacgaaagacactagcttctcgacgagctttatagcgcctggcccggagatgccacttagagacggcgaatcgaagccaatggttggattcaagatcaaggagggaagatga

SEQ ID NO: 73120 - protein, 1045 aa, Arabidopsis thaliana
  peptide (1)..(1045): Ceres Seq. ID no. 4958719
MVRAQNRTRPTTHPDDARALNSIFAAWKIRAPREWNISGELCSGVAIDASVLDSNHAYNPLIKCDCSFQNSTICRINNIKVYAIDVVGPIPPELWTLTYLTNLLTVSCYWEFDSDAVDVKASETLTFGINALSGPIPKEIGLLTDLRLLGISSNNFSGSLPAEIGSCTKLQQMYIDSSGLSGGIPLSFANFVELEVAWIMDVELTGRIPDFIGFWTKLTTLRILGTGLSGPIPSSFSNLIALTELRLGDISNGSSSLDFIKDMKSLSVLVLRNNNLTGTIPSTIGGYTSLQQVDLSFNKLHGPIPASLFNLSRLTHLFLGNNTLNGSLPTLKGQSLSNLDVSYNDLSGSLPSWVSLPDLKLNLVANNFTLEGLDNRVLSGLHCLQKNFPCNRGEGICKCNKKIPSQIMFSMLNVQTYGQGSNVLLEKNCFKTFAIDWCLDYNFSINCGGPEIRSVSGALFEKEDADLGPASFVVSAAKRWAASSVGNFAGSSNNIYIATSLAQFINTMDSELFQSARLSASSLRYYGLGLENGGYTVTLQFAEVQIEGSNSWKGIGRRRFNIYVQGRLVEKDFDIRRTAGGSSVRAVQREYKTNVSENHLEVHLFWAGKGTCCIPIQGAYGPLIAAVSATPDFTPTVANRPPSKGKSRTGTIVGVIVGVGLLSIFAGVVILVIRKRRKPYTDDEEILSMDVKPYTFTYSELKNATQDFDLSNKLGEGGFGAVYKGNLNDGREVAVKQLSIGSRQGKGQFVAEIIAISSVLHRNLVKLYGCCFEGDHRLLVYEYLPNGSLDQALFGDKSLHLDWSTRYEICLGVARGLVYLHEEASVRIIHRDVKASNILLDSELVPKVSDFGLAKLYDDKKTHISTRVAGTIGYLAPEYAMRGHLTEKTDVYAFGVVALELVSGRKNSDENLEEGKKYLLEWAWNLHEKNRDVELIDDELSEYNMEEVKRMIGIALLCTQSSYALRPPMSRVVAMLSGDAEVNDATSKPGYLTDCTFDDTTSSSFSNFQTKDTSFSTSFIAPGPEMPLRDGESKPMVGFKIKEGR

SEQ ID NO: 73121 - protein, 873 aa, Arabidopsis thaliana
  peptide (1)..(873): Ceres Seq. ID no. 4958720
MYIDSSGLSGGIPLSFANFVELEVAWIMDVELTGRIPDFIGFWTKLTTLRILGTGLSGPIPSSFSNLIALTELRLGDISNGSSSLDFIKDMKSLSVLVLRNNNLTGTIPSTIGGYTSLQQVDLSFNKLHGPIPASLFNLSRLTHLFLGNNTLNGSLPTLKGQSLSNLDVSYNDLSGSLPSWVSLPDLKLNLVANNFTLEGLDNRVLSGLHCLQKNFPCNRGEGICKCNKKIPSQIMFSMLNVQTYGQGSNVLLEKNCFKTFAIDWCLDYNFSINCGGPEIRSVSGALFEKEDADLGPASFVVSAAKRWAASSVGNFAGSSNNIYIATSLAQFINTMDSELFQSARLSASSLRYYGLGLENGGYTVTLQFAEVQIEGSNSWKGIGRRRFNIYVQGRLVEKDFDIRRTAGGSSVRAVQREYKTNVSENHLEVHLFWAGKGTCCIPIQGAYGPLIAAVSATPDFTPTVANRPPSKGKSRTGTIVGVIVGVGLLSIFAGVVILVIRKRRKPYTDDEEILSMDVKPYTFTYSELKNATQDFDLSNKLGEGGFGAVYKGNLNDGREVAVKQLSIGSRQGKGQFVAEIIAISSVLHRNLVKLYGCCFEGDHRLLVYEYLPNGSLDQALFGDKSLHLDWSTRYEICLGVARGLVYLHEEASVRIIHRDVKASNILLDSELVPKVSDFGLAKLYDDKKTHISTRVAGTIGYLAPEYAMRGHLTEKTDVYAFGVVALELVSGRKNSDENLEEGKKYLLEWAWNLHEKNRDVELIDDELSEYNMEEVKRMIGIALLCTQSSYALRPPMSRVVAMLSGDAEVNDATSKPGYLTDCTFDDTTSSSFSNFQTKDTSFSTSFIAPGPEMPLRDGESKPMVGFKIKEGR

SEQ ID NO: 73122 - protein, 846 aa, Arabidopsis thaliana
  peptide (1)..(846): Ceres Seq. ID no. 4958721
MDVELTGRIPDFIGFWTKLTTLRILGTGLSGPIPSSFSNLIALTELRLGDISNGSSSLDFIKDMKSLSVLVLRNNNLTGTIPSTIGGYTSLQQVDLSFNKLHGPIPASLFNLSRLTHLFLGNNTLNGSLPTLKGQSLSNLDVSYNDLSGSLPSWVSLPDLKLNLVANNFTLEGLDNRVLSGLHCLQKNFPCNRGEGICKCNKKIPSQIMFSMLNVQTYGQGSNVLLEKNCFKTFAIDWCLDYNFSINCGGPEIRSVSGALFEKEDADLGPASFVVSAAKRWAASSVGNFAGSSNNIYIATSLAQFINTMDSELFQSARLSASSLRYYGLGLENGGYTVTLQFAEVQIEGSNSWKGIGRRRFNIYVQGRLVEKDFDIRRTAGGSSVRAVQREYKTNVSENHLEVHLFWAGKGTCCIPIQGAYGPLIAAVSATPDFTPTVANRPPSKGKSRTGTIVGVIVGVGLLSIFAGVVILVIRKRRKPYTDDEEILSMDVKPYTFTYSELKNATQDFDLSNKLGEGGFGAVYKGNLNDGREVAVKQLSIGSRQGKGQFVAEIIAISSVLHRNLVKLYGCCFEGDHRLLVYEYLPNGSLDQALFGDKSLHLDWSTRYEICLGVARGLVYLHEEASVRIIHRDVKASNILLDSELVPKVSDFGLAKLYDDKKTHISTRVAGTIGYLAPEYAMRGHLTEKTDVYAFGVVALELVSGRKNSDENLEEGKKYLLEWAWNLHEKNRDVELIDDELSEYNMEEVKRMIGIALLCTQSSYALRPPMSRVVAMLSGDAEVNDATSKPGYLTDCTFDDTTSSSFSNFQTKDTSFSTSFIAPGPEMPLRDGESKPMVGFKIKEGR

SEQ ID NO: 73123 - DNA, 1920 bp, Arabidopsis thaliana
  misc_feature (1)..(1920): Ceres Seq. ID no. 4958734
  misc_feature (1)..(1920): Ortholog of  Ceres SEQ ID NO 13597546 as cited in SEQ ID NO 65017
  misc_feature (1)..(1920): Ortholog of  Ceres SEQ ID NO 14307912 as cited in SEQ ID NO 66380
  misc_feature (1)..(1920): Ortholog of  Ceres SEQ ID NO 14308045 as cited in SEQ ID NO 67444
  misc_feature (1)..(1920): Ortholog of  Ceres SEQ ID NO 13654353 as cited in SEQ ID NO 68318
atgccagagcattgggtctttgtcccaaaacctcatgaagtaggttcatggaaaaaggttccatcagacttttgtcctttcataccggtccgacgaggacagtgtatcaatggggttacatattacctagcttggattgacatgtataattctgtgcttgtgagtttcgacataagatcggaagagctcacaatgagccaaatacctcggagggacgacggagatggatccaggaagaatgtgagtcttatagagtatggtggaaaagttactcttcttgactctaaccatcttagagacaaggggatgttggttttaagggttctggaagatgccgggatcaacaaggaatggtccaaaaagactatggttttgcatccttatcagctgcatttagtccaagtagacattatattcaacgtaaacgatattatgaaagaaatgtggggtgttgcactgagttttgttatagctttagtggtcgtcaagatcagtctctggctctatagatgggctaaccctaactgctccggcaaactacctccaggttcaatggggtttccggtgatcggagaaaccgttgagttcttcaaaccttacagtttcaacgaaatccatccatttgtcaagaaaagaatgttcaagcacggtggttcattattccggacgaatatcctcggctctaaaacgattgtttcgacagatccggaagtgaactttgagattctcaaacaagagaacaggtgtttcatcatgagctatccagaagctcttgttagaatctttgggaaagataacttgttcttcaagcaaggcaaggacttccacaggtacatgagacatattgctctgcagcttcttggccctgagtgtttgaagcagagatttatacaacaaatcgacatagcaacaagcgagcatctcaaatctgtctccttccaaggcgttgtagacgtcaaagatactagtggaagattgatattggaacaaatgatcctgatgatcataagtaacatcaaacctgagactaagagcaaactgatagagagttttagagatttcagctttgatttggttaggtccccttttgatccttctttttggaacgctctttacaatggtcttatggcacgcagcaatgtgatgaagatgctaaaaagaatgttcaaagagaggagagaagaagcaacatcggatgactcaaaatatggagacttcatggagacaatgatatatgaggtggagaaagaaggcgatacgatcaacgaggaaagatcagtagagctaatacttagtttactgattgcgtcttatgaaactacttctactatgactgcattaactgtgaaattcatagctgaaaaccccaaagtgcttatggagctgaagagagaacatgagaccatcctccaaaacagagctgataaagaatctggagttacttggaaagaatatagatccatgatgaatttcacccatatggttatcaatgagtctcttcgtttaggaagtttgtcacctgctatgtttagaaaggcggtgaatgatgtggagatcaaagggtatacaattccagcaggatggattgtattggtggttccatctcttcttcattatgaccctcaaatctatgaacaaccatgtgagtttaatccatggagatgggaggggaaagaattgctttctggctctaaaacgttcatggcgtttggtggtggtgcaagactatgtgcaggagcagagtttgctaggcttcagatggctatatttcttcatcatctagtcacaacgtatgacttctctttgatcgataaatcttatatcatccgagcacccttacttcgattctccaagccgatacgcataacgatctccgagaatcctttaagttcatctcatcaaaatgcaaatcttttttag

SEQ ID NO: 73124 - protein, 639 aa, Arabidopsis thaliana
  peptide (1)..(639): Ceres Seq. ID no. 4958735
MPEHWVFVPKPHEVGSWKKVPSDFCPFIPVRRGQCINGVTYYLAWIDMYNSVLVSFDIRSEELTMSQIPRRDDGDGSRKNVSLIEYGGKVTLLDSNHLRDKGMLVLRVLEDAGINKEWSKKTMVLHPYQLHLVQVDIIFNVNDIMKEMWGVALSFVIALVVVKISLWLYRWANPNCSGKLPPGSMGFPVIGETVEFFKPYSFNEIHPFVKKRMFKHGGSLFRTNILGSKTIVSTDPEVNFEILKQENRCFIMSYPEALVRIFGKDNLFFKQGKDFHRYMRHIALQLLGPECLKQRFIQQIDIATSEHLKSVSFQGVVDVKDTSGRLILEQMILMIISNIKPETKSKLIESFRDFSFDLVRSPFDPSFWNALYNGLMARSNVMKMLKRMFKERREEATSDDSKYGDFMETMIYEVEKEGDTINEERSVELILSLLIASYETTSTMTALTVKFIAENPKVLMELKREHETILQNRADKESGVTWKEYRSMMNFTHMVINESLRLGSLSPAMFRKAVNDVEIKGYTIPAGWIVLVVPSLLHYDPQIYEQPCEFNPWRWEGKELLSGSKTFMAFGGGARLCAGAEFARLQMAIFLHHLVTTYDFSLIDKSYIIRAPLLRFSKPIRITISENPLSSSHQNANLF

SEQ ID NO: 73125 - protein, 592 aa, Arabidopsis thaliana
  peptide (1)..(592): Ceres Seq. ID no. 4958736
MYNSVLVSFDIRSEELTMSQIPRRDDGDGSRKNVSLIEYGGKVTLLDSNHLRDKGMLVLRVLEDAGINKEWSKKTMVLHPYQLHLVQVDIIFNVNDIMKEMWGVALSFVIALVVVKISLWLYRWANPNCSGKLPPGSMGFPVIGETVEFFKPYSFNEIHPFVKKRMFKHGGSLFRTNILGSKTIVSTDPEVNFEILKQENRCFIMSYPEALVRIFGKDNLFFKQGKDFHRYMRHIALQLLGPECLKQRFIQQIDIATSEHLKSVSFQGVVDVKDTSGRLILEQMILMIISNIKPETKSKLIESFRDFSFDLVRSPFDPSFWNALYNGLMARSNVMKMLKRMFKERREEATSDDSKYGDFMETMIYEVEKEGDTINEERSVELILSLLIASYETTSTMTALTVKFIAENPKVLMELKREHETILQNRADKESGVTWKEYRSMMNFTHMVINESLRLGSLSPAMFRKAVNDVEIKGYTIPAGWIVLVVPSLLHYDPQIYEQPCEFNPWRWEGKELLSGSKTFMAFGGGARLCAGAEFARLQMAIFLHHLVTTYDFSLIDKSYIIRAPLLRFSKPIRITISENPLSSSHQNANLF

SEQ ID NO: 73126 - protein, 575 aa, Arabidopsis thaliana
  peptide (1)..(575): Ceres Seq. ID no. 4958737
MSQIPRRDDGDGSRKNVSLIEYGGKVTLLDSNHLRDKGMLVLRVLEDAGINKEWSKKTMVLHPYQLHLVQVDIIFNVNDIMKEMWGVALSFVIALVVVKISLWLYRWANPNCSGKLPPGSMGFPVIGETVEFFKPYSFNEIHPFVKKRMFKHGGSLFRTNILGSKTIVSTDPEVNFEILKQENRCFIMSYPEALVRIFGKDNLFFKQGKDFHRYMRHIALQLLGPECLKQRFIQQIDIATSEHLKSVSFQGVVDVKDTSGRLILEQMILMIISNIKPETKSKLIESFRDFSFDLVRSPFDPSFWNALYNGLMARSNVMKMLKRMFKERREEATSDDSKYGDFMETMIYEVEKEGDTINEERSVELILSLLIASYETTSTMTALTVKFIAENPKVLMELKREHETILQNRADKESGVTWKEYRSMMNFTHMVINESLRLGSLSPAMFRKAVNDVEIKGYTIPAGWIVLVVPSLLHYDPQIYEQPCEFNPWRWEGKELLSGSKTFMAFGGGARLCAGAEFARLQMAIFLHHLVTTYDFSLIDKSYIIRAPLLRFSKPIRITISENPLSSSHQNANLF

SEQ ID NO: 73127 - DNA, 2019 bp, Arabidopsis thaliana
  misc_feature (1)..(2019): Ceres Seq. ID no. 4958757
  misc_feature (1)..(2019): Ortholog of  Ceres SEQ ID NO 15170990 as cited in SEQ ID NO 55101
atgcgccggcacaagcgatggcctttgaggtctcttgtctgcagcttcagctcctctgcggcggagacagttactacttcaacggcagcttcagcgacggcggcttttccgttgaagcatgtgacaaggtcgaacttcgagacgacgctgaatgatctacgctcactcgtaaaggctgcagatttcgtggcgattgaccttgagatgactggcgtgacaagcgctccgtggcgagactccttagagttcgaccgctacgacgtcagatacctcaaagtcaaagactccgccgagaaattcgccgtcgttcagtttggtgtctgtccctttcgttgggattctcgtactcagtcattcgtgtcctacccgcacaatttctttgtatttcctcgtcaagaactcacatttgatccaccagctcatgaatttctctgtcagactacatcaatggattttcttgccaagtatcagtttgatttcaacacctgcatacatgaaggaatatcttatttgtccagacgagaagaggaagaggcaagtaagcgtttgaaaatgctacacggcgaggacggaattgattcatcgggtgaaactgaagagttaaagttggtgcgattggcagatgttcttttcgctgcaaggatggagaaattgctgaatgaatggcggtctggcctgttacatggtgggaatgcgtcctctgagtttccgaggatttcaaatggttcaaaccagagtatggaaactgtgtttcaccatatgcgtcctgctctcagtctgaagggtttcacttctcatcagctcagagttcttaactcggttttaagaaagcattttggagatcttgtgtacatacattcaaatgataaaagttcttcttcacgagacattgttgtgtatactgattcagattccgacaaggaaaacctcatgaaggaggcaaaggacgaacgcaagagattggcagaaagaaaaatacaatctgcaatcgggttccgtcaagtgattgatctgcttgcttcagagaaaaagctgatcgttggtcacaattgtttcctcgatattgcacatgtatacagcaaatttgtgggtcctcttccttcaacagctgagaaattcgtggcctccattaacagtcactttccttatattgttgacaccaaaatactcttaaacgtgaatccaatgttgcatcagcggatgaaaaagtccagtacatcactgtcttccgcgttttcctcgttatgtccgcaaatcgagttttcttcaagaagctctgactcgtttcttcagcagcgtgtcaatattgacgttgaaatagacaacgttaggtgttctaactggaatgcaggaggaaaacacgaagccggttatgatgctttcatgacaggttgcatctttgcgcaggcatgcaatcatctcggttttgacttcaaacagcattcgcagttagatgactttgcccagaacgagaaacttgaaaagtacatcaaccgtctttatctcagctggacaagaggtgatatcatcgaccttcgaacaggccatagtaatgcagataactggcgagtctcaaagttcaaatacgagaacattgtcctcatctggaacttcccacgaaaacttaaggcgagagggatcaaagaatgcatatgcaaagcctttggctctgcttctaactcagaacttgtctgggacttcttagcactcaagcggcagctggagtcaagcgacggtccagtctcagttcttcaccctttatccaagatccttgaaggaggaaacactggagctgcagactacgaagcatacaaagagatttgcagctcacacgtctcagaggtcatgttctctgaccaagctgaaacagttggtgtcaaatcaagaacaagacccaacgcacaatgcgagactgagacaagagaggagaacacagtcactgtgactcacaaagcatcggatttgattgatgcgtttttggccaatagagttgaagtcgaaactgctacgagtaattaa

SEQ ID NO: 73128 - protein, 672 aa, Arabidopsis thaliana
  peptide (1)..(672): Ceres Seq. ID no. 4958758
MRRHKRWPLRSLVCSFSSSAAETVTTSTAASATAAFPLKHVTRSNFETTLNDLRSLVKAADFVAIDLEMTGVTSAPWRDSLEFDRYDVRYLKVKDSAEKFAVVQFGVCPFRWDSRTQSFVSYPHNFFVFPRQELTFDPPAHEFLCQTTSMDFLAKYQFDFNTCIHEGISYLSRREEEEASKRLKMLHGEDGIDSSGETEELKLVRLADVLFAARMEKLLNEWRSGLLHGGNASSEFPRISNGSNQSMETVFHHMRPALSLKGFTSHQLRVLNSVLRKHFGDLVYIHSNDKSSSSRDIVVYTDSDSDKENLMKEAKDERKRLAERKIQSAIGFRQVIDLLASEKKLIVGHNCFLDIAHVYSKFVGPLPSTAEKFVASINSHFPYIVDTKILLNVNPMLHQRMKKSSTSLSSAFSSLCPQIEFSSRSSDSFLQQRVNIDVEIDNVRCSNWNAGGKHEAGYDAFMTGCIFAQACNHLGFDFKQHSQLDDFAQNEKLEKYINRLYLSWTRGDIIDLRTGHSNADNWRVSKFKYENIVLIWNFPRKLKARGIKECICKAFGSASNSELVWDFLALKRQLESSDGPVSVLHPLSKILEGGNTGAADYEAYKEICSSHVSEVMFSDQAETVGVKSRTRPNAQCETETREENTVTVTHKASDLIDAFLANRVEVETATSN

SEQ ID NO: 73129 - protein, 604 aa, Arabidopsis thaliana
  peptide (1)..(604): Ceres Seq. ID no. 4958759
MTGVTSAPWRDSLEFDRYDVRYLKVKDSAEKFAVVQFGVCPFRWDSRTQSFVSYPHNFFVFPRQELTFDPPAHEFLCQTTSMDFLAKYQFDFNTCIHEGISYLSRREEEEASKRLKMLHGEDGIDSSGETEELKLVRLADVLFAARMEKLLNEWRSGLLHGGNASSEFPRISNGSNQSMETVFHHMRPALSLKGFTSHQLRVLNSVLRKHFGDLVYIHSNDKSSSSRDIVVYTDSDSDKENLMKEAKDERKRLAERKIQSAIGFRQVIDLLASEKKLIVGHNCFLDIAHVYSKFVGPLPSTAEKFVASINSHFPYIVDTKILLNVNPMLHQRMKKSSTSLSSAFSSLCPQIEFSSRSSDSFLQQRVNIDVEIDNVRCSNWNAGGKHEAGYDAFMTGCIFAQACNHLGFDFKQHSQLDDFAQNEKLEKYINRLYLSWTRGDIIDLRTGHSNADNWRVSKFKYENIVLIWNFPRKLKARGIKECICKAFGSASNSELVWDFLALKRQLESSDGPVSVLHPLSKILEGGNTGAADYEAYKEICSSHVSEVMFSDQAETVGVKSRTRPNAQCETETREENTVTVTHKASDLIDAFLANRVEVETATSN

SEQ ID NO: 73130 - protein, 523 aa, Arabidopsis thaliana
  peptide (1)..(523): Ceres Seq. ID no. 4958760
MDFLAKYQFDFNTCIHEGISYLSRREEEEASKRLKMLHGEDGIDSSGETEELKLVRLADVLFAARMEKLLNEWRSGLLHGGNASSEFPRISNGSNQSMETVFHHMRPALSLKGFTSHQLRVLNSVLRKHFGDLVYIHSNDKSSSSRDIVVYTDSDSDKENLMKEAKDERKRLAERKIQSAIGFRQVIDLLASEKKLIVGHNCFLDIAHVYSKFVGPLPSTAEKFVASINSHFPYIVDTKILLNVNPMLHQRMKKSSTSLSSAFSSLCPQIEFSSRSSDSFLQQRVNIDVEIDNVRCSNWNAGGKHEAGYDAFMTGCIFAQACNHLGFDFKQHSQLDDFAQNEKLEKYINRLYLSWTRGDIIDLRTGHSNADNWRVSKFKYENIVLIWNFPRKLKARGIKECICKAFGSASNSELVWDFLALKRQLESSDGPVSVLHPLSKILEGGNTGAADYEAYKEICSSHVSEVMFSDQAETVGVKSRTRPNAQCETETREENTVTVTHKASDLIDAFLANRVEVETATSN

SEQ ID NO: 73131 - DNA, 2484 bp, Arabidopsis thaliana
  misc_feature (1)..(2484): Ceres Seq. ID no. 4958915
  misc_feature (1)..(2484): Ortholog of  Ceres SEQ ID NO 14307018 as cited in SEQ ID NO 59674
atggaggaaattgaagaaggaagcagcaacaacagcataagacgtgttggtaccggaagtagtgaccggagatgggttgatggaagcgaggtagactctgaaacgccgctgttttcagaaatcagagatagagactatagttttgggaatttgaggagaagattaatgaaaaaacccaaaagagctgattctcttgatgttgaagctatggaaattgcaggttctcatggtcacaatctcaaggatttgtcacttttgactacacttggaatagcgtttcagacgttaggtgttgtgtatggtgatatgggaacaagtcctttgtatgtgttcagtgatgtgtttagtaaagttcctataagatcagaagttgatgttcttggagctttgtctctcgttatctacactattgctgtgattcctttggcaaagtatgtatttgtagtccttaaagctaacgacaatggcgaaggagggacatttgcgttgtattcacttatttgtaggtatgcaaaggtgaataagctgccaaatcaacaacctgcggatgagcagatctcgagttttaggcttaaactcccaactcctgagctggaaagagctctggggattaaagaagctttggagacaaaagggtatttgaaaactcttcttttgcttttagtcctaatgggaacttccatgattattggcgatggaattctaacaccagctatgtcagtgatgtctgcaatgagtggtctacaaggtgaagttaaaggatttggaacaaatgcattggttatgtcttcgattgtgattctcgtggctttgttcagcatacaacggtttgggacgggtaaagttggttttctatttgctccagttctggcgctctggttcttctctcttggtgctattggaatctataatctgttgaagtatgacttcactgtcataagagcactaaacccgttttatatcgttttgttcttcaacaagaatagcaaacaggcttggtctgctcttggtggatgtgtcttatgcataacaggagctgaagcaatgtttgcagatttaggacatttctcagttcgttctatacagatggcatttacttgcgtggtgttcccatgccttctcttagcttacatgggtcaagctgcttatctaacaaagcatcccgaggcctcagctcgcatattctatgattcagttccaaagagtttgttctggccggtgtttgtgattgcaacattagctgctatgatagctagccaagccatgatctccgcgactttctcatgcgtcaaacaagccatggctctcggttgctttccaaggctgaagataatccacacttctaagaaacggataggtcaaatctatataccagttatcaactggttcttgatgatcatgtgcattcttgtcgtctccatcttcagaagcacaacccacattgccaatgcttacggcatagcagaggtaggtgtaatgatggttagcacagttttggtaactctagtgatgcttcttatttggcaaaccaatatatttctcgccctttgctttccccttatatttggatcagtggagaccatttacttgctagctgttctcaccaagatattggaaggcggttgggttccgctagtattcgccactttcttcctcactgtaatgtacatttggaactacggaagtgtactcaagtaccaaagcgaggtcagggaaagaatctccatggattttatgcgtgagctcggttcaactcttgggaccattcgaatccctgggattggactcctttataacgagcttgtccaaggtataccttccatttttggacagttcttgctcactcttcctgcgattcactcaacaatcatctttgtctgcatcaaatatgttcctgtcccggttgttcctcaagaagagaggttcctcttcagacgggtttgtcctaaggactaccatatgttcaggtgcattgcgaggtatggttacaaagatgtcagaaaagaagattctagagtctttgaacagcttcttattgaaagtctagagaagttcttgagatgtgaagcattagaggatgctctagagagcactctgaatgattttgatcccgatagagtttccgttgcaagtgatacttacacggacgacctcatggctcctctcatccaccgtgcaaagcgttctgagccagagcaagagttggattcagaggttttgccatcttcaagcgtagggtcgtctatggaggaagatccagctctggaatatgaacttgcggctttgagagaagccacagactcggggctaacgtatttactggctcatggagatgtaagggcgaagaagaattcgattttcgtgaagaagcttgtgattaattacttctatgcgtttctaaggagaaattgcagagctggagctgcgaatctcactgttcctcatatgaacatcttgcaagctgggatgacttatatggtctag

SEQ ID NO: 73132 - protein, 827 aa, Arabidopsis thaliana
  peptide (1)..(827): Ceres Seq. ID no. 4958916
MEEIEEGSSNNSIRRVGTGSSDRRWVDGSEVDSETPLFSEIRDRDYSFGNLRRRLMKKPKRADSLDVEAMEIAGSHGHNLKDLSLLTTLGIAFQTLGVVYGDMGTSPLYVFSDVFSKVPIRSEVDVLGALSLVIYTIAVIPLAKYVFVVLKANDNGEGGTFALYSLICRYAKVNKLPNQQPADEQISSFRLKLPTPELERALGIKEALETKGYLKTLLLLLVLMGTSMIIGDGILTPAMSVMSAMSGLQGEVKGFGTNALVMSSIVILVALFSIQRFGTGKVGFLFAPVLALWFFSLGAIGIYNLLKYDFTVIRALNPFYIVLFFNKNSKQAWSALGGCVLCITGAEAMFADLGHFSVRSIQMAFTCVVFPCLLLAYMGQAAYLTKHPEASARIFYDSVPKSLFWPVFVIATLAAMIASQAMISATFSCVKQAMALGCFPRLKIIHTSKKRIGQIYIPVINWFLMIMCILVVSIFRSTTHIANAYGIAEVGVMMVSTVLVTLVMLLIWQTNIFLALCFPLIFGSVETIYLLAVLTKILEGGWVPLVFATFFLTVMYIWNYGSVLKYQSEVRERISMDFMRELGSTLGTIRIPGIGLLYNELVQGIPSIFGQFLLTLPAIHSTIIFVCIKYVPVPVVPQEERFLFRRVCPKDYHMFRCIARYGYKDVRKEDSRVFEQLLIESLEKFLRCEALEDALESTLNDFDPDRVSVASDTYTDDLMAPLIHRAKRSEPEQELDSEVLPSSSVGSSMEEDPALEYELAALREATDSGLTYLLAHGDVRAKKNSIFVKKLVINYFYAFLRRNCRAGAANLTVPHMNILQAGMTYMV

SEQ ID NO: 73133 - protein, 772 aa, Arabidopsis thaliana
  peptide (1)..(772): Ceres Seq. ID no. 4958917
MKKPKRADSLDVEAMEIAGSHGHNLKDLSLLTTLGIAFQTLGVVYGDMGTSPLYVFSDVFSKVPIRSEVDVLGALSLVIYTIAVIPLAKYVFVVLKANDNGEGGTFALYSLICRYAKVNKLPNQQPADEQISSFRLKLPTPELERALGIKEALETKGYLKTLLLLLVLMGTSMIIGDGILTPAMSVMSAMSGLQGEVKGFGTNALVMSSIVILVALFSIQRFGTGKVGFLFAPVLALWFFSLGAIGIYNLLKYDFTVIRALNPFYIVLFFNKNSKQAWSALGGCVLCITGAEAMFADLGHFSVRSIQMAFTCVVFPCLLLAYMGQAAYLTKHPEASARIFYDSVPKSLFWPVFVIATLAAMIASQAMISATFSCVKQAMALGCFPRLKIIHTSKKRIGQIYIPVINWFLMIMCILVVSIFRSTTHIANAYGIAEVGVMMVSTVLVTLVMLLIWQTNIFLALCFPLIFGSVETIYLLAVLTKILEGGWVPLVFATFFLTVMYIWNYGSVLKYQSEVRERISMDFMRELGSTLGTIRIPGIGLLYNELVQGIPSIFGQFLLTLPAIHSTIIFVCIKYVPVPVVPQEERFLFRRVCPKDYHMFRCIARYGYKDVRKEDSRVFEQLLIESLEKFLRCEALEDALESTLNDFDPDRVSVASDTYTDDLMAPLIHRAKRSEPEQELDSEVLPSSSVGSSMEEDPALEYELAALREATDSGLTYLLAHGDVRAKKNSIFVKKLVINYFYAFLRRNCRAGAANLTVPHMNILQAGMTYMV

SEQ ID NO: 73134 - protein, 758 aa, Arabidopsis thaliana
  peptide (1)..(758): Ceres Seq. ID no. 4958918
MEIAGSHGHNLKDLSLLTTLGIAFQTLGVVYGDMGTSPLYVFSDVFSKVPIRSEVDVLGALSLVIYTIAVIPLAKYVFVVLKANDNGEGGTFALYSLICRYAKVNKLPNQQPADEQISSFRLKLPTPELERALGIKEALETKGYLKTLLLLLVLMGTSMIIGDGILTPAMSVMSAMSGLQGEVKGFGTNALVMSSIVILVALFSIQRFGTGKVGFLFAPVLALWFFSLGAIGIYNLLKYDFTVIRALNPFYIVLFFNKNSKQAWSALGGCVLCITGAEAMFADLGHFSVRSIQMAFTCVVFPCLLLAYMGQAAYLTKHPEASARIFYDSVPKSLFWPVFVIATLAAMIASQAMISATFSCVKQAMALGCFPRLKIIHTSKKRIGQIYIPVINWFLMIMCILVVSIFRSTTHIANAYGIAEVGVMMVSTVLVTLVMLLIWQTNIFLALCFPLIFGSVETIYLLAVLTKILEGGWVPLVFATFFLTVMYIWNYGSVLKYQSEVRERISMDFMRELGSTLGTIRIPGIGLLYNELVQGIPSIFGQFLLTLPAIHSTIIFVCIKYVPVPVVPQEERFLFRRVCPKDYHMFRCIARYGYKDVRKEDSRVFEQLLIESLEKFLRCEALEDALESTLNDFDPDRVSVASDTYTDDLMAPLIHRAKRSEPEQELDSEVLPSSSVGSSMEEDPALEYELAALREATDSGLTYLLAHGDVRAKKNSIFVKKLVINYFYAFLRRNCRAGAANLTVPHMNILQAGMTYMV

SEQ ID NO: 73135 - DNA, 1434 bp, Arabidopsis thaliana
  misc_feature (1)..(1434): Ceres Seq. ID no. 4958938
  misc_feature (1)..(1434): Ortholog of  Ceres SEQ ID NO 13600220 as cited in SEQ ID NO 0
atggaaaagacttttgctctgattaccatttttcttgcttttgctttctccgggaaatgcagcgacgttttcagcagatgtgattttcctgagggattcgtctttggatcttccacttctgcttatcagtgggaaggagctgttgcggaagacggaaggaaacctagtgtctgggacagattttgtcactcacataataaccaaggtaacggagatataacatgtgatgggtatcacaaatacaaggaagatgtgaagttgatggtggacactaacttagatgctttcagattctccatctcttggtctaggctaatacctaatagaagaggccctgttaaccaaaagggtcttcagttctacaagaatcttatccaagaattagtaaaccatggaattgaaccatatgttacactgcaccactttgatcatcctcaatatcttgaggacgaatatgaaggatggctcaaccacatgatcgtcgaagactttactgcttatgcagatgtttgcttcagagagtttggaaaccatgtcaaattctggaccacgatcaacgagggcaatatattctctattggaggttacaacgatggggattcaccgcctggtcgttgttccataccaggccaaaactgcttattagggaactcttccactgaaccatatattgtaggccataatttgttgcttgcgcacgcctctgtttcaagactatataagcaaaattacaaggataagcagggaggttccataggctttagcatattgacgatagggtttagtccttccacaagctccaaagatgatgccattgcaactcaaagagccaacgatttcttcaacggctggatgcttgggcctcttatatatggagactatccggatacaatgaaaagaatcgtcggatcaagaatgcccgttttctcggaggaagaatcagaacaagtgaaaggctcatctgactatataggaatcaatcactatcttgcagcttctatcacaaacagcaaactgaaaccttctatttcaggaaaccctgatttctactcagacatgaaccagagctatggcaatcctcctgtctacgttcttgagaatggtcgaccgataaatcgagattcgcagttgaaagaaaaggacacaccaaggattgagttcttacaagcttacattggtggtgtgctgaaatccattaggaatggatcagatacgagaggctactttgtatggtcacttatggatttatacgagattaaggggggatacgatgttggttatggattgtactctgtcaatttcagtgatcctcatcgcaaaagatctcccaaactctctgctcattggtattctgattttctcaagggcaaaaccgcttttcttggttctcaaggcatcacggaattgcagagcaacctctctccttactcctag

SEQ ID NO: 73136 - protein, 477 aa, Arabidopsis thaliana
  peptide (1)..(477): Ceres Seq. ID no. 4958939
MEKTFALITIFLAFAFSGKCSDVFSRCDFPEGFVFGSSTSAYQWEGAVAEDGRKPSVWDRFCHSHNNQGNGDITCDGYHKYKEDVKLMVDTNLDAFRFSISWSRLIPNRRGPVNQKGLQFYKNLIQELVNHGIEPYVTLHHFDHPQYLEDEYEGWLNHMIVEDFTAYADVCFREFGNHVKFWTTINEGNIFSIGGYNDGDSPPGRCSIPGQNCLLGNSSTEPYIVGHNLLLAHASVSRLYKQNYKDKQGGSIGFSILTIGFSPSTSSKDDAIATQRANDFFNGWMLGPLIYGDYPDTMKRIVGSRMPVFSEEESEQVKGSSDYIGINHYLAASITNSKLKPSISGNPDFYSDMNQSYGNPPVYVLENGRPINRDSQLKEKDTPRIEFLQAYIGGVLKSIRNGSDTRGYFVWSLMDLYEIKGGYDVGYGLYSVNFSDPHRKRSPKLSAHWYSDFLKGKTAFLGSQGITELQSNLSPYS

SEQ ID NO: 73137 - protein, 390 aa, Arabidopsis thaliana
  peptide (1)..(390): Ceres Seq. ID no. 4958940
MVDTNLDAFRFSISWSRLIPNRRGPVNQKGLQFYKNLIQELVNHGIEPYVTLHHFDHPQYLEDEYEGWLNHMIVEDFTAYADVCFREFGNHVKFWTTINEGNIFSIGGYNDGDSPPGRCSIPGQNCLLGNSSTEPYIVGHNLLLAHASVSRLYKQNYKDKQGGSIGFSILTIGFSPSTSSKDDAIATQRANDFFNGWMLGPLIYGDYPDTMKRIVGSRMPVFSEEESEQVKGSSDYIGINHYLAASITNSKLKPSISGNPDFYSDMNQSYGNPPVYVLENGRPINRDSQLKEKDTPRIEFLQAYIGGVLKSIRNGSDTRGYFVWSLMDLYEIKGGYDVGYGLYSVNFSDPHRKRSPKLSAHWYSDFLKGKTAFLGSQGITELQSNLSPYS

SEQ ID NO: 73138 - protein, 319 aa, Arabidopsis thaliana
  peptide (1)..(319): Ceres Seq. ID no. 4958941
MIVEDFTAYADVCFREFGNHVKFWTTINEGNIFSIGGYNDGDSPPGRCSIPGQNCLLGNSSTEPYIVGHNLLLAHASVSRLYKQNYKDKQGGSIGFSILTIGFSPSTSSKDDAIATQRANDFFNGWMLGPLIYGDYPDTMKRIVGSRMPVFSEEESEQVKGSSDYIGINHYLAASITNSKLKPSISGNPDFYSDMNQSYGNPPVYVLENGRPINRDSQLKEKDTPRIEFLQAYIGGVLKSIRNGSDTRGYFVWSLMDLYEIKGGYDVGYGLYSVNFSDPHRKRSPKLSAHWYSDFLKGKTAFLGSQGITELQSNLSPYS

SEQ ID NO: 73139 - DNA, 2445 bp, Arabidopsis thaliana
  misc_feature (1)..(2445): Ceres Seq. ID no. 4959201
  misc_feature (1)..(2445): Ortholog of  Ceres SEQ ID NO 13582534 as cited in SEQ ID NO 57409
atgggaaagattggtattgttttctttgcttcgttgctcttcttgctaattatattcccaagttgtgcctttgcagctataaccagagcaagtcctttgtcaataggacaaactctgagctcccctaatggaacttatgagttagggttcttcagtccaaacaactctcggaatcagtatgttgggatctggttcaagaacatcacccctcgggttgttgtctgggtggctaacagagataagccagttacaaacaacgcagcgaatctcactatcaacagcaatgggagccttatcttggttgagagagaacaaaatgttgtttggtcaataggagaaactttctcttctaacgagcttcgtgctgagctattagaaaacggaaatcttgtactcattgatggagtttcagaaagaaacttatgggaaagtttcgagcatcttggtgatactatgttacttgaatcatctgtgatgtatgatgttccgaataacaagaaacgtgttttatcttcttggaaaaatcccaccgatccttcacctggagaattcgtagctgagcttacgacacaagtacctccgcaaggctttataatgagaggatccaggccttactggagaggtggtccatgggcaagggtaaggttcaccggcataccagaaatggatggatcacatgtaagcaaattcgacatttcccaagatgttgcagccggcacaggatctttgacttattcattagaacgaagaaattcgaacctgtcgtacactacgctcacatcagcgggatcgttaaagatcatttggaataatggctctggttgggttactgacttggaggcccctgtaagctcatgtgatgtttataatacatgtggaccttttggcttgtgtataagatctaatcccccaaagtgtgaatgcttgaaaggctttgtaccaaaatcagatgaggagtggaataaaaggaattggactggtggttgtatgagaagaacaaatttatcttgtgatgtgaactcttctgcaacagcacaagccaataatggagacatcttcgacatagttgcaaatgtgaagcctccagacttttatgaatatctaagtttgatcaatgaagaggattgccaacaacgttgtcttggaaactgttcttgcacggcattttcctatattgaacaaattggatgtttggtatggaatcgagagcttgtggatgtaatgcagtttgttgctggaggagaaactctttccattcgtcttgcaagttctgagttagctggaagcaatcgagtgaagattattgttgctagcattgtcagcatttctgttttcatgatcttggtttttgcctcttattggtactggagatacaaagccaaacaaaatgattcaaatcctataccattggagacatcacaagatgcatggagggaacaactgaaaccacaagatgtaaatttctttgatatgcaaaccatattaactatcaccaataactttagcatggaaaataagcttggtcaaggtggattcggtccagtgtataagggaaatctacaagatgggaaagaaatagccataaaacgcctttcgagcacctctggacagggtctagaggagttcatgaatgaaataatactcatctcgaaactccaacacagaaacttggtccgccttttgggatgttgcattgaaggagaagaaaagctattgatttatgagtttatggcgaacaaaagcctcaatacctttatctttgattcgacgaaaaagcttgagcttgattggcccaagcggtttgaaatcattcaaggtattgcttgcggacttctttatcttcaccgcgactcatgtcttagggttgtacaccgagatatgaaggtcagcaacatccttttagacgaggaaatgaacccaaaaatatcagattttggattggctcggatgtttcaaggaacccaacatcaagccaacactcgcagggttgttggaacgctcggatacatgtctccagagtatgcttggacaggcatgttctctgagaaatccgacatctacgcatttggagttctgctattggaaatcataaccggcaagaggatttcaagtttcaccattggagaggaaggcaaaactcttcttgaatttgcatgggattcttggtgcgaaagcggtggatcggatctactggaccaagatatctctagctcgggttctgaatccgaagtagcgagatgtgttcagattggtttgctctgtattcaacaacaagccggggatagacccaacattgcacaagtaatgtcaatgcttacaaccacaatggatcttccgaaaccaaaacaacccgtattcgcaatgcaagtccaagagagtgattcagagtctaagactatgtactctgtcaataatataacacaaactgctatagttggtcgataa

SEQ ID NO: 73140 - protein, 814 aa, Arabidopsis thaliana
  peptide (1)..(814): Ceres Seq. ID no. 4959202
MGKIGIVFFASLLFLLIIFPSCAFAAITRASPLSIGQTLSSPNGTYELGFFSPNNSRNQYVGIWFKNITPRVVVWVANRDKPVTNNAANLTINSNGSLILVEREQNVVWSIGETFSSNELRAELLENGNLVLIDGVSERNLWESFEHLGDTMLLESSVMYDVPNNKKRVLSSWKNPTDPSPGEFVAELTTQVPPQGFIMRGSRPYWRGGPWARVRFTGIPEMDGSHVSKFDISQDVAAGTGSLTYSLERRNSNLSYTTLTSAGSLKIIWNNGSGWVTDLEAPVSSCDVYNTCGPFGLCIRSNPPKCECLKGFVPKSDEEWNKRNWTGGCMRRTNLSCDVNSSATAQANNGDIFDIVANVKPPDFYEYLSLINEEDCQQRCLGNCSCTAFSYIEQIGCLVWNRELVDVMQFVAGGETLSIRLASSELAGSNRVKIIVASIVSISVFMILVFASYWYWRYKAKQNDSNPIPLETSQDAWREQLKPQDVNFFDMQTILTITNNFSMENKLGQGGFGPVYKGNLQDGKEIAIKRLSSTSGQGLEEFMNEIILISKLQHRNLVRLLGCCIEGEEKLLIYEFMANKSLNTFIFDSTKKLELDWPKRFEIIQGIACGLLYLHRDSCLRVVHRDMKVSNILLDEEMNPKISDFGLARMFQGTQHQANTRRVVGTLGYMSPEYAWTGMFSEKSDIYAFGVLLLEIITGKRISSFTIGEEGKTLLEFAWDSWCESGGSDLLDQDISSSGSESEVARCVQIGLLCIQQQAGDRPNIAQVMSMLTTTMDLPKPKQPVFAMQVQESDSESKTMYSVNNITQTAIVGR

SEQ ID NO: 73141 - protein, 663 aa, Arabidopsis thaliana
  peptide (1)..(663): Ceres Seq. ID no. 4959203
MLLESSVMYDVPNNKKRVLSSWKNPTDPSPGEFVAELTTQVPPQGFIMRGSRPYWRGGPWARVRFTGIPEMDGSHVSKFDISQDVAAGTGSLTYSLERRNSNLSYTTLTSAGSLKIIWNNGSGWVTDLEAPVSSCDVYNTCGPFGLCIRSNPPKCECLKGFVPKSDEEWNKRNWTGGCMRRTNLSCDVNSSATAQANNGDIFDIVANVKPPDFYEYLSLINEEDCQQRCLGNCSCTAFSYIEQIGCLVWNRELVDVMQFVAGGETLSIRLASSELAGSNRVKIIVASIVSISVFMILVFASYWYWRYKAKQNDSNPIPLETSQDAWREQLKPQDVNFFDMQTILTITNNFSMENKLGQGGFGPVYKGNLQDGKEIAIKRLSSTSGQGLEEFMNEIILISKLQHRNLVRLLGCCIEGEEKLLIYEFMANKSLNTFIFDSTKKLELDWPKRFEIIQGIACGLLYLHRDSCLRVVHRDMKVSNILLDEEMNPKISDFGLARMFQGTQHQANTRRVVGTLGYMSPEYAWTGMFSEKSDIYAFGVLLLEIITGKRISSFTIGEEGKTLLEFAWDSWCESGGSDLLDQDISSSGSESEVARCVQIGLLCIQQQAGDRPNIAQVMSMLTTTMDLPKPKQPVFAMQVQESDSESKTMYSVNNITQTAIVGR

SEQ ID NO: 73142 - protein, 656 aa, Arabidopsis thaliana
  peptide (1)..(656): Ceres Seq. ID no. 4959204
MYDVPNNKKRVLSSWKNPTDPSPGEFVAELTTQVPPQGFIMRGSRPYWRGGPWARVRFTGIPEMDGSHVSKFDISQDVAAGTGSLTYSLERRNSNLSYTTLTSAGSLKIIWNNGSGWVTDLEAPVSSCDVYNTCGPFGLCIRSNPPKCECLKGFVPKSDEEWNKRNWTGGCMRRTNLSCDVNSSATAQANNGDIFDIVANVKPPDFYEYLSLINEEDCQQRCLGNCSCTAFSYIEQIGCLVWNRELVDVMQFVAGGETLSIRLASSELAGSNRVKIIVASIVSISVFMILVFASYWYWRYKAKQNDSNPIPLETSQDAWREQLKPQDVNFFDMQTILTITNNFSMENKLGQGGFGPVYKGNLQDGKEIAIKRLSSTSGQGLEEFMNEIILISKLQHRNLVRLLGCCIEGEEKLLIYEFMANKSLNTFIFDSTKKLELDWPKRFEIIQGIACGLLYLHRDSCLRVVHRDMKVSNILLDEEMNPKISDFGLARMFQGTQHQANTRRVVGTLGYMSPEYAWTGMFSEKSDIYAFGVLLLEIITGKRISSFTIGEEGKTLLEFAWDSWCESGGSDLLDQDISSSGSESEVARCVQIGLLCIQQQAGDRPNIAQVMSMLTTTMDLPKPKQPVFAMQVQESDSESKTMYSVNNITQTAIVGR

SEQ ID NO: 73143 - DNA, 1161 bp, Arabidopsis thaliana
  misc_feature (1)..(1161): Ceres Seq. ID no. 4959236
  misc_feature (1)..(1161): Ortholog of  Ceres SEQ ID NO 13658400 as cited in SEQ ID NO 66403
aaacctccaacttttttttgttttatcagattgtaaatttagggaagagactttcgcaagcaatctagaagcaaatcgatcgccaaatctccggattatttgcaagaatcgttcccagataatcttccccagattctccacttctccagctctgatcggagtgttgctcgaacagcttgaagaagacgacgaagatatggctacttcgaagaaaatgatcacacgtgaagaatgggagaagaaactaaatgctgtgaagcttaggaaagaagatatgaatactttggtgatgaattttcttgtgactgaaggatatgttgaagctgctgagaaattccaaagggagtctggaaccaaaccagagatagatcttgcgaccattactgatcgaatggctgttaaaaaggctgttcaaaacggaaatgtcgaggatgcgattgaaaaagttaatgatttgaatcctgagatactagacacgaatccggagctcttttttcatcttcagcagcaaaggttgatagaattaattcgacaagggaagacagaagaggccttagagtttgctcaggaggaacttgcaccacgtggcgaagaaaaccaagcgtttctggaagaattggaaaaaactgtagccctacttgtttttgacgatgcctctacctgcccggttaaagagcttcttgatctttcccaccgtcttaagacagcaagtgaagtaaatgcagcgattcttacaagccagagccacgaaaaagatcctaaacttccaagcttgttgaagatgttgatttgggctcaaactcaactggacgagaaagcagtgtatccgcacattaatgatttgtctaccggtaagctcgaagacccgtcagaatgattccgtacttctttcagccattggaaatcagtagcaaaaaggaacaatgaatggtgctctcttctcttcccgtcaatctcaataacttacaattcatatgctttctgcttttccttttcttctgcatcgggatttgttggacccgcaatcgttaggatatggggaggggaacataagcttttgtaggcaatgaattactctagtcaaatgttcttattatcaacatatttgatgactcattgcatacgtgcatttgatttgaatgaagttatcgactttgtttg

SEQ ID NO: 73144 - protein, 291 aa, Arabidopsis thaliana
  peptide (1)..(291): Ceres Seq. ID no. 4959237
NLQLFFVLSDCKFREETFASNLEANRSPNLRIICKNRSQIIFPRFSTSPALIGVLLEQLEEDDEDMATSKKMITREEWEKKLNAVKLRKEDMNTLVMNFLVTEGYVEAAEKFQRESGTKPEIDLATITDRMAVKKAVQNGNVEDAIEKVNDLNPEILDTNPELFFHLQQQRLIELIRQGKTEEALEFAQEELAPRGEENQAFLEELEKTVALLVFDDASTCPVKELLDLSHRLKTASEVNAAILTSQSHEKDPKLPSLLKMLIWAQTQLDEKAVYPHINDLSTGKLEDPSE

SEQ ID NO: 73145 - protein, 226 aa, Arabidopsis thaliana
  peptide (1)..(226): Ceres Seq. ID no. 4959238
MATSKKMITREEWEKKLNAVKLRKEDMNTLVMNFLVTEGYVEAAEKFQRESGTKPEIDLATITDRMAVKKAVQNGNVEDAIEKVNDLNPEILDTNPELFFHLQQQRLIELIRQGKTEEALEFAQEELAPRGEENQAFLEELEKTVALLVFDDASTCPVKELLDLSHRLKTASEVNAAILTSQSHEKDPKLPSLLKMLIWAQTQLDEKAVYPHINDLSTGKLEDPSE

SEQ ID NO: 73146 - protein, 220 aa, Arabidopsis thaliana
  peptide (1)..(220): Ceres Seq. ID no. 4959239
MITREEWEKKLNAVKLRKEDMNTLVMNFLVTEGYVEAAEKFQRESGTKPEIDLATITDRMAVKKAVQNGNVEDAIEKVNDLNPEILDTNPELFFHLQQQRLIELIRQGKTEEALEFAQEELAPRGEENQAFLEELEKTVALLVFDDASTCPVKELLDLSHRLKTASEVNAAILTSQSHEKDPKLPSLLKMLIWAQTQLDEKAVYPHINDLSTGKLEDPSE

SEQ ID NO: 73147 - DNA, 2466 bp, Arabidopsis thaliana
  misc_feature (1)..(2466): Ceres Seq. ID no. 4959248
  misc_feature (1)..(2466): Ortholog of  Ceres SEQ ID NO 13582534 as cited in SEQ ID NO 57409
atggatttcttgttcttgttattggagagaaaaaataaacacatggggaagaagagggtcgtgttgctttggcttagcatctttataagttttagctctgcagagataacggaagagagccctttgtcaataggacaaactctcagctcctccaatggagtttatgaactgggcttcttcagttttaataactcccaaaatcagtatgtcggaatctccttcaagggtatcattccccgggtggttgtgtgggtggcaaatagagaaaagcctgttacagactctgcggcaaatctggttatcagcagcaacggaagtcttcagttatttaatggcaaacatggtgttgtgtggtccagtggaaaagctcttgcatctaacgggtctcgtgtagagcttttagacagtggaaatctagttgtcatagaaaaagtttcgggaagaactctatgggaaagttttgagcatcttggtgatactctgctccctcactcaactatcatgtataatgtccacaccggtgagaagcgagggttgacttcttggaaaagttacactgatccatcgcctggtgactttgtcgttctgattacaccgcaagtgccatcacaggggtttcttatgagaggctcgaccccttattttagatctggtccatgggctaaaacaaagttcaccgggttacctcaaatggatgaatcatacacaagtccattcagcttaacacaggatgtaaatgggtcaggatactattcgtattttgatagagacaacaaacgttcacgtattaggttaacaccagatggatcaatgaaggcgttacggtataatggaatggactgggacacaacctacgagggtcctgccaattcatgtgatatttatggcgtatgtggaccttttggtttttgtgttatctcagttcctccaaagtgtaaatgcttcaaaggttttattcctaaatccattgaggagtggaaaacaggaaactggactagtggttgtgtgaggcgtagcgaactacattgtcaaggaaactctactggcaaagatgcaaatgtcttccatactgttcccaacataaagcctccagacttttacgaatacgcagattctgtggatgcggaagaatgccaacaaaattgcctcaacaattgttcttgcttggccttcgcttatattcctggaatagggtgcttaatgtggagcaaggacctaatggacacagttcaatttgctgcaggaggagaacttctttccattcgtcttgcacgttctgagctagacgtaaataagcgcaagaagaccatcattgctattacagtgagccttaccctttttgtgatcttgggctttactgcgtttggtttctggagacgcagagtggaacaaaatgaagatgcatggaggaatgatctgcaaacacaagacgtcccaggtctagaatattttgagatgaataccatacaaactgccaccaataatttcagtctatcaaacaaactcggtcatggtggatttggttcagtttacaaggcgagaaacggaaaactgcaagatggaagggaaattgcggtaaaacgcctttctagcagctctgagcagggcaaacaggagttcatgaatgaaatagtactgatatcaaaactccaacacagaaacttagtccgggttttgggatgctgcgtcgaaggaacagagaagctattgatttatgagtttatgaaaaacaaaagccttgatacttttgtctttgtttttacacggtgtttttgcttagattcaaaaaaaaggcttgagatagattggccaaagagatttgatatcattcaaggtattgcacgtggacttctctatctccatcgtgactcacgcctcagaataattcaccgagacctgaaggtcagcaacattcttctggacgagaaaatgaacccgaaaatatcagattttgggttggctcggatgtttcatggaaccgaatatcaggataaaactcgcagggttgtcggaactctaggttatatgtctcctgagtatgcatgggctggagtattctctgagaaatcagacatctacagcttcggagttctactgctagaaatcatcagcggagagaagatctcgaggttcagctatggcgaagaaggaaaaacacttcttgcatatgcatgggaatgttggtgtggagcccgaggagttaatcttttggaccaagctcttggtgattcttgtcacccatatgaagttggaaggtgtgtccagattggtttgctttgtgttcaataccagcctgcagacagaccaaacacacttgagttgctttctatgcttaccacaacatcagatcttcctctgccaaaacaacctacatttgtagtgcacacgagagatggcaaatctccgtcaaatgattcgatgatcactgtcaatgagatgacagagtctgtgatccatggacgttga

SEQ ID NO: 73148 - protein, 821 aa, Arabidopsis thaliana
  peptide (1)..(821): Ceres Seq. ID no. 4959249
MDFLFLLLERKNKHMGKKRVVLLWLSIFISFSSAEITEESPLSIGQTLSSSNGVYELGFFSFNNSQNQYVGISFKGIIPRVVVWVANREKPVTDSAANLVISSNGSLQLFNGKHGVVWSSGKALASNGSRVELLDSGNLVVIEKVSGRTLWESFEHLGDTLLPHSTIMYNVHTGEKRGLTSWKSYTDPSPGDFVVLITPQVPSQGFLMRGSTPYFRSGPWAKTKFTGLPQMDESYTSPFSLTQDVNGSGYYSYFDRDNKRSRIRLTPDGSMKALRYNGMDWDTTYEGPANSCDIYGVCGPFGFCVISVPPKCKCFKGFIPKSIEEWKTGNWTSGCVRRSELHCQGNSTGKDANVFHTVPNIKPPDFYEYADSVDAEECQQNCLNNCSCLAFAYIPGIGCLMWSKDLMDTVQFAAGGELLSIRLARSELDVNKRKKTIIAITVSLTLFVILGFTAFGFWRRRVEQNEDAWRNDLQTQDVPGLEYFEMNTIQTATNNFSLSNKLGHGGFGSVYKARNGKLQDGREIAVKRLSSSSEQGKQEFMNEIVLISKLQHRNLVRVLGCCVEGTEKLLIYEFMKNKSLDTFVFVFTRCFCLDSKKRLEIDWPKRFDIIQGIARGLLYLHRDSRLRIIHRDLKVSNILLDEKMNPKISDFGLARMFHGTEYQDKTRRVVGTLGYMSPEYAWAGVFSEKSDIYSFGVLLLEIISGEKISRFSYGEEGKTLLAYAWECWCGARGVNLLDQALGDSCHPYEVGRCVQIGLLCVQYQPADRPNTLELLSMLTTTSDLPLPKQPTFVVHTRDGKSPSNDSMITVNEMTESVIHGR

SEQ ID NO: 73149 - protein, 807 aa, Arabidopsis thaliana
  peptide (1)..(807): Ceres Seq. ID no. 4959250
MGKKRVVLLWLSIFISFSSAEITEESPLSIGQTLSSSNGVYELGFFSFNNSQNQYVGISFKGIIPRVVVWVANREKPVTDSAANLVISSNGSLQLFNGKHGVVWSSGKALASNGSRVELLDSGNLVVIEKVSGRTLWESFEHLGDTLLPHSTIMYNVHTGEKRGLTSWKSYTDPSPGDFVVLITPQVPSQGFLMRGSTPYFRSGPWAKTKFTGLPQMDESYTSPFSLTQDVNGSGYYSYFDRDNKRSRIRLTPDGSMKALRYNGMDWDTTYEGPANSCDIYGVCGPFGFCVISVPPKCKCFKGFIPKSIEEWKTGNWTSGCVRRSELHCQGNSTGKDANVFHTVPNIKPPDFYEYADSVDAEECQQNCLNNCSCLAFAYIPGIGCLMWSKDLMDTVQFAAGGELLSIRLARSELDVNKRKKTIIAITVSLTLFVILGFTAFGFWRRRVEQNEDAWRNDLQTQDVPGLEYFEMNTIQTATNNFSLSNKLGHGGFGSVYKARNGKLQDGREIAVKRLSSSSEQGKQEFMNEIVLISKLQHRNLVRVLGCCVEGTEKLLIYEFMKNKSLDTFVFVFTRCFCLDSKKRLEIDWPKRFDIIQGIARGLLYLHRDSRLRIIHRDLKVSNILLDEKMNPKISDFGLARMFHGTEYQDKTRRVVGTLGYMSPEYAWAGVFSEKSDIYSFGVLLLEIISGEKISRFSYGEEGKTLLAYAWECWCGARGVNLLDQALGDSCHPYEVGRCVQIGLLCVQYQPADRPNTLELLSMLTTTSDLPLPKQPTFVVHTRDGKSPSNDSMITVNEMTESVIHGR

SEQ ID NO: 73150 - protein, 654 aa, Arabidopsis thaliana
  peptide (1)..(654): Ceres Seq. ID no. 4959251
MYNVHTGEKRGLTSWKSYTDPSPGDFVVLITPQVPSQGFLMRGSTPYFRSGPWAKTKFTGLPQMDESYTSPFSLTQDVNGSGYYSYFDRDNKRSRIRLTPDGSMKALRYNGMDWDTTYEGPANSCDIYGVCGPFGFCVISVPPKCKCFKGFIPKSIEEWKTGNWTSGCVRRSELHCQGNSTGKDANVFHTVPNIKPPDFYEYADSVDAEECQQNCLNNCSCLAFAYIPGIGCLMWSKDLMDTVQFAAGGELLSIRLARSELDVNKRKKTIIAITVSLTLFVILGFTAFGFWRRRVEQNEDAWRNDLQTQDVPGLEYFEMNTIQTATNNFSLSNKLGHGGFGSVYKARNGKLQDGREIAVKRLSSSSEQGKQEFMNEIVLISKLQHRNLVRVLGCCVEGTEKLLIYEFMKNKSLDTFVFVFTRCFCLDSKKRLEIDWPKRFDIIQGIARGLLYLHRDSRLRIIHRDLKVSNILLDEKMNPKISDFGLARMFHGTEYQDKTRRVVGTLGYMSPEYAWAGVFSEKSDIYSFGVLLLEIISGEKISRFSYGEEGKTLLAYAWECWCGARGVNLLDQALGDSCHPYEVGRCVQIGLLCVQYQPADRPNTLELLSMLTTTSDLPLPKQPTFVVHTRDGKSPSNDSMITVNEMTESVIHGR

SEQ ID NO: 73151 - DNA, 2421 bp, Arabidopsis thaliana
  misc_feature (1)..(2421): Ceres Seq. ID no. 4959259
  misc_feature (1)..(2421): Ortholog of  Ceres SEQ ID NO 13582534 as cited in SEQ ID NO 57409
atggggaagaagaggatagtgttctttgcttatttgcccttttttaccatctttatgagttttagctttgcagggataaccaaagagagtcccttttcaattggacaaactctcagctcctctaatggtgtttatgaattgggattcttcagtcttaataactcccaaaatcagtatctcggaatttggttcaagagtatcattccccaggtggttgtgtgggtggctaatagagaaaagcctgttacagactctgcggcaaatctcggtatcagcagcaatggtagtcttctgttatctaatggcaaacatggcgttgtgtggtctaccggagatatttttgcatctaatgggtctcgtgcagagcttacagaccatggaaatcttgttttcatagacaaagtttcgggaaggactctatggcaaagctttgagcatcttggtaatactctgctccctacgtcaattatgatgtataatctcgtcgctggtgagaagcgaggattgactgcttggaaaagttacaccgatccatcgcctggcgaatttgtggctctgattacaccgcaagtgccatcacaggggattattatgagaggctcgacacgttattatagaaccggtccatgggctaaaacaaggttcactggatcaccacaaatggatgaatcatacacaagtccattcatcttaacacaggatgtaaatgggtcaggatacttttcatttgttgaaagaggcaaaccttcacgcatgattttaacatcagagggaacaatgaaggtcttagtgcataatggaatggactgggaatcaacctacgagggtccagccaattcatgtgatatatatggcgtatgtggaccttttgggctttgtgttgtatcaattcctccaaaatgtaaatgcttcaaaggttttgttcctaaattcgctaaggagtggaagaaaggaaactggactagtggttgtgtgaggcgtaccgaactacattgtcaaggaaactccagtggcaaagatgcaaatgtcttctatactgttcccaacataaagcctccagacttttacgagtatgcaaattctcagaatgctgaagaatgccaccaaaattgcctccacaattgttcttgcttggcgttttcttatattcctggaatagggtgcttaatgtggagcaaggatctaatggacacaaggcaattttctgcagcaggagaacttctttccattcgtcttgcacgttctgagctagatgtaaataagcgcaagatgaccattgttgctagtacagtgagcctgaccctattcgtgatctttggatttgctgcatttggtttctggagatgcagagtggaacataatgctcatatatcaaacgatgcatggaggaattttctgcaatcacaagacgtcccaggtttagaattttttgagatgaatgccatacaaactgccaccaataatttcagtctatcaaacaaactcggtcctggtggatttggttctgtttacaaggcgagaaacggaaaactgcaagatggaagagaaattgcggtaaaacgtctttctagcagctctgggcagggcaaacaggagttcatgaatgaaatagtactgatatcaaaactccaacacagaaacttagtccgggttttgggatgctgcgtcgaaggaacagagaagctattgatttatgggttcttgaaaaacaaaagcctggatacttttgtctttgatgcaagaaaaaagctcgaacttgattggccaaagagatttgagatcattgaaggtattgcacgtggacttctctatctccaccgtgactcacgcctcagagtaattcaccgagacctgaaggtcagcaacattcttctggatgagaaaatgaacccgaaaatatcagattttggtttggctcggatgtttcagggaacccaatatcaggaaaaaactcgcagggttgtcggaactctaggatatatgtctcctgagtatgcatggactggcgtattctctgagaaatccgatatctacagtttcggagttctgttgttagaaatcatcagcggaaagaagatctcaagtttcagctatggcgaggagggaaaagcacttcttgcatatgcatgggaatgttggtgtgaaacccgagaagttaattttttggaccaagctcttgctgattctagtcacccatctgaagttggaaggtgtgtacagattggtttgctctgtgttcaacacgagcctgcagacagaccaaacacacttgagttgctgtctatgcttaccacaacatcagatcttcctctgcccaaaaaacccacatttgtagtgcacactagaaaagacgaatcaccgtcaaatgattcgatgatcactgtcaatgagatgacagagtctgtgatccaaggacgttga

SEQ ID NO: 73152 - protein, 806 aa, Arabidopsis thaliana
  peptide (1)..(806): Ceres Seq. ID no. 4959260
MGKKRIVFFAYLPFFTIFMSFSFAGITKESPFSIGQTLSSSNGVYELGFFSLNNSQNQYLGIWFKSIIPQVVVWVANREKPVTDSAANLGISSNGSLLLSNGKHGVVWSTGDIFASNGSRAELTDHGNLVFIDKVSGRTLWQSFEHLGNTLLPTSIMMYNLVAGEKRGLTAWKSYTDPSPGEFVALITPQVPSQGIIMRGSTRYYRTGPWAKTRFTGSPQMDESYTSPFILTQDVNGSGYFSFVERGKPSRMILTSEGTMKVLVHNGMDWESTYEGPANSCDIYGVCGPFGLCVVSIPPKCKCFKGFVPKFAKEWKKGNWTSGCVRRTELHCQGNSSGKDANVFYTVPNIKPPDFYEYANSQNAEECHQNCLHNCSCLAFSYIPGIGCLMWSKDLMDTRQFSAAGELLSIRLARSELDVNKRKMTIVASTVSLTLFVIFGFAAFGFWRCRVEHNAHISNDAWRNFLQSQDVPGLEFFEMNAIQTATNNFSLSNKLGPGGFGSVYKARNGKLQDGREIAVKRLSSSSGQGKQEFMNEIVLISKLQHRNLVRVLGCCVEGTEKLLIYGFLKNKSLDTFVFDARKKLELDWPKRFEIIEGIARGLLYLHRDSRLRVIHRDLKVSNILLDEKMNPKISDFGLARMFQGTQYQEKTRRVVGTLGYMSPEYAWTGVFSEKSDIYSFGVLLLEIISGKKISSFSYGEEGKALLAYAWECWCETREVNFLDQALADSSHPSEVGRCVQIGLLCVQHEPADRPNTLELLSMLTTTSDLPLPKKPTFVVHTRKDESPSNDSMITVNEMTESVIQGR

SEQ ID NO: 73153 - protein, 788 aa, Arabidopsis thaliana
  peptide (1)..(788): Ceres Seq. ID no. 4959261
MSFSFAGITKESPFSIGQTLSSSNGVYELGFFSLNNSQNQYLGIWFKSIIPQVVVWVANREKPVTDSAANLGISSNGSLLLSNGKHGVVWSTGDIFASNGSRAELTDHGNLVFIDKVSGRTLWQSFEHLGNTLLPTSIMMYNLVAGEKRGLTAWKSYTDPSPGEFVALITPQVPSQGIIMRGSTRYYRTGPWAKTRFTGSPQMDESYTSPFILTQDVNGSGYFSFVERGKPSRMILTSEGTMKVLVHNGMDWESTYEGPANSCDIYGVCGPFGLCVVSIPPKCKCFKGFVPKFAKEWKKGNWTSGCVRRTELHCQGNSSGKDANVFYTVPNIKPPDFYEYANSQNAEECHQNCLHNCSCLAFSYIPGIGCLMWSKDLMDTRQFSAAGELLSIRLARSELDVNKRKMTIVASTVSLTLFVIFGFAAFGFWRCRVEHNAHISNDAWRNFLQSQDVPGLEFFEMNAIQTATNNFSLSNKLGPGGFGSVYKARNGKLQDGREIAVKRLSSSSGQGKQEFMNEIVLISKLQHRNLVRVLGCCVEGTEKLLIYGFLKNKSLDTFVFDARKKLELDWPKRFEIIEGIARGLLYLHRDSRLRVIHRDLKVSNILLDEKMNPKISDFGLARMFQGTQYQEKTRRVVGTLGYMSPEYAWTGVFSEKSDIYSFGVLLLEIISGKKISSFSYGEEGKALLAYAWECWCETREVNFLDQALADSSHPSEVGRCVQIGLLCVQHEPADRPNTLELLSMLTTTSDLPLPKKPTFVVHTRKDESPSNDSMITVNEMTESVIQGR

SEQ ID NO: 73154 - protein, 650 aa, Arabidopsis thaliana
  peptide (1)..(650): Ceres Seq. ID no. 4959262
MMYNLVAGEKRGLTAWKSYTDPSPGEFVALITPQVPSQGIIMRGSTRYYRTGPWAKTRFTGSPQMDESYTSPFILTQDVNGSGYFSFVERGKPSRMILTSEGTMKVLVHNGMDWESTYEGPANSCDIYGVCGPFGLCVVSIPPKCKCFKGFVPKFAKEWKKGNWTSGCVRRTELHCQGNSSGKDANVFYTVPNIKPPDFYEYANSQNAEECHQNCLHNCSCLAFSYIPGIGCLMWSKDLMDTRQFSAAGELLSIRLARSELDVNKRKMTIVASTVSLTLFVIFGFAAFGFWRCRVEHNAHISNDAWRNFLQSQDVPGLEFFEMNAIQTATNNFSLSNKLGPGGFGSVYKARNGKLQDGREIAVKRLSSSSGQGKQEFMNEIVLISKLQHRNLVRVLGCCVEGTEKLLIYGFLKNKSLDTFVFDARKKLELDWPKRFEIIEGIARGLLYLHRDSRLRVIHRDLKVSNILLDEKMNPKISDFGLARMFQGTQYQEKTRRVVGTLGYMSPEYAWTGVFSEKSDIYSFGVLLLEIISGKKISSFSYGEEGKALLAYAWECWCETREVNFLDQALADSSHPSEVGRCVQIGLLCVQHEPADRPNTLELLSMLTTTSDLPLPKKPTFVVHTRKDESPSNDSMITVNEMTESVIQGR

SEQ ID NO: 73155 - DNA, 2250 bp, Arabidopsis thaliana
  misc_feature (1)..(2250): Ceres Seq. ID no. 4959270
  misc_feature (1)..(2250): Ortholog of  Ceres SEQ ID NO 13582534 as cited in SEQ ID NO 57409
atgaggatcacgttctttgcttctttgctcttatttaccaataccatctttataagttttagctttgcaattgcagggataaacaaagagagtcctttgtcaataggacaaactctcagctcctctaatggagtttatgaattgggtttcttcagttttaataactcggaaaatcattatcttggaatctggttcaagggaatcattccccgggtggttgtgtgggtggccaatagagaaaatcctgttacagattccacagcaaatctcgctatcagcagcaacgcaagtcttctgttatataatggaaaacatggcgttgcatggtccagtggtgaaactcttgcttctaacgggtctcgtgcagagctttcagacaccggaaatcttattgtcatagacaatttttcgggaagaactctttggcaaagctttgaccatcttggtgatactatgcttcctttctcagctctgatgtataacctcgccactggcgagaagcaggtcttgacttcttggaaaagttacactaatccagcggttggtgactttgtgcttcagattacaacgcaagtgccaacacaagctttaactatgagaggctcgaagccttattggagaagcggtccatgggctaaaacaagaaacttcaaacttccacgtatagtgataacatcgaagggttcactggagatttctaggcatagtgggactgattgggtattgaactttgtggctccagcgcactcatgtgattattacggtgtatgtggaccttttgggatttgtgtcaagtcagtgtgtaaatgcttcaaagggtttataccaaaatatattgaggagtggaaaagaggaaattggactgatggttgtgtgaggcgtaccaaactacattgtcaggaaaactcaactaaaaaagatgcaaacttcttccatccagttgccaacataaagcctccagacttttacgaatttgcaagtgctgtggatgcagaaggatgctacaaaatttgcctccacaactgttcttgcttggccttttcttatattcatggaattgggtgcttaatatggaaccaagacttcatggacacagtgcaattttctgcaggaggagagattctttccattcgtcttgcacgttctgaattaggtgggaataagcgcaagaagaccattactgctagtattgtcagcctttctctttttctgatattgggttctactgcgtttggtttctggagatacagagttaaacataatgcttcacaagatgcaccgaaatatgatttggaaccacaagatgtctcaggttcatatttgtttgagatgaacaccattcaaactgccaccaataatttcagtctctcaaataaactgggacaaggtggatttggttcagtttacaagggaaagctgcaagatgggaaagaaattgctgtaaaacggctttctagcagctcagggcagggcaaagaggagttcatgaatgaaatagtactcatctcaaaactacaacacaaaaacttagttcggattttaggatgttgcattgaaggagaagagaggctgttgatttatgagtttatgttgaacaaaagccttgatacttttctcttcgattcaagaaaaaggcttgagattgactggccaaagagatttgatatcattcaaggtattgcgcgtggaattcactatctccatcgtgactcatgcctcaaggtaattcaccgtgatctgaaggtcagcaatattcttcttgacgagaagatgaatccaaagatatcagattttggattggctcggatgtatcagggaaccgaatatcaggacaatactcgcagggtcgtaggaactctaggatatatgtctccagaggatatattagaaatcataagcggagagaagatctcaagattcagctatggcaaagaagaaaaaacccttattgcatatgcatgggaatcttggtgtgaaactggaggagttgatcttttggataaagatgttgctgattcatgtcgcccattagaagttgagagatgtattcagattggtcttctctgtgttcaacaccaacctgcagacagaccaaacacacttgagttgatgtctatgctcacgacaacatcagatcttccatcaccaaaacaacccacatttgtagtgcactggagagatgacgaatcatcgtctaaggatttgatcactgtgaatgagatgacaaagtctgtgatcttagggcgttga

SEQ ID NO: 73156 - protein, 749 aa, Arabidopsis thaliana
  peptide (1)..(749): Ceres Seq. ID no. 4959271
MRITFFASLLLFTNTIFISFSFAIAGINKESPLSIGQTLSSSNGVYELGFFSFNNSENHYLGIWFKGIIPRVVVWVANRENPVTDSTANLAISSNASLLLYNGKHGVAWSSGETLASNGSRAELSDTGNLIVIDNFSGRTLWQSFDHLGDTMLPFSALMYNLATGEKQVLTSWKSYTNPAVGDFVLQITTQVPTQALTMRGSKPYWRSGPWAKTRNFKLPRIVITSKGSLEISRHSGTDWVLNFVAPAHSCDYYGVCGPFGICVKSVCKCFKGFIPKYIEEWKRGNWTDGCVRRTKLHCQENSTKKDANFFHPVANIKPPDFYEFASAVDAEGCYKICLHNCSCLAFSYIHGIGCLIWNQDFMDTVQFSAGGEILSIRLARSELGGNKRKKTITASIVSLSLFLILGSTAFGFWRYRVKHNASQDAPKYDLEPQDVSGSYLFEMNTIQTATNNFSLSNKLGQGGFGSVYKGKLQDGKEIAVKRLSSSSGQGKEEFMNEIVLISKLQHKNLVRILGCCIEGEERLLIYEFMLNKSLDTFLFDSRKRLEIDWPKRFDIIQGIARGIHYLHRDSCLKVIHRDLKVSNILLDEKMNPKISDFGLARMYQGTEYQDNTRRVVGTLGYMSPEDILEIISGEKISRFSYGKEEKTLIAYAWESWCETGGVDLLDKDVADSCRPLEVERCIQIGLLCVQHQPADRPNTLELMSMLTTTSDLPSPKQPTFVVHWRDDESSSKDLITVNEMTKSVILGR

SEQ ID NO: 73157 - protein, 598 aa, Arabidopsis thaliana
  peptide (1)..(598): Ceres Seq. ID no. 4959272
MLPFSALMYNLATGEKQVLTSWKSYTNPAVGDFVLQITTQVPTQALTMRGSKPYWRSGPWAKTRNFKLPRIVITSKGSLEISRHSGTDWVLNFVAPAHSCDYYGVCGPFGICVKSVCKCFKGFIPKYIEEWKRGNWTDGCVRRTKLHCQENSTKKDANFFHPVANIKPPDFYEFASAVDAEGCYKICLHNCSCLAFSYIHGIGCLIWNQDFMDTVQFSAGGEILSIRLARSELGGNKRKKTITASIVSLSLFLILGSTAFGFWRYRVKHNASQDAPKYDLEPQDVSGSYLFEMNTIQTATNNFSLSNKLGQGGFGSVYKGKLQDGKEIAVKRLSSSSGQGKEEFMNEIVLISKLQHKNLVRILGCCIEGEERLLIYEFMLNKSLDTFLFDSRKRLEIDWPKRFDIIQGIARGIHYLHRDSCLKVIHRDLKVSNILLDEKMNPKISDFGLARMYQGTEYQDNTRRVVGTLGYMSPEDILEIISGEKISRFSYGKEEKTLIAYAWESWCETGGVDLLDKDVADSCRPLEVERCIQIGLLCVQHQPADRPNTLELMSMLTTTSDLPSPKQPTFVVHWRDDESSSKDLITVNEMTKSVILGR

SEQ ID NO: 73158 - protein, 591 aa, Arabidopsis thaliana
  peptide (1)..(591): Ceres Seq. ID no. 4959273
MYNLATGEKQVLTSWKSYTNPAVGDFVLQITTQVPTQALTMRGSKPYWRSGPWAKTRNFKLPRIVITSKGSLEISRHSGTDWVLNFVAPAHSCDYYGVCGPFGICVKSVCKCFKGFIPKYIEEWKRGNWTDGCVRRTKLHCQENSTKKDANFFHPVANIKPPDFYEFASAVDAEGCYKICLHNCSCLAFSYIHGIGCLIWNQDFMDTVQFSAGGEILSIRLARSELGGNKRKKTITASIVSLSLFLILGSTAFGFWRYRVKHNASQDAPKYDLEPQDVSGSYLFEMNTIQTATNNFSLSNKLGQGGFGSVYKGKLQDGKEIAVKRLSSSSGQGKEEFMNEIVLISKLQHKNLVRILGCCIEGEERLLIYEFMLNKSLDTFLFDSRKRLEIDWPKRFDIIQGIARGIHYLHRDSCLKVIHRDLKVSNILLDEKMNPKISDFGLARMYQGTEYQDNTRRVVGTLGYMSPEDILEIISGEKISRFSYGKEEKTLIAYAWESWCETGGVDLLDKDVADSCRPLEVERCIQIGLLCVQHQPADRPNTLELMSMLTTTSDLPSPKQPTFVVHWRDDESSSKDLITVNEMTKSVILGR

SEQ ID NO: 73159 - DNA, 2691 bp, Arabidopsis thaliana
  misc_feature (1)..(2691): Ceres Seq. ID no. 4959288
  misc_feature (1)..(2691): Ortholog of  Ceres SEQ ID NO 14315338 as cited in SEQ ID NO 60283
atgtcagtttctgttttgcgacagtgtaaatttcatttgtctctcacttctgtatgcttatcgtttatatttggtttaatattctctcttctcttcaaagctacaggcggaaattcggctgttgcacataagtcaggatctctaagtactccagcaacttctactggacaagcaggggataataagtctttagtagtgcatagtgttgttccacgggatagtgatattgggaaagactcttctgattcaggaaaggaatctatcactttctcaaaaacaaagccaggcatgctgttgagaccggcttatgtaagaaagacgccaacaaagtttgatgaaacaaagaagcagtcagtggctgttggatatctaaagaaaagtggattggatggtgagaagaaactagatactgagacggcgtttgattcagaaatgagtggtaggaacccatatgatgccgacgattctatcatcaagagtatcaccaacaagtttgaacaagctttattaccagaatcaccgactgatgaagcaaaatgtatgctgctgaaaccgcctcgtgtacagagatcaccaagtactaagtacaatgaggcaagatgggcgacatctactgattctggagctttagacagtaaaaagaatgggttagagtcctcaagagacatggacttgccaacagggctcagggatgacagaggtagtaacccatgtgaggaagatatcgagaacaagagcatttcaagtaggtcagaaagagttctgtcaccagaaaaagctggtgatgaactaaaaagccttgaatcccctggaggtagcaaagaatcaaaatctgtgaaggatatgcgtcatctggttattgattctttaaaaactgctgtgtttgcagtaaaagttgtttcgggaaggacacggtcattggttgagaggtttgaaagaggagaaaaaattactcattctgaagataaagcagccagtgcaacagtagttcatagctctaattctgtagaggaagagcccctgacagcatcggtacagacagttagcatgatgcctacccaggtaatgccagttaaacttgatcaggcaactaactcgaccacagttgacgttcctgtgttatcaacacgacgaactaagagtactccagtcagagtaatgcctgtagtactcggtcgggacactagcatggcaactgatacgcctcctgtaacatcaacccgacctgataggacttcagctactaatttgacatctgatgtgtctggtgtaacatcaaaacgacaaactaggacttctccagcccccgtcatgccaatgatactcaatcagacaacaaaaatgaaatctgatgagccttctataacatcaacatggcctgataggacttcggctactgatttgacatctgatgtgtctggtgtaatatcatcacgacaaactaggacttctccagcaccggtcatgccaatgaaactcaatcagaaaacaaaaataaaatctgatgagcctcctataacatcaacacggcctgataggccttcagctactaatttgacatctgatgagtctcctgtaacatcaacacgacaagcaaagacttctccagccccagttacgcctgtgatactaaatcagcgtcaaacaactaacatgaaatctgatgagcctcctgtaatatcaacaagaccacttaggacctcttcggcacgagtaatgcctgtgatactcaatcaagcatctaccacgtatgatgagcgtcctttatcatcttcacgatcggctagaacttctcctgcccgtataatgcctatgaaactcaatcaagcagataatatgccatcgtatgagcctccagttgcattaacacgatcagctaggaactctcccgcccgtgtaattcctgtgaaacttaatcaagcaacaaatgtgacagctgatgcatctcatataagatccaggcaaagatttagtccaactcaaacgctggcaacacctgcagtatttgatcaggtgactgatatgacactggatgagactacaaaaactcaacaatcttctgatatcttgacccaggaagagcctcagatatctgggagagaggatgatggtgacatttgggagattttaatgcgaactcatagtgaggtcttaaacactcttcaatcacggttgacaaaattacagattgtaagacatttctgggaacgtagtgatattaaaggcgcgattgcggccttaagaaaactgtcagatcactctgttcaagcagatgtgatcaatattctaacagacaaaacagagattttaacattagatttattttctcaattagcacccgtcctcacaggcttattgggcagcaagactgagaggcctgtaaatgtctccttggaaatgctcttgaagcttgtagcagtgtttggcacagttatacaatcaactgtttcagcacgacgagttgtcggcgttgatcttcatgcagaggaaagtaaaacaaatcgagaactgcaggttacagatctgccaaagctgttctgcggaattgcaaaaggttcagaagattcttccactactgacaagaagaggtggtcttatagcaagaaaggcacaagaactaaacctagttcttcaaacaccatagctcctggttcaaagtcaagaccactcggaatcacttgcgaactgtaa

SEQ ID NO: 73160 - protein, 896 aa, Arabidopsis thaliana
  peptide (1)..(896): Ceres Seq. ID no. 4959289
MSVSVLRQCKFHLSLTSVCLSFIFGLIFSLLFKATGGNSAVAHKSGSLSTPATSTGQAGDNKSLVVHSVVPRDSDIGKDSSDSGKESITFSKTKPGMLLRPAYVRKTPTKFDETKKQSVAVGYLKKSGLDGEKKLDTETAFDSEMSGRNPYDADDSIIKSITNKFEQALLPESPTDEAKCMLLKPPRVQRSPSTKYNEARWATSTDSGALDSKKNGLESSRDMDLPTGLRDDRGSNPCEEDIENKSISSRSERVLSPEKAGDELKSLESPGGSKESKSVKDMRHLVIDSLKTAVFAVKVVSGRTRSLVERFERGEKITHSEDKAASATVVHSSNSVEEEPLTASVQTVSMMPTQVMPVKLDQATNSTTVDVPVLSTRRTKSTPVRVMPVVLGRDTSMATDTPPVTSTRPDRTSATNLTSDVSGVTSKRQTRTSPAPVMPMILNQTTKMKSDEPSITSTWPDRTSATDLTSDVSGVISSRQTRTSPAPVMPMKLNQKTKIKSDEPPITSTRPDRPSATNLTSDESPVTSTRQAKTSPAPVTPVILNQRQTTNMKSDEPPVISTRPLRTSSARVMPVILNQASTTYDERPLSSSRSARTSPARIMPMKLNQADNMPSYEPPVALTRSARNSPARVIPVKLNQATNVTADASHIRSRQRFSPTQTLATPAVFDQVTDMTLDETTKTQQSSDILTQEEPQISGREDDGDIWEILMRTHSEVLNTLQSRLTKLQIVRHFWERSDIKGAIAALRKLSDHSVQADVINILTDKTEILTLDLFSQLAPVLTGLLGSKTERPVNVSLEMLLKLVAVFGTVIQSTVSARRVVGVDLHAEESKTNRELQVTDLPKLFCGIAKGSEDSSTTDKKRWSYSKKGTRTKPSSSNTIAPGSKSRPLGITCEL

SEQ ID NO: 73161 - protein, 800 aa, Arabidopsis thaliana
  peptide (1)..(800): Ceres Seq. ID no. 4959290
MLLRPAYVRKTPTKFDETKKQSVAVGYLKKSGLDGEKKLDTETAFDSEMSGRNPYDADDSIIKSITNKFEQALLPESPTDEAKCMLLKPPRVQRSPSTKYNEARWATSTDSGALDSKKNGLESSRDMDLPTGLRDDRGSNPCEEDIENKSISSRSERVLSPEKAGDELKSLESPGGSKESKSVKDMRHLVIDSLKTAVFAVKVVSGRTRSLVERFERGEKITHSEDKAASATVVHSSNSVEEEPLTASVQTVSMMPTQVMPVKLDQATNSTTVDVPVLSTRRTKSTPVRVMPVVLGRDTSMATDTPPVTSTRPDRTSATNLTSDVSGVTSKRQTRTSPAPVMPMILNQTTKMKSDEPSITSTWPDRTSATDLTSDVSGVISSRQTRTSPAPVMPMKLNQKTKIKSDEPPITSTRPDRPSATNLTSDESPVTSTRQAKTSPAPVTPVILNQRQTTNMKSDEPPVISTRPLRTSSARVMPVILNQASTTYDERPLSSSRSARTSPARIMPMKLNQADNMPSYEPPVALTRSARNSPARVIPVKLNQATNVTADASHIRSRQRFSPTQTLATPAVFDQVTDMTLDETTKTQQSSDILTQEEPQISGREDDGDIWEILMRTHSEVLNTLQSRLTKLQIVRHFWERSDIKGAIAALRKLSDHSVQADVINILTDKTEILTLDLFSQLAPVLTGLLGSKTERPVNVSLEMLLKLVAVFGTVIQSTVSARRVVGVDLHAEESKTNRELQVTDLPKLFCGIAKGSEDSSTTDKKRWSYSKKGTRTKPSSSNTIAPGSKSRPLGITCEL

SEQ ID NO: 73162 - protein, 752 aa, Arabidopsis thaliana
  peptide (1)..(752): Ceres Seq. ID no. 4959291
MSGRNPYDADDSIIKSITNKFEQALLPESPTDEAKCMLLKPPRVQRSPSTKYNEARWATSTDSGALDSKKNGLESSRDMDLPTGLRDDRGSNPCEEDIENKSISSRSERVLSPEKAGDELKSLESPGGSKESKSVKDMRHLVIDSLKTAVFAVKVVSGRTRSLVERFERGEKITHSEDKAASATVVHSSNSVEEEPLTASVQTVSMMPTQVMPVKLDQATNSTTVDVPVLSTRRTKSTPVRVMPVVLGRDTSMATDTPPVTSTRPDRTSATNLTSDVSGVTSKRQTRTSPAPVMPMILNQTTKMKSDEPSITSTWPDRTSATDLTSDVSGVISSRQTRTSPAPVMPMKLNQKTKIKSDEPPITSTRPDRPSATNLTSDESPVTSTRQAKTSPAPVTPVILNQRQTTNMKSDEPPVISTRPLRTSSARVMPVILNQASTTYDERPLSSSRSARTSPARIMPMKLNQADNMPSYEPPVALTRSARNSPARVIPVKLNQATNVTADASHIRSRQRFSPTQTLATPAVFDQVTDMTLDETTKTQQSSDILTQEEPQISGREDDGDIWEILMRTHSEVLNTLQSRLTKLQIVRHFWERSDIKGAIAALRKLSDHSVQADVINILTDKTEILTLDLFSQLAPVLTGLLGSKTERPVNVSLEMLLKLVAVFGTVIQSTVSARRVVGVDLHAEESKTNRELQVTDLPKLFCGIAKGSEDSSTTDKKRWSYSKKGTRTKPSSSNTIAPGSKSRPLGITCEL

SEQ ID NO: 73163 - DNA, 1020 bp, Arabidopsis thaliana
  misc_feature (1)..(1020): Ceres Seq. ID no. 4959297
  misc_feature (1)..(1020): Ortholog of  Ceres SEQ ID NO 15170911 as cited in SEQ ID NO 55290
atgacaaccaaggcggtgctaatctcaagcggcgtcgccaccgtggctctgttactgaaactctctgttccggtagctgttgatttctccgtgtcacgagctccgatcttgtggagctccttgttgtcatggctgaaaccaccgtatctttacgttgttaccaacggaattatcatcactatcgttgcttcttctaagtattaccgaagtcaccatgaccgtgatgaagaagatgagatcgtcgtgtacggtggtggaggttataagatccagacggaggagccgattgtgaatcaacatcaagcttctccgaggattctggaggttaaggatttggatactggtgcgcattttggtttcgttgtggcgaatctggaggctgaggaactggaatcagaggcggttacggcggttgtgtttgacgatgaggaggaggagaagaagattatagatagcgcggcgacggcggaggatgaaattgaagaggagcttaagagtgtgattatggttgagaattcagatctggttgaatccgatgtcataccgccgccgatgatgatcgaatcggagaatcttcctccgattgagaagcctctcgttacttcaaggttcggtcaccggaaattgatgaaagcaagtcaagaaggtggaagagctttgagagtgacgaagccgaagaagaacgagacgttggagaatacgtggaagatgataacggaagggaaatcaacgccgttgactagacagttataccggagatctgacacgtttggacgtggagattccgggggagttgacggtgaggtgaaaccggtttataagaagtcggatacgtttagggacaggactaattattatcagttggcggagacggcgaaggtgaggaaagagccgtcgctgagtcaggaagagttgaatcggcgagttgaggcgtttataaagaagtttaatgaggagatgaagttgcagagaatggagtctctcagacagtacaaagagataactagccgtggggtttag

SEQ ID NO: 73164 - protein, 339 aa, Arabidopsis thaliana; identical to SEQ ID NO: 47170
  peptide (1)..(339): Ceres Seq. ID no. 4959298

SEQ ID NO: 73165 - protein, 171 aa, Arabidopsis thaliana
  peptide (1)..(171): Ceres Seq. ID no. 4959299
MVENSDLVESDVIPPPMMIESENLPPIEKPLVTSRFGHRKLMKASQEGGRALRVTKPKKNETLENTWKMITEGKSTPLTRQLYRRSDTFGRGDSGGVDGEVKPVYKKSDTFRDRTNYYQLAETAKVRKEPSLSQEELNRRVEAFIKKFNEEMKLQRMESLRQYKEITSRGV

SEQ ID NO: 73166 - DNA, 1287 bp, Arabidopsis thaliana
  misc_feature (1)..(1287): Ceres Seq. ID no. 4959406
  misc_feature (1)..(1287): Ortholog of  Ceres SEQ ID NO 15180386 as cited in SEQ ID NO 0
atggcgttgttgggatttgcttgcgggcctcgttacagacagctgcagtatgaggtcctccatcgaactctggagaaagcaggtcctgcttttatcaaatttggtcaatggattgctacgcgacctgatcggtttaataaggatttgtgtttgcagctttcaaagcttcacagtaatgctcctgagcacagttttgcgttcaccaaaaagagcattgaaaatgcatttggtcgtaaactctctgagatatttgaggaatttgatgaggcgccagtggcatctgggagtatagctcaagtacaccgagcttccttgaagtttcagtatgcaggacaaaaggtgaagtcctcggaagttgctgtgaaagttagacatccttgtgttgaggaaacgatgaagcgagattttgtgataattaatttcgtggcgaggctaaccacttttattccggggttaaattggcttagattggacgagtgtgtgcaacagtttagtgtctacatgttgtcccaagttgatctctcaagggaagcttctcatttgagtcggtttatatataacttccgtggatggaaagatgtctcttttcctaagcccatctatcctctaatacatcccgctgttttagtcgagacgtatgagcacggagagagtgtggctcgttatgttgatggctccgaaggacaagaaaaacttaaggctaaagtagctcatatcggaactaatgctctcttgaaaatgctcctggtcgacaacttcattcatgctgatatgcatcctgggaatattcttgtccggccaaacaatactagaagaggtctattcagatcgaggaagccacacatcgttttcctagatgtgggcatgactgcagaactttcaaaaactgaccgagataacctactcggatttttcaaggccgttgcacgtagagacggccggactgctgctgaacgaacacttaaattatctaaacaacagaattgtcctgatccacaggcctttatcaaggaagtagaagaagcatttacattctggggaacagaggaaggggatctagtccatccagcggattgtatgcacgaactattcgagaaaatgaggagtcatagagttaatatcgacggcaatgtgtccaccgtcatgtttacaacattagttctcgagggttggcaacggaaactggatccaggatacgatgtgatgcgtacgctacaaacaatgctgctgaaaacggattggatgaaatcactttcttacacgatcgatggacttatggctccgtag

SEQ ID NO: 73167 - protein, 428 aa, Arabidopsis thaliana; identical to SEQ ID NO: 46436
  peptide (1)..(428): Ceres Seq. ID no. 4959407

SEQ ID NO: 73168 - protein, 297 aa, Arabidopsis thaliana
  peptide (1)..(297): Ceres Seq. ID no. 4959408
MKRDFVIINFVARLTTFIPGLNWLRLDECVQQFSVYMLSQVDLSREASHLSRFIYNFRGWKDVSFPKPIYPLIHPAVLVETYEHGESVARYVDGSEGQEKLKAKVAHIGTNALLKMLLVDNFIHADMHPGNILVRPNNTRRGLFRSRKPHIVFLDVGMTAELSKTDRDNLLGFFKAVARRDGRTAAERTLKLSKQQNCPDPQAFIKEVEEAFTFWGTEEGDLVHPADCMHELFEKMRSHRVNIDGNVSTVMFTTLVLEGWQRKLDPGYDVMRTLQTMLLKTDWMKSLSYTIDGLMAP

SEQ ID NO: 73169 - protein, 261 aa, Arabidopsis thaliana
  peptide (1)..(261): Ceres Seq. ID no. 4959409
MLSQVDLSREASHLSRFIYNFRGWKDVSFPKPIYPLIHPAVLVETYEHGESVARYVDGSEGQEKLKAKVAHIGTNALLKMLLVDNFIHADMHPGNILVRPNNTRRGLFRSRKPHIVFLDVGMTAELSKTDRDNLLGFFKAVARRDGRTAAERTLKLSKQQNCPDPQAFIKEVEEAFTFWGTEEGDLVHPADCMHELFEKMRSHRVNIDGNVSTVMFTTLVLEGWQRKLDPGYDVMRTLQTMLLKTDWMKSLSYTIDGLMAP

SEQ ID NO: 73170 - DNA, 2457 bp, Arabidopsis thaliana
  misc_feature (1)..(2457): Ceres Seq. ID no. 4959410
  misc_feature (1)..(2457): Ortholog of  Ceres SEQ ID NO 13582534 as cited in SEQ ID NO 57409
atggggaagaagaggatcatgttctttgcttccttgctcttaattaccatctttttaagtttcagctatgcagggataacgagagaaagtcctctgtcaataggaaaaactctcagctcctctaatggagtttatgaattgggattcttcagttttaataactcccaaaatcagtatgttggaatctggttcaagggtatcattccccgggtggttgtgtgggtggccaatagagaaaagcctgttacagactctgcagcaaatttaactatcagcagcaatggaagtcttctgttgtttaatgaaaatcatagcgttgtgtggtccattggagaaacttttgcatctaacgggtctcgtgcggagcttacagacaacggaaatttagttgtcatagacaataattcgggaagaactctatgggaaagctttgagcattttggtgacactatgctacctttctcaaacctgatgtataatcttgccacaggtgagaagcgggtgttgacttcttggaaaagtcacactgatccatcgcctggcgattttacggttcagattacaccgcaagttccatcccaggcgtgtactatgagaggctcaaagacttattggagaagcggtccatgggctaaaacaaggttcaccgggatacctgtaatggatgacacatatacaagtccattcagccttcagcaagatacaaacgggtcaggatccttcacttattttgaaagaaacttcaaactttcatatataatgataacatcagaaggctcactgaagatttttcagcataatggaatggactgggaattaaacttcgaggctccagaaaattcatgcgatatttacggcttttgtggaccttttggaatttgtgttatgtcagtacctccaaagtgtaaatgcttcaaagggtttgtaccaaaatccattgaggagtggaaaagaggaaactggactgatggttgtgtgaggcatactgaactacattgccaaggaaacactaatggtaaaactgtaaacggcttctatcacgttgccaacataaagcctccagacttttacgaatttgcaagttttgtggatgctgaaggatgctaccaaatttgcctccacaattgttcttgcttggcctttgcttatatcaatggaataggttgcttaatgtggaaccaagacctaatggacgcagtgcaattttctgcagggggagaaattctttccattcgccttgcaagttctgaactaggtggaaataagcgcaacaaaatcattgttgctagtattgtgagcctttctctttttgtgatactggcttttgctgcgttttgtttcttgagatacaaagtgaaacataccgcgaagatatcaaagattgcttcaaaagaggcatggaataatgatctagagccacaagatgtctcaggtttaaagttctttgagatgaataccattcaaactgccactgataatttcagtctctcaaataaactaggacaaggtggatttggctcagtttacaagggaaagctgcaagatgggaaagaaattgctgtaaaacggctttctagcagctccggacagggaaaagaggagttcatgaatgaaatagtactcatctcgaaactacaacataaaaacttggttaggattctgggatgttgcattgaaggagaagagaggctgttggtatatgagtttttgctgaacaaaagccttgatacttttctcttcgttctgatcgtttctatacggtattattgcttagattcaagaaaaaggcttgagattgactggcctaagagatttaatatcattgaaggcattgcgcgtgggcttcactatctccaccgtgactcatgcctcagggtcattcaccgtgatcttaaggttagcaatattcttctggatgagaagatgaacccaaaaatatcagactttggattggctcggatgtatcagggaaccgaatatcaggacaacactcgtagggttgcaggaactctaggatatatggctcccgagtatgcatggactgggatgttctctgagaaatcagatatctacagttttggagttatactgttggaaatcatcaccggggagaagatctcaagattcagctatggtagacaaggaaaaacccttcttgcatatgcatgggaatcttggtgtgaaagtggaggaatcgatcttttggataaagatgttgctgattcatgtcacccattagaagttgagagatgtgtgcagattggtttgctatgtgttcaacaccaacctgctgatagaccaaacacaatggagttgttgtctatgctcaccacaacatcagatcttacatcaccaaaacagcccacatttgtagtgcacacgagagatgaagaatctctgtctcagggtttgatcaccgtcaatgagatgacccaatctgtgatccttgggcgttaa

SEQ ID NO: 73171 - protein, 818 aa, Arabidopsis thaliana
  peptide (1)..(818): Ceres Seq. ID no. 4959411
MGKKRIMFFASLLLITIFLSFSYAGITRESPLSIGKTLSSSNGVYELGFFSFNNSQNQYVGIWFKGIIPRVVVWVANREKPVTDSAANLTISSNGSLLLFNENHSVVWSIGETFASNGSRAELTDNGNLVVIDNNSGRTLWESFEHFGDTMLPFSNLMYNLATGEKRVLTSWKSHTDPSPGDFTVQITPQVPSQACTMRGSKTYWRSGPWAKTRFTGIPVMDDTYTSPFSLQQDTNGSGSFTYFERNFKLSYIMITSEGSLKIFQHNGMDWELNFEAPENSCDIYGFCGPFGICVMSVPPKCKCFKGFVPKSIEEWKRGNWTDGCVRHTELHCQGNTNGKTVNGFYHVANIKPPDFYEFASFVDAEGCYQICLHNCSCLAFAYINGIGCLMWNQDLMDAVQFSAGGEILSIRLASSELGGNKRNKIIVASIVSLSLFVILAFAAFCFLRYKVKHTAKISKIASKEAWNNDLEPQDVSGLKFFEMNTIQTATDNFSLSNKLGQGGFGSVYKGKLQDGKEIAVKRLSSSSGQGKEEFMNEIVLISKLQHKNLVRILGCCIEGEERLLVYEFLLNKSLDTFLFVLIVSIRYYCLDSRKRLEIDWPKRFNIIEGIARGLHYLHRDSCLRVIHRDLKVSNILLDEKMNPKISDFGLARMYQGTEYQDNTRRVAGTLGYMAPEYAWTGMFSEKSDIYSFGVILLEIITGEKISRFSYGRQGKTLLAYAWESWCESGGIDLLDKDVADSCHPLEVERCVQIGLLCVQHQPADRPNTMELLSMLTTTSDLTSPKQPTFVVHTRDEESLSQGLITVNEMTQSVILGR

SEQ ID NO: 73172 - protein, 812 aa, Arabidopsis thaliana
  peptide (1)..(812): Ceres Seq. ID no. 4959412
MFFASLLLITIFLSFSYAGITRESPLSIGKTLSSSNGVYELGFFSFNNSQNQYVGIWFKGIIPRVVVWVANREKPVTDSAANLTISSNGSLLLFNENHSVVWSIGETFASNGSRAELTDNGNLVVIDNNSGRTLWESFEHFGDTMLPFSNLMYNLATGEKRVLTSWKSHTDPSPGDFTVQITPQVPSQACTMRGSKTYWRSGPWAKTRFTGIPVMDDTYTSPFSLQQDTNGSGSFTYFERNFKLSYIMITSEGSLKIFQHNGMDWELNFEAPENSCDIYGFCGPFGICVMSVPPKCKCFKGFVPKSIEEWKRGNWTDGCVRHTELHCQGNTNGKTVNGFYHVANIKPPDFYEFASFVDAEGCYQICLHNCSCLAFAYINGIGCLMWNQDLMDAVQFSAGGEILSIRLASSELGGNKRNKIIVASIVSLSLFVILAFAAFCFLRYKVKHTAKISKIASKEAWNNDLEPQDVSGLKFFEMNTIQTATDNFSLSNKLGQGGFGSVYKGKLQDGKEIAVKRLSSSSGQGKEEFMNEIVLISKLQHKNLVRILGCCIEGEERLLVYEFLLNKSLDTFLFVLIVSIRYYCLDSRKRLEIDWPKRFNIIEGIARGLHYLHRDSCLRVIHRDLKVSNILLDEKMNPKISDFGLARMYQGTEYQDNTRRVAGTLGYMAPEYAWTGMFSEKSDIYSFGVILLEIITGEKISRFSYGRQGKTLLAYAWESWCESGGIDLLDKDVADSCHPLEVERCVQIGLLCVQHQPADRPNTMELLSMLTTTSDLTSPKQPTFVVHTRDEESLSQGLITVNEMTQSVILGR

SEQ ID NO: 73173 - protein, 668 aa, Arabidopsis thaliana
  peptide (1)..(668): Ceres Seq. ID no. 4959413
MLPFSNLMYNLATGEKRVLTSWKSHTDPSPGDFTVQITPQVPSQACTMRGSKTYWRSGPWAKTRFTGIPVMDDTYTSPFSLQQDTNGSGSFTYFERNFKLSYIMITSEGSLKIFQHNGMDWELNFEAPENSCDIYGFCGPFGICVMSVPPKCKCFKGFVPKSIEEWKRGNWTDGCVRHTELHCQGNTNGKTVNGFYHVANIKPPDFYEFASFVDAEGCYQICLHNCSCLAFAYINGIGCLMWNQDLMDAVQFSAGGEILSIRLASSELGGNKRNKIIVASIVSLSLFVILAFAAFCFLRYKVKHTAKISKIASKEAWNNDLEPQDVSGLKFFEMNTIQTATDNFSLSNKLGQGGFGSVYKGKLQDGKEIAVKRLSSSSGQGKEEFMNEIVLISKLQHKNLVRILGCCIEGEERLLVYEFLLNKSLDTFLFVLIVSIRYYCLDSRKRLEIDWPKRFNIIEGIARGLHYLHRDSCLRVIHRDLKVSNILLDEKMNPKISDFGLARMYQGTEYQDNTRRVAGTLGYMAPEYAWTGMFSEKSDIYSFGVILLEIITGEKISRFSYGRQGKTLLAYAWESWCESGGIDLLDKDVADSCHPLEVERCVQIGLLCVQHQPADRPNTMELLSMLTTTSDLTSPKQPTFVVHTRDEESLSQGLITVNEMTQSVILGR

SEQ ID NO: 73174 - DNA, 3372 bp, Arabidopsis thaliana
  misc_feature (1)..(3372): Ceres Seq. ID no. 4959487
  misc_feature (1)..(3372): Ortholog of  Ceres SEQ ID NO 13654989 as cited in SEQ ID NO 63117
  misc_feature (1)..(3372): Ortholog of  Ceres SEQ ID NO 13584744 as cited in SEQ ID NO 69137
atggaagtaactttagggccaatgacttatttatggattgttgtgtcttttgctctgaacttgttatggattcttgtcaggtatcctgatgacgtccatgatcgtaagtgggttccattctcagaagatgaattgatgacagtaaacaacactgtagatacagactttgataatccttatgacccgccaaaagctgtaattagcacggctgccataccaaccaatgccagttcaagtctgatccttacttggctaacttccaatccagaagatcagatctacatctacattcactttcttgaactacaagtgttacggggcaatgaaactaggatattcgacattttgatgaatggaatcattacttctccagcttatagtcctacggactcggttgtcgacacagtatacaacaaagaacctctaaggtgcaatgcttcagtatgcagcttggaactaagaaaaacactcggttcaactcttccacctctaattaacgccatcgagattttcacagtacttgagtttccagaaacagcaacatatgaagatgatttcagtgcaattgagaacatccgagctgcgtatgcattaagcaacgggagtggagatccatgcgtccctaaaccatcccactatctcaaatgcagcaacttcacggatacgtccgtagtacaattgagaatcatttccctaaatttatcctcaatgagattatccggtgtcatatcacctagcattcaaactctgaccaagcttcaagtgctggacttgtcgaataacaatttgaccggaggagtacccggatttctatccaacatggtgtccttgttgtcaatagacttaagcaataatagtttaagtggtccgattccacaagctcttcttgatagacgaaaggaaggattggatttaaagtttcatggaaacacaaaactttatgagtttatttcacacaggaaaaagaattttccattagtagcagttgttgcctcagcttctgccatcgccattgtcctggttgttcttggtgtccttttcatctgccttcgaagaaagccaccaagtagagaggctccacactcatcaatcgaaacagtaaagagaagatttacttattcagaggttatggcaatgacaaataatttcaagaaaattattggtgaaggagggtttggaatcatctatcacggtcatctgaacgatggccagcaagtagctgttaaagtactatctgaatcatcatcccaaggatacaagcagttcaaggctgaggttgaacttttaatgagagttcatcatgtaaacctggtaaaccttgctggatattgtgatgacagcaaccacttagcactgatctatgagttcatggagaatagagacttaaaagagcatctctcaggaaaagaaggctcctcattcttggactggccatgtagactaaaaatagctgcagaagctgcacttggattggaatacttgcacacaggatgcaaaccaccgatgattcatagagatgttaaaagcacaaatatattgttgaatgaagactttcaggcaaaactcggtgattttggactttcgagatctttccctatcgggggtgaaactcatgtgtcgacagttgttgtcggaactcatggatttctcgatcctgaatattaccaaacacagcggttgtccgagaagagtgatgtctacagtttcggtattgtcttactagaaatcatcacaaacaaacttgtgattgatcaaactcgtgaaaggcctcatatagcagaatgggtgaggtatatgctttcaataggtgatatcgaaagtgtaatggatccaaaccttaaggggaaatatgactctagctctgcctggaaagttcttgaactagcgatgttgtgttcgaaactttctttagcagaaagaccaaacatggctcaaattgttcatgaactaaatgagtatctattgtacgagaactcaagaagagaaatcagtcaagatgtgaggtcaaaaaattccagtgaagtgagcacaaacaccgaaatggctcctatggcactgaacctcctcgaaaaggcatctcctttttccaattccttctcctatgctaatgctacagatgcgagccttagagctggtcgaaaagggttgagtttttctgtctcttacctcgttgattcattgggtttacctaaaaaggtcgcagaatcgatctcaaagaaagtcagcttcgaggacaaaggcaatcctgattctgttctgagtctattgagaagtcatgggttcactgattctcagatctcaagcatcattacggattatccacaattgctagtagctgatgctgagaaatcaattggtcccaagcttcagtttctgcagtccagaggagcttcaaggtctgagctcactcatattgtatctacagttcctgaaatcttggggaagagaggggacaaaactatcagcatatactatgattttgttaaagagattatagaagcggataagagttccaagttcgaaaagttatgtcattctttgccagagggtagtaagcaggagaacaaaatcagaaatgttttggttttgagagaattgggtgttcctcaaaggttgttgttcccattgcttatatctgatcaccaacctgtctgtggaaaagaaaattttgaagaatcactcaagaaagttgttgagatgggttttgatccaaccacctcaaagtttgtcaaagctcttagggttgtttacagattccgcgacaaaactatagaagcaaaagttaatgtctgtaaaagtttaggcttttctgttggagatgtatgggcaatgtttaagaagtgtccttcctttctgaatttctctgagaacaagatagttcaaacttgggaaaccctgaagaagtgtggactactcgaagacgatgtcctctcagtgttgaagaagtttccacaatgcattaatgcttcagagcagaagataatgaactccattgaaacatttctaggcttaggatttagcagagatgaggttgcaatgatagccaagcgctttcctcaatgccttattttatctgcagagacagtgaagaaaaagactgagtttctggtgaagaagatgaattggccactaaaggctgtggtttcaacccctgcggtacttggatacagcttagagaagaggactatcccaaggtgtaatgtaattaaagctctcatgtccaaaggatcgcttggaagtgaactccctggaatgtcgtctgttttggtatgtaccaatgaagaattcttatgcaggtatgtgaagaaccatgatgacaagaagatagtacctgagttgatggctattttcaccggagatcgcgtttcatag

SEQ ID NO: 73175 - protein, 1123 aa, Arabidopsis thaliana
  peptide (1)..(1123): Ceres Seq. ID no. 4959488
MEVTLGPMTYLWIVVSFALNLLWILVRYPDDVHDRKWVPFSEDELMTVNNTVDTDFDNPYDPPKAVISTAAIPTNASSSLILTWLTSNPEDQIYIYIHFLELQVLRGNETRIFDILMNGIITSPAYSPTDSVVDTVYNKEPLRCNASVCSLELRKTLGSTLPPLINAIEIFTVLEFPETATYEDDFSAIENIRAAYALSNGSGDPCVPKPSHYLKCSNFTDTSVVQLRIISLNLSSMRLSGVISPSIQTLTKLQVLDLSNNNLTGGVPGFLSNMVSLLSIDLSNNSLSGPIPQALLDRRKEGLDLKFHGNTKLYEFISHRKKNFPLVAVVASASAIAIVLVVLGVLFICLRRKPPSREAPHSSIETVKRRFTYSEVMAMTNNFKKIIGEGGFGIIYHGHLNDGQQVAVKVLSESSSQGYKQFKAEVELLMRVHHVNLVNLAGYCDDSNHLALIYEFMENRDLKEHLSGKEGSSFLDWPCRLKIAAEAALGLEYLHTGCKPPMIHRDVKSTNILLNEDFQAKLGDFGLSRSFPIGGETHVSTVVVGTHGFLDPEYYQTQRLSEKSDVYSFGIVLLEIITNKLVIDQTRERPHIAEWVRYMLSIGDIESVMDPNLKGKYDSSSAWKVLELAMLCSKLSLAERPNMAQIVHELNEYLLYENSRREISQDVRSKNSSEVSTNTEMAPMALNLLEKASPFSNSFSYANATDASLRAGRKGLSFSVSYLVDSLGLPKKVAESISKKVSFEDKGNPDSVLSLLRSHGFTDSQISSIITDYPQLLVADAEKSIGPKLQFLQSRGASRSELTHIVSTVPEILGKRGDKTISIYYDFVKEIIEADKSSKFEKLCHSLPEGSKQENKIRNVLVLRELGVPQRLLFPLLISDHQPVCGKENFEESLKKVVEMGFDPTTSKFVKALRVVYRFRDKTIEAKVNVCKSLGFSVGDVWAMFKKCPSFLNFSENKIVQTWETLKKCGLLEDDVLSVLKKFPQCINASEQKIMNSIETFLGLGFSRDEVAMIAKRFPQCLILSAETVKKKTEFLVKKMNWPLKAVVSTPAVLGYSLEKRTIPRCNVIKALMSKGSLGSELPGMSSVLVCTNEEFLCRYVKNHDDKKIVPELMAIFTGDRVS

SEQ ID NO: 73176 - protein, 1116 aa, Arabidopsis thaliana
  peptide (1)..(1116): Ceres Seq. ID no. 4959489
MTYLWIVVSFALNLLWILVRYPDDVHDRKWVPFSEDELMTVNNTVDTDFDNPYDPPKAVISTAAIPTNASSSLILTWLTSNPEDQIYIYIHFLELQVLRGNETRIFDILMNGIITSPAYSPTDSVVDTVYNKEPLRCNASVCSLELRKTLGSTLPPLINAIEIFTVLEFPETATYEDDFSAIENIRAAYALSNGSGDPCVPKPSHYLKCSNFTDTSVVQLRIISLNLSSMRLSGVISPSIQTLTKLQVLDLSNNNLTGGVPGFLSNMVSLLSIDLSNNSLSGPIPQALLDRRKEGLDLKFHGNTKLYEFISHRKKNFPLVAVVASASAIAIVLVVLGVLFICLRRKPPSREAPHSSIETVKRRFTYSEVMAMTNNFKKIIGEGGFGIIYHGHLNDGQQVAVKVLSESSSQGYKQFKAEVELLMRVHHVNLVNLAGYCDDSNHLALIYEFMENRDLKEHLSGKEGSSFLDWPCRLKIAAEAALGLEYLHTGCKPPMIHRDVKSTNILLNEDFQAKLGDFGLSRSFPIGGETHVSTVVVGTHGFLDPEYYQTQRLSEKSDVYSFGIVLLEIITNKLVIDQTRERPHIAEWVRYMLSIGDIESVMDPNLKGKYDSSSAWKVLELAMLCSKLSLAERPNMAQIVHELNEYLLYENSRREISQDVRSKNSSEVSTNTEMAPMALNLLEKASPFSNSFSYANATDASLRAGRKGLSFSVSYLVDSLGLPKKVAESISKKVSFEDKGNPDSVLSLLRSHGFTDSQISSIITDYPQLLVADAEKSIGPKLQFLQSRGASRSELTHIVSTVPEILGKRGDKTISIYYDFVKEIIEADKSSKFEKLCHSLPEGSKQENKIRNVLVLRELGVPQRLLFPLLISDHQPVCGKENFEESLKKVVEMGFDPTTSKFVKALRVVYRFRDKTIEAKVNVCKSLGFSVGDVWAMFKKCPSFLNFSENKIVQTWETLKKCGLLEDDVLSVLKKFPQCINASEQKIMNSIETFLGLGFSRDEVAMIAKRFPQCLILSAETVKKKTEFLVKKMNWPLKAVVSTPAVLGYSLEKRTIPRCNVIKALMSKGSLGSELPGMSSVLVCTNEEFLCRYVKNHDDKKIVPELMAIFTGDRVS

SEQ ID NO: 73177 - protein, 1078 aa, Arabidopsis thaliana
  peptide (1)..(1078): Ceres Seq. ID no. 4959490
MTVNNTVDTDFDNPYDPPKAVISTAAIPTNASSSLILTWLTSNPEDQIYIYIHFLELQVLRGNETRIFDILMNGIITSPAYSPTDSVVDTVYNKEPLRCNASVCSLELRKTLGSTLPPLINAIEIFTVLEFPETATYEDDFSAIENIRAAYALSNGSGDPCVPKPSHYLKCSNFTDTSVVQLRIISLNLSSMRLSGVISPSIQTLTKLQVLDLSNNNLTGGVPGFLSNMVSLLSIDLSNNSLSGPIPQALLDRRKEGLDLKFHGNTKLYEFISHRKKNFPLVAVVASASAIAIVLVVLGVLFICLRRKPPSREAPHSSIETVKRRFTYSEVMAMTNNFKKIIGEGGFGIIYHGHLNDGQQVAVKVLSESSSQGYKQFKAEVELLMRVHHVNLVNLAGYCDDSNHLALIYEFMENRDLKEHLSGKEGSSFLDWPCRLKIAAEAALGLEYLHTGCKPPMIHRDVKSTNILLNEDFQAKLGDFGLSRSFPIGGETHVSTVVVGTHGFLDPEYYQTQRLSEKSDVYSFGIVLLEIITNKLVIDQTRERPHIAEWVRYMLSIGDIESVMDPNLKGKYDSSSAWKVLELAMLCSKLSLAERPNMAQIVHELNEYLLYENSRREISQDVRSKNSSEVSTNTEMAPMALNLLEKASPFSNSFSYANATDASLRAGRKGLSFSVSYLVDSLGLPKKVAESISKKVSFEDKGNPDSVLSLLRSHGFTDSQISSIITDYPQLLVADAEKSIGPKLQFLQSRGASRSELTHIVSTVPEILGKRGDKTISIYYDFVKEIIEADKSSKFEKLCHSLPEGSKQENKIRNVLVLRELGVPQRLLFPLLISDHQPVCGKENFEESLKKVVEMGFDPTTSKFVKALRVVYRFRDKTIEAKVNVCKSLGFSVGDVWAMFKKCPSFLNFSENKIVQTWETLKKCGLLEDDVLSVLKKFPQCINASEQKIMNSIETFLGLGFSRDEVAMIAKRFPQCLILSAETVKKKTEFLVKKMNWPLKAVVSTPAVLGYSLEKRTIPRCNVIKALMSKGSLGSELPGMSSVLVCTNEEFLCRYVKNHDDKKIVPELMAIFTGDRVS

SEQ ID NO: 73178 - DNA, 614 bp, Arabidopsis thaliana
  misc_feature (1)..(614): Ceres Seq. ID no. 4959549
  misc_feature (1)..(614): Ortholog of  Ceres SEQ ID NO 15178860 as cited in SEQ ID NO 0
aaatcagacaaaagcctcgcatctctctctcttgggatctgaatcttcaaattgaaaacaaaaagatcacaagagaaaaaaacaaaaaaaaatgcctcatggaactcttgaagttgttcttgtcagcgccaaaggtctcgaggacgcagattttctgaatcagaagagcaacgttgcagaaggaatggggacaactccggaatggaatgagacatttatcttcactgtctctgaaggaactacagagttaaaagcgaaaatcttcgacaaagatgtcggtacagaggatgatgcggttggtgaagcaactattccgttggagccggttttcgtggaaggaagtattccaccaactgcatacaatgtggtgaaagatgaagagtacaaaggagagatttgggtggctctctccttcaagccctcggaaaaccgaagcaggggtatggacgaggagtcctatgggggctggaaaaactctgaagcatcatactaagagaagaaaccattgtgtgtcactgtttgatttgagtcttgggaacaaaatgttgagttttcatttgaaagcgtattttttgttcagattgtttttaatgatttcataaactcgtgagatt

SEQ ID NO: 73179 - protein, 133 aa, Arabidopsis thaliana; identical to SEQ ID NO: 29919
  peptide (1)..(133): Ceres Seq. ID no. 4959550

SEQ ID NO: 73180 - protein, 102 aa, Arabidopsis thaliana; identical to SEQ ID NO: 29920
  peptide (1)..(102): Ceres Seq. ID no. 4959551

SEQ ID NO: 73181 - protein, 75 aa, Arabidopsis thaliana
  peptide (1)..(75): Ceres Seq. ID no. 4959552
MKSTKERFGWLSPSSPRKTEAGVWTRSPMGAGKTLKHHTKRRNHCVSLFDLSLGNKMLSFHLKAYFLFRLFLMIS

SEQ ID NO: 73182 - DNA, 705 bp, Arabidopsis thaliana
  misc_feature (1)..(705): Ceres Seq. ID no. 4959614
  misc_feature (1)..(705): Ortholog of  Ceres SEQ ID NO 15177455 as cited in SEQ ID NO 0
atgcaggcggaggagataatatgccgtgtttcagacgaagagatcatcgagaattacctgaggccaaagataaacggtgaaacatcttcaatcccgagatatgttgtggaattggcagaggagctgtacactgtagagccttggctgcttcctcgacaaacagctccaattctcaaccctggcgagtggttctactttgggaaacgcaatcgaaagtatagtaacttggaaggtgttcattgcgagggatcgtggatactcgaagacggttgcatcgcagtcctgtccaaggagacgggtgaggaaattggtggaacgacgagatttaggtattactataggaacaagggggataaagagagtcgtctgaagatgagcaattggtttatgagagagtatcgtctctattacaaatccaggagagtcttcaatggacgtcaggtgatggagccacttcactgctacatagtgaacaaatacattcatgatgatggcatttttgatatctgcaatatgggaaacaactatttcggcaatcgctatcgcgaaagcaactcccaaaatactgttgtggatgcttcggttgacattctcctccaacacactctacattttgcggacgttgcatttgcctcgcatttgatattgacacacctatacatacattcattgattcaatcatataatatatcaattcatacttga

SEQ ID NO: 73183 - protein, 234 aa, Arabidopsis thaliana
  peptide (1)..(234): Ceres Seq. ID no. 4959615
MQAEEIICRVSDEEIIENYLRPKINGETSSIPRYVVELAEELYTVEPWLLPRQTAPILNPGEWFYFGKRNRKYSNLEGVHCEGSWILEDGCIAVLSKETGEEIGGTTRFRYYYRNKGDKESRLKMSNWFMREYRLYYKSRRVFNGRQVMEPLHCYIVNKYIHDDGIFDICNMGNNYFGNRYRESNSQNTVVDASVDILLQHTLHFADVAFASHLILTHLYIHSLIQSYNISIHT

SEQ ID NO: 73184 - DNA, 1016 bp, Arabidopsis thaliana
  misc_feature (1)..(1016): Ceres Seq. ID no. 4960102
  misc_feature (1)..(1016): Ortholog of  Ceres SEQ ID NO 14302008 as cited in SEQ ID NO 56021
aaagtctcaacctttcttctctaatggagatctgcacttacttcaaatcacaacccacttggctcctcattctcttcgttctggggtcaatctcaatcttcaaattcatcttcaccctcctcagatctttctacatctacttcctccgaccatccaaaaacctccgccgatacggttcatgggcaatcatcaccggaccaacagacggaatcggtaaagctttcgcctttcagttagcccagaaaggtcttaaccttatactcgttgctcgtaacccagacaagctcaaagatgtctctgattccatcagatctaagtattttcatgaggttgatgaagagttgatcaataacttgattaagatcaatgttgaaggaactactaaagttactcaagctgtgttgcctaatatgcttaagaggaagaaaggtgctattattaatatgggttctggtgctgctgctcttattccttcttatcctttttactctgtttatgctggtgctaaaacgtacgtggatcagttcacaaagtgtctacatgttgagtataagaagagtgggattgatgttcaatgccaggttcccttgtatgttgcaacaaagatgacaaaaataagaagagcatccttcttagttgcatcaccagagggttacgcaaaggcagcactgcgttttgtaggctatgaagcacaatgcacaccgtactggcctcacgctctcatgggtgcagttgtctctgcattgcccgaaagcgtttttgaatcatttaacatcaagagatgcctccagatccggaagaagggtctccaaaaagactccatgaagaaagaatgaatcttccaggtttaagttactaccaagaatttccttcttctgaagttgttggtttcttgaaaagcttctgttctgaatcttttgtaagacttgtactctttagttttctaagttttttatattttaagattaaaaaccctaacgtacacgaataatttacttcctctgtttctatttatt

SEQ ID NO: 73185 - protein, 277 aa, Arabidopsis thaliana; identical to SEQ ID NO: 27288
  peptide (1)..(277): Ceres Seq. ID no. 4960103

SEQ ID NO: 73186 - protein, 270 aa, Arabidopsis thaliana; identical to SEQ ID NO: 27289
  peptide (1)..(270): Ceres Seq. ID no. 4960104

SEQ ID NO: 73187 - protein, 141 aa, Arabidopsis thaliana; identical to SEQ ID NO: 27290
  peptide (1)..(141): Ceres Seq. ID no. 4960105

SEQ ID NO: 73188 - DNA, 1005 bp, Arabidopsis thaliana
  misc_feature (1)..(1005): Ceres Seq. ID no. 4960149
  misc_feature (1)..(1005): Ortholog of  Ceres SEQ ID NO 15180785 as cited in SEQ ID NO 0
atgtttgtttccaatatgattcctctaacctttgtaacagtctgtgtatgtagagtcttgaagccgaataaagttgctctcaacagtatgattctttcagctatgaggacttgctcaatctctgggttccatactcatcttccgaagtcaagcggttcagtttcttcgagaaagaggttttcttctactgctttatcactcatcactcaaaccatttcaccatttgctcatccccgttcatcagtaattgtgtcaagccttctctccccatctgatatccctcagaaatctgaagaatggtttgctttaaggaaagacaagttaaccacaagtacattcagtacagcgctggggttttggaaaggaaaccggcgtgccgagctctggcatgaaaaggtttatgattcagatgcacgagttgttgaggagtctgcacggtttgctatgaactggggtgtacaaatggaatcatctgcgatagaaaggtacaaaagaataatgggttgtgaggttggaacaatgggatttgctattcactccaatgaggaatttcactggcttggcgcttcaccggatggaatcctcgattgctttggtattctagaagtgaaatgtccatataacaaagggaaaaccgaaactgtattaccctggaaaaaagtgccctactattacatgcctcagctgcagggtcaaatggagataatggaccgggaatgggtcaacttatactgctggacacgaaatggaagcacggttttccgtgtgatgagagaccgaagctattggagaatcatacatgatgtattaagggagttctggtgggagagtgtgattcctgcaagggaggctttgttgttagggaaagaggatgaggaggtgaaaaagtatgagccaacatctacgcataaacgaaccaagcttgccatagctaaaagcctaaatttggctgcggaatcaaaactagtatgcagagaaattgctgatcatgtcgagttcttttag

SEQ ID NO: 73189 - protein, 334 aa, Arabidopsis thaliana
  peptide (1)..(334): Ceres Seq. ID no. 4960150
MFVSNMIPLTFVTVCVCRVLKPNKVALNSMILSAMRTCSISGFHTHLPKSSGSVSSRKRFSSTALSLITQTISPFAHPRSSVIVSSLLSPSDIPQKSEEWFALRKDKLTTSTFSTALGFWKGNRRAELWHEKVYDSDARVVEESARFAMNWGVQMESSAIERYKRIMGCEVGTMGFAIHSNEEFHWLGASPDGILDCFGILEVKCPYNKGKTETVLPWKKVPYYYMPQLQGQMEIMDREWVNLYCWTRNGSTVFRVMRDRSYWRIIHDVLREFWWESVIPAREALLLGKEDEEVKKYEPTSTHKRTKLAIAKSLNLAAESKLVCREIADHVEFF

SEQ ID NO: 73190 - protein, 329 aa, Arabidopsis thaliana
  peptide (1)..(329): Ceres Seq. ID no. 4960151
MIPLTFVTVCVCRVLKPNKVALNSMILSAMRTCSISGFHTHLPKSSGSVSSRKRFSSTALSLITQTISPFAHPRSSVIVSSLLSPSDIPQKSEEWFALRKDKLTTSTFSTALGFWKGNRRAELWHEKVYDSDARVVEESARFAMNWGVQMESSAIERYKRIMGCEVGTMGFAIHSNEEFHWLGASPDGILDCFGILEVKCPYNKGKTETVLPWKKVPYYYMPQLQGQMEIMDREWVNLYCWTRNGSTVFRVMRDRSYWRIIHDVLREFWWESVIPAREALLLGKEDEEVKKYEPTSTHKRTKLAIAKSLNLAAESKLVCREIADHVEFF

SEQ ID NO: 73191 - protein, 305 aa, Arabidopsis thaliana
  peptide (1)..(305): Ceres Seq. ID no. 4960152
MILSAMRTCSISGFHTHLPKSSGSVSSRKRFSSTALSLITQTISPFAHPRSSVIVSSLLSPSDIPQKSEEWFALRKDKLTTSTFSTALGFWKGNRRAELWHEKVYDSDARVVEESARFAMNWGVQMESSAIERYKRIMGCEVGTMGFAIHSNEEFHWLGASPDGILDCFGILEVKCPYNKGKTETVLPWKKVPYYYMPQLQGQMEIMDREWVNLYCWTRNGSTVFRVMRDRSYWRIIHDVLREFWWESVIPAREALLLGKEDEEVKKYEPTSTHKRTKLAIAKSLNLAAESKLVCREIADHVEFF

SEQ ID NO: 73192 - DNA, 751 bp, Arabidopsis thaliana
  misc_feature (1)..(751): Ceres Seq. ID no. 4960291
  misc_feature (1)..(751): Ortholog of  Ceres SEQ ID NO 15178852 as cited in SEQ ID NO 0
aaatttctcaaaatcgcaaaatctttgcctctttcttctctaatcgaactaaatcttaaaactttgctgattgattgattttcgattccgggagaagaaaaatggtatctgggttgattaatgagaaccctatcatttacccaaagaaagagaggcgtcttcgtactgatacaagcattactgatgagcttacaccagaaccaattgatcaacttgagatttttgatcatataagagatatcaaagatccagagcatcctaatactctggaagatctcagagtagttacagaagactcagttgaagtggatgatgagaacagttatgttagggttacgttcactccaactgtcgaacattgtagcatggcaaccgttatcggtctttgtgtccgtgtgaaacttctacgaagccttccttctcgatacaagattgatataagggtagcacctggttctcatgcaacagaagatgcattgaataaacaactaaacgataaagaacgtgtggcggctgcactagagaatccaaacctcgtggagatggttgatgaatgcctgccatcagaagagtgaattgcttttattttcttgtgagcaagtaatttacacaagcctggtggtctcagtttacactatcaatacatgtctctgttttatttgcaaagattttgatccatcacatcgactaggacttgcattgtaatacttactctgatttcaagtttgttctcaatcatttcaataaagtc

SEQ ID NO: 73193 - protein, 157 aa, Arabidopsis thaliana; identical to SEQ ID NO: 35345
  peptide (1)..(157): Ceres Seq. ID no. 4960292

SEQ ID NO: 73194 - DNA, 687 bp, Arabidopsis thaliana
  misc_feature (1)..(687): Ceres Seq. ID no. 4960373
  misc_feature (1)..(687): Ortholog of  Ceres SEQ ID NO 14312266 as cited in SEQ ID NO 59225
  misc_feature (1)..(687): Ortholog of  Ceres SEQ ID NO 13597620 as cited in SEQ ID NO 65383
atggggtcacttttgcagggttttactaaatcactcgccatgactttcctctccgagattggtgacaaaacgttcttcgctgctgctattttggcgatgcggtatcctaggaggcttgtattagctggttgtttatcagctttgattgtcatgactatattatctgctacacttggttgggctgctccaaatctgatctctcggaaatggactcatcatataacaacattcttgttctttggctttgggttatggtctttgtgggatggttttaaagaaggaggaggttctgaagaattggcagaagttgaagcagaactggattctgatttgaagaagactaatgatcaatcgaaaaacagtaagattgaagatgaacagaaaaagcagaaaagaccattccttactgcattcttctctcccatttttctcaaggcgttttcgattaacttctttggtgaatggggtgacaagagtcagcttgcgaccattggtttggctgcagatgaaaatccactcggcgtggtccttggcggaattgtggcacaaacattgtgtaccacagctgctgtgcttggtggcaagagcttagcatctcaaatatccgaacgaattgtggctctttccggtggaatgcttttcattatcttcggcattcagtcgcttcttactccggttgatgcttga

SEQ ID NO: 73195 - protein, 228 aa, Arabidopsis thaliana; identical to SEQ ID NO: 38159
  peptide (1)..(228): Ceres Seq. ID no. 4960374

SEQ ID NO: 73196 - protein, 215 aa, Arabidopsis thaliana; identical to SEQ ID NO: 38160
  peptide (1)..(215): Ceres Seq. ID no. 4960375

SEQ ID NO: 73197 - protein, 196 aa, Arabidopsis thaliana
  peptide (1)..(196): Ceres Seq. ID no. 4960376
MRYPRRLVLAGCLSALIVMTILSATLGWAAPNLISRKWTHHITTFLFFGFGLWSLWDGFKEGGGSEELAEVEAELDSDLKKTNDQSKNSKIEDEQKKQKRPFLTAFFSPIFLKAFSINFFGEWGDKSQLATIGLAADENPLGVVLGGIVAQTLCTTAAVLGGKSLASQISERIVALSGGMLFIIFGIQSLLTPVDA

SEQ ID NO: 73198 - DNA, 1449 bp, Arabidopsis thaliana
  misc_feature (1)..(1449): Ceres Seq. ID no. 4960485
  misc_feature (1)..(1449): Ortholog of  Ceres SEQ ID NO 13600098 as cited in SEQ ID NO 0
atgtctctcaaggcgttagactacgagtccttgaatgaaaacgtgaagaattgtcagtatgcagtcagaggtgaactttatcttcgtgcttctgagcttcagaaagaaggcaaaaagattattttcacaaatgttggaaaccctcatgctttaggacagaaacctctgacttttcctcgtcaggtggtttctttatgccaagcaccatttctgttagatgatccaaatgttggtatgatattcccagcagatgctattgcaagagctaagcattatctttccttgacttctggtggtcttggtgcttacagtgactcaagaggtcttccgggagttcggaaagaagtcgctgagttcattgaacggcgtgatggatatccaagcgatccagaactcatatttctaactgatggagcgagcaaaggtgtgatgcaaatcttgaattgtgtcatacgcggtcagaaagacggaatgattctggttccagttccacagtatccactctactcggctactatatctctgttaggtggtactcttgttccttactatcttgaagagtctgaaaactggggacttgatgttaacaaccttcgccaatctgttgctcaagctcgctctcaaggaataacagtaagggcaatggtgattattaaccccggaaacccaactggccagtgtcttagcgaagctaacataagagagatactacggttctgttgtgatgagagattagttcttctcggagacgaagtgtatcagcaaaatatataccaagatgaacgtccctttatcagttccaagaaggttttgatggatatgggagcaccgatcagcaaggaagttcagctcatatctttccacaccgtttccaaaggatactggggcgaatgtgggcaacggggaggttactttgagatgacaaatatccctcccaggaccgttgaggagatatacaaggtggcctctatagctctcagccccaacgtctctgcgcagatatttatgggtttaatggttagcccaccaaagcctggagacatttcatatgaccaattcgttcgtgagagcaagggaatactagaatcactgagaagaagagcaaggatgatgactgatggattcaacagctgcaaaaacgtcgtctgtaatttcacagaaggtgctatgtattcattccctcaaataaagttgccgtcgaaagcaatccaagcagcaaaacaagccggaaaagtccctgacgttttctactgccttaagctcttagaagccacaggaatctccacagttccaggctctggatttggacaaaaagaaggggtgtttcatttaaggacaacaattctgccagcagaagaagaaatgccagagattatggacagtttcaaaaagttcaatgatgagtttatgtctcagtacgctgataactttggttactccagaatgtga

SEQ ID NO: 73199 - protein, 482 aa, Arabidopsis thaliana
  peptide (1)..(482): Ceres Seq. ID no. 4960486
MSLKALDYESLNENVKNCQYAVRGELYLRASELQKEGKKIIFTNVGNPHALGQKPLTFPRQVVSLCQAPFLLDDPNVGMIFPADAIARAKHYLSLTSGGLGAYSDSRGLPGVRKEVAEFIERRDGYPSDPELIFLTDGASKGVMQILNCVIRGQKDGMILVPVPQYPLYSATISLLGGTLVPYYLEESENWGLDVNNLRQSVAQARSQGITVRAMVIINPGNPTGQCLSEANIREILRFCCDERLVLLGDEVYQQNIYQDERPFISSKKVLMDMGAPISKEVQLISFHTVSKGYWGECGQRGGYFEMTNIPPRTVEEIYKVASIALSPNVSAQIFMGLMVSPPKPGDISYDQFVRESKGILESLRRRARMMTDGFNSCKNVVCNFTEGAMYSFPQIKLPSKAIQAAKQAGKVPDVFYCLKLLEATGISTVPGSGFGQKEGVFHLRTTILPAEEEMPEIMDSFKKFNDEFMSQYADNFGYSRM

SEQ ID NO: 73200 - protein, 404 aa, Arabidopsis thaliana
  peptide (1)..(404): Ceres Seq. ID no. 4960487
MIFPADAIARAKHYLSLTSGGLGAYSDSRGLPGVRKEVAEFIERRDGYPSDPELIFLTDGASKGVMQILNCVIRGQKDGMILVPVPQYPLYSATISLLGGTLVPYYLEESENWGLDVNNLRQSVAQARSQGITVRAMVIINPGNPTGQCLSEANIREILRFCCDERLVLLGDEVYQQNIYQDERPFISSKKVLMDMGAPISKEVQLISFHTVSKGYWGECGQRGGYFEMTNIPPRTVEEIYKVASIALSPNVSAQIFMGLMVSPPKPGDISYDQFVRESKGILESLRRRARMMTDGFNSCKNVVCNFTEGAMYSFPQIKLPSKAIQAAKQAGKVPDVFYCLKLLEATGISTVPGSGFGQKEGVFHLRTTILPAEEEMPEIMDSFKKFNDEFMSQYADNFGYSRM

SEQ ID NO: 73201 - protein, 339 aa, Arabidopsis thaliana
  peptide (1)..(339): Ceres Seq. ID no. 4960488
MQILNCVIRGQKDGMILVPVPQYPLYSATISLLGGTLVPYYLEESENWGLDVNNLRQSVAQARSQGITVRAMVIINPGNPTGQCLSEANIREILRFCCDERLVLLGDEVYQQNIYQDERPFISSKKVLMDMGAPISKEVQLISFHTVSKGYWGECGQRGGYFEMTNIPPRTVEEIYKVASIALSPNVSAQIFMGLMVSPPKPGDISYDQFVRESKGILESLRRRARMMTDGFNSCKNVVCNFTEGAMYSFPQIKLPSKAIQAAKQAGKVPDVFYCLKLLEATGISTVPGSGFGQKEGVFHLRTTILPAEEEMPEIMDSFKKFNDEFMSQYADNFGYSRM

SEQ ID NO: 73202 - DNA, 893 bp, Arabidopsis thaliana
  misc_feature (1)..(893): Ceres Seq. ID no. 4960512
  misc_feature (1)..(893): Ortholog of  Ceres SEQ ID NO 13661969 as cited in SEQ ID NO 61215
  misc_feature (1)..(893): Ortholog of  Ceres SEQ ID NO 12614809 as cited in SEQ ID NO 68808
  misc_feature (1)..(893): Ortholog of  Ceres SEQ ID NO 12634366 as cited in SEQ ID NO 0
  misc_feature (1)..(893): Ortholog of  Ceres SEQ ID NO 14309113 as cited in SEQ ID NO 0
  misc_feature (1)..(893): Ortholog of  Ceres SEQ ID NO 15175257 as cited in SEQ ID NO 0
gagtatttatcacattaattattatcatacaataacagcgtttcaccattctcttttcaatattttcagttactttctataagaaccattcacttattcttttttctctctatctgtgattatggcttcctctatttccgctgctgaagtgaaagttgtcccagaagagtataatttcttgcaaaaacatgtcgccttcttcgacagaaacaaagatggtatcgtttatccctcggagacatttcaaggatttagagcaatcggatgtggatatttgttgtcaacattcgctgctgttttcatcaacatcagtctcagcagcaaaactcgtccggggaaaggattctcattctcgtttccgatagaggttaagaatgtccgcctagggatacatagcagcgattcaggcgtttacgacaaggatggacggtttgtggcttcaaagttcgaggagatatttgcgaagcatgctcacacacatcgcgatgctttgaccagcaaggaacttaaagaacttctcaaggcaaacagagaacctaatgattgtaaaggagggattttagcgtttggggagtggaaggtattgtataatttgtgcaaagacaagagtggtttgctacacaaggagatagtgagagccgtctatgatggttctcttttcgaacaactcgagaaacaaagatcttctaaaactccttagaatcatcaaaaaaaaaatcctaatgtaaattcattgttatgctcgtgaatctgttttagttaaatctttagtagttacagtaatctatggtgtgaagattgggatgtgtttgattttcaagaattatagtttatttgtgtaagtacttgtgtgattgtatcttattcaaataaaagattatatgatttttttt

SEQ ID NO: 73203 - protein, 192 aa, Arabidopsis thaliana; identical to SEQ ID NO: 28252
  peptide (1)..(192): Ceres Seq. ID no. 4960513

SEQ ID NO: 73204 - DNA, 619 bp, Arabidopsis thaliana
  misc_feature (1)..(619): Ceres Seq. ID no. 4960596
  misc_feature (1)..(619): Ortholog of  Ceres SEQ ID NO 13597375 as cited in SEQ ID NO 63986
tgtttttgataacaaagtggagtggggaatcgacttggcctcagagcatgaaagatacttgacagaggttgagtttgatcaaaagccaataattgtgtataactacccgaaaggaatcaaagctttttacatgagacttaacgatgatgagaagacagttgctgccatggatgtccttgttccaaagattaattaggttggagaactcattggtggaagccaaagggaagaacgatatgatgttatcaaacagaggatcgaggagatgggtctaccaatggagccatatgagtggtacctagacttgcgtcgttatggaacagtgaagcattgtggatttggacttggcttcgaacgtatgattcagttcgctacaggaattgataacatcagagatgttattcctttccctcgctatcctggaaaagctgatctctgattcctctctagacacacaattctggtctggtctcgacatggttttagtttccttttaaattggttaaatgaaaattgtattgatttttatctatactctgtttctcaagctgtgagagctaatatgaagggaaacaaagttatatgaagggaaacaaagttatacttttgggttagcttc

SEQ ID NO: 73205 - protein, 64 aa, Arabidopsis thaliana; identical to SEQ ID NO: 40450
  peptide (1)..(64): Ceres Seq. ID no. 4960597

SEQ ID NO: 73206 - protein, 57 aa, Arabidopsis thaliana
  peptide (1)..(57): Ceres Seq. ID no. 4960598
MGLPMEPYEWYLDLRRYGTVKHCGFGLGFERMIQFATGIDNIRDVIPFPRYPGKADL

SEQ ID NO: 73207 - protein, 53 aa, Arabidopsis thaliana; identical to SEQ ID NO: 40452
  peptide (1)..(53): Ceres Seq. ID no. 4960599

SEQ ID NO: 73208 - DNA, 3357 bp, Arabidopsis thaliana
  misc_feature (1)..(3357): Ceres Seq. ID no. 4960709
  misc_feature (1)..(3357): Ortholog of  Ceres SEQ ID NO 12613725 as cited in SEQ ID NO 68196
atgacgactacttcagaaatttctcttcaagaagaatacgtcaccgacgccgttgaccaccgtggacttgccgccagaagatccaataccggtagatggagagccgccttgttcataatcggtgtggaggtggctgagaggttcgcttactatggaatcggatcaaacttaataagctacttgactggaccacttggtgaatccacggctgtagccgccgctaatgtcaacgcgtggtcaggaattgccactcttcttcctgttcttggagcttttgtcgccgacgcatttctcggtcgttaccgaacaattatcatctcttctcttatctacgtcctgggattggcgtttctgactttatctgcgtttctgattcccaatactactgaagtgacatcttcaacttcttcttttctcaatgtactcttcttcttctctctgtatttggtggctattggacaaagtggacacaagccttgtgttcaagcttttggtgctgaccagtttgatgaaaaagactctcaagagaaatctgacagaagctccttcttcaactggtggtaccttagtctgtctgcaggaatctgctttgcgattttagttgttgtatacatccaggaagagttcagctgggcttttgggtttggaatcccatgtgtgttcatggtgatctctcttgttcttttcgtgtcagggagaaggatttataggtacagtaaaagaagacatgaagaggaaataaacccttttacgaggataggtagagtcttctttgtagcactcaagaaccaaagattgagttcatcagacttgtgcaaagttgagctagaggcaaatacatccccagagaaacagagttttttcaacaaagcattgcttgtacccaatgattcttctcaaggagaaaacgcatccaagtctagtgatgttgaagatgccacagctcttatcaggctaattccagtatggtttacgactctggcttacgcgataccctacgcgcaatacatgacatttttcactaagcaaggcgtcacaatggatagaacaattcttcctggtgttaagatcccacctgcttctcttcaggtctttatcggcatatcaatagtcctctttgtccccatctacgaccgagttttcgtccccatcgccaggttaataaccaaagaaccttgtggcatcacaaccctcaaaagaattggaactggaattgtactgtcgactatcactatggtaattgcagctctggttgagttcaagcggctcgagactgcgaaagaacacgggcttatagaccaaccggaagcaactcttccaatgtcgatatggtggttaatccctcagtacttgttgctgggattggctgacgtatatactttagtgggaatgcaagagttcttctacagccaagtccctactgagctgagaagcatcggtctcgcgctttacttaagcgcgttgggcgtgggaagcttattaagcagcttactcatctctctgatagacttggccactggaggagacgcaggaaacagctggtttaacagtaatctgaacagagctcatcttgattacttctattggttactagcgattgttagcgccgttgggttctttacgttcttgttcatttccaagtcgtacatctatcgtcgagtggatcgaaaaatgacgacgacttccaaaacttctcttcaagaagaatacgtcatcgacgccgttgaccaccgtggcttttccgccagaaggtctattaccggtagatggagagctgcatggttcattatcggtgtggaggtggcggagaggttcgcgaactacgggatcggatcaaacctgataagctacttgactggaccacttggtcaatctacggcggtcgccgccgctaatgtcaacgcttggtctggaatttccactattcttcctcttcttggagcttttgtcgccgacgcttttcttggtcgctacataacaattatcatcgcttcttttatctatgtcctgggactggcgtttctgactttatctgcgtttctgattcccaacaatactgaagtgacctcgtcaccttcttcttttctcaatgcactcttcttcttctctctttatttggtggctattggacaaagtggacacaagccttgtgttcaggcttttggtgcagatcagtttgatgagaagaacccgcaagagaatagtgatagaagctctttcttcaactggtggtaccttagtatgtgtgcaggaatcggcctagcgattttagtggttgtgtacatccaagaaaatgtaagctgggcacttgggtttggaatcccatgtgtgttcatggtgatctctcttgttcttttcgttttagggagaaagagttataggtttagtaaaacaagacaagaagaggaaacaaacccgtttacgagaataggtagagtcttctttgtagcattcaagaaccagagattgaattcatcagacttgtgcaaagttgagctaatagaggcaaatcgatctcaagaatctccagaggagctgagttttctcaacaaagcattgcttgtcccaaatgattctgatgaaggagaagtggcatgcaagtctagagatgtcgaagatgctacagctcttgtcaggcttattccagtatggcttacaactttggcttacgcgatacctttcgcgcagtacatgactttctttacaaagcaaggtgtcacaatggaaagaacaatatttccaggtgtagagatcccacctgcttctcttcaggttcttatcagcatatcaattgttctctttgtccccatctatgaccgtgttttggtcccaatcggaaggtcaataactaaagatccttgtggcatcacaactctcaaaagaattggaaccggaatggtactagcaactctcactatggtggtggctgctttggttgagtcaaagcggctcgagactgcaaaagaatacggacttatagaccaaccgaaaacaactcttccaatgtcgatatggtggttattccctcagtatatgttactgggattggctgacgtacacactttagtaggaatgcaagagttcttctacagccaagtccccactgagctgagaagcctcggtctcgcgatttacttaagtgcaatgggcgttggaagcttattaagcagcttactcatctatctgatcgatttggccactggaggagacgccggaaacagctggttcaacagtaatctgaacagagcccatctagattacttctattggttacttgcggttgttagtgccgttgggttctttacgttcttgttcatctccaagtcctatatatatcgccgggtggacgtagtgtag

SEQ ID NO: 73209 - protein, 1118 aa, Arabidopsis thaliana
  peptide (1)..(1118): Ceres Seq. ID no. 4960710
MTTTSEISLQEEYVTDAVDHRGLAARRSNTGRWRAALFIIGVEVAERFAYYGIGSNLISYLTGPLGESTAVAAANVNAWSGIATLLPVLGAFVADAFLGRYRTIIISSLIYVLGLAFLTLSAFLIPNTTEVTSSTSSFLNVLFFFSLYLVAIGQSGHKPCVQAFGADQFDEKDSQEKSDRSSFFNWWYLSLSAGICFAILVVVYIQEEFSWAFGFGIPCVFMVISLVLFVSGRRIYRYSKRRHEEEINPFTRIGRVFFVALKNQRLSSSDLCKVELEANTSPEKQSFFNKALLVPNDSSQGENASKSSDVEDATALIRLIPVWFTTLAYAIPYAQYMTFFTKQGVTMDRTILPGVKIPPASLQVFIGISIVLFVPIYDRVFVPIARLITKEPCGITTLKRIGTGIVLSTITMVIAALVEFKRLETAKEHGLIDQPEATLPMSIWWLIPQYLLLGLADVYTLVGMQEFFYSQVPTELRSIGLALYLSALGVGSLLSSLLISLIDLATGGDAGNSWFNSNLNRAHLDYFYWLLAIVSAVGFFTFLFISKSYIYRRVDRKMTTTSKTSLQEEYVIDAVDHRGFSARRSITGRWRAAWFIIGVEVAERFANYGIGSNLISYLTGPLGQSTAVAAANVNAWSGISTILPLLGAFVADAFLGRYITIIIASFIYVLGLAFLTLSAFLIPNNTEVTSSPSSFLNALFFFSLYLVAIGQSGHKPCVQAFGADQFDEKNPQENSDRSSFFNWWYLSMCAGIGLAILVVVYIQENVSWALGFGIPCVFMVISLVLFVLGRKSYRFSKTRQEEETNPFTRIGRVFFVAFKNQRLNSSDLCKVELIEANRSQESPEELSFLNKALLVPNDSDEGEVACKSRDVEDATALVRLIPVWLTTLAYAIPFAQYMTFFTKQGVTMERTIFPGVEIPPASLQVLISISIVLFVPIYDRVLVPIGRSITKDPCGITTLKRIGTGMVLATLTMVVAALVESKRLETAKEYGLIDQPKTTLPMSIWWLFPQYMLLGLADVHTLVGMQEFFYSQVPTELRSLGLAIYLSAMGVGSLLSSLLIYLIDLATGGDAGNSWFNSNLNRAHLDYFYWLLAVVSAVGFFTFLFISKSYIYRRVDVV

SEQ ID NO: 73210 - protein, 897 aa, Arabidopsis thaliana
  peptide (1)..(897): Ceres Seq. ID no. 4960711
MVISLVLFVSGRRIYRYSKRRHEEEINPFTRIGRVFFVALKNQRLSSSDLCKVELEANTSPEKQSFFNKALLVPNDSSQGENASKSSDVEDATALIRLIPVWFTTLAYAIPYAQYMTFFTKQGVTMDRTILPGVKIPPASLQVFIGISIVLFVPIYDRVFVPIARLITKEPCGITTLKRIGTGIVLSTITMVIAALVEFKRLETAKEHGLIDQPEATLPMSIWWLIPQYLLLGLADVYTLVGMQEFFYSQVPTELRSIGLALYLSALGVGSLLSSLLISLIDLATGGDAGNSWFNSNLNRAHLDYFYWLLAIVSAVGFFTFLFISKSYIYRRVDRKMTTTSKTSLQEEYVIDAVDHRGFSARRSITGRWRAAWFIIGVEVAERFANYGIGSNLISYLTGPLGQSTAVAAANVNAWSGISTILPLLGAFVADAFLGRYITIIIASFIYVLGLAFLTLSAFLIPNNTEVTSSPSSFLNALFFFSLYLVAIGQSGHKPCVQAFGADQFDEKNPQENSDRSSFFNWWYLSMCAGIGLAILVVVYIQENVSWALGFGIPCVFMVISLVLFVLGRKSYRFSKTRQEEETNPFTRIGRVFFVAFKNQRLNSSDLCKVELIEANRSQESPEELSFLNKALLVPNDSDEGEVACKSRDVEDATALVRLIPVWLTTLAYAIPFAQYMTFFTKQGVTMERTIFPGVEIPPASLQVLISISIVLFVPIYDRVLVPIGRSITKDPCGITTLKRIGTGMVLATLTMVVAALVESKRLETAKEYGLIDQPKTTLPMSIWWLFPQYMLLGLADVHTLVGMQEFFYSQVPTELRSLGLAIYLSAMGVGSLLSSLLIYLIDLATGGDAGNSWFNSNLNRAHLDYFYWLLAVVSAVGFFTFLFISKSYIYRRVDVV

SEQ ID NO: 73211 - protein, 782 aa, Arabidopsis thaliana
  peptide (1)..(782): Ceres Seq. ID no. 4960712
MTFFTKQGVTMDRTILPGVKIPPASLQVFIGISIVLFVPIYDRVFVPIARLITKEPCGITTLKRIGTGIVLSTITMVIAALVEFKRLETAKEHGLIDQPEATLPMSIWWLIPQYLLLGLADVYTLVGMQEFFYSQVPTELRSIGLALYLSALGVGSLLSSLLISLIDLATGGDAGNSWFNSNLNRAHLDYFYWLLAIVSAVGFFTFLFISKSYIYRRVDRKMTTTSKTSLQEEYVIDAVDHRGFSARRSITGRWRAAWFIIGVEVAERFANYGIGSNLISYLTGPLGQSTAVAAANVNAWSGISTILPLLGAFVADAFLGRYITIIIASFIYVLGLAFLTLSAFLIPNNTEVTSSPSSFLNALFFFSLYLVAIGQSGHKPCVQAFGADQFDEKNPQENSDRSSFFNWWYLSMCAGIGLAILVVVYIQENVSWALGFGIPCVFMVISLVLFVLGRKSYRFSKTRQEEETNPFTRIGRVFFVAFKNQRLNSSDLCKVELIEANRSQESPEELSFLNKALLVPNDSDEGEVACKSRDVEDATALVRLIPVWLTTLAYAIPFAQYMTFFTKQGVTMERTIFPGVEIPPASLQVLISISIVLFVPIYDRVLVPIGRSITKDPCGITTLKRIGTGMVLATLTMVVAALVESKRLETAKEYGLIDQPKTTLPMSIWWLFPQYMLLGLADVHTLVGMQEFFYSQVPTELRSLGLAIYLSAMGVGSLLSSLLIYLIDLATGGDAGNSWFNSNLNRAHLDYFYWLLAVVSAVGFFTFLFISKSYIYRRVDVV

SEQ ID NO: 73212 - DNA, 332 bp, Arabidopsis thaliana
  misc_feature (1)..(332): Ceres Seq. ID no. 4960749
  misc_feature (1)..(332): Ortholog of  Ceres SEQ ID NO 15180432 as cited in SEQ ID NO 0
atttcagaattaagatatggtcttctgtccaacttaattctcaaatggtgcgagggacaggttaccgagtacctcgtggcaactttcggtgattatttcacagatgtgaaaatgtatgtcgaagaaagatcatttagaagatttgtcgaagcatgtttggaagaaacagtcgttgtctatgttgaccatctcctaactcagaaaaactacatcaaggaagaaactattgaacggatgaggctagatgaagaggttctcatggatttctttagggagtatataagtgcatctaaagtggagagcagaatcagaataatgagcgatctgagaga

SEQ ID NO: 73213 - protein, 110 aa, Arabidopsis thaliana
  peptide (1)..(110): Ceres Seq. ID no. 4960750
ISELRYGLLSNLILKWCEGQVTEYLVATFGDYFTDVKMYVEERSFRRFVEACLEETVVVYVDHLLTQKNYIKEETIERMRLDEEVLMDFFREYISASKVESRIRIMSDLR

SEQ ID NO: 73214 - protein, 73 aa, Arabidopsis thaliana
  peptide (1)..(73): Ceres Seq. ID no. 4960751
MYVEERSFRRFVEACLEETVVVYVDHLLTQKNYIKEETIERMRLDEEVLMDFFREYISASKVESRIRIMSDLR

SEQ ID NO: 73215 - DNA, 1674 bp, Arabidopsis thaliana
  misc_feature (1)..(1674): Ceres Seq. ID no. 4960840
  misc_feature (1)..(1674): Ortholog of  Ceres SEQ ID NO 13600098 as cited in SEQ ID NO 0
aacatcaccacaaaagtccaagctttctctctcctcaacctcgtccccttgcttcttctcctcctgctctgtctcgtttcttctcttctacttcggagatgtctgcttctgattccacttcttctcttcccgttactcttgactccatcaatcccaaggttctgaaatgtgagtatgctgttcgaggagaaattgtcaacattgctcagaagttacaagaagacttgaagactaataaggatgcttatccctttgatgagataatctattgcaacattgggaatcctcaatctcttggtcagctgcctataaagttcttccgtgaggttctcgcattgtgtgaccacgcaagtcttttggatgagtctgaaacccatggtttgttcagtaccgattcaattgaccgagcatggaggattttggaccatattcccggaagagcaactggggcttacagtcatagccagggtatcaagggtttacgtgatgtaattgcagctggaatcgaagcacgtgatggtttccctgctgatccaaatgatattttcttgactgatggtgcaagtccagcggttcacatgatgatgcaacttctcttgagctcagagaaagatggtattctttccccgattcctcagtatccattgtactcggcttcaattgcccttcatggtggatctttggttccgtactatcttgatgaagcaacaggatggggactggaaatatctgaccttaagaagcaactagaggaagctaggtccaagggcatctctgtaagggccttggttgtcataaaccccggtaacccaactgggcaggttcttgcggaagaaaaccagcgtgacattgttaatttctgcaagcaagagggtttggttcttttagctgatgaagtctaccaagaaaatgtttacgtccctgacaaaaagttccattctttcaagaaagtggctcggtctttgggctatggagaaaaagatatctcgttagtctcgttccaatcagtctccaaaggatattatggagaatgtggaaaaagaggaggttacatggaggttactggattcacttctgatgtaagagaacagatatacaaaatggcttctgtgaatctttgttctaacatctctggtcaaattcttgctagccttgtcatgagcccacccaagaaagagatggaattctctcatccatggctaaacgtgcaaagactttggaagacgctctcaacagtttagaaggtgttacatgtaacagagccgaaggagcaatgtatctcttcccgcgaattaaccttcctcaaaaggctatcgaagctgctgaggctgaaaaaactgcaccagatgcgttctactgcaaacgccttctcaatgctactggtgtagttgtagtccctggttctggctttggacaggttcctggaacatggcactttagatgcacaatacttccacaagaagacaagattccagcgatagtgaatcgtctgacagagttccacaagagcttcatggacgagttccgcaactaaaaggacctgaccatgaagatgaacttaaagacccttttgaagaaaagtgtgatcagtttgagttattaaaaaaaagaaaacttgtgttttgaatttgatcaggcaattgtgatcagctaatttaattttagaatattttg

SEQ ID NO: 73216 - protein, 412 aa, Arabidopsis thaliana
  peptide (1)..(412): Ceres Seq. ID no. 4960841
HHHKSPSFLSPQPRPLASSPPALSRFFSSTSEMSASDSTSSLPVTLDSINPKVLKCEYAVRGEIVNIAQKLQEDLKTNKDAYPFDEIIYCNIGNPQSLGQLPIKFFREVLALCDHASLLDESETHGLFSTDSIDRAWRILDHIPGRATGAYSHSQGIKGLRDVIAAGIEARDGFPADPNDIFLTDGASPAVHMMMQLLLSSEKDGILSPIPQYPLYSASIALHGGSLVPYYLDEATGWGLEISDLKKQLEEARSKGISVRALVVINPGNPTGQVLAEENQRDIVNFCKQEGLVLLADEVYQENVYVPDKKFHSFKKVARSLGYGEKDISLVSFQSVSKGYYGECGKRGGYMEVTGFTSDVREQIYKMASVNLCSNISGQILASLVMSPPKKEMEFSHPWLNVQRLWKTLSTV

SEQ ID NO: 73217 - protein, 380 aa, Arabidopsis thaliana
  peptide (1)..(380): Ceres Seq. ID no. 4960842
MSASDSTSSLPVTLDSINPKVLKCEYAVRGEIVNIAQKLQEDLKTNKDAYPFDEIIYCNIGNPQSLGQLPIKFFREVLALCDHASLLDESETHGLFSTDSIDRAWRILDHIPGRATGAYSHSQGIKGLRDVIAAGIEARDGFPADPNDIFLTDGASPAVHMMMQLLLSSEKDGILSPIPQYPLYSASIALHGGSLVPYYLDEATGWGLEISDLKKQLEEARSKGISVRALVVINPGNPTGQVLAEENQRDIVNFCKQEGLVLLADEVYQENVYVPDKKFHSFKKVARSLGYGEKDISLVSFQSVSKGYYGECGKRGGYMEVTGFTSDVREQIYKMASVNLCSNISGQILASLVMSPPKKEMEFSHPWLNVQRLWKTLSTV

SEQ ID NO: 73218 - protein, 220 aa, Arabidopsis thaliana
  peptide (1)..(220): Ceres Seq. ID no. 4960843
MMMQLLLSSEKDGILSPIPQYPLYSASIALHGGSLVPYYLDEATGWGLEISDLKKQLEEARSKGISVRALVVINPGNPTGQVLAEENQRDIVNFCKQEGLVLLADEVYQENVYVPDKKFHSFKKVARSLGYGEKDISLVSFQSVSKGYYGECGKRGGYMEVTGFTSDVREQIYKMASVNLCSNISGQILASLVMSPPKKEMEFSHPWLNVQRLWKTLSTV

SEQ ID NO: 73219 - DNA, 2073 bp, Arabidopsis thaliana
  misc_feature (1)..(2073): Ceres Seq. ID no. 4961339
  misc_feature (1)..(2073): Ortholog of  Ceres SEQ ID NO 13584744 as cited in SEQ ID NO 69137
atggctcatgagcagcaacacctccaaatagtaattcttcaagctcttgtaacagaacctttggaggaatctcaatcccgttcccatttggaatcggcgggaaggattgctatctcaatagttggtacgaggttgtctgtaacagcaccacttccgggtcctgcaaaactgatcaacagggaagtggtgaacatatctcttccaaaatctgacttcttcagcccttacggagtagttcacatcaaaggtcctgtgacttcgttgggttgttctagtaatattagtcaaggacttcaaaaaacactaccagatttgaacatcacaggcaggggtagtccatattttctaacagatgagaaccgccttgtggcggttggttgtggtacgaaggcgttaatgaccgatatagaatcggagatcttaggttgtgaatcaagctgcaaagacacaaagagtaatgaagtaggtaactcgctttgtaacggttacaaatgttgccaagcgaggttacccgtagagcgtccgcaagcagtaggtgtcaacatagagagcaataacgatacaagaggagaagggtgcaaagctgcgttcttgacaagtatgaagtatttcccgtcaaatatcaccaaaccagaatggttccaggccgatggctacgctgtagtagaactaggatggtattttgatacttcagattctcgctttaggaaccctttgggttgcacaaacttgacccgttctagtggctcttacttcttaaccgacatttgcctttgccgttacggttacttttccagaatgagttatagaagctgttattgcggcagtggctacagaggaaacccatacatacgaggtggatgcatcgacattgatgaatgcgaagtacccaacaagtgtggagaagacacttgtgtgaacatggctggaaggtacagttgcgtgccaaagataaccaagcctgccaaactcgctcatgtgcttcgagggatttttgggttatacaaatttatcagaaagcgaaggcggatcatccgtagcatgaagttcttcaaacgtaatggaggcctattgttgaaacaacagttaacaacaaaggacggcagtgtcgagatgtcaaaaatattcagctcgagagagttggagaaagccactgataacttcagcatagatagagtgcttgggcaaggcggtcaaggcactgtgtacaaaagaatgcttgtagatgggagtattgttgcggttaaaagatccaaagttgtggatgaagacaaaatggaagagtttatcaatgagattgttcttctgtcacaaatcaatcaccgcaacattgtgaaactcttgggatgttgcttggagacagaagttccaatcttggtgtacgaatatattcccaatggagatctgttcaagcggcttcatgatgaatatgatgattacatgatgacttgggaagtgcgacttcgcatagccgtagagatagcaggagctctttcgtacatgcactcagctgcatcttttccaatattccatagagatatcaaaactaccaatatactgttggatgagaaatacagagcaaaaatatctgatttcggaacttcaagatcggtagcgactgatcaaactcacttaacaacattagttgcaggaacttttgggtacatggatccagagtacttcctgtcgagccaatacactcacaaaagcgatgtatatagtttcggtgttgtgttggtggagctcataacgggagaaaaaccaatgtcacgtgtccggtctgaagaaggcataggtttggcaacttatttcctcgaggcaatgaaagagaacagagctgttgacataattgatattaggatcaaagacgaaagcaagcaagtaatggcggtagcaaaactcgccagaagatgtcttaatcgaaaagggaataagcggccaaacatgagagaggtttcaataaagctagagaggatccgttcatcacccaaagatttagatgtccataccgaaaacgaagaagaagaagaagaggatcaacttatggaaatcaatagaatatatgattcttga

SEQ ID NO: 73220 - protein, 690 aa, Arabidopsis thaliana
  peptide (1)..(690): Ceres Seq. ID no. 4961340
MAHEQQHLQIVILQALVTEPLEESQSRSHLESAGRIAISIVGTRLSVTAPLPGPAKLINREVVNISLPKSDFFSPYGVVHIKGPVTSLGCSSNISQGLQKTLPDLNITGRGSPYFLTDENRLVAVGCGTKALMTDIESEILGCESSCKDTKSNEVGNSLCNGYKCCQARLPVERPQAVGVNIESNNDTRGEGCKAAFLTSMKYFPSNITKPEWFQADGYAVVELGWYFDTSDSRFRNPLGCTNLTRSSGSYFLTDICLCRYGYFSRMSYRSCYCGSGYRGNPYIRGGCIDIDECEVPNKCGEDTCVNMAGRYSCVPKITKPAKLAHVLRGIFGLYKFIRKRRRIIRSMKFFKRNGGLLLKQQLTTKDGSVEMSKIFSSRELEKATDNFSIDRVLGQGGQGTVYKRMLVDGSIVAVKRSKVVDEDKMEEFINEIVLLSQINHRNIVKLLGCCLETEVPILVYEYIPNGDLFKRLHDEYDDYMMTWEVRLRIAVEIAGALSYMHSAASFPIFHRDIKTTNILLDEKYRAKISDFGTSRSVATDQTHLTTLVAGTFGYMDPEYFLSSQYTHKSDVYSFGVVLVELITGEKPMSRVRSEEGIGLATYFLEAMKENRAVDIIDIRIKDESKQVMAVAKLARRCLNRKGNKRPNMREVSIKLERIRSSPKDLDVHTENEEEEEEDQLMEINRIYDS

SEQ ID NO: 73221 - protein, 558 aa, Arabidopsis thaliana
  peptide (1)..(558): Ceres Seq. ID no. 4961341
MTDIESEILGCESSCKDTKSNEVGNSLCNGYKCCQARLPVERPQAVGVNIESNNDTRGEGCKAAFLTSMKYFPSNITKPEWFQADGYAVVELGWYFDTSDSRFRNPLGCTNLTRSSGSYFLTDICLCRYGYFSRMSYRSCYCGSGYRGNPYIRGGCIDIDECEVPNKCGEDTCVNMAGRYSCVPKITKPAKLAHVLRGIFGLYKFIRKRRRIIRSMKFFKRNGGLLLKQQLTTKDGSVEMSKIFSSRELEKATDNFSIDRVLGQGGQGTVYKRMLVDGSIVAVKRSKVVDEDKMEEFINEIVLLSQINHRNIVKLLGCCLETEVPILVYEYIPNGDLFKRLHDEYDDYMMTWEVRLRIAVEIAGALSYMHSAASFPIFHRDIKTTNILLDEKYRAKISDFGTSRSVATDQTHLTTLVAGTFGYMDPEYFLSSQYTHKSDVYSFGVVLVELITGEKPMSRVRSEEGIGLATYFLEAMKENRAVDIIDIRIKDESKQVMAVAKLARRCLNRKGNKRPNMREVSIKLERIRSSPKDLDVHTENEEEEEEDQLMEINRIYDS

SEQ ID NO: 73222 - protein, 490 aa, Arabidopsis thaliana
  peptide (1)..(490): Ceres Seq. ID no. 4961342
MKYFPSNITKPEWFQADGYAVVELGWYFDTSDSRFRNPLGCTNLTRSSGSYFLTDICLCRYGYFSRMSYRSCYCGSGYRGNPYIRGGCIDIDECEVPNKCGEDTCVNMAGRYSCVPKITKPAKLAHVLRGIFGLYKFIRKRRRIIRSMKFFKRNGGLLLKQQLTTKDGSVEMSKIFSSRELEKATDNFSIDRVLGQGGQGTVYKRMLVDGSIVAVKRSKVVDEDKMEEFINEIVLLSQINHRNIVKLLGCCLETEVPILVYEYIPNGDLFKRLHDEYDDYMMTWEVRLRIAVEIAGALSYMHSAASFPIFHRDIKTTNILLDEKYRAKISDFGTSRSVATDQTHLTTLVAGTFGYMDPEYFLSSQYTHKSDVYSFGVVLVELITGEKPMSRVRSEEGIGLATYFLEAMKENRAVDIIDIRIKDESKQVMAVAKLARRCLNRKGNKRPNMREVSIKLERIRSSPKDLDVHTENEEEEEEDQLMEINRIYDS

SEQ ID NO: 73223 - DNA, 1518 bp, Arabidopsis thaliana
  misc_feature (1)..(1518): Ceres Seq. ID no. 4961402
  misc_feature (1)..(1518): Ortholog of  Ceres SEQ ID NO 15226728 as cited in SEQ ID NO 1302
atggaggatattgggttggttaagcaaggttggaaatggatgcaatctcagaaacatatgtgctccgatgcttgttctgcgatgcgatgctttggggagatgataggagggcttgtggagcgtcactggccattgggagctgctgcagctgttgttctgaacttgggttgcactcctgggctctttatcgtaggactatttggaattttgattttatggatgtatgcaaacttttggatcactggaacattgtttatagtcggaggctatttattctccttaaatcatgctcgcgtggtggttcttgtggcgggcttatatgcgatgtattgtgtcaaagtcagacttggatggcttggtcttttcctctcaataaatcttgctttcttgtccaacgatatattaaattgtcttcttcaatggtgtgacaatctaagtgaaaaaccacaacacgaggaaccaaagaaaccgaaagaaacaatcatagaagaagactattcaagggaatttgagtatccttcagttcctgtcgaagatgaaaccgagacaaagattcacgagaataagtcttctgctaaaccaactgcgccttctactgttgttaataccgtaaaggaaatttctagtgttaaaatagtcaaaatagaagagtcaagttcagctgatgaaatgaagagaatactgaatagtttgaatcattatgaagcattgggggtccctcggcataaaaagatcgatgctgcggtgcttaagaaagagtataggaagaaggcaatgttggttcatcctgataaaaatatggggagtccattggcaagtgaatcattcaagaaacttcaaagtgcttacgaggttctatctgatttcgtaaagaagagagattacgatgagcaactacgaaaagaagaatctaggactaggagtgtttgtcagacatctcatgcttcttcgcatcagatgagtcaaggcggatacactgtacaaaatgtggtaattcacacatatggatatgtaccaataggacaaaagcaaaggcaagatggtgccaggattgtggccaatatcatcaagcaaaagatggagatggatgggtcgaactcaaagggacattacccttcgagagagcacataagtatcctcagctcaatcactttctttttcatgtccattaagattgaaataccgcgtgcttttgtttgcgcggagagcaaaatatttgacgtctcagaatgggccatttgtcagggaatggcttgtagaccaaacacgcatagaccaagctttcatgtgaacatggttgggttagaaaagacaacacagagatcaaactcaagtaggttcccatgggatctagatgtggagatgatggatgaggacgaagaagagtttgagctatggcttcaacaagctcttgcttcaggtctcttctgcgaaacctcaaaacgtagaaaaagctggagccctttcaagttgggccagatgaaaagcaagaaacagtggcgaagaacttccacttga

SEQ ID NO: 73224 - protein, 505 aa, Arabidopsis thaliana
  peptide (1)..(505): Ceres Seq. ID no. 4961403
MEDIGLVKQGWKWMQSQKHMCSDACSAMRCFGEMIGGLVERHWPLGAAAAVVLNLGCTPGLFIVGLFGILILWMYANFWITGTLFIVGGYLFSLNHARVVVLVAGLYAMYCVKVRLGWLGLFLSINLAFLSNDILNCLLQWCDNLSEKPQHEEPKKPKETIIEEDYSREFEYPSVPVEDETETKIHENKSSAKPTAPSTVVNTVKEISSVKIVKIEESSSADEMKRILNSLNHYEALGVPRHKKIDAAVLKKEYRKKAMLVHPDKNMGSPLASESFKKLQSAYEVLSDFVKKRDYDEQLRKEESRTRSVCQTSHASSHQMSQGGYTVQNVVIHTYGYVPIGQKQRQDGARIVANIIKQKMEMDGSNSKGHYPSREHISILSSITFFFMSIKIEIPRAFVCAESKIFDVSEWAICQGMACRPNTHRPSFHVNMVGLEKTTQRSNSSRFPWDLDVEMMDEDEEEFELWLQQALASGLFCETSKRRKSWSPFKLGQMKSKKQWRRTST

SEQ ID NO: 73225 - protein, 492 aa, Arabidopsis thaliana
  peptide (1)..(492): Ceres Seq. ID no. 4961404
MQSQKHMCSDACSAMRCFGEMIGGLVERHWPLGAAAAVVLNLGCTPGLFIVGLFGILILWMYANFWITGTLFIVGGYLFSLNHARVVVLVAGLYAMYCVKVRLGWLGLFLSINLAFLSNDILNCLLQWCDNLSEKPQHEEPKKPKETIIEEDYSREFEYPSVPVEDETETKIHENKSSAKPTAPSTVVNTVKEISSVKIVKIEESSSADEMKRILNSLNHYEALGVPRHKKIDAAVLKKEYRKKAMLVHPDKNMGSPLASESFKKLQSAYEVLSDFVKKRDYDEQLRKEESRTRSVCQTSHASSHQMSQGGYTVQNVVIHTYGYVPIGQKQRQDGARIVANIIKQKMEMDGSNSKGHYPSREHISILSSITFFFMSIKIEIPRAFVCAESKIFDVSEWAICQGMACRPNTHRPSFHVNMVGLEKTTQRSNSSRFPWDLDVEMMDEDEEEFELWLQQALASGLFCETSKRRKSWSPFKLGQMKSKKQWRRTST

SEQ ID NO: 73226 - protein, 486 aa, Arabidopsis thaliana
  peptide (1)..(486): Ceres Seq. ID no. 4961405
MCSDACSAMRCFGEMIGGLVERHWPLGAAAAVVLNLGCTPGLFIVGLFGILILWMYANFWITGTLFIVGGYLFSLNHARVVVLVAGLYAMYCVKVRLGWLGLFLSINLAFLSNDILNCLLQWCDNLSEKPQHEEPKKPKETIIEEDYSREFEYPSVPVEDETETKIHENKSSAKPTAPSTVVNTVKEISSVKIVKIEESSSADEMKRILNSLNHYEALGVPRHKKIDAAVLKKEYRKKAMLVHPDKNMGSPLASESFKKLQSAYEVLSDFVKKRDYDEQLRKEESRTRSVCQTSHASSHQMSQGGYTVQNVVIHTYGYVPIGQKQRQDGARIVANIIKQKMEMDGSNSKGHYPSREHISILSSITFFFMSIKIEIPRAFVCAESKIFDVSEWAICQGMACRPNTHRPSFHVNMVGLEKTTQRSNSSRFPWDLDVEMMDEDEEEFELWLQQALASGLFCETSKRRKSWSPFKLGQMKSKKQWRRTST

SEQ ID NO: 73227 - DNA, 2082 bp, Arabidopsis thaliana
  misc_feature (1)..(2082): Ceres Seq. ID no. 4961412
  misc_feature (1)..(2082): Ortholog of  Ceres SEQ ID NO 13584744 as cited in SEQ ID NO 69137
atgacgcagaagctcgtacgccttgtgatcgtctctctggctattactgtcactttacttcaagcaaaaaccgataaccaagaagtctccgcgttgaacgtaatgttcacgagcttaaattcgccgtcgaaactcaaaggttggaaagctaacggaggtgatccctgcgaagattcttgggaaggcgtcaaatgcaaaggctcttcggtcactgaattacagttatcaggctttgagctaggtggatctcgcggttatctactaagcaacctcaaatctctcacaacttttgatctcagcaaaaacaatctcaaaggaaacataccttatcaactcccacccaacattgccaatctagacttttctgaaaacgaactcgatggaaacgtgccctactcgttatctcaaatgaaaaatctccaaagcattaatcttggacaaaacaagctcaatggagaactaccagatatgtttcagaaactgtccaaactcgaaactctggacttttcgttgaataaactctctgggaaattacctcagagttttgctaatctcacaagcctcaaaaaactacacttgcaggataatcgattcacaggcgacataaacgttctcaggaaccttgccatcgatgacttgaacgtcgaagacaaccagtttgaaggatggatacctaatgagcttaaggacatagacagtttactgactggaggtaacgactggtcaactgaaactgctccaccaccaccaccgggtgttaaatatggccgaaaatcttcgggttcgaaagacggaggaggtataaccgccggaactggaatggtgatcgctggagcatgtttaggcgttcttgtgttgatcattgttttaattgcgctcgtttccaagaaaaaatcatctctctcacctcatttcatcgacgaagataacagtcatcacaccccaaagttcaaatctctcacctcgcatggatctgcgcaagagcttcgtgttgatttcggcaacgattacaaaggtatacgacacatttcaacctatcttggactaaaacattatgtttcgtcgcgtgtgatgtctttcactgataccgaatttgcgaacaagctcaatgcaaaacgaaccacttcaactcgttccgctgtggaattcgagctctctgatttgcaaagcgcaacagccaatttctcacctggaaatctactaggggaaggctcaatcggacgtgtttacagagccaaatattccgacggacgtactttggcggttaagaagatcgattcaacgttgtttgattcgggtaaatcagaaggaataacgccgattgtaatgagcctctcaaagattaggcatcaaaatatagcagagctcgtaggctattgctcagagcaaggtcacaacatgttagtctacgaatacttcaggaatggctcactccatgagttccttcatttgtcagattgcttcagtaaacccttgacttggaacacaagagtcagaatcgccttgggaaccgctcgagccgttgagtacctgcacgaggcatgttcaccttctgtgatgcataagaatatcaagtcttctaacattttgctagacgcagatctcaaccctcgtctctcagattacggcctctcaaaattctaccttgtgagcattaaaacgagtcaaaatctaggagaaggatacaatgcaccagaagccagggacccttctgcttatacaccaaagagtgacgtctacagctttggcgtcgtcatgttagagcttctcaccggtcgagttccatttgacgggtcaaagccaaggccggagagatcgttggtacggtgggcgacaccacaacttcacgacatagatgcattgtcgaatatagcggatccagctctgcacggactttacccaccaaaatcattgtcaagattcgccgacattatcgcattatgtgttcaggtggaaccggagttccgaccaccgatgtcagaagttgtggaggcgcttgtacggatggttcaacggtcaagtatgaagcttaaagatgatctttcatcgtcttatcgagcccacgacgattatgattactag

SEQ ID NO: 73228 - protein, 693 aa, Arabidopsis thaliana
  peptide (1)..(693): Ceres Seq. ID no. 4961413
MTQKLVRLVIVSLAITVTLLQAKTDNQEVSALNVMFTSLNSPSKLKGWKANGGDPCEDSWEGVKCKGSSVTELQLSGFELGGSRGYLLSNLKSLTTFDLSKNNLKGNIPYQLPPNIANLDFSENELDGNVPYSLSQMKNLQSINLGQNKLNGELPDMFQKLSKLETLDFSLNKLSGKLPQSFANLTSLKKLHLQDNRFTGDINVLRNLAIDDLNVEDNQFEGWIPNELKDIDSLLTGGNDWSTETAPPPPPGVKYGRKSSGSKDGGGITAGTGMVIAGACLGVLVLIIVLIALVSKKKSSLSPHFIDEDNSHHTPKFKSLTSHGSAQELRVDFGNDYKGIRHISTYLGLKHYVSSRVMSFTDTEFANKLNAKRTTSTRSAVEFELSDLQSATANFSPGNLLGEGSIGRVYRAKYSDGRTLAVKKIDSTLFDSGKSEGITPIVMSLSKIRHQNIAELVGYCSEQGHNMLVYEYFRNGSLHEFLHLSDCFSKPLTWNTRVRIALGTARAVEYLHEACSPSVMHKNIKSSNILLDADLNPRLSDYGLSKFYLVSIKTSQNLGEGYNAPEARDPSAYTPKSDVYSFGVVMLELLTGRVPFDGSKPRPERSLVRWATPQLHDIDALSNIADPALHGLYPPKSLSRFADIIALCVQVEPEFRPPMSEVVEALVRMVQRSSMKLKDDLSSSYRAHDDYDY

SEQ ID NO: 73229 - protein, 659 aa, Arabidopsis thaliana
  peptide (1)..(659): Ceres Seq. ID no. 4961414
MFTSLNSPSKLKGWKANGGDPCEDSWEGVKCKGSSVTELQLSGFELGGSRGYLLSNLKSLTTFDLSKNNLKGNIPYQLPPNIANLDFSENELDGNVPYSLSQMKNLQSINLGQNKLNGELPDMFQKLSKLETLDFSLNKLSGKLPQSFANLTSLKKLHLQDNRFTGDINVLRNLAIDDLNVEDNQFEGWIPNELKDIDSLLTGGNDWSTETAPPPPPGVKYGRKSSGSKDGGGITAGTGMVIAGACLGVLVLIIVLIALVSKKKSSLSPHFIDEDNSHHTPKFKSLTSHGSAQELRVDFGNDYKGIRHISTYLGLKHYVSSRVMSFTDTEFANKLNAKRTTSTRSAVEFELSDLQSATANFSPGNLLGEGSIGRVYRAKYSDGRTLAVKKIDSTLFDSGKSEGITPIVMSLSKIRHQNIAELVGYCSEQGHNMLVYEYFRNGSLHEFLHLSDCFSKPLTWNTRVRIALGTARAVEYLHEACSPSVMHKNIKSSNILLDADLNPRLSDYGLSKFYLVSIKTSQNLGEGYNAPEARDPSAYTPKSDVYSFGVVMLELLTGRVPFDGSKPRPERSLVRWATPQLHDIDALSNIADPALHGLYPPKSLSRFADIIALCVQVEPEFRPPMSEVVEALVRMVQRSSMKLKDDLSSSYRAHDDYDY

SEQ ID NO: 73230 - protein, 557 aa, Arabidopsis thaliana
  peptide (1)..(557): Ceres Seq. ID no. 4961415
MKNLQSINLGQNKLNGELPDMFQKLSKLETLDFSLNKLSGKLPQSFANLTSLKKLHLQDNRFTGDINVLRNLAIDDLNVEDNQFEGWIPNELKDIDSLLTGGNDWSTETAPPPPPGVKYGRKSSGSKDGGGITAGTGMVIAGACLGVLVLIIVLIALVSKKKSSLSPHFIDEDNSHHTPKFKSLTSHGSAQELRVDFGNDYKGIRHISTYLGLKHYVSSRVMSFTDTEFANKLNAKRTTSTRSAVEFELSDLQSATANFSPGNLLGEGSIGRVYRAKYSDGRTLAVKKIDSTLFDSGKSEGITPIVMSLSKIRHQNIAELVGYCSEQGHNMLVYEYFRNGSLHEFLHLSDCFSKPLTWNTRVRIALGTARAVEYLHEACSPSVMHKNIKSSNILLDADLNPRLSDYGLSKFYLVSIKTSQNLGEGYNAPEARDPSAYTPKSDVYSFGVVMLELLTGRVPFDGSKPRPERSLVRWATPQLHDIDALSNIADPALHGLYPPKSLSRFADIIALCVQVEPEFRPPMSEVVEALVRMVQRSSMKLKDDLSSSYRAHDDYDY

SEQ ID NO: 73231 - DNA, 441 bp, Arabidopsis thaliana
  misc_feature (1)..(441): Ceres Seq. ID no. 4961446
  misc_feature (1)..(441): Ortholog of  Ceres SEQ ID NO 13594918 as cited in SEQ ID NO 55747
atgggagatgtagttttgttcatagatgaaacatatttgaaatcgagttttaatcgctgtagaatctgtcacgaagaagaagctgagagctactttgaagctccttgttcttgttcaggaaccatcaagttcgctcacagagattgcatacaacgatggtgtgatgagaaaggaaacacaatttgtgaaatttgtctccagttttcggttattttgttgataaagcatgcatttgatgcggtttatggaactgaagagtatccctatacaatattcacggctataggcatactattaccaatgctcgttatcattcgaaccatcacagctattcaaaggagtctccgatatcaaattctcgaatcagaagaagatacattgagctctgaagaagaagatcatggtttggaggaggaagagcaacaacaacatatagcttga

SEQ ID NO: 73232 - protein, 146 aa, Arabidopsis thaliana
  peptide (1)..(146): Ceres Seq. ID no. 4961447
MGDVVLFIDETYLKSSFNRCRICHEEEAESYFEAPCSCSGTIKFAHRDCIQRWCDEKGNTICEICLQFSVILLIKHAFDAVYGTEEYPYTIFTAIGILLPMLVIIRTITAIQRSLRYQILESEEDTLSSEEEDHGLEEEEQQQHIA

SEQ ID NO: 73233 - DNA, 573 bp, Arabidopsis thaliana
  misc_feature (1)..(573): Ceres Seq. ID no. 4961521
  misc_feature (1)..(573): Ortholog of  Ceres SEQ ID NO 13589868 as cited in SEQ ID NO 55521
atggggacagctctgggaaagccatttgccggttttttccaccaagaagaatcgaggatagtgttgttcggtctcgacgctgccggaaaatcatcaataatgcacaaactcaaaaccggagaaacccttaccacaaccatgcctactattggaacggatgtggaaagtgtaaaatacaaggattcaaacttacgcttttgggaaatgggcggccaacaatgttacaagtggtttccaatgacgaaacatgacttccaagaaatagcggggcttgtgcttgtagtcgatagcacagacagagatcgaatagaagatgcgaaagattttcttaatgcggtgattgatgagatacaagggagtgtaccggacaatgtggctgttcttgtatttggaaacaagcatgaagttcctggtgctatgtctgcttctgagatcagtaacaagcttgatctcacttctcttcgtcaaaaaaactggcagagaaactggcatgtccagagctcatgtgcattctctggtgatggtttacatgaaggactcgactggctgttgaaaaatgctgaaagaatgtaa

SEQ ID NO: 73234 - protein, 190 aa, Arabidopsis thaliana
  peptide (1)..(190): Ceres Seq. ID no. 4961522
MGTALGKPFAGFFHQEESRIVLFGLDAAGKSSIMHKLKTGETLTTTMPTIGTDVESVKYKDSNLRFWEMGGQQCYKWFPMTKHDFQEIAGLVLVVDSTDRDRIEDAKDFLNAVIDEIQGSVPDNVAVLVFGNKHEVPGAMSASEISNKLDLTSLRQKNWQRNWHVQSSCAFSGDGLHEGLDWLLKNAERM

SEQ ID NO: 73235 - protein, 157 aa, Arabidopsis thaliana
  peptide (1)..(157): Ceres Seq. ID no. 4961523
MHKLKTGETLTTTMPTIGTDVESVKYKDSNLRFWEMGGQQCYKWFPMTKHDFQEIAGLVLVVDSTDRDRIEDAKDFLNAVIDEIQGSVPDNVAVLVFGNKHEVPGAMSASEISNKLDLTSLRQKNWQRNWHVQSSCAFSGDGLHEGLDWLLKNAERM

SEQ ID NO: 73236 - protein, 144 aa, Arabidopsis thaliana
  peptide (1)..(144): Ceres Seq. ID no. 4961524
MPTIGTDVESVKYKDSNLRFWEMGGQQCYKWFPMTKHDFQEIAGLVLVVDSTDRDRIEDAKDFLNAVIDEIQGSVPDNVAVLVFGNKHEVPGAMSASEISNKLDLTSLRQKNWQRNWHVQSSCAFSGDGLHEGLDWLLKNAERM

SEQ ID NO: 73237 - DNA, 897 bp, Arabidopsis thaliana
  misc_feature (1)..(897): Ceres Seq. ID no. 4961610
  misc_feature (1)..(897): Ortholog of  Ceres SEQ ID NO 13660872 as cited in SEQ ID NO 60830
  misc_feature (1)..(897): Ortholog of  Ceres SEQ ID NO 12616221 as cited in SEQ ID NO 63291
atgagtttgcctccaggattcaggtttcatcccactgatgaagaactggtggcttactatcttgataggaaggtcaacggccaagccattgagctcgagatcatcccagaagttgatctttataaatgcgagccatgggacttgcctgaaaagtcatttttgccgggaaacgacatggaatggtacttttacagcacaagggataagaagtatccaaatggctctaggacgaaccgtgcgacccgagcgggttactggaaggccacggggaaagatcgtacagtagaatcaaagaagatgaagatgggaatgaagaagacactggtttattatagaggaagggctcctcatggccttcgtactaattgggtcatgcatgaatatcgtctcacgcacgctccttcctcctccttgaaggagtcgtatgcattgtgccgagtgtttaagaagaacatacaaattccaaagagaaaaggggaagaagaagaagcagaagaagagagcactagtgtaggaaaagaagaggaagaagaaaaggagaagaagtggagaaaatgtgatggtaattatattgaagacgagagcttgaaaagagcatccgcggagacatcttcatcagagctaactcaaggggtccttttagacgaagcaaacagctcatccatatttgctcttcatttctcatcttctcttctggacgatcatgatcatcttttctcaaactattctcatcagcttccatatcatcctcctcttcaactccaagatttccctcaactttctatgaacgaagcagagattatgtcaatccaacaagactttcaatgcagagactctatgaacgggacacttgacgaaatcttctcttcttccgccactttccccgcttccctttga

SEQ ID NO: 73238 - protein, 298 aa, Arabidopsis thaliana
  peptide (1)..(298): Ceres Seq. ID no. 4961611
MSLPPGFRFHPTDEELVAYYLDRKVNGQAIELEIIPEVDLYKCEPWDLPEKSFLPGNDMEWYFYSTRDKKYPNGSRTNRATRAGYWKATGKDRTVESKKMKMGMKKTLVYYRGRAPHGLRTNWVMHEYRLTHAPSSSLKESYALCRVFKKNIQIPKRKGEEEEAEEESTSVGKEEEEEKEKKWRKCDGNYIEDESLKRASAETSSSELTQGVLLDEANSSSIFALHFSSSLLDDHDHLFSNYSHQLPYHPPLQLQDFPQLSMNEAEIMSIQQDFQCRDSMNGTLDEIFSSSATFPASL

SEQ ID NO: 73239 - protein, 240 aa, Arabidopsis thaliana
  peptide (1)..(240): Ceres Seq. ID no. 4961612
MEWYFYSTRDKKYPNGSRTNRATRAGYWKATGKDRTVESKKMKMGMKKTLVYYRGRAPHGLRTNWVMHEYRLTHAPSSSLKESYALCRVFKKNIQIPKRKGEEEEAEEESTSVGKEEEEEKEKKWRKCDGNYIEDESLKRASAETSSSELTQGVLLDEANSSSIFALHFSSSLLDDHDHLFSNYSHQLPYHPPLQLQDFPQLSMNEAEIMSIQQDFQCRDSMNGTLDEIFSSSATFPASL

SEQ ID NO: 73240 - protein, 199 aa, Arabidopsis thaliana
  peptide (1)..(199): Ceres Seq. ID no. 4961613
MKMGMKKTLVYYRGRAPHGLRTNWVMHEYRLTHAPSSSLKESYALCRVFKKNIQIPKRKGEEEEAEEESTSVGKEEEEEKEKKWRKCDGNYIEDESLKRASAETSSSELTQGVLLDEANSSSIFALHFSSSLLDDHDHLFSNYSHQLPYHPPLQLQDFPQLSMNEAEIMSIQQDFQCRDSMNGTLDEIFSSSATFPASL

SEQ ID NO: 73241 - DNA, 789 bp, Arabidopsis thaliana
  misc_feature (1)..(789): Ceres Seq. ID no. 4961622
  misc_feature (1)..(789): Ortholog of  Ceres SEQ ID NO 14315418 as cited in SEQ ID NO 57506
atgtcaggactcgatatctatcctcacgatccttcttcttcttcttcgaccagctctatcgatctatccaatgaagctttcttcagcaccggtggtctgtttctcgaaccaccaggcgtttcctcttccttcttcgactctatctcctccaaatgctccgactcagagccactgcatttccccggttactggagaaacaaaacccgtctccgctccggtaagaactttatgttcctgtccgtgagcttgagtaaagacagatctgagcagcaatgtaagaaggctttggcgcaaaacgacgaaattcccggcaaggataatcgaaaacgaagtgttatcggtggcgtgaggagacgcgggaccatgaacacaaggaagcatctctgggctggtgctgtagctgccatggtttcaaaaacattcttagctccacttgagagactaaagcttgaatatacagttcgtggtgaacagaggaacttgttggtggttgctaagtcaattgcaactacacagggcttgactggattctggaaaggtaatttgctcaatgttcttcgaactgctcctttcaaagccgtcaatttttgtgcctatgatacctatagaaagcaattgcttaaaatcgctgggaatcaagaagcaaccaactttgaaagattcgttgctggtgccgctgctgggattactgctactgtgctctgcttgccactcgacactgtattgccttcggcttcaataagttactttgtctacgagtgtatgaagatagtacttaaagtagaataa

SEQ ID NO: 73242 - protein, 262 aa, Arabidopsis thaliana
  peptide (1)..(262): Ceres Seq. ID no. 4961623
MSGLDIYPHDPSSSSSTSSIDLSNEAFFSTGGLFLEPPGVSSSFFDSISSKCSDSEPLHFPGYWRNKTRLRSGKNFMFLSVSLSKDRSEQQCKKALAQNDEIPGKDNRKRSVIGGVRRRGTMNTRKHLWAGAVAAMVSKTFLAPLERLKLEYTVRGEQRNLLVVAKSIATTQGLTGFWKGNLLNVLRTAPFKAVNFCAYDTYRKQLLKIAGNQEATNFERFVAGAAAGITATVLCLPLDTVLPSASISYFVYECMKIVLKVE

SEQ ID NO: 73243 - protein, 186 aa, Arabidopsis thaliana
  peptide (1)..(186): Ceres Seq. ID no. 4961624
MFLSVSLSKDRSEQQCKKALAQNDEIPGKDNRKRSVIGGVRRRGTMNTRKHLWAGAVAAMVSKTFLAPLERLKLEYTVRGEQRNLLVVAKSIATTQGLTGFWKGNLLNVLRTAPFKAVNFCAYDTYRKQLLKIAGNQEATNFERFVAGAAAGITATVLCLPLDTVLPSASISYFVYECMKIVLKVE

SEQ ID NO: 73244 - protein, 141 aa, Arabidopsis thaliana
  peptide (1)..(141): Ceres Seq. ID no. 4961625
MNTRKHLWAGAVAAMVSKTFLAPLERLKLEYTVRGEQRNLLVVAKSIATTQGLTGFWKGNLLNVLRTAPFKAVNFCAYDTYRKQLLKIAGNQEATNFERFVAGAAAGITATVLCLPLDTVLPSASISYFVYECMKIVLKVE

SEQ ID NO: 73245 - DNA, 2736 bp, Arabidopsis thaliana
  misc_feature (1)..(2736): Ceres Seq. ID no. 4961715
  misc_feature (1)..(2736): Ortholog of  Ceres SEQ ID NO 14302392 as cited in SEQ ID NO 61332
atggattgcataaagagtattggtagatccgctttcgttgccatcgcgccggaatctccgttcatagcagccggaacaatggccggagcagtagatctttcgtttagttcatccgccaatctcgagatctttgaactcgattttcagtccaacgatcgtgagctaaaactagtaggtcaatgccaaagttccgagcggtttaatcgactcgcttggggaagttatggctctggatccgatggtctcatagccggtggtctagttgacgggaacatcggtttatggaatccaattagttctgagtctggtgaaattgcgcacgttagagatttgtcaaaacacaaaggacctgttcgtggtcttgaatttaatgttaagtctccaaatcaacttgcttctggggctgatgatggtacagtttgtatttgggatttagcaaatccttcaaagccttctcattatctaaagggtactggttcttatatgcaaagtgaaatctcttctttatcatggaataaagggtttcaacatgttttagcatctacctcacacaacgggactacagtgatatgggatgtgaataacgagaagattataacagacttgaaaactaccgttaggtgctcagttttgcaatgggatcctgatcattttaatcagattttggttgcttcagatgaagatagttcaccgaatgtgaagagtggtgatacttgttatacaacaggtgtgattgcaatggagtggtgtccaagtgacagcttgtatctacttacctgtgggaaagacaaccgaactatttgttggaacacaaagacaggaaagattgtggctgagttacctactggtcaaaactggaattttgatgttcattggtatccaaagatgcctggagttatatcagcatcttcagttgatgggaaaattggcatctataaccttgaggtagctctttgcagtttcgttttggtctttctgcatagcttggccacagaaaaaagtttggtgaatcgaatttctaaatttgaagctgcattagaaaatggagagaagacttcccttaggggtttatgcgagaagaaaacagaagaggccgaatctgaggaagagaaggaaacatggggactgctgaaaattatgcttgaagaagatgggaacgcaaagacgaagttgcgtagccatcttggctttagtttaccatctgaggaaaatgatcaaactgctaatgagcctcatgctacatgttcttctacaaacgtggaagaaactcagaaagtgccagaaccagaaggagaagaagaagagagctctgatccaacatttgatgatgccatccaacgttcattgattgtgggagattacaaggaagcagtggctcagtgtttttctgcaaataagatggctgatgctttagttattgctcatgttggtggtacagaattgtgggagagtactcgtgataaatatataaggatgagcaatgctccttacatgaaggttgtttctgcaatgatgaacaatgatctaatgacctaccttcatacaagacaacctaaatcctggaaagaaactcttgctctcatctgcacttttgcagaaggagatgaatggataagcctctgcgatgctcttgcctcaaatttgatggctgctggttttactttggctgcaactctgtgttacatttgcgcaggcaatgtcgacaaaacagtagacatttggtcaatgagccttgaaaaacaaagtgctgggaaatcttatgctgagtgtgttcaagatcttatggagaaaactcttgtccttgctttgacaacttgcaacaagagagtcagtgcgtctctacgtaaactctttgaaagttatgctgagatattggctagtcaaggacttattgcaacagctatgaagttcttaaaacttctggagtctggtgatttctcacctgaactttcaatcttgcgtgatcggatttctctgtatgcagaacctgaagctgctaacacttctgcttcaacaaacactcagcctaaaatttccaatccatatcaagagaaatcttttactccagctccattaagcaatgctcagccatcaagaagtattactttttttcctttgaatcctcctcgagaactaaagaacgcggaccaatatcagcaaccaaccatggattatcattcatttaatcgatccgctggcccagcttacaatgctccacccggtcctggttcatatcgatccatccattcacaagttggtccatatataaactccaagattccccaaactgttgctcctccagtccgacctatgactccaacacaccaggtagcggtgcaaccagaacctgtagctccaccaccaactgttcagactgcagatacttccaatgtaccagcccaccagaaacctattgtggcttcattgacaaggctatttaaagagacatttgaaccattaagaggttattcaagagatactcctgccaagaagcgtgaggcagaagataattgctcaagaaagctaggagctctgttttcaaaactaaataatggggacatctcgaagaacgctgctgaaaaactcactcagctctgtcaagctctggacaaacgtgattttggtgcagcgttaaaaatacaggggcttatgacaagcaccgaatgggatgagtgcagttcttggcttccaacacttaagaaaatgatcgtcacgggaaggcaaaatgtgcggtga

SEQ ID NO: 73246 - protein, 911 aa, Arabidopsis thaliana
  peptide (1)..(911): Ceres Seq. ID no. 4961716
MDCIKSIGRSAFVAIAPESPFIAAGTMAGAVDLSFSSSANLEIFELDFQSNDRELKLVGQCQSSERFNRLAWGSYGSGSDGLIAGGLVDGNIGLWNPISSESGEIAHVRDLSKHKGPVRGLEFNVKSPNQLASGADDGTVCIWDLANPSKPSHYLKGTGSYMQSEISSLSWNKGFQHVLASTSHNGTTVIWDVNNEKIITDLKTTVRCSVLQWDPDHFNQILVASDEDSSPNVKSGDTCYTTGVIAMEWCPSDSLYLLTCGKDNRTICWNTKTGKIVAELPTGQNWNFDVHWYPKMPGVISASSVDGKIGIYNLEVALCSFVLVFLHSLATEKSLVNRISKFEAALENGEKTSLRGLCEKKTEEAESEEEKETWGLLKIMLEEDGNAKTKLRSHLGFSLPSEENDQTANEPHATCSSTNVEETQKVPEPEGEEEESSDPTFDDAIQRSLIVGDYKEAVAQCFSANKMADALVIAHVGGTELWESTRDKYIRMSNAPYMKVVSAMMNNDLMTYLHTRQPKSWKETLALICTFAEGDEWISLCDALASNLMAAGFTLAATLCYICAGNVDKTVDIWSMSLEKQSAGKSYAECVQDLMEKTLVLALTTCNKRVSASLRKLFESYAEILASQGLIATAMKFLKLLESGDFSPELSILRDRISLYAEPEAANTSASTNTQPKISNPYQEKSFTPAPLSNAQPSRSITFFPLNPPRELKNADQYQQPTMDYHSFNRSAGPAYNAPPGPGSYRSIHSQVGPYINSKIPQTVAPPVRPMTPTHQVAVQPEPVAPPPTVQTADTSNVPAHQKPIVASLTRLFKETFEPLRGYSRDTPAKKREAEDNCSRKLGALFSKLNNGDISKNAAEKLTQLCQALDKRDFGAALKIQGLMTSTEWDECSSWLPTLKKMIVTGRQNVR

SEQ ID NO: 73247 - protein, 885 aa, Arabidopsis thaliana
  peptide (1)..(885): Ceres Seq. ID no. 4961717
MAGAVDLSFSSSANLEIFELDFQSNDRELKLVGQCQSSERFNRLAWGSYGSGSDGLIAGGLVDGNIGLWNPISSESGEIAHVRDLSKHKGPVRGLEFNVKSPNQLASGADDGTVCIWDLANPSKPSHYLKGTGSYMQSEISSLSWNKGFQHVLASTSHNGTTVIWDVNNEKIITDLKTTVRCSVLQWDPDHFNQILVASDEDSSPNVKSGDTCYTTGVIAMEWCPSDSLYLLTCGKDNRTICWNTKTGKIVAELPTGQNWNFDVHWYPKMPGVISASSVDGKIGIYNLEVALCSFVLVFLHSLATEKSLVNRISKFEAALENGEKTSLRGLCEKKTEEAESEEEKETWGLLKIMLEEDGNAKTKLRSHLGFSLPSEENDQTANEPHATCSSTNVEETQKVPEPEGEEEESSDPTFDDAIQRSLIVGDYKEAVAQCFSANKMADALVIAHVGGTELWESTRDKYIRMSNAPYMKVVSAMMNNDLMTYLHTRQPKSWKETLALICTFAEGDEWISLCDALASNLMAAGFTLAATLCYICAGNVDKTVDIWSMSLEKQSAGKSYAECVQDLMEKTLVLALTTCNKRVSASLRKLFESYAEILASQGLIATAMKFLKLLESGDFSPELSILRDRISLYAEPEAANTSASTNTQPKISNPYQEKSFTPAPLSNAQPSRSITFFPLNPPRELKNADQYQQPTMDYHSFNRSAGPAYNAPPGPGSYRSIHSQVGPYINSKIPQTVAPPVRPMTPTHQVAVQPEPVAPPPTVQTADTSNVPAHQKPIVASLTRLFKETFEPLRGYSRDTPAKKREAEDNCSRKLGALFSKLNNGDISKNAAEKLTQLCQALDKRDFGAALKIQGLMTSTEWDECSSWLPTLKKMIVTGRQNVR

SEQ ID NO: 73248 - protein, 750 aa, Arabidopsis thaliana
  peptide (1)..(750): Ceres Seq. ID no. 4961718
MQSEISSLSWNKGFQHVLASTSHNGTTVIWDVNNEKIITDLKTTVRCSVLQWDPDHFNQILVASDEDSSPNVKSGDTCYTTGVIAMEWCPSDSLYLLTCGKDNRTICWNTKTGKIVAELPTGQNWNFDVHWYPKMPGVISASSVDGKIGIYNLEVALCSFVLVFLHSLATEKSLVNRISKFEAALENGEKTSLRGLCEKKTEEAESEEEKETWGLLKIMLEEDGNAKTKLRSHLGFSLPSEENDQTANEPHATCSSTNVEETQKVPEPEGEEEESSDPTFDDAIQRSLIVGDYKEAVAQCFSANKMADALVIAHVGGTELWESTRDKYIRMSNAPYMKVVSAMMNNDLMTYLHTRQPKSWKETLALICTFAEGDEWISLCDALASNLMAAGFTLAATLCYICAGNVDKTVDIWSMSLEKQSAGKSYAECVQDLMEKTLVLALTTCNKRVSASLRKLFESYAEILASQGLIATAMKFLKLLESGDFSPELSILRDRISLYAEPEAANTSASTNTQPKISNPYQEKSFTPAPLSNAQPSRSITFFPLNPPRELKNADQYQQPTMDYHSFNRSAGPAYNAPPGPGSYRSIHSQVGPYINSKIPQTVAPPVRPMTPTHQVAVQPEPVAPPPTVQTADTSNVPAHQKPIVASLTRLFKETFEPLRGYSRDTPAKKREAEDNCSRKLGALFSKLNNGDISKNAAEKLTQLCQALDKRDFGAALKIQGLMTSTEWDECSSWLPTLKKMIVTGRQNVR

SEQ ID NO: 73249 - DNA, 588 bp, Arabidopsis thaliana
  misc_feature (1)..(588): Ceres Seq. ID no. 4961726
  misc_feature (1)..(588): Ortholog of  Ceres SEQ ID NO 13659710 as cited in SEQ ID NO 60808
atgatgtgcatgaaatgcatgataattcagccagtaggtgctagttgctcaaatatttcatgtagttcatcaatgggaaaatattactgtaaaatatgcaagttgtttgacgatgatagggaaatctatcattgtccatactgcaatctctgccggctaggaaaaggactgagcatagactactttcattgcatgaaatgtaatgcttgtatgtcgcgactcatagtagaacatgtatgcagagaaaagtgcttagaagataattgtccgatttgtcatgaatacatatttacctcaaattctccggtgaaggctcttccatgcggtcacgtgatgcattcaacatgctttcaggagtacacatgttcgcattacacatgccctatttgcagcaagtcgctcggggatatgcaggtttactttagaatgttagacgcactgcttgcagaacaaaagatgccagatgaatacttaaaccaaactcaggtaatactgtgtaatgactgtggaagaaaggggaatgctccttaccattggctctatcacaagtgttcttcttgtgcctcctacaacaccagacttttctag

SEQ ID NO: 73250 - protein, 195 aa, Arabidopsis thaliana
  peptide (1)..(195): Ceres Seq. ID no. 4961727
MMCMKCMIIQPVGASCSNISCSSSMGKYYCKICKLFDDDREIYHCPYCNLCRLGKGLSIDYFHCMKCNACMSRLIVEHVCREKCLEDNCPICHEYIFTSNSPVKALPCGHVMHSTCFQEYTCSHYTCPICSKSLGDMQVYFRMLDALLAEQKMPDEYLNQTQVILCNDCGRKGNAPYHWLYHKCSSCASYNTRLF

SEQ ID NO: 73251 - protein, 194 aa, Arabidopsis thaliana
  peptide (1)..(194): Ceres Seq. ID no. 4961728
MCMKCMIIQPVGASCSNISCSSSMGKYYCKICKLFDDDREIYHCPYCNLCRLGKGLSIDYFHCMKCNACMSRLIVEHVCREKCLEDNCPICHEYIFTSNSPVKALPCGHVMHSTCFQEYTCSHYTCPICSKSLGDMQVYFRMLDALLAEQKMPDEYLNQTQVILCNDCGRKGNAPYHWLYHKCSSCASYNTRLF

SEQ ID NO: 73252 - protein, 192 aa, Arabidopsis thaliana
  peptide (1)..(192): Ceres Seq. ID no. 4961729
MKCMIIQPVGASCSNISCSSSMGKYYCKICKLFDDDREIYHCPYCNLCRLGKGLSIDYFHCMKCNACMSRLIVEHVCREKCLEDNCPICHEYIFTSNSPVKALPCGHVMHSTCFQEYTCSHYTCPICSKSLGDMQVYFRMLDALLAEQKMPDEYLNQTQVILCNDCGRKGNAPYHWLYHKCSSCASYNTRLF

SEQ ID NO: 73253 - DNA, 1398 bp, Arabidopsis thaliana
  misc_feature (1)..(1398): Ceres Seq. ID no. 4961993
  misc_feature (1)..(1398): Ortholog of  Ceres SEQ ID NO 14311878 as cited in SEQ ID NO 51611
atggttgagattcagggaagattcaaaagaattgagtcggctttcaacgtagccgcggctcgtgtacatccaccgtgtgataacagtagcggaagcgatcattcgccggatctttccgatttggtcgcatcttttatagagaaagagggacaaatagtattacgtgaagaagaagaaacttcttccgacgataacaatttggaagatgtgaatgagaggttacggaagcttctagaaggtttatcctgtggcgaagagcggatgagaatactgtcagcgacgatggaggttgctggaacgttcgtcggagatattagttcttctaagcgtcacttaatggcgtttctacgtaacaagggttttgatgcaggtctttgcaagtcgagttgggaaagattcggcaaaaacaccggcggaaaatacgagtacgtcgacgttcgttgtggcggagattataataatcggtatttcgtcgagacaaaccttgccggagagtttgagatagctagaccaacgaaaaggtacctctcaatactaagccaagtgccacgcgtcttcgtgggaacttcagaggaactgaaactgctcgtgagaatcatgtgccatgagatgagacggtcgatgaagcacgtagggatccacgtgccaccgtggaggagaaacggttacatgcaagctaagtggttcggtttctataaacgaacttcgacgaccaataactacgaaatggttaatacttatgatacgactgcgtttaagggttgcaaggaagagttttgggaagctaaaggtcttaaggttatggttggtcagctttcgattgctttcaacattagtgcgctttgccggaaaggaaccgttcatccgtcgccaccgccggcgataaagaccgacgaacagtttctatctcttctccccgtagctatcctctctctcgtggcggcgctctcggtggaggatcgtgaagttcttgcttacctcatctcaaactccggcgactcaaatcgtatctctcgtctcaagaaaaacaaagaagataatcatcactctcctctctttctttgtgattgttttagttgttacacgagttactgggtcagatgggacacgtcaccgaggcgccaactcattcacgagatcatcgatgcttacgaagatagtttggagatgaagaagaaaaagaaagatcggagaaagcgatcgggaaaagcttctggacgagttaactcgataggaacgagtcgactcagtgaattgggttcgagttcagccgagtttgctggtggtgactcggagaaagatggaaattgcggcggtgaagaggcggagaaggagaaaggctccgttggaaaggttatgagtttcattggtcagagatttttgggagtttggggataa

SEQ ID NO: 73254 - protein, 465 aa, Arabidopsis thaliana
  peptide (1)..(465): Ceres Seq. ID no. 4961994
MVEIQGRFKRIESAFNVAAARVHPPCDNSSGSDHSPDLSDLVASFIEKEGQIVLREEEETSSDDNNLEDVNERLRKLLEGLSCGEERMRILSATMEVAGTFVGDISSSKRHLMAFLRNKGFDAGLCKSSWERFGKNTGGKYEYVDVRCGGDYNNRYFVETNLAGEFEIARPTKRYLSILSQVPRVFVGTSEELKLLVRIMCHEMRRSMKHVGIHVPPWRRNGYMQAKWFGFYKRTSTTNNYEMVNTYDTTAFKGCKEEFWEAKGLKVMVGQLSIAFNISALCRKGTVHPSPPPAIKTDEQFLSLLPVAILSLVAALSVEDREVLAYLISNSGDSNRISRLKKNKEDNHHSPLFLCDCFSCYTSYWVRWDTSPRRQLIHEIIDAYEDSLEMKKKKKDRRKRSGKASGRVNSIGTSRLSELGSSSAEFAGGDSEKDGNCGGEEAEKEKGSVGKVMSFIGQRFLGVWG

SEQ ID NO: 73255 - protein, 378 aa, Arabidopsis thaliana
  peptide (1)..(378): Ceres Seq. ID no. 4961995
MRILSATMEVAGTFVGDISSSKRHLMAFLRNKGFDAGLCKSSWERFGKNTGGKYEYVDVRCGGDYNNRYFVETNLAGEFEIARPTKRYLSILSQVPRVFVGTSEELKLLVRIMCHEMRRSMKHVGIHVPPWRRNGYMQAKWFGFYKRTSTTNNYEMVNTYDTTAFKGCKEEFWEAKGLKVMVGQLSIAFNISALCRKGTVHPSPPPAIKTDEQFLSLLPVAILSLVAALSVEDREVLAYLISNSGDSNRISRLKKNKEDNHHSPLFLCDCFSCYTSYWVRWDTSPRRQLIHEIIDAYEDSLEMKKKKKDRRKRSGKASGRVNSIGTSRLSELGSSSAEFAGGDSEKDGNCGGEEAEKEKGSVGKVMSFIGQRFLGVWG

SEQ ID NO: 73256 - protein, 371 aa, Arabidopsis thaliana
  peptide (1)..(371): Ceres Seq. ID no. 4961996
MEVAGTFVGDISSSKRHLMAFLRNKGFDAGLCKSSWERFGKNTGGKYEYVDVRCGGDYNNRYFVETNLAGEFEIARPTKRYLSILSQVPRVFVGTSEELKLLVRIMCHEMRRSMKHVGIHVPPWRRNGYMQAKWFGFYKRTSTTNNYEMVNTYDTTAFKGCKEEFWEAKGLKVMVGQLSIAFNISALCRKGTVHPSPPPAIKTDEQFLSLLPVAILSLVAALSVEDREVLAYLISNSGDSNRISRLKKNKEDNHHSPLFLCDCFSCYTSYWVRWDTSPRRQLIHEIIDAYEDSLEMKKKKKDRRKRSGKASGRVNSIGTSRLSELGSSSAEFAGGDSEKDGNCGGEEAEKEKGSVGKVMSFIGQRFLGVWG

SEQ ID NO: 73257 - DNA, 1710 bp, Arabidopsis thaliana
  misc_feature (1)..(1710): Ceres Seq. ID no. 4962173
  misc_feature (1)..(1710): Ortholog of  Ceres SEQ ID NO 12581802 as cited in SEQ ID NO 54880
atggatccaattgaatcagtggagtacaatggctttgaaactaccaatggtaactctcacaacgacgaccatggttggaagaaagtagtgtacccaaaacgtaaccggaagcaaaaaccggcggatcaagcggcggcgacgaagaatggtgtcaccgggaatctaattcccaatggtactttatccaatggaggaggcaacgtcttccgttctcttgaggagcaagctgaaggtcgtcatctacagatcctcgccgcgaagaaagcttccgatacggcggatgtgtcggacgggggaagatctaaatggcgatctaacgggtacggcgacgaagggtatgattttgatgacagcgacagtgaaatcgcggtggggaaggagaatttgaaagcggaggaagttaagaaaccgaaggttaagaaggtgaagaagcctaaggttactttagctgaagctgctgctaagattgatgtatctaatctcgcagctttcctcgttgaagcttcgattccactttctcatattcctgaagcagtgtataagacatcagctgattggattaaccaacgtcccattgaggcacttggagcctttgtattgtggggcttggattgtattcttgctgacttggctgtacaacaaggaggtgtcaagggtggtaagaaaggagcacaacaggcttcttcgaaatctcaggttgcgatatttgtggcggtagcaatggttttgcgtaagaaacctgatgctttaactaatatattgccaactttgagggagaatcccaagtatcagggacaggataagcttccagttacagtttggatgatggctcaggcctcccaaggtgatatatcagtaggcttgtactcgtgggctcacaacttgttaccggtggtcagtagcaagagttgcaatcctcagtcaagggatctcattcttcagttggttgagaggatcttgtccaacccgaaggcccggaccatacttgtaaatggggctgttaggaagggagagcgattgattccacctccttcgtttgagatcttggttcgacttacattccctgcatcttccgcaagagtgaaggctacagagaggtttgaggcaatatatcccttgctgaaggaggtgtctcttgctggtgctcctgggagtaaggcaatgaagcaagtcacacagcaaatattcacttttgctctgaaagcagccggggaagaaaatcccttattagccaaggaagcggctgcaatcactatctgggctctcactcaaaatgttgattgctgcaagcattgggagaatctttataccgacaatttgaaagccagtgttgctgttcttaaaaagctcattggcgagtggaaggagcgttctgtcaagctgactcctgctgaaaccctcactctcaaccaaacaatgaagagcttgaggcaaaagaacgaggaagctcttactgagggaggtaatggtgtaagccagtccctatacaaagacgcagacaagtactgcaaggtgatcgctgggaaactctccagtggtggctgcatcaaaagtatagctaccactgctgcacttctagctgctactggttttgctggtgctgctgctctgtctgccaaccctgaggctatagcttacctaaagaacctggtggagtcattggacatcaacaaattcaccgagacagttatgacagcattgaagaactga

SEQ ID NO: 73258 - protein, 569 aa, Arabidopsis thaliana
  peptide (1)..(569): Ceres Seq. ID no. 4962174
MDPIESVEYNGFETTNGNSHNDDHGWKKVVYPKRNRKQKPADQAAATKNGVTGNLIPNGTLSNGGGNVFRSLEEQAEGRHLQILAAKKASDTADVSDGGRSKWRSNGYGDEGYDFDDSDSEIAVGKENLKAEEVKKPKVKKVKKPKVTLAEAAAKIDVSNLAAFLVEASIPLSHIPEAVYKTSADWINQRPIEALGAFVLWGLDCILADLAVQQGGVKGGKKGAQQASSKSQVAIFVAVAMVLRKKPDALTNILPTLRENPKYQGQDKLPVTVWMMAQASQGDISVGLYSWAHNLLPVVSSKSCNPQSRDLILQLVERILSNPKARTILVNGAVRKGERLIPPPSFEILVRLTFPASSARVKATERFEAIYPLLKEVSLAGAPGSKAMKQVTQQIFTFALKAAGEENPLLAKEAAAITIWALTQNVDCCKHWENLYTDNLKASVAVLKKLIGEWKERSVKLTPAETLTLNQTMKSLRQKNEEALTEGGNGVSQSLYKDADKYCKVIAGKLSSGGCIKSIATTAALLAATGFAGAAALSANPEAIAYLKNLVESLDINKFTETVMTALKN

SEQ ID NO: 73259 - protein, 329 aa, Arabidopsis thaliana
  peptide (1)..(329): Ceres Seq. ID no. 4962175
MVLRKKPDALTNILPTLRENPKYQGQDKLPVTVWMMAQASQGDISVGLYSWAHNLLPVVSSKSCNPQSRDLILQLVERILSNPKARTILVNGAVRKGERLIPPPSFEILVRLTFPASSARVKATERFEAIYPLLKEVSLAGAPGSKAMKQVTQQIFTFALKAAGEENPLLAKEAAAITIWALTQNVDCCKHWENLYTDNLKASVAVLKKLIGEWKERSVKLTPAETLTLNQTMKSLRQKNEEALTEGGNGVSQSLYKDADKYCKVIAGKLSSGGCIKSIATTAALLAATGFAGAAALSANPEAIAYLKNLVESLDINKFTETVMTALKN

SEQ ID NO: 73260 - protein, 295 aa, Arabidopsis thaliana
  peptide (1)..(295): Ceres Seq. ID no. 4962176
MMAQASQGDISVGLYSWAHNLLPVVSSKSCNPQSRDLILQLVERILSNPKARTILVNGAVRKGERLIPPPSFEILVRLTFPASSARVKATERFEAIYPLLKEVSLAGAPGSKAMKQVTQQIFTFALKAAGEENPLLAKEAAAITIWALTQNVDCCKHWENLYTDNLKASVAVLKKLIGEWKERSVKLTPAETLTLNQTMKSLRQKNEEALTEGGNGVSQSLYKDADKYCKVIAGKLSSGGCIKSIATTAALLAATGFAGAAALSANPEAIAYLKNLVESLDINKFTETVMTALKN

SEQ ID NO: 73261 - DNA, 2937 bp, Arabidopsis thaliana
  misc_feature (1)..(2937): Ceres Seq. ID no. 4962323
  misc_feature (1)..(2937): Ortholog of  Ceres SEQ ID NO 12586556 as cited in SEQ ID NO 64667
  misc_feature (1)..(2937): Ortholog of  Ceres SEQ ID NO 14316045 as cited in SEQ ID NO 66810
  misc_feature (1)..(2937): Ortholog of  Ceres SEQ ID NO 13660894 as cited in SEQ ID NO 67475
atggcgatgttgggtaatgttcttcatctctctccaatggtgttagccaccacgacgactacgaaaccatctcttctaaaccagagcaagtgtaccaaagccacgccatcgtcgttaaagaattgcaaaaccatagacgaactcaaaatgtttcatcgttcgctcacgaagcaaggacttgataatgatgtctccactataactaagcttgtagcacggagttgtgaattgggtactcgtgaaagtttgagctttgctaaagaagtgtttgagaacagtgaatcgtatggaacttgtttcatgtacaattctttgattcgaggatatgcatcttctgggttatgcaacgaagctatattgttatttcttcgaatgatgaattctgggatttctccagataagtacacgtttccttttggattgagtgcgtgtgcgaaaagcagagcgaaaggtaatgggattcagattcatgggttgattgtgaagatgggttatgcgaaagatttgtttgtgcagaactcgctggttcatttttacgccgagtgtggagagcttgatagtgcacgtaaggtgtttgatgaaatgtctgagagaaatgttgtttcttggacgagtatgatttgtggttacgcgaggcgggattttgctaaagacgctgttgatttgttttttcggatggtgagagatgaagaggtgactcctaattcggttacaatggtgtgtgtgatatcggcttgtgctaagctagaggatcttgagacgggcgagaaggtttatgcttttatccgtaattctggtattgaagttaatgatcttatggttagtgcactggttgatatgtacatgaaatgcaatgccattgatgtagcaaaacggctttttgatgaatatggtgctagtaatttggatttgtgcaatgcaatggcatcaaattatgtacggcaagggttaacgagggaggctttaggtgtttttaatctgatgatggactctggtgttagacctgataggatttcgatgttgagtgcgatttcatcttgttcacaattgagaaatatcttgtggggaaagagctgtcatgggtatgtattgaggaatgggtttgagagttgggataatatatgcaatgcgttgattgatatgtacatgaaatgtcataggcaagatactgcgtttaggatctttgatcggatgtcgaacaagacagtggtgacgtggaactcgattgttgctggctatgtagagaatggtgaggtggatgcagcctgggaaacatttgaaaccatgcctgagaaaaacattgtttcttggaatacgattatcagcggtctggtgcaaggaagtttgtttgaggaagcgattgaagttttctgttctatgcaaagccaagagggtgtcaatgcggatggtgtgacaatgatgagtattgcatctgcttgtgggcacttgggagctcttgatctagctaaatggatatattactacattgagaagaacggaattcagcttgatgtcagacttggtacaaccttagtagatatgttttctaggtgtggggatcctgaaagtgctatgtcaatttttaatagtttgacaaacagagatgtctcagcttggacagcggctataggagcaatggctatggcaggaaacgctgagcgagcaattgagcttttcgatgatatgattgaacaagggttgaaaccagatggggttgcgtttgttggagcactgacagcttgcagccatggtggattggtccaacagggtaaggaaattttctattcgatgttgaaacttcatggagtttctccagaagatgtgcactatggatgtatggttgatctgcttggtcgagcaggattgttagaggaagctgtgcaactcattgaggacatgcctatggagccaaacgatgtgatttggaactctcttttagctgcttgtcgtgttcagggaaatgtggagatggcagcttatgcagccgagaagatacaagtcttggctccagagagaactgggagttatgttcttctgtcaaatgtttatgcatcagctggaagatggaacgacatggcgaaagtgagactgagtatgaaggagaaagggttacgtaaaccgccagggactagttcaatacagattcgaggtaaaacccatgagttcacatcaggggacgagtcacaccctgaaatgccaaacatagaagcaatgctagatgaagttagtcaaagagcgagtcacttaggccatgtacctgatcttagtaatgttcttatggatgttgatgagaaagagaagatctttatgcttagcagacacagcgagaaacttgcaatggcctatggactcattagctcaaacaaaggcacaacaatccgaatagtcaagaacctaagagtatgctctgattgtcattcatttgcaaaatttgcatccaaagtatacaacagagaaatcattctaagagacaataaccggtttcattacatccgtcaagggaagtgttcttgcggtgacttctgtttgacggatgacgatctcgaagttctcaaaggttgtttagatctaggctttggtttcaactacgacgagatccctgcgctctgcaagactttacctgctttagagctttgctattcaatgagccaaaaaaatttagacgataagcatacaccatcactccaattgccaattggaagatctctagtcccgtcgtgtgataatccggatgatgtgaaagctagactcaaatgctgggcacaagccgttgcctcggctataggagcaatggctatggcaggaaacgctgagcgagcaaacgctaagggtttaatacagattcgaggtaagacccatgagttcacttcaggagatgagtctcaccctgaaatgccaaaaattggagcaatgctcaccatagagcaagcaacttag

SEQ ID NO: 73262 - protein, 978 aa, Arabidopsis thaliana
  peptide (1)..(978): Ceres Seq. ID no. 4962324
MAMLGNVLHLSPMVLATTTTTKPSLLNQSKCTKATPSSLKNCKTIDELKMFHRSLTKQGLDNDVSTITKLVARSCELGTRESLSFAKEVFENSESYGTCFMYNSLIRGYASSGLCNEAILLFLRMMNSGISPDKYTFPFGLSACAKSRAKGNGIQIHGLIVKMGYAKDLFVQNSLVHFYAECGELDSARKVFDEMSERNVVSWTSMICGYARRDFAKDAVDLFFRMVRDEEVTPNSVTMVCVISACAKLEDLETGEKVYAFIRNSGIEVNDLMVSALVDMYMKCNAIDVAKRLFDEYGASNLDLCNAMASNYVRQGLTREALGVFNLMMDSGVRPDRISMLSAISSCSQLRNILWGKSCHGYVLRNGFESWDNICNALIDMYMKCHRQDTAFRIFDRMSNKTVVTWNSIVAGYVENGEVDAAWETFETMPEKNIVSWNTIISGLVQGSLFEEAIEVFCSMQSQEGVNADGVTMMSIASACGHLGALDLAKWIYYYIEKNGIQLDVRLGTTLVDMFSRCGDPESAMSIFNSLTNRDVSAWTAAIGAMAMAGNAERAIELFDDMIEQGLKPDGVAFVGALTACSHGGLVQQGKEIFYSMLKLHGVSPEDVHYGCMVDLLGRAGLLEEAVQLIEDMPMEPNDVIWNSLLAACRVQGNVEMAAYAAEKIQVLAPERTGSYVLLSNVYASAGRWNDMAKVRLSMKEKGLRKPPGTSSIQIRGKTHEFTSGDESHPEMPNIEAMLDEVSQRASHLGHVPDLSNVLMDVDEKEKIFMLSRHSEKLAMAYGLISSNKGTTIRIVKNLRVCSDCHSFAKFASKVYNREIILRDNNRFHYIRQGKCSCGDFCLTDDDLEVLKGCLDLGFGFNYDEIPALCKTLPALELCYSMSQKNLDDKHTPSLQLPIGRSLVPSCDNPDDVKARLKCWAQAVASAIGAMAMAGNAERANAKGLIQIRGKTHEFTSGDESHPEMPKIGAMLTIEQAT

SEQ ID NO: 73263 - protein, 976 aa, Arabidopsis thaliana
  peptide (1)..(976): Ceres Seq. ID no. 4962325
MLGNVLHLSPMVLATTTTTKPSLLNQSKCTKATPSSLKNCKTIDELKMFHRSLTKQGLDNDVSTITKLVARSCELGTRESLSFAKEVFENSESYGTCFMYNSLIRGYASSGLCNEAILLFLRMMNSGISPDKYTFPFGLSACAKSRAKGNGIQIHGLIVKMGYAKDLFVQNSLVHFYAECGELDSARKVFDEMSERNVVSWTSMICGYARRDFAKDAVDLFFRMVRDEEVTPNSVTMVCVISACAKLEDLETGEKVYAFIRNSGIEVNDLMVSALVDMYMKCNAIDVAKRLFDEYGASNLDLCNAMASNYVRQGLTREALGVFNLMMDSGVRPDRISMLSAISSCSQLRNILWGKSCHGYVLRNGFESWDNICNALIDMYMKCHRQDTAFRIFDRMSNKTVVTWNSIVAGYVENGEVDAAWETFETMPEKNIVSWNTIISGLVQGSLFEEAIEVFCSMQSQEGVNADGVTMMSIASACGHLGALDLAKWIYYYIEKNGIQLDVRLGTTLVDMFSRCGDPESAMSIFNSLTNRDVSAWTAAIGAMAMAGNAERAIELFDDMIEQGLKPDGVAFVGALTACSHGGLVQQGKEIFYSMLKLHGVSPEDVHYGCMVDLLGRAGLLEEAVQLIEDMPMEPNDVIWNSLLAACRVQGNVEMAAYAAEKIQVLAPERTGSYVLLSNVYASAGRWNDMAKVRLSMKEKGLRKPPGTSSIQIRGKTHEFTSGDESHPEMPNIEAMLDEVSQRASHLGHVPDLSNVLMDVDEKEKIFMLSRHSEKLAMAYGLISSNKGTTIRIVKNLRVCSDCHSFAKFASKVYNREIILRDNNRFHYIRQGKCSCGDFCLTDDDLEVLKGCLDLGFGFNYDEIPALCKTLPALELCYSMSQKNLDDKHTPSLQLPIGRSLVPSCDNPDDVKARLKCWAQAVASAIGAMAMAGNAERANAKGLIQIRGKTHEFTSGDESHPEMPKIGAMLTIEQAT

SEQ ID NO: 73264 - protein, 966 aa, Arabidopsis thaliana
  peptide (1)..(966): Ceres Seq. ID no. 4962326
MVLATTTTTKPSLLNQSKCTKATPSSLKNCKTIDELKMFHRSLTKQGLDNDVSTITKLVARSCELGTRESLSFAKEVFENSESYGTCFMYNSLIRGYASSGLCNEAILLFLRMMNSGISPDKYTFPFGLSACAKSRAKGNGIQIHGLIVKMGYAKDLFVQNSLVHFYAECGELDSARKVFDEMSERNVVSWTSMICGYARRDFAKDAVDLFFRMVRDEEVTPNSVTMVCVISACAKLEDLETGEKVYAFIRNSGIEVNDLMVSALVDMYMKCNAIDVAKRLFDEYGASNLDLCNAMASNYVRQGLTREALGVFNLMMDSGVRPDRISMLSAISSCSQLRNILWGKSCHGYVLRNGFESWDNICNALIDMYMKCHRQDTAFRIFDRMSNKTVVTWNSIVAGYVENGEVDAAWETFETMPEKNIVSWNTIISGLVQGSLFEEAIEVFCSMQSQEGVNADGVTMMSIASACGHLGALDLAKWIYYYIEKNGIQLDVRLGTTLVDMFSRCGDPESAMSIFNSLTNRDVSAWTAAIGAMAMAGNAERAIELFDDMIEQGLKPDGVAFVGALTACSHGGLVQQGKEIFYSMLKLHGVSPEDVHYGCMVDLLGRAGLLEEAVQLIEDMPMEPNDVIWNSLLAACRVQGNVEMAAYAAEKIQVLAPERTGSYVLLSNVYASAGRWNDMAKVRLSMKEKGLRKPPGTSSIQIRGKTHEFTSGDESHPEMPNIEAMLDEVSQRASHLGHVPDLSNVLMDVDEKEKIFMLSRHSEKLAMAYGLISSNKGTTIRIVKNLRVCSDCHSFAKFASKVYNREIILRDNNRFHYIRQGKCSCGDFCLTDDDLEVLKGCLDLGFGFNYDEIPALCKTLPALELCYSMSQKNLDDKHTPSLQLPIGRSLVPSCDNPDDVKARLKCWAQAVASAIGAMAMAGNAERANAKGLIQIRGKTHEFTSGDESHPEMPKIGAMLTIEQAT

SEQ ID NO: 73265 - DNA, 2268 bp, Arabidopsis thaliana
  misc_feature (1)..(2268): Ceres Seq. ID no. 4962345
  misc_feature (1)..(2268): Ortholog of  Ceres SEQ ID NO 15169720 as cited in SEQ ID NO 54503
atgaatctatacgcgcacgatctttctcttctcgatttcaattacaacgtctccggtcccttcggcgagccactatctcaccgcttcctctctcctggccctttcttccaaggcgaagaagacgattaccgccgtaatacgagctacagtcacgacggagctaatggacgagaaccggacacagattcaagagcatctccgccgcatcgccacgacgggaggtctccgttacctctgggaatggattggagttctcctcctcgtcatttggaaggaagggacacggtttggccacatgatcatcgaactggttggagttactgtgtcactgtcccttcttgggttgaccttcccaagtcaagcgtttcagatcctgccgtgttttatagagtgcaagtagcgatacaatctcctgagggaatcacttctgctaggctggtacttaggaggttcaatgatttcttggagttatattcgtctattaaaaaggagtttgtgaagaaaagcttaccccaggcaccaccaaagaagattctgaggatgagaaaccagacacttttggaagagaggaggtgctctctggaagattggatgaatagacttttgtcagatattgatatatccagaagcgctcttatagctacatttcttgagcttgaagctgctgtcaggtcttattttaatgatgaatatcaagaaactgaagatacctctggggacattccgtcacttctacctaccaccatctctgatgtccctggtagttcatcagttaccatagatcatgacaatgattctgctgatgagacatctaatgcctcaacaatgaagcatgacgaagctaatctcaaaaatcttttctcaaggaattcaactgctgtagataatgtgactgattggcatgagttgatcacagaatatggacttctagatcaaagttcttttcaggaaaaagttgaacgtctttctagtactaatggagatgcagcaactggtaccgtaaccagagggggcatttctagtggagttggaattcagaggttggatggaagtgatagaaagtttcaagaactgaccattgaaagcattaaaaaaactcatgtaagcgattttgaggcgtcaactgctgtggaacctgatttagttaaccaaggcgctatggatattcatggtgaagcccatggaaacatgtatggtgcagtaggtggagatactgagactcagaaggatcttgctattgtatttcagtctgaggagcgacataaattaaagagggttattgatacattaaagcagagactggaaacagcaaaagctgacacggaagatcttatctcaaggctgaatcaggagttagccgttcgacaatttctgtcaacaaaggtaagagatttagaggttgaacttgaaacaactcgagagagctgcaagcaaggcatggagaaaacagtcctagatgaaaaggaaagatttactcaaattcagtgggatatggaggaactccgcaagcaatgcatggaaatggaatcgtttttaaactctataaaggacgagaaaacacatattgagactgcaaatgagtcacttgttcaagaaaatcagatgttgctgcagcagatcaatgatataagagaaaattttgagaattttcataaagaacacgaagagctggaagtgaaagcgaaagcagagctgaaagtcctcgttaaagaggtcaagtctctccgaaccactcaatcagatttgagacaagagcttagcggcataatgaaagaaaaactggagatggagagaattgttcaacgggagaaggatagagaagaaactgcaaaaaacgcagacaagaagttgctgcatgagtgtgatgttctacaaaaccggcttcaagaatgcaatgtcaagttcgacattgaagaggagggtaaattaataatggactcatcatctctatccgaagccatcgagctactagcaacatccgataaccgaataggtcttctaattgctgagacgcagcttctctcagaggaagtggaaaagctgaagctaacatcaggagggcatcgtggaacagacgatctagtaaggaagatgctgacagaggttctgattgataatgccagattaaggaagcaggttaactctgttcttcgttgctctttgtccggacatggaatatcagtcagagaagccggaacagaagtagatgacgaagaaggaagtattgatctagcaagaactgttatgagcaagatccttgagaaatga

SEQ ID NO: 73266 - protein, 755 aa, Arabidopsis thaliana
  peptide (1)..(755): Ceres Seq. ID no. 4962346
MNLYAHDLSLLDFNYNVSGPFGEPLSHRFLSPGPFFQGEEDDYRRNTSYSHDGANGREPDTDSRASPPHRHDGRSPLPLGMDWSSPPRHLEGRDTVWPHDHRTGWSYCVTVPSWVDLPKSSVSDPAVFYRVQVAIQSPEGITSARLVLRRFNDFLELYSSIKKEFVKKSLPQAPPKKILRMRNQTLLEERRCSLEDWMNRLLSDIDISRSALIATFLELEAAVRSYFNDEYQETEDTSGDIPSLLPTTISDVPGSSSVTIDHDNDSADETSNASTMKHDEANLKNLFSRNSTAVDNVTDWHELITEYGLLDQSSFQEKVERLSSTNGDAATGTVTRGGISSGVGIQRLDGSDRKFQELTIESIKKTHVSDFEASTAVEPDLVNQGAMDIHGEAHGNMYGAVGGDTETQKDLAIVFQSEERHKLKRVIDTLKQRLETAKADTEDLISRLNQELAVRQFLSTKVRDLEVELETTRESCKQGMEKTVLDEKERFTQIQWDMEELRKQCMEMESFLNSIKDEKTHIETANESLVQENQMLLQQINDIRENFENFHKEHEELEVKAKAELKVLVKEVKSLRTTQSDLRQELSGIMKEKLEMERIVQREKDREETAKNADKKLLHECDVLQNRLQECNVKFDIEEEGKLIMDSSSLSEAIELLATSDNRIGLLIAETQLLSEEVEKLKLTSGGHRGTDDLVRKMLTEVLIDNARLRKQVNSVLRCSLSGHGISVREAGTEVDDEEGSIDLARTVMSKILEK

SEQ ID NO: 73267 - protein, 675 aa, Arabidopsis thaliana
  peptide (1)..(675): Ceres Seq. ID no. 4962347
MDWSSPPRHLEGRDTVWPHDHRTGWSYCVTVPSWVDLPKSSVSDPAVFYRVQVAIQSPEGITSARLVLRRFNDFLELYSSIKKEFVKKSLPQAPPKKILRMRNQTLLEERRCSLEDWMNRLLSDIDISRSALIATFLELEAAVRSYFNDEYQETEDTSGDIPSLLPTTISDVPGSSSVTIDHDNDSADETSNASTMKHDEANLKNLFSRNSTAVDNVTDWHELITEYGLLDQSSFQEKVERLSSTNGDAATGTVTRGGISSGVGIQRLDGSDRKFQELTIESIKKTHVSDFEASTAVEPDLVNQGAMDIHGEAHGNMYGAVGGDTETQKDLAIVFQSEERHKLKRVIDTLKQRLETAKADTEDLISRLNQELAVRQFLSTKVRDLEVELETTRESCKQGMEKTVLDEKERFTQIQWDMEELRKQCMEMESFLNSIKDEKTHIETANESLVQENQMLLQQINDIRENFENFHKEHEELEVKAKAELKVLVKEVKSLRTTQSDLRQELSGIMKEKLEMERIVQREKDREETAKNADKKLLHECDVLQNRLQECNVKFDIEEEGKLIMDSSSLSEAIELLATSDNRIGLLIAETQLLSEEVEKLKLTSGGHRGTDDLVRKMLTEVLIDNARLRKQVNSVLRCSLSGHGISVREAGTEVDDEEGSIDLARTVMSKILEK

SEQ ID NO: 73268 - protein, 575 aa, Arabidopsis thaliana
  peptide (1)..(575): Ceres Seq. ID no. 4962348
MRNQTLLEERRCSLEDWMNRLLSDIDISRSALIATFLELEAAVRSYFNDEYQETEDTSGDIPSLLPTTISDVPGSSSVTIDHDNDSADETSNASTMKHDEANLKNLFSRNSTAVDNVTDWHELITEYGLLDQSSFQEKVERLSSTNGDAATGTVTRGGISSGVGIQRLDGSDRKFQELTIESIKKTHVSDFEASTAVEPDLVNQGAMDIHGEAHGNMYGAVGGDTETQKDLAIVFQSEERHKLKRVIDTLKQRLETAKADTEDLISRLNQELAVRQFLSTKVRDLEVELETTRESCKQGMEKTVLDEKERFTQIQWDMEELRKQCMEMESFLNSIKDEKTHIETANESLVQENQMLLQQINDIRENFENFHKEHEELEVKAKAELKVLVKEVKSLRTTQSDLRQELSGIMKEKLEMERIVQREKDREETAKNADKKLLHECDVLQNRLQECNVKFDIEEEGKLIMDSSSLSEAIELLATSDNRIGLLIAETQLLSEEVEKLKLTSGGHRGTDDLVRKMLTEVLIDNARLRKQVNSVLRCSLSGHGISVREAGTEVDDEEGSIDLARTVMSKILEK

SEQ ID NO: 73269 - DNA, 2766 bp, Arabidopsis thaliana
  misc_feature (1)..(2766): Ceres Seq. ID no. 4962377
  misc_feature (1)..(2766): Ortholog of  Ceres SEQ ID NO 14306557 as cited in SEQ ID NO 53442
atgttgcaacagcctctcagactagatatcaagagaaagtttgctcaacgatcagagagagtcaaatctgttgatctgcatcctactgaaccatggattctagcaagtttgtattctggaaccgtgtgtatttggaactaccagacacagacgattacaaaatccttcgaggtgacggaattgccagttaggtcggccaagtttattccgcgcaagcaatgggttgtggctggagcggatgatatgtacatccgtgtatacaattacaatacaatggacaaggtcaaagtatttgaggctcattcggattacattaggtgtgtagctgtccatccgacccttccatatgtgctgtcatcttctgatgatatgctcataaagctttgggactgggaaaacggttgggcttgtactcagatatttgagggacattcgcactatgtgatgcaagtggtatttaatccaaaagataccaacacttttgccagtgcttcgcttgatcgtaccataaagatatggaatcttggttccccagacccaaattttacactggatgctcatcagaaaggagtcaactgtgtagattatttcacagggggtgataaaccctatctaattaccggctctgatgatcatactgctaaggtatgggactatcaaaccaaaagttgtgtccagacgctagatgggcacacacacaatgtttctgccgtatgtttccatccagagcttccaataataatcacaggttctgaggatggcactgttcgcatttggcacgccactacctacaggctagaaaacacattaaattatggtctcgagagagtttgggccattggttacatcaaaagttctcggcgggttgtgattggatatgatgaaggaaccatcatggttaaacttggacgagaaattcctgtcgctagcatggacagtagcggaaaaatcatatgggctaagcataatgaaattcaaaccgcaaacatcaaaagtattggtgcaggttacgaggctactgatggagaaagacttcccttgtctgttaaagagttggggacctgtgatctttatccacaaagcttgaagcacaaccctaatgggaggtttgtcgtagtctgcggtgatggagagtacataatctacactgctttggcgtggagaaatagatcttttgggtctggcctggaatttgtttggtcatctgagggggaatgtgcggttagagaaagctcatcaaagataaagatattcagtaaaaatttccaggaaaggaagagtatccggcctactttctcagctgagaagatttttggaggaaccttgttagcaatgtgttcgaatgatttcatctgcttctatgattgggccgaatgcaggctgattcaacaaattgatgtcaccgtaaagaatctttattgggctgaaagtggtgatttagtagccattgctagtgatacgtcattctacatcttgaagtacaatcgagagttggtttcctcgcattttgatagtggaagaccaactgatgaagagggtgttgaggatgcttttgaggttctccacgagaatgatgaacgtgttaggaccggtatatgggttggggactgcttcatttacaacaactcttcttggaagcttaactattgtgttggaggcgaggtaaccacaatgtatcatttggaccgcccaatgtatttgttaggctatattgccaaccaaagccgggtttacttggtagacaaagaattcaatgtcataggatataccctgctgcttagcctgattgaatacaagactcttgtgatgcgaggcgatttggatagagccaatcaaattttacctacaattcctaaagagcagcataacaatgttgctcatttcttggaatctcggggaatgattgaagatgctttagaaattgcgacagatccagactacaaatttgatctggccatacaactgggtagacttgaaattgcaaaggaaattgctgaagaagtacagagcgagtctaaatggaagcagttaggagagttagccatgtcctcggggaagctgcaattggccgaggattgcatgaagtacgctatggatttgagtggtttgttactactatattcttctttgggagatgctgaaggggtgtcaaaacttgcatgccttgctaaggaacaggggaagaacaatgttgcctttctttgcttatttacgctgggtagattggaagattgtctgcagttattggtggagagtaaccggataccagaagctgctctgatggcacgttcttatcttccaagcaaagtttcggagatagtagctctatggagggaagatctcagcaaggttaatccaaaagcagctgaatctttagctgatcctgaagagtactcaaatctttttgaggattggcaagttgctctttctgttgaagcgaacactgcagagacaaggggagtttataccgctgcagaaaattatccatcccatgccgataaaccttccattacccttgtggaagcctttagaaacctgcaagttgaagcagaggaatcacttgaaaatggaaacatcgatcacgaggtagcagaagaaaacggtcatgtagagaatgaaggagatgaagaggaacaacaggaagaagaagtgaatgaagaagagggagttgtggatgcagactctacggacggtgctgtacttgttaatggaagtgagggtgaggaagagtggggtacgaataacaaaggaaacccatcagcctaa

SEQ ID NO: 73270 - protein, 921 aa, Arabidopsis thaliana
  peptide (1)..(921): Ceres Seq. ID no. 4962378
MLQQPLRLDIKRKFAQRSERVKSVDLHPTEPWILASLYSGTVCIWNYQTQTITKSFEVTELPVRSAKFIPRKQWVVAGADDMYIRVYNYNTMDKVKVFEAHSDYIRCVAVHPTLPYVLSSSDDMLIKLWDWENGWACTQIFEGHSHYVMQVVFNPKDTNTFASASLDRTIKIWNLGSPDPNFTLDAHQKGVNCVDYFTGGDKPYLITGSDDHTAKVWDYQTKSCVQTLDGHTHNVSAVCFHPELPIIITGSEDGTVRIWHATTYRLENTLNYGLERVWAIGYIKSSRRVVIGYDEGTIMVKLGREIPVASMDSSGKIIWAKHNEIQTANIKSIGAGYEATDGERLPLSVKELGTCDLYPQSLKHNPNGRFVVVCGDGEYIIYTALAWRNRSFGSGLEFVWSSEGECAVRESSSKIKIFSKNFQERKSIRPTFSAEKIFGGTLLAMCSNDFICFYDWAECRLIQQIDVTVKNLYWAESGDLVAIASDTSFYILKYNRELVSSHFDSGRPTDEEGVEDAFEVLHENDERVRTGIWVGDCFIYNNSSWKLNYCVGGEVTTMYHLDRPMYLLGYIANQSRVYLVDKEFNVIGYTLLLSLIEYKTLVMRGDLDRANQILPTIPKEQHNNVAHFLESRGMIEDALEIATDPDYKFDLAIQLGRLEIAKEIAEEVQSESKWKQLGELAMSSGKLQLAEDCMKYAMDLSGLLLLYSSLGDAEGVSKLACLAKEQGKNNVAFLCLFTLGRLEDCLQLLVESNRIPEAALMARSYLPSKVSEIVALWREDLSKVNPKAAESLADPEEYSNLFEDWQVALSVEANTAETRGVYTAAENYPSHADKPSITLVEAFRNLQVEAEESLENGNIDHEVAEENGHVENEGDEEEQQEEEVNEEEGVVDADSTDGAVLVNGSEGEEEWGTNNKGNPSA

SEQ ID NO: 73271 - protein, 840 aa, Arabidopsis thaliana
  peptide (1)..(840): Ceres Seq. ID no. 4962379
MYIRVYNYNTMDKVKVFEAHSDYIRCVAVHPTLPYVLSSSDDMLIKLWDWENGWACTQIFEGHSHYVMQVVFNPKDTNTFASASLDRTIKIWNLGSPDPNFTLDAHQKGVNCVDYFTGGDKPYLITGSDDHTAKVWDYQTKSCVQTLDGHTHNVSAVCFHPELPIIITGSEDGTVRIWHATTYRLENTLNYGLERVWAIGYIKSSRRVVIGYDEGTIMVKLGREIPVASMDSSGKIIWAKHNEIQTANIKSIGAGYEATDGERLPLSVKELGTCDLYPQSLKHNPNGRFVVVCGDGEYIIYTALAWRNRSFGSGLEFVWSSEGECAVRESSSKIKIFSKNFQERKSIRPTFSAEKIFGGTLLAMCSNDFICFYDWAECRLIQQIDVTVKNLYWAESGDLVAIASDTSFYILKYNRELVSSHFDSGRPTDEEGVEDAFEVLHENDERVRTGIWVGDCFIYNNSSWKLNYCVGGEVTTMYHLDRPMYLLGYIANQSRVYLVDKEFNVIGYTLLLSLIEYKTLVMRGDLDRANQILPTIPKEQHNNVAHFLESRGMIEDALEIATDPDYKFDLAIQLGRLEIAKEIAEEVQSESKWKQLGELAMSSGKLQLAEDCMKYAMDLSGLLLLYSSLGDAEGVSKLACLAKEQGKNNVAFLCLFTLGRLEDCLQLLVESNRIPEAALMARSYLPSKVSEIVALWREDLSKVNPKAAESLADPEEYSNLFEDWQVALSVEANTAETRGVYTAAENYPSHADKPSITLVEAFRNLQVEAEESLENGNIDHEVAEENGHVENEGDEEEQQEEEVNEEEGVVDADSTDGAVLVNGSEGEEEWGTNNKGNPSA

SEQ ID NO: 73272 - protein, 830 aa, Arabidopsis thaliana
  peptide (1)..(830): Ceres Seq. ID no. 4962380
MDKVKVFEAHSDYIRCVAVHPTLPYVLSSSDDMLIKLWDWENGWACTQIFEGHSHYVMQVVFNPKDTNTFASASLDRTIKIWNLGSPDPNFTLDAHQKGVNCVDYFTGGDKPYLITGSDDHTAKVWDYQTKSCVQTLDGHTHNVSAVCFHPELPIIITGSEDGTVRIWHATTYRLENTLNYGLERVWAIGYIKSSRRVVIGYDEGTIMVKLGREIPVASMDSSGKIIWAKHNEIQTANIKSIGAGYEATDGERLPLSVKELGTCDLYPQSLKHNPNGRFVVVCGDGEYIIYTALAWRNRSFGSGLEFVWSSEGECAVRESSSKIKIFSKNFQERKSIRPTFSAEKIFGGTLLAMCSNDFICFYDWAECRLIQQIDVTVKNLYWAESGDLVAIASDTSFYILKYNRELVSSHFDSGRPTDEEGVEDAFEVLHENDERVRTGIWVGDCFIYNNSSWKLNYCVGGEVTTMYHLDRPMYLLGYIANQSRVYLVDKEFNVIGYTLLLSLIEYKTLVMRGDLDRANQILPTIPKEQHNNVAHFLESRGMIEDALEIATDPDYKFDLAIQLGRLEIAKEIAEEVQSESKWKQLGELAMSSGKLQLAEDCMKYAMDLSGLLLLYSSLGDAEGVSKLACLAKEQGKNNVAFLCLFTLGRLEDCLQLLVESNRIPEAALMARSYLPSKVSEIVALWREDLSKVNPKAAESLADPEEYSNLFEDWQVALSVEANTAETRGVYTAAENYPSHADKPSITLVEAFRNLQVEAEESLENGNIDHEVAEENGHVENEGDEEEQQEEEVNEEEGVVDADSTDGAVLVNGSEGEEEWGTNNKGNPSA

SEQ ID NO: 73273 - DNA, 840 bp, Arabidopsis thaliana
  misc_feature (1)..(840): Ceres Seq. ID no. 4962547
  misc_feature (1)..(840): Ortholog of  Ceres SEQ ID NO 14316382 as cited in SEQ ID NO 57756
atggaattactttatgatacacataatgatataaacattctcatcactgatctcaagcttcattatatgactgattcggagcatggatattggtttgagaattacatgaacataaatacaaaattgctcgatctgtgtaacgcttttatgtccttgcttcgtcacatgaaccatggcattgtttgcttaaagttccttaggcataaattagaaatgaaatctgaggatctatgcactgagatttgttccgcacttgatagttggagggaaaatatcaccgcggaaatatcgaaatgccgcgaagttcttgggagatatgttgaatcattaaactttcataaagtcaagaattgtataaaagaagcaaaggttcttatgaaggcgttttatggggctaatgttcttacggcttatatctgcagtgtctttgtgatagttttgtcgaattccgacaaagatattttgcctatatatgtctggaagcaatcattgtggaaaaaagatttcttggatttgcagactatcgtaaacgtcaaaacaagagttaatatttccactgatggaacaatggtactccaagagttagaatctgttgctgccaaaatgaagaagatgtatcttacaattcaagaaggtgatgatcttgttcaagagtcctttaaggaatctattgaggaatgcaaagaagaagtcgagaaactggaacatgggttagatgaaatcttcaggaaaattggcaacttgtctgatgtaacctttaaaggacgtgaaatcattcgtgacggtttatttgattcaatgattagggagttaactcatggaccatacatatatgattaa

SEQ ID NO: 73274 - protein, 279 aa, Arabidopsis thaliana
  peptide (1)..(279): Ceres Seq. ID no. 4962548
MELLYDTHNDINILITDLKLHYMTDSEHGYWFENYMNINTKLLDLCNAFMSLLRHMNHGIVCLKFLRHKLEMKSEDLCTEICSALDSWRENITAEISKCREVLGRYVESLNFHKVKNCIKEAKVLMKAFYGANVLTAYICSVFVIVLSNSDKDILPIYVWKQSLWKKDFLDLQTIVNVKTRVNISTDGTMVLQELESVAAKMKKMYLTIQEGDDLVQESFKESIEECKEEVEKLEHGLDEIFRKIGNLSDVTFKGREIIRDGLFDSMIRELTHGPYIYD

SEQ ID NO: 73275 - protein, 257 aa, Arabidopsis thaliana
  peptide (1)..(257): Ceres Seq. ID no. 4962549
MTDSEHGYWFENYMNINTKLLDLCNAFMSLLRHMNHGIVCLKFLRHKLEMKSEDLCTEICSALDSWRENITAEISKCREVLGRYVESLNFHKVKNCIKEAKVLMKAFYGANVLTAYICSVFVIVLSNSDKDILPIYVWKQSLWKKDFLDLQTIVNVKTRVNISTDGTMVLQELESVAAKMKKMYLTIQEGDDLVQESFKESIEECKEEVEKLEHGLDEIFRKIGNLSDVTFKGREIIRDGLFDSMIRELTHGPYIYD

SEQ ID NO: 73276 - protein, 244 aa, Arabidopsis thaliana
  peptide (1)..(244): Ceres Seq. ID no. 4962550
MNINTKLLDLCNAFMSLLRHMNHGIVCLKFLRHKLEMKSEDLCTEICSALDSWRENITAEISKCREVLGRYVESLNFHKVKNCIKEAKVLMKAFYGANVLTAYICSVFVIVLSNSDKDILPIYVWKQSLWKKDFLDLQTIVNVKTRVNISTDGTMVLQELESVAAKMKKMYLTIQEGDDLVQESFKESIEECKEEVEKLEHGLDEIFRKIGNLSDVTFKGREIIRDGLFDSMIRELTHGPYIYD

SEQ ID NO: 73277 - DNA, 930 bp, Arabidopsis thaliana
  misc_feature (1)..(930): Ceres Seq. ID no. 4962587
  misc_feature (1)..(930): Ortholog of  Ceres SEQ ID NO 14312166 as cited in SEQ ID NO 59253
atgagaactcttttgcacaacttcaattttgtccctcaagattctccttattacaaaacgtccccttttcccacatcatccttcttcaacgttcgctttcccatcaagaacaaccaaatctcttgtaacaaagcaaagaatttgagaatggatccgtctaagggaatccaagaacagaggattgtgattccaaacagacacaacgagaagctggttggtctgcttcatgaaactggttctacagacatcgtagtcttgtgccatggctttcgatcaaacaagagtaaccaaataatgaataatgtggctgctgctatacagaaagaagggatcagcgcttttcgttttgatttctccgggaatggagagagtgaaggcagtttctattatggtaactataaccatgaagctgatgatttacattctgttgtccaatacttctctaacaagaaccgtgtggttcctataatcctcggtcacagtaagggaggtgatgttgtcctcctctacgcctccaagtatcatgatgtccgcaatgtaatcaatctctcgggacgttatgatcttaaaaagggtataagagagcgtcttggagaagattttttggaaagaattaagcaacaaggattcatcgatgttggagatggaaaatcggggtatcgtgttactgagaagagcttaatggacaggttaagcactgatattcatgaagcttgcctcaagattgacaaagagtgcagggtcttgacggttcatggatcggaggacgaggtaatacctgtggaagatgcgaaggagtttgcgaagatcataccaaaccacaagctggagattgtggaaggagctaatcatggttatactgagcaccaaagtcaattagtttcaacagttatggagttcataaagacagtcattgtgaagaacaactag

SEQ ID NO: 73278 - protein, 309 aa, Arabidopsis thaliana
  peptide (1)..(309): Ceres Seq. ID no. 4962588
MRTLLHNFNFVPQDSPYYKTSPFPTSSFFNVRFPIKNNQISCNKAKNLRMDPSKGIQEQRIVIPNRHNEKLVGLLHETGSTDIVVLCHGFRSNKSNQIMNNVAAAIQKEGISAFRFDFSGNGESEGSFYYGNYNHEADDLHSVVQYFSNKNRVVPIILGHSKGGDVVLLYASKYHDVRNVINLSGRYDLKKGIRERLGEDFLERIKQQGFIDVGDGKSGYRVTEKSLMDRLSTDIHEACLKIDKECRVLTVHGSEDEVIPVEDAKEFAKIIPNHKLEIVEGANHGYTEHQSQLVSTVMEFIKTVIVKNN

SEQ ID NO: 73279 - protein, 260 aa, Arabidopsis thaliana; identical to SEQ ID NO: 71070
  peptide (1)..(260): Ceres Seq. ID no. 4962589

SEQ ID NO: 73280 - protein, 211 aa, Arabidopsis thaliana; identical to SEQ ID NO: 71071
  peptide (1)..(211): Ceres Seq. ID no. 4962590

SEQ ID NO: 73281 - DNA, 3690 bp, Arabidopsis thaliana
  misc_feature (1)..(3690): Ceres Seq. ID no. 4962681
  misc_feature (1)..(3690): Ortholog of  Ceres SEQ ID NO 12586556 as cited in SEQ ID NO 64667
atgaaacgcatcaatgtcgatctccatcttctccattttccgaaattcagaaaatttcaatcacgaaaagtatcttcgtccctacccaaattggaactcgatcagaaatcaccacaggagacagttttcttacttggtcaggtacttgacacttacccagatatcagaacacttagaacagtccactcaagaatcattttggaagatctacgttgtaattcttctttgggtgttaaacttatgagagcttatgcttctctaaaagatgtagcgtcagcacgcaaggtgttcgacgaaattcctgagagaaacgtaattatcattaatgttatgattagaagctatgtgaataatgggttttacggtgaaggtgttaaagtgtttgggacgatgtgtggttgtaatgttagacctgatcattatactttcccgtgtgttctaaaggcgtgttcttgctctgggactattgtcattgggaggaaaattcatgggtctgctacaaaagttgggctctcttcgactttgtttgttgggaatggtttagtttctatgtatggaaagtgtggatttttatctgaagcaaggcttgtacttgacgagatgtctaggagagatgtggtgtcttggaactcgttggttgttgggtatgcgcaaaatcagagatttgatgatgctttggaggtttgtagggaaatggagtctgtgaagataagccatgatgctggtacgatggctagtctgttaccagcagtgagtaacactacaactgaaaacgttatgtatgttaaagatatgttttttaaaatggggaaaaagagtttggtttcatggaatgtgatgatcggtgtgtatatgaaaaatgcgatgcctgttgaagctgtggaattgtattcccgaatggaggctgatgggtttgaacctgatgcagtctcaatcacaagtgtattacctgcttgtggagatacctctgctctgtctcttggtaagaaaatccatggatacattgagaggaagaagctgataccaaatctgttgttagagaatgcactgatcgacatgtatgcaaaatgcggatgtttagagaaagctagagatgtgtttgagaacatgaagtcacgtgatgttgtgtcttggacagctatgatttcagcttatggattcagcggacgaggctgtgacgcagtggcattgttttcgaaattgcaagattcgggtctcgtccctgattcaattgcgtttgtcacaacgcttgctgcttgtagccatgcggggttactagaagaaggtaggagttgtttcaaactcatgacagatcattacaagatcactcctaggttagagcatttggcttgtatggtggatcttcttggccgagccgggaaagtgaaagaagcttacagatttatacaagatatgtcaatggaaccaaacgagagagtttggggagcattattaggagcttgcagggtgcattctgatacagacatcggtctactagcagctgataaacttttccagttagcacccgagcaatcgggttactacgtattgctttctaacatatacgcaaaggctggaagatgggaagaagtgactaacatcagaaacataatgaagagcaaagggttaaagaagaatcccggagcaagcaatgttgaggtcaacagaataattcatacattcttagtaggcgacaggtcacacccgcaatccgatgagatatacagagagctggatgttctagtaaagaaaatgaaagagttaggttatgttcctgattcagagtcagcgcttcacgatgtggaagaggaagataaagagacgcatttagctgttcacagtgagaaattagccattgtgtttgctctgatgaacactaaggaggaagaagaagacagtaataataccataagaataacgaagaatcttaggatatgtggagactgtcatgttgcagctaagcttatctcacagataacttctcgagagataatcatcagagacactaatagatttcatgtgttccggttcggtgtttgctcttgtgcttctgagctcagagatagagagagcgagaggttagagataacagtagttttaccgatgattgagtcggttatggccgttcgtctctccaccggattttgctcgtcgacggcgttactcctctttgttcattcgtctgaatcgtctcatgctaaatttgtagagtatcgtacagcaccgagctcggaggagggaggaaactgcttccattatgcgtcccgccgcgtttttcagcctcaacgtatccaccatattgatgggagtgggtttctgaagtacaacagtgactatataacaagaaaacacctacggaagaatcgaactcaagccacagctgagtatgtagattcagcttcagatccagaaaagcaaactggcaagtcaaggtatcatccttcagaagaaatcagagcctctttgccacagaatgatggagattccaggctttcacctgcagaaactactagaaccatcattgaggtgaacaataaaggaaccctgatgcttacaggttctattggtgatggagttcatgagaatattctctggccagatataccttatataacagatcaaaatggaaatttatactttcaagtaaaggaggatgaggacgtcatgcagtccgttacttctgaaaataattatgtgttgctaaagcatgtatcttctgacgatgttatggatgcattgcagcaagttatagttggttttgatacgatggagatgatcaaggaaatggagctgatgggactttctgatagtgactttgaaactgaagatgatgaaagtggagatgatgacagtgaggatacaggagaagacgaagatgaggaggaatgggttgctattttagaggatgaagatgaagacgatgatgatgatgatgatgatgatgaggatgatgatgattctgattctgatgaatcgctgggagactgggcaaatttggaaacaatgaggagttgtcatcccatgttttttgcaaagagaatgactgaggttgcttcaaatgatcctgttgattggatggatcagccgtctgctggccttgctatccagggacttttgagtcatatcttagtggaagattattcagatatccaaaagaaacttgctgatagcaattctacaactaacggaaacaaggatgcagaaaacttagtggacaagcttgaagacaatagtaaggcaggtggtgacgaatctgagatagattcatcacaggatgaaaaagcaagaaatgtggtggcgttttacaagctggagatgataagaattcagcttatcacagcacaaggggatcagactgaagttgaggtggaagatgtcagaaaagcacaacctgatgctattgctcatgcatcagctgaaatcataagccgtttagaagaatctggtgataaaataactgaagcactcaaatctctgtgttggagacataacagtattcaagcagaggaagtgaagctgattgggatagattccctaggttttgacctcaggctttgcgcaggagcaaagattgagtcattgcgatttgcattctcgacaagggcaacatcagaagaaaacgcagagggacaaataagaaaactattattcccgaaaacgaaccagtcgacacaaccaaaaccaaaatga

SEQ ID NO: 73282 - protein, 1229 aa, Arabidopsis thaliana
  peptide (1)..(1229): Ceres Seq. ID no. 4962682
MKRINVDLHLLHFPKFRKFQSRKVSSSLPKLELDQKSPQETVFLLGQVLDTYPDIRTLRTVHSRIILEDLRCNSSLGVKLMRAYASLKDVASARKVFDEIPERNVIIINVMIRSYVNNGFYGEGVKVFGTMCGCNVRPDHYTFPCVLKACSCSGTIVIGRKIHGSATKVGLSSTLFVGNGLVSMYGKCGFLSEARLVLDEMSRRDVVSWNSLVVGYAQNQRFDDALEVCREMESVKISHDAGTMASLLPAVSNTTTENVMYVKDMFFKMGKKSLVSWNVMIGVYMKNAMPVEAVELYSRMEADGFEPDAVSITSVLPACGDTSALSLGKKIHGYIERKKLIPNLLLENALIDMYAKCGCLEKARDVFENMKSRDVVSWTAMISAYGFSGRGCDAVALFSKLQDSGLVPDSIAFVTTLAACSHAGLLEEGRSCFKLMTDHYKITPRLEHLACMVDLLGRAGKVKEAYRFIQDMSMEPNERVWGALLGACRVHSDTDIGLLAADKLFQLAPEQSGYYVLLSNIYAKAGRWEEVTNIRNIMKSKGLKKNPGASNVEVNRIIHTFLVGDRSHPQSDEIYRELDVLVKKMKELGYVPDSESALHDVEEEDKETHLAVHSEKLAIVFALMNTKEEEEDSNNTIRITKNLRICGDCHVAAKLISQITSREIIIRDTNRFHVFRFGVCSCASELRDRESERLEITVVLPMIESVMAVRLSTGFCSSTALLLFVHSSESSHAKFVEYRTAPSSEEGGNCFHYASRRVFQPQRIHHIDGSGFLKYNSDYITRKHLRKNRTQATAEYVDSASDPEKQTGKSRYHPSEEIRASLPQNDGDSRLSPAETTRTIIEVNNKGTLMLTGSIGDGVHENILWPDIPYITDQNGNLYFQVKEDEDVMQSVTSENNYVLLKHVSSDDVMDALQQVIVGFDTMEMIKEMELMGLSDSDFETEDDESGDDDSEDTGEDEDEEEWVAILEDEDEDDDDDDDDDEDDDDSDSDESLGDWANLETMRSCHPMFFAKRMTEVASNDPVDWMDQPSAGLAIQGLLSHILVEDYSDIQKKLADSNSTTNGNKDAENLVDKLEDNSKAGGDESEIDSSQDEKARNVVAFYKLEMIRIQLITAQGDQTEVEVEDVRKAQPDAIAHASAEIISRLEESGDKITEALKSLCWRHNSIQAEEVKLIGIDSLGFDLRLCAGAKIESLRFAFSTRATSEENAEGQIRKLLFPKTNQSTQPKPK

SEQ ID NO: 73283 - protein, 1149 aa, Arabidopsis thaliana
  peptide (1)..(1149): Ceres Seq. ID no. 4962683
MRAYASLKDVASARKVFDEIPERNVIIINVMIRSYVNNGFYGEGVKVFGTMCGCNVRPDHYTFPCVLKACSCSGTIVIGRKIHGSATKVGLSSTLFVGNGLVSMYGKCGFLSEARLVLDEMSRRDVVSWNSLVVGYAQNQRFDDALEVCREMESVKISHDAGTMASLLPAVSNTTTENVMYVKDMFFKMGKKSLVSWNVMIGVYMKNAMPVEAVELYSRMEADGFEPDAVSITSVLPACGDTSALSLGKKIHGYIERKKLIPNLLLENALIDMYAKCGCLEKARDVFENMKSRDVVSWTAMISAYGFSGRGCDAVALFSKLQDSGLVPDSIAFVTTLAACSHAGLLEEGRSCFKLMTDHYKITPRLEHLACMVDLLGRAGKVKEAYRFIQDMSMEPNERVWGALLGACRVHSDTDIGLLAADKLFQLAPEQSGYYVLLSNIYAKAGRWEEVTNIRNIMKSKGLKKNPGASNVEVNRIIHTFLVGDRSHPQSDEIYRELDVLVKKMKELGYVPDSESALHDVEEEDKETHLAVHSEKLAIVFALMNTKEEEEDSNNTIRITKNLRICGDCHVAAKLISQITSREIIIRDTNRFHVFRFGVCSCASELRDRESERLEITVVLPMIESVMAVRLSTGFCSSTALLLFVHSSESSHAKFVEYRTAPSSEEGGNCFHYASRRVFQPQRIHHIDGSGFLKYNSDYITRKHLRKNRTQATAEYVDSASDPEKQTGKSRYHPSEEIRASLPQNDGDSRLSPAETTRTIIEVNNKGTLMLTGSIGDGVHENILWPDIPYITDQNGNLYFQVKEDEDVMQSVTSENNYVLLKHVSSDDVMDALQQVIVGFDTMEMIKEMELMGLSDSDFETEDDESGDDDSEDTGEDEDEEEWVAILEDEDEDDDDDDDDDEDDDDSDSDESLGDWANLETMRSCHPMFFAKRMTEVASNDPVDWMDQPSAGLAIQGLLSHILVEDYSDIQKKLADSNSTTNGNKDAENLVDKLEDNSKAGGDESEIDSSQDEKARNVVAFYKLEMIRIQLITAQGDQTEVEVEDVRKAQPDAIAHASAEIISRLEESGDKITEALKSLCWRHNSIQAEEVKLIGIDSLGFDLRLCAGAKIESLRFAFSTRATSEENAEGQIRKLLFPKTNQSTQPKPK

SEQ ID NO: 73284 - protein, 1119 aa, Arabidopsis thaliana
  peptide (1)..(1119): Ceres Seq. ID no. 4962684
MIRSYVNNGFYGEGVKVFGTMCGCNVRPDHYTFPCVLKACSCSGTIVIGRKIHGSATKVGLSSTLFVGNGLVSMYGKCGFLSEARLVLDEMSRRDVVSWNSLVVGYAQNQRFDDALEVCREMESVKISHDAGTMASLLPAVSNTTTENVMYVKDMFFKMGKKSLVSWNVMIGVYMKNAMPVEAVELYSRMEADGFEPDAVSITSVLPACGDTSALSLGKKIHGYIERKKLIPNLLLENALIDMYAKCGCLEKARDVFENMKSRDVVSWTAMISAYGFSGRGCDAVALFSKLQDSGLVPDSIAFVTTLAACSHAGLLEEGRSCFKLMTDHYKITPRLEHLACMVDLLGRAGKVKEAYRFIQDMSMEPNERVWGALLGACRVHSDTDIGLLAADKLFQLAPEQSGYYVLLSNIYAKAGRWEEVTNIRNIMKSKGLKKNPGASNVEVNRIIHTFLVGDRSHPQSDEIYRELDVLVKKMKELGYVPDSESALHDVEEEDKETHLAVHSEKLAIVFALMNTKEEEEDSNNTIRITKNLRICGDCHVAAKLISQITSREIIIRDTNRFHVFRFGVCSCASELRDRESERLEITVVLPMIESVMAVRLSTGFCSSTALLLFVHSSESSHAKFVEYRTAPSSEEGGNCFHYASRRVFQPQRIHHIDGSGFLKYNSDYITRKHLRKNRTQATAEYVDSASDPEKQTGKSRYHPSEEIRASLPQNDGDSRLSPAETTRTIIEVNNKGTLMLTGSIGDGVHENILWPDIPYITDQNGNLYFQVKEDEDVMQSVTSENNYVLLKHVSSDDVMDALQQVIVGFDTMEMIKEMELMGLSDSDFETEDDESGDDDSEDTGEDEDEEEWVAILEDEDEDDDDDDDDDEDDDDSDSDESLGDWANLETMRSCHPMFFAKRMTEVASNDPVDWMDQPSAGLAIQGLLSHILVEDYSDIQKKLADSNSTTNGNKDAENLVDKLEDNSKAGGDESEIDSSQDEKARNVVAFYKLEMIRIQLITAQGDQTEVEVEDVRKAQPDAIAHASAEIISRLEESGDKITEALKSLCWRHNSIQAEEVKLIGIDSLGFDLRLCAGAKIESLRFAFSTRATSEENAEGQIRKLLFPKTNQSTQPKPK

SEQ ID NO: 73285 - DNA, 711 bp, Arabidopsis thaliana
  misc_feature (1)..(711): Ceres Seq. ID no. 4962693
  misc_feature (1)..(711): Ortholog of  Ceres SEQ ID NO 12616212 as cited in SEQ ID NO 63390
atgtttgatgaacgtggatccttttctattgcccatccgtatcctggtccccttgcagctttattcaagtctataggaaagcttccagaaagggttgcttttactggagagattgttcctgttaaagagaaaagggttgatgcggtgaagaaatatgtcgaggaagctatacagtcagagatgaaagcgattagcgataccccaaattctgtccgtagtattttgaattcttccgatcagatgtatgcctcccggtgtgacagtcttagagccctgatcaatgatgcaaaggaaaaatacgttatctataagttcgttccaagctcatgtatgtttattgacccaaatggtacgaaagaaatagacttgaaggttttggaactgtcaaaaccagatccattagggacttggtcgacaaaacttgtggatggaatcaataagaacgaatcaagaagacgagctttgattcttttctgtttatattttcttgatataaacgcaagggatgcttatatggtatcagtggataggaaaggtttccacttgttggggaaggtaccgagtgaacaagaagctggagatgagtatcagtggagagagtttaggtttgagtttgaagaagaggtgaaagacgttgaagctttttgccaccaacttgtggaaatggaacaagaggttgtaagcaagtttactgaccataccggtttgtga

SEQ ID NO: 73286 - protein, 236 aa, Arabidopsis thaliana
  peptide (1)..(236): Ceres Seq. ID no. 4962694
MFDERGSFSIAHPYPGPLAALFKSIGKLPERVAFTGEIVPVKEKRVDAVKKYVEEAIQSEMKAISDTPNSVRSILNSSDQMYASRCDSLRALINDAKEKYVIYKFVPSSCMFIDPNGTKEIDLKVLELSKPDPLGTWSTKLVDGINKNESRRRALILFCLYFLDINARDAYMVSVDRKGFHLLGKVPSEQEAGDEYQWREFRFEFEEEVKDVEAFCHQLVEMEQEVVSKFTDHTGL

SEQ ID NO: 73287 - protein, 176 aa, Arabidopsis thaliana
  peptide (1)..(176): Ceres Seq. ID no. 4962695
MKAISDTPNSVRSILNSSDQMYASRCDSLRALINDAKEKYVIYKFVPSSCMFIDPNGTKEIDLKVLELSKPDPLGTWSTKLVDGINKNESRRRALILFCLYFLDINARDAYMVSVDRKGFHLLGKVPSEQEAGDEYQWREFRFEFEEEVKDVEAFCHQLVEMEQEVVSKFTDHTGL

SEQ ID NO: 73288 - protein, 156 aa, Arabidopsis thaliana
  peptide (1)..(156): Ceres Seq. ID no. 4962696
MYASRCDSLRALINDAKEKYVIYKFVPSSCMFIDPNGTKEIDLKVLELSKPDPLGTWSTKLVDGINKNESRRRALILFCLYFLDINARDAYMVSVDRKGFHLLGKVPSEQEAGDEYQWREFRFEFEEEVKDVEAFCHQLVEMEQEVVSKFTDHTGL

SEQ ID NO: 73289 - DNA, 1941 bp, Arabidopsis thaliana
  misc_feature (1)..(1941): Ceres Seq. ID no. 4962731
  misc_feature (1)..(1941): Ortholog of  Ceres SEQ ID NO 12586556 as cited in SEQ ID NO 64667
  misc_feature (1)..(1941): Ortholog of  Ceres SEQ ID NO 13660894 as cited in SEQ ID NO 67475
atgttgttcgatgaaatgcctaagagagattccgtgtcttggaacacaatgatttctgggtacacaagctgtgggaaattggaggatgcatggtgtttatttacatgtatgaagagatctggatctgatgttgatgggtatagttttagtaggttgttgaaagggattgcttctgtgaaaaggttcgatcttggagagcaagtgcatggtttggttataaagggaggttatgagtgtaatgtgtatgttggaagttcgcttgttgatatgtatgcgaaatgtgaaagagttgaagatgcttttgaggcttttaaggagatttcagagcctaactctgtttcatggaatgctttgattgctggatttgtgcaagtgcgagatatcaagactgctttttggttgttgggtttgatggagatgaaagctgctgtgactatggatgctggcactttcgctccacttcttactttgcttgatgatcctatgttttgtaacttgttaaagcaagttcatgctaaggttttgaaactcgggcttcaacacgagatcactatatgcaatgcgatgatcagctcttatgcagattgtgggtcagtatcagatgcaaagagagtttttgatggcttgggtggctcaaaagacttgatttcgtggaattcgatgattgcaggtttctctaaacatgagctaaaggaatctgcttttgaactgtttattcaaatgcaaagacattgggtcgaaaccgacatttatacttacaccggcttgttaagcgcttgctctggcgaagaacatcaaatttttgggaagtctttgcatggtatggtaataaagaagggattggaacaagtaacttctgcaacaaatgcattgatctctatgtatattcagtttcctacaggcaccatggaagatgctctgtctctatttgaatccttaaaatctaaggatcttatctcttggaattcgatcattacagggttcgcccagaagggtctcagcgaggatgcggtaaagttctttagctacttaagatcctcagagataaaagtcgacgattacgccttctctgcacttctcagatcatgctcggacctagcaacactccaattaggtcagcagatccacgcgctcgccactaaatcaggcttcgtatcaaacgagtttgtaatcagttctctgatcgtgatgtactcaaaatgtggcataatcgagagtgcacgaaaatgcttccaacagatttcctccaaacacagcacagtagcttggaacgcaatgattcttggatacgctcaacatggtttaggccaagtctctcttgatctcttctcccaaatgtgtaaccaaaacgtgaagctagaccatgtaaccttcacagcaatccttacagcttgtagccacaccggtttaatacaagagggactcgagttgcttaatttaatggaaccggtttacaaaatccaacctcgaatggaacattacgcagctgcagttgatctcttaggcagagcagggctcgtgaacaaagcgaaagagttaatcgaatcaatgccgttgaatcctgatccaatggtattgaaaactttccttggagtttgcagggcttgtggagagatcgaaatggctactcaagtggctaaccatttgctagagattgaaccagaagatcattttacgtatgtttcgttgtctcatatgtatagtgatctcaagaaatgggaagagaaagcaagtgtgaagaagatgatgaaggagagaggtgtaaagaaagttccaggttggagctggattgagattagaaatcaagttaaggcctttaatgctgaagatcgatcaaatcctctttgtcaagatatatatatgatgattaaagacttgactcaggaaatgcagtggcttgattctgataatggggttgatgcagattcacttcatgcttaa

SEQ ID NO: 73290 - protein, 646 aa, Arabidopsis thaliana
  peptide (1)..(646): Ceres Seq. ID no. 4962732
MLFDEMPKRDSVSWNTMISGYTSCGKLEDAWCLFTCMKRSGSDVDGYSFSRLLKGIASVKRFDLGEQVHGLVIKGGYECNVYVGSSLVDMYAKCERVEDAFEAFKEISEPNSVSWNALIAGFVQVRDIKTAFWLLGLMEMKAAVTMDAGTFAPLLTLLDDPMFCNLLKQVHAKVLKLGLQHEITICNAMISSYADCGSVSDAKRVFDGLGGSKDLISWNSMIAGFSKHELKESAFELFIQMQRHWVETDIYTYTGLLSACSGEEHQIFGKSLHGMVIKKGLEQVTSATNALISMYIQFPTGTMEDALSLFESLKSKDLISWNSIITGFAQKGLSEDAVKFFSYLRSSEIKVDDYAFSALLRSCSDLATLQLGQQIHALATKSGFVSNEFVISSLIVMYSKCGIIESARKCFQQISSKHSTVAWNAMILGYAQHGLGQVSLDLFSQMCNQNVKLDHVTFTAILTACSHTGLIQEGLELLNLMEPVYKIQPRMEHYAAAVDLLGRAGLVNKAKELIESMPLNPDPMVLKTFLGVCRACGEIEMATQVANHLLEIEPEDHFTYVSLSHMYSDLKKWEEKASVKKMMKERGVKKVPGWSWIEIRNQVKAFNAEDRSNPLCQDIYMMIKDLTQEMQWLDSDNGVDADSLHA

SEQ ID NO: 73291 - protein, 641 aa, Arabidopsis thaliana
  peptide (1)..(641): Ceres Seq. ID no. 4962733
MPKRDSVSWNTMISGYTSCGKLEDAWCLFTCMKRSGSDVDGYSFSRLLKGIASVKRFDLGEQVHGLVIKGGYECNVYVGSSLVDMYAKCERVEDAFEAFKEISEPNSVSWNALIAGFVQVRDIKTAFWLLGLMEMKAAVTMDAGTFAPLLTLLDDPMFCNLLKQVHAKVLKLGLQHEITICNAMISSYADCGSVSDAKRVFDGLGGSKDLISWNSMIAGFSKHELKESAFELFIQMQRHWVETDIYTYTGLLSACSGEEHQIFGKSLHGMVIKKGLEQVTSATNALISMYIQFPTGTMEDALSLFESLKSKDLISWNSIITGFAQKGLSEDAVKFFSYLRSSEIKVDDYAFSALLRSCSDLATLQLGQQIHALATKSGFVSNEFVISSLIVMYSKCGIIESARKCFQQISSKHSTVAWNAMILGYAQHGLGQVSLDLFSQMCNQNVKLDHVTFTAILTACSHTGLIQEGLELLNLMEPVYKIQPRMEHYAAAVDLLGRAGLVNKAKELIESMPLNPDPMVLKTFLGVCRACGEIEMATQVANHLLEIEPEDHFTYVSLSHMYSDLKKWEEKASVKKMMKERGVKKVPGWSWIEIRNQVKAFNAEDRSNPLCQDIYMMIKDLTQEMQWLDSDNGVDADSLHA

SEQ ID NO: 73292 - protein, 630 aa, Arabidopsis thaliana
  peptide (1)..(630): Ceres Seq. ID no. 4962734
MISGYTSCGKLEDAWCLFTCMKRSGSDVDGYSFSRLLKGIASVKRFDLGEQVHGLVIKGGYECNVYVGSSLVDMYAKCERVEDAFEAFKEISEPNSVSWNALIAGFVQVRDIKTAFWLLGLMEMKAAVTMDAGTFAPLLTLLDDPMFCNLLKQVHAKVLKLGLQHEITICNAMISSYADCGSVSDAKRVFDGLGGSKDLISWNSMIAGFSKHELKESAFELFIQMQRHWVETDIYTYTGLLSACSGEEHQIFGKSLHGMVIKKGLEQVTSATNALISMYIQFPTGTMEDALSLFESLKSKDLISWNSIITGFAQKGLSEDAVKFFSYLRSSEIKVDDYAFSALLRSCSDLATLQLGQQIHALATKSGFVSNEFVISSLIVMYSKCGIIESARKCFQQISSKHSTVAWNAMILGYAQHGLGQVSLDLFSQMCNQNVKLDHVTFTAILTACSHTGLIQEGLELLNLMEPVYKIQPRMEHYAAAVDLLGRAGLVNKAKELIESMPLNPDPMVLKTFLGVCRACGEIEMATQVANHLLEIEPEDHFTYVSLSHMYSDLKKWEEKASVKKMMKERGVKKVPGWSWIEIRNQVKAFNAEDRSNPLCQDIYMMIKDLTQEMQWLDSDNGVDADSLHA

SEQ ID NO: 73293 - DNA, 576 bp, Arabidopsis thaliana
  misc_feature (1)..(576): Ceres Seq. ID no. 4962845
  misc_feature (1)..(576): Ortholog of  Ceres SEQ ID NO 14311890 as cited in SEQ ID NO 51504
atggcagaggacgagctggtcgagattgttcctaatatgaacatggagcaactcaatttcatcagtggcgatttcggtcggttcattcctcagattccgacaaaggtgcctctgtggcttgcagtggcactgaagaggagaggaaaatgcactttccggcctccggggtggatgtctgttgataatttgactcagatcttggaagcagaacgtgaatctcagtcgacattccaggcattaccatttagttacgtggagattgccagactactttttgaccatgcacgtgacgatattccagacatgtatatggtgagatccctagtcgaggacatcagagatgtacggcttcacaaacttgagactaacttaggatcatttcaaggtacatctgcagtaaagatctctaatgtatcggcaatggaagtaaacatagtacgcccatttgtgataagagccttagaagcattttataagcatgacaagccagaggctgatgtagacagagacaccagaagtagtagacaacagcgtgaaaccaacaatgaaccaaggagacctctaaggcaacgctag

SEQ ID NO: 73294 - protein, 191 aa, Arabidopsis thaliana; identical to SEQ ID NO: 71770
  peptide (1)..(191): Ceres Seq. ID no. 4962846

SEQ ID NO: 73295 - protein, 179 aa, Arabidopsis thaliana; identical to SEQ ID NO: 71771
  peptide (1)..(179): Ceres Seq. ID no. 4962847

SEQ ID NO: 73296 - protein, 177 aa, Arabidopsis thaliana
  peptide (1)..(177): Ceres Seq. ID no. 4962848
MEQLNFISGDFGRFIPQIPTKVPLWLAVALKRRGKCTFRPPGWMSVDNLTQILEAERESQSTFQALPFSYVEIARLLFDHARDDIPDMYMVRSLVEDIRDVRLHKLETNLGSFQGTSAVKISNVSAMEVNIVRPFVIRALEAFYKHDKPEADVDRDTRSSRQQRETNNEPRRPLRQR

SEQ ID NO: 73297 - DNA, 2160 bp, Arabidopsis thaliana
  misc_feature (1)..(2160): Ceres Seq. ID no. 4962861
  misc_feature (1)..(2160): Ortholog of  Ceres SEQ ID NO 12586556 as cited in SEQ ID NO 64667
  misc_feature (1)..(2160): Ortholog of  Ceres SEQ ID NO 13660894 as cited in SEQ ID NO 67475
atgtcggaagcatcttgtcttgcttctcctttgctctacaccaattctggaatccattctgattctttctacgcttcgcttattgatagtgccactcataaagctcagctgaagcaaatccacgcacgtttacttgttttaggtttgcagttcagtggtttcttgatcaccaagctcattcacgctagctcttcctttggtgacattacttttgcacgccaagtgttcgacgatttacctcgtcctcaaatattcccttggaatgctataatcaggggttattcaaggaacaatcacttccaagatgctcttctcatgtattccaatatgcaactcgctcgtgtttctcctgattctttcactttccctcatcttcttaaagcttgcagcggtttgtctcatcttcagatgggtagattcgttcatgctcaggtgttcaggcttggatttgatgcggatgtgtttgttcagaacggtctcattgccttgtatgcgaaatgtaggcgtttgggatctgcgagaactgtgtttgaaggactgccattgccagagaggacgatagtctcatggactgctatcgtttcagcttatgctcagaacggtgagcctatggaggctcttgagatttttagtcagatgaggaagatggatgtgaagcctgactgggtagctcttgtcagcgttctcaatgctttcacttgcttgcaggatttgaagcaagggagatctattcatgcttctgttgtgaagatgggtcttgaaatagagcctgacttactcatctctctcaacaccatgtatgcaaaatgtggccaagttgcaactgccaagattctgtttgataagatgaagtcacctaacctgattttgtggaacgccatgatctctggctatgcgaagaacggttatgccagggaagctattgatatgtttcatgagatgatcaataaagatgttagacccgacaccatctctataacatctgccatttcggcttgcgctcaagtaggttctcttgagcaggctcgcagtatgtatgaatatgtaggcagaagtgactacagggatgacgttttcataagcagcgcattaatcgatatgtttgctaaatgtggaagtgtagaaggcgcaaggttggtttttgaccgaacacttgacagggatgttgtggtgtggagtgctatgattgttgggtatggattgcacgggcgggcaagagaagcaatcagtctgtaccgtgcaatggagcgtggtggagtacatcccaatgacgtcacttttctggggcttctcatggcctgtaaccattcaggcatggtaagagaaggctggtggtttttcaaccggatggcggatcacaaaataaatccacaacagcaacattatgcatgtgtcattgatcttctcgggcgtgctggtcatctggatcaagcttatgaagtgatcaaatgcatgccggtccagcccggtgtaacggtttggggagcactcctaagcgcttgcaagaagcatcgccacgttgaactgggagaatatgcagctcaacagcttttctcaatagacccatccaacacaggccactatgtacagctctctaatctgtatgctgcagcacgtttgtgggaccgtgttgcagaggtgcgagtgagaatgaaggagaaaggattgaacaaagacgttggatgtagctgggttgaagtaaggggaaggttggaggctttccgagtgggtgataagtcacatccgagatatgaagagatagagagacaagtagagtggatagagagtagattgaaggaaggtggatttgtggctaacaaggatgcttcattgcacgatctcaacgatgaagaagctgaagagactttgtgcagccacagcgagaggatcgcgattgcgtatgggcttataagtacaccccaaggcacaccactgcggatcacaaagaatctgagagcatgcgtaaactgtcatgctgctacaaagcttatctcgaagctagtggacagagagattgttgtgagagatacaaataggttccaccattttaaggatggagtttgttcctgtggtgattattgtcttaaggttgaaaagcttacttatttaatcatcaatttaaagattctgacaaacacaatagaaaaatctgtgagataa

SEQ ID NO: 73298 - protein, 719 aa, Arabidopsis thaliana
  peptide (1)..(719): Ceres Seq. ID no. 4962862
MSEASCLASPLLYTNSGIHSDSFYASLIDSATHKAQLKQIHARLLVLGLQFSGFLITKLIHASSSFGDITFARQVFDDLPRPQIFPWNAIIRGYSRNNHFQDALLMYSNMQLARVSPDSFTFPHLLKACSGLSHLQMGRFVHAQVFRLGFDADVFVQNGLIALYAKCRRLGSARTVFEGLPLPERTIVSWTAIVSAYAQNGEPMEALEIFSQMRKMDVKPDWVALVSVLNAFTCLQDLKQGRSIHASVVKMGLEIEPDLLISLNTMYAKCGQVATAKILFDKMKSPNLILWNAMISGYAKNGYAREAIDMFHEMINKDVRPDTISITSAISACAQVGSLEQARSMYEYVGRSDYRDDVFISSALIDMFAKCGSVEGARLVFDRTLDRDVVVWSAMIVGYGLHGRAREAISLYRAMERGGVHPNDVTFLGLLMACNHSGMVREGWWFFNRMADHKINPQQQHYACVIDLLGRAGHLDQAYEVIKCMPVQPGVTVWGALLSACKKHRHVELGEYAAQQLFSIDPSNTGHYVQLSNLYAAARLWDRVAEVRVRMKEKGLNKDVGCSWVEVRGRLEAFRVGDKSHPRYEEIERQVEWIESRLKEGGFVANKDASLHDLNDEEAEETLCSHSERIAIAYGLISTPQGTPLRITKNLRACVNCHAATKLISKLVDREIVVRDTNRFHHFKDGVCSCGDYCLKVEKLTYLIINLKILTNTIEKSVR

SEQ ID NO: 73299 - protein, 614 aa, Arabidopsis thaliana
  peptide (1)..(614): Ceres Seq. ID no. 4962863
MYSNMQLARVSPDSFTFPHLLKACSGLSHLQMGRFVHAQVFRLGFDADVFVQNGLIALYAKCRRLGSARTVFEGLPLPERTIVSWTAIVSAYAQNGEPMEALEIFSQMRKMDVKPDWVALVSVLNAFTCLQDLKQGRSIHASVVKMGLEIEPDLLISLNTMYAKCGQVATAKILFDKMKSPNLILWNAMISGYAKNGYAREAIDMFHEMINKDVRPDTISITSAISACAQVGSLEQARSMYEYVGRSDYRDDVFISSALIDMFAKCGSVEGARLVFDRTLDRDVVVWSAMIVGYGLHGRAREAISLYRAMERGGVHPNDVTFLGLLMACNHSGMVREGWWFFNRMADHKINPQQQHYACVIDLLGRAGHLDQAYEVIKCMPVQPGVTVWGALLSACKKHRHVELGEYAAQQLFSIDPSNTGHYVQLSNLYAAARLWDRVAEVRVRMKEKGLNKDVGCSWVEVRGRLEAFRVGDKSHPRYEEIERQVEWIESRLKEGGFVANKDASLHDLNDEEAEETLCSHSERIAIAYGLISTPQGTPLRITKNLRACVNCHAATKLISKLVDREIVVRDTNRFHHFKDGVCSCGDYCLKVEKLTYLIINLKILTNTIEKSVR

SEQ ID NO: 73300 - protein, 610 aa, Arabidopsis thaliana
  peptide (1)..(610): Ceres Seq. ID no. 4962864
MQLARVSPDSFTFPHLLKACSGLSHLQMGRFVHAQVFRLGFDADVFVQNGLIALYAKCRRLGSARTVFEGLPLPERTIVSWTAIVSAYAQNGEPMEALEIFSQMRKMDVKPDWVALVSVLNAFTCLQDLKQGRSIHASVVKMGLEIEPDLLISLNTMYAKCGQVATAKILFDKMKSPNLILWNAMISGYAKNGYAREAIDMFHEMINKDVRPDTISITSAISACAQVGSLEQARSMYEYVGRSDYRDDVFISSALIDMFAKCGSVEGARLVFDRTLDRDVVVWSAMIVGYGLHGRAREAISLYRAMERGGVHPNDVTFLGLLMACNHSGMVREGWWFFNRMADHKINPQQQHYACVIDLLGRAGHLDQAYEVIKCMPVQPGVTVWGALLSACKKHRHVELGEYAAQQLFSIDPSNTGHYVQLSNLYAAARLWDRVAEVRVRMKEKGLNKDVGCSWVEVRGRLEAFRVGDKSHPRYEEIERQVEWIESRLKEGGFVANKDASLHDLNDEEAEETLCSHSERIAIAYGLISTPQGTPLRITKNLRACVNCHAATKLISKLVDREIVVRDTNRFHHFKDGVCSCGDYCLKVEKLTYLIINLKILTNTIEKSVR

SEQ ID NO: 73301 - DNA, 1152 bp, Arabidopsis thaliana
  misc_feature (1)..(1152): Ceres Seq. ID no. 4963002
  misc_feature (1)..(1152): Ortholog of  Ceres SEQ ID NO 15177514 as cited in SEQ ID NO 0
atgaccacctgtccgcttcccgatggtcatgatcctcgtctggtgggtccgaggatagaatcggcgttggaaaagtcaggccagtggcgctgccgccggggtcctctctttatcactgccgttggcaacctaacgcagatccctggtggtgacgaatccctgcgaacgctttcttccactggaatcgctcttaaacatgcccacgatattcaaagggatttgtttgagtggactgatgagaatcttgctccggctactataatgctcataaccagttctaaggacctgaaaactttagctagtacactttacgacatagagaagaagggatacagaattcttctcgcatatcctccacgagctctagctctccggctaagcattcttaaagatgttcctgaagagttgttctgggatagcttaatggcagatgctgctatggaggataacaaacaggagcaacaagacttgttcttcaggactacaagcgcagtgaaaccggtgaaactcccttgttttgctcagaatgcgattttggtgcccaaagctttgaagatttcaccacgcatctcaagagtgaaaaacatgcgtattctggaggctagtcataacaatgtggatcgactagaccctgctaacatggtgctgggtcgatcaaaggcaagttttaatatctcatctcaagagtgggacttgctggttactcaagatatagcgtatcatacttcttctcctctaacactaaaggcaacattgactttggatttactgactttggttgatgctaaaacattcaaggaactctgcaagatgttggaatttgatggtaaaacatgcaacaagggaaacggttctaccatggtgaagattcgaccagaggagggaaacccctgttttacgtctgttaccatggaagaatgcatgatgatgatgagaaagttaaagactgaggaagctgctgtagaagaggagaaccccgagaagcccattcagtccatccaagtgcaacggtcatctgcaacagaacaagaagacaaaccagttagttctgtggctaagagagcgtcaaggaaaagcatctccagctgttcaagtcaagatacgatcttaactaataggctcaaatgtttagaggatgaggataaaatgtaa

SEQ ID NO: 73302 - protein, 383 aa, Arabidopsis thaliana
  peptide (1)..(383): Ceres Seq. ID no. 4963003
MTTCPLPDGHDPRLVGPRIESALEKSGQWRCRRGPLFITAVGNLTQIPGGDESLRTLSSTGIALKHAHDIQRDLFEWTDENLAPATIMLITSSKDLKTLASTLYDIEKKGYRILLAYPPRALALRLSILKDVPEELFWDSLMADAAMEDNKQEQQDLFFRTTSAVKPVKLPCFAQNAILVPKALKISPRISRVKNMRILEASHNNVDRLDPANMVLGRSKASFNISSQEWDLLVTQDIAYHTSSPLTLKATLTLDLLTLVDAKTFKELCKMLEFDGKTCNKGNGSTMVKIRPEEGNPCFTSVTMEECMMMMRKLKTEEAAVEEENPEKPIQSIQVQRSSATEQEDKPVSSVAKRASRKSISSCSSQDTILTNRLKCLEDEDKM

SEQ ID NO: 73303 - protein, 296 aa, Arabidopsis thaliana
  peptide (1)..(296): Ceres Seq. ID no. 4963004
MLITSSKDLKTLASTLYDIEKKGYRILLAYPPRALALRLSILKDVPEELFWDSLMADAAMEDNKQEQQDLFFRTTSAVKPVKLPCFAQNAILVPKALKISPRISRVKNMRILEASHNNVDRLDPANMVLGRSKASFNISSQEWDLLVTQDIAYHTSSPLTLKATLTLDLLTLVDAKTFKELCKMLEFDGKTCNKGNGSTMVKIRPEEGNPCFTSVTMEECMMMMRKLKTEEAAVEEENPEKPIQSIQVQRSSATEQEDKPVSSVAKRASRKSISSCSSQDTILTNRLKCLEDEDKM

SEQ ID NO: 73304 - protein, 242 aa, Arabidopsis thaliana
  peptide (1)..(242): Ceres Seq. ID no. 4963005
MADAAMEDNKQEQQDLFFRTTSAVKPVKLPCFAQNAILVPKALKISPRISRVKNMRILEASHNNVDRLDPANMVLGRSKASFNISSQEWDLLVTQDIAYHTSSPLTLKATLTLDLLTLVDAKTFKELCKMLEFDGKTCNKGNGSTMVKIRPEEGNPCFTSVTMEECMMMMRKLKTEEAAVEEENPEKPIQSIQVQRSSATEQEDKPVSSVAKRASRKSISSCSSQDTILTNRLKCLEDEDKM

SEQ ID NO: 73305 - DNA, 1827 bp, Arabidopsis thaliana
  misc_feature (1)..(1827): Ceres Seq. ID no. 4963044
  misc_feature (1)..(1827): Ortholog of  Ceres SEQ ID NO 14316344 as cited in SEQ ID NO 60120
atgcttcccagtgatgctgctgacccttcagtttgctatgttcctaatccttacaatccctaccagtattacaatgtatatgggagtggtcaagagtggactgactacccagcttacacaaatcctgagggtgttgacatgaattctggaatttatggagagaatgggactgttgtgtatcctcagggttatgggtatgcagcgtatccttactcgccagcaactagccctgctccacagcttggcggggaagggcagttgtacggtgctcagcagtatcagtatcctaactattttccaaacagtggaccgtatgcttcatctgtggctacacctacccagccggatctctctgcaaacaaacctgctggtgtgaagacactacctgcggatagcaataatgttgcttctgctgctggtatcacaaaaggaagtaatggatcagctccagtgaaaccaactaaccaggctacccttaacacctcaagtaatttgtatggtatgggtgctccaggaggaggtttggctgctggttatcaggaccccaggtatgcctatgaagggtattatgctcctgtgccgtggcacgatggctctaagtactctgatgtgcagagacctgtttctggtagtggagttgcatcctcctattctaagtctagcacagtaccttcatcgaggaatcaaaactaccgctcaaattctcactacacgagcgtgcaccagccttcatcagtgactggctatggtacagctcaggggtactacaacaggatgtatcagaacaagttatatggtcagtatggtagcacagggagatctgctttgggttatggttcatctgggtatgattcaagaacaaatggaagaggatgggcggccacagacaacaaatacagaagctggggcaggggtaacagttactattacggaaatgagaacaatgtagatggtttgaatgaacttaacaggggacctagagctaagggcacaaagaaccagaagggaaatctagatgatagcttagaggttaaggagcagactggagaatcaaatgtaactgaggttggggaggcggataacacatgtgttgttcctgacagagaacagtacaataaagaagatttcccagtggattatgcaaatgccatgttctttatcatcaagtcatacagtgaagatgatgtgcacaagagcattaaatataatgtttgggctagcacaccaaatggaaacaagaagcttgctgcagcataccaggaagctcaacagaaagctggcggctgtcccatctttctgtttttctcggtcaatgcaagtggacaatttgttggtcttgctgaaatgacaggaccagttgatttcaacacaaatgtggagtactggcagcaagataagtggaccggctctttccccctcaagtggcatattgtgaaggatgtgccaaacagtttactgaagcatattactttagagaacaatgagaacaaacctgttaccaacagcagagacacacaagaggttaagttggagcaaggtttgaagattgtgaaaattttcaaggagcatagcagcaagacttgcattttggatgatttctcattctacgaggttcgacagaagactatcttggagaagaaagccaagcaaacccagaaacaggtaagcgaggagaaggtaaccgatgaaaagaaggaatctgcaactgcagagtcagcgagcaaggaatctcctgcagctgttcaaacgtccagtgatgttaaggttgctgagaatgggtctgttgctaaaccagtcacaggcgatgtggtggcaaatggttgctaa

SEQ ID NO: 73306 - protein, 608 aa, Arabidopsis thaliana; identical to SEQ ID NO: 45804
  peptide (1)..(608): Ceres Seq. ID no. 4963045

SEQ ID NO: 73307 - protein, 562 aa, Arabidopsis thaliana; identical to SEQ ID NO: 45805
  peptide (1)..(562): Ceres Seq. ID no. 4963046

SEQ ID NO: 73308 - protein, 441 aa, Arabidopsis thaliana
  peptide (1)..(441): Ceres Seq. ID no. 4963047
MGAPGGGLAAGYQDPRYAYEGYYAPVPWHDGSKYSDVQRPVSGSGVASSYSKSSTVPSSRNQNYRSNSHYTSVHQPSSVTGYGTAQGYYNRMYQNKLYGQYGSTGRSALGYGSSGYDSRTNGRGWAATDNKYRSWGRGNSYYYGNENNVDGLNELNRGPRAKGTKNQKGNLDDSLEVKEQTGESNVTEVGEADNTCVVPDREQYNKEDFPVDYANAMFFIIKSYSEDDVHKSIKYNVWASTPNGNKKLAAAYQEAQQKAGGCPIFLFFSVNASGQFVGLAEMTGPVDFNTNVEYWQQDKWTGSFPLKWHIVKDVPNSLLKHITLENNENKPVTNSRDTQEVKLEQGLKIVKIFKEHSSKTCILDDFSFYEVRQKTILEKKAKQTQKQVSEEKVTDEKKESATAESASKESPAAVQTSSDVKVAENGSVAKPVTGDVVANGC

SEQ ID NO: 73309 - DNA, 1167 bp, Arabidopsis thaliana
  misc_feature (1)..(1167): Ceres Seq. ID no. 4963082
  misc_feature (1)..(1167): Ortholog of  Ceres SEQ ID NO 15170501 as cited in SEQ ID NO 52774
atgtattttcattattatggacaacttctacatcagcaaaatatgctacaagattatgtgcggacaggtacgtactatgccgcagtcatggagaatcattcagattttgctggtcgtgttgtggtcgatgtgggtgctgggagtggcattttgtcaatgtttgcggcccaggctggtgccaaacatgtgtatgcggttgaagcatcagaaatggctgagtatgctcgtaagctgattgctggaaacccattattcgctgaccgaatcacagtcatcaagggtaaagttgaggatatcgagttgcctgagaaagcagatattttgatttctgaaccgatgggcaccttattggtcaacgagagaatgttagaatcgtatgtaattgctagggatcgttttatgactccaaaaggcaaaatgtttcccactgtcggaaggattcacatggcacctttttctgatgaattcttatttattgagatggcaaataaggctatgttttggcaacagcagaactattatggagttgatctgacacctctatatggatcagcgcaccaaggttatttttctcagcccgtggttgatgcatttgatccgagattattagtggcttctccgatgttccacatgatagatttcactcaaatgaaggaagaagatttttacgagattgatatcccgttgaagttcactgcttccatgtgcaccagaatgcatggacttgcctgctggtttgacgttctctttgacgggagcacggtccaaagatggctcacaactgctcccggtgcacctacaacgcattggtaccaaatcagatgtgttctctcgcagcctatttacgtaatggcaggtcaagagatcactggtagacttcatttgatagcccacagtgctcagagttacaccatagatctaactttatcagctaaaatgtgggggcccggtgcaagtcaaggcggaattctccaatcatcgacatgcaaattcgatctgaaagaaccttattatagaatgtctcagccacaagcataccctgttgcacaagaaccacctctacaaccacaaccagagctaagtacacaggacatacaaacaccaaacgatgaattagaagaagagttactgcaacaattgccacagaacccaagtgcccagctctaa

SEQ ID NO: 73310 - protein, 388 aa, Arabidopsis thaliana
  peptide (1)..(388): Ceres Seq. ID no. 4963083
MYFHYYGQLLHQQNMLQDYVRTGTYYAAVMENHSDFAGRVVVDVGAGSGILSMFAAQAGAKHVYAVEASEMAEYARKLIAGNPLFADRITVIKGKVEDIELPEKADILISEPMGTLLVNERMLESYVIARDRFMTPKGKMFPTVGRIHMAPFSDEFLFIEMANKAMFWQQQNYYGVDLTPLYGSAHQGYFSQPVVDAFDPRLLVASPMFHMIDFTQMKEEDFYEIDIPLKFTASMCTRMHGLACWFDVLFDGSTVQRWLTTAPGAPTTHWYQIRCVLSQPIYVMAGQEITGRLHLIAHSAQSYTIDLTLSAKMWGPGASQGGILQSSTCKFDLKEPYYRMSQPQAYPVAQEPPLQPQPELSTQDIQTPNDELEEELLQQLPQNPSAQL

SEQ ID NO: 73311 - protein, 374 aa, Arabidopsis thaliana
  peptide (1)..(374): Ceres Seq. ID no. 4963084
MLQDYVRTGTYYAAVMENHSDFAGRVVVDVGAGSGILSMFAAQAGAKHVYAVEASEMAEYARKLIAGNPLFADRITVIKGKVEDIELPEKADILISEPMGTLLVNERMLESYVIARDRFMTPKGKMFPTVGRIHMAPFSDEFLFIEMANKAMFWQQQNYYGVDLTPLYGSAHQGYFSQPVVDAFDPRLLVASPMFHMIDFTQMKEEDFYEIDIPLKFTASMCTRMHGLACWFDVLFDGSTVQRWLTTAPGAPTTHWYQIRCVLSQPIYVMAGQEITGRLHLIAHSAQSYTIDLTLSAKMWGPGASQGGILQSSTCKFDLKEPYYRMSQPQAYPVAQEPPLQPQPELSTQDIQTPNDELEEELLQQLPQNPSAQL

SEQ ID NO: 73312 - protein, 359 aa, Arabidopsis thaliana
  peptide (1)..(359): Ceres Seq. ID no. 4963085
MENHSDFAGRVVVDVGAGSGILSMFAAQAGAKHVYAVEASEMAEYARKLIAGNPLFADRITVIKGKVEDIELPEKADILISEPMGTLLVNERMLESYVIARDRFMTPKGKMFPTVGRIHMAPFSDEFLFIEMANKAMFWQQQNYYGVDLTPLYGSAHQGYFSQPVVDAFDPRLLVASPMFHMIDFTQMKEEDFYEIDIPLKFTASMCTRMHGLACWFDVLFDGSTVQRWLTTAPGAPTTHWYQIRCVLSQPIYVMAGQEITGRLHLIAHSAQSYTIDLTLSAKMWGPGASQGGILQSSTCKFDLKEPYYRMSQPQAYPVAQEPPLQPQPELSTQDIQTPNDELEEELLQQLPQNPSAQL

SEQ ID NO: 73313 - DNA, 1701 bp, Arabidopsis thaliana
  misc_feature (1)..(1701): Ceres Seq. ID no. 4963109
  misc_feature (1)..(1701): Ortholog of  Ceres SEQ ID NO 13662574 as cited in SEQ ID NO 64794
atgggcacatcatctgggtccaatcttcctcaccagatgctacctccacgtcagcaactacaaacatctctttcgcttgtatcttcagatccccacttgtcacggtctaattctggcattgtgcgtgaatcaccagctgaaagtgctagctctcaagaaacttggccaacctcaaaatctattatgggaaggaagacagatagcggaaagacagggcctgactctcatgatcaacatgtgatccgccatgtttccattgctgataaggtatcgctacgggacatagctagagagagacttgacatagtcgctgagagaatgcatcgattaccagaagaatatctcgaggagttaaagaatggtcttaaggctatccttgaaggaaatggtgcgcagcctatagatgagtttatgtttctgcagaagtttgtccagacgagatctgatttaacttcaaagacacttgtcagggctcaccgagtgcagcttgaagttcttgtggttataaacactggtatccaagcattcttgcacccaaacatcaatctctctcagtcatcactcatcgagatctttgtgtacaagagatgcagaaacatagcttgccaaaacgaactcccggctgatggttgtccctgtgagatatgcgctaataggaaaggcttctgcaacctgtgcatgtgtgtgatatgtaacaagtttgactttgcagtcaacacatgccgctggattggctgcgacgtgtgttctcattggactcatacggattgtgctattagggatggggagatttcgatgggagtttctcccaagagcgtatctgggatgggagaaatgctgttcaagtgtcgagcgtgcaaccatacttctgaattgctggggtgggtgaaagatgtgtttcagcactgtgcaccaaactgggatagggaatctttaatgaaggaacttgacttcgttagtaggattttccgtggaagcgaagatacaagaggccggaaactcttctggaagtgtgaggagcttatggagaagattaaaggtggactggctgaagcaacagcggccaagttgatactcatgtttttccaagaaattgaattggactctccaaagagccttgaaagcggagaaggtgggggtacgatagcacctcaagatgcatgcaaccgaattgctgaagttgtaaaggaaacactgaggaaaatggagatagtgggtgaggaaaagacgaggatgtacaagaaagcgcgaatggggcttgaggaatgcgagagagaggtagaagagaaagcaaagcaagtggcggaactgcagatggagaggcagaagaagaaacaacagatagaagaggtggagaggatagtgaggctgaagcaagcagaggcagagatgtttcagttaaaagcaaacgaggcaaaagtggaagcagagagattggaaaggattgtgaaagcgaaaaaggagaaaacagaagaggaatacgcaagtaactatttgaaactgaggctgagcgaggcggaggcagagaaagagtatctgtttgaaaagataaaagagcaggaaagtggtgggaatggtggtgaagcgtcacaagcagtgatgtactcaaagatcagagaaatgctgcatggatacaatgcatcgtcgccaagggtagatccaagatcaaaccagcgaaatcctttcagatccaatccttag

SEQ ID NO: 73314 - protein, 566 aa, Arabidopsis thaliana; identical to SEQ ID NO: 43217
  peptide (1)..(566): Ceres Seq. ID no. 4963110

SEQ ID NO: 73315 - protein, 554 aa, Arabidopsis thaliana; identical to SEQ ID NO: 43218
  peptide (1)..(554): Ceres Seq. ID no. 4963111

SEQ ID NO: 73316 - protein, 505 aa, Arabidopsis thaliana
  peptide (1)..(505): Ceres Seq. ID no. 4963112
MGRKTDSGKTGPDSHDQHVIRHVSIADKVSLRDIARERLDIVAERMHRLPEEYLEELKNGLKAILEGNGAQPIDEFMFLQKFVQTRSDLTSKTLVRAHRVQLEVLVVINTGIQAFLHPNINLSQSSLIEIFVYKRCRNIACQNELPADGCPCEICANRKGFCNLCMCVICNKFDFAVNTCRWIGCDVCSHWTHTDCAIRDGEISMGVSPKSVSGMGEMLFKCRACNHTSELLGWVKDVFQHCAPNWDRESLMKELDFVSRIFRGSEDTRGRKLFWKCEELMEKIKGGLAEATAAKLILMFFQEIELDSPKSLESGEGGGTIAPQDACNRIAEVVKETLRKMEIVGEEKTRMYKKARMGLEECEREVEEKAKQVAELQMERQKKKQQIEEVERIVRLKQAEAEMFQLKANEAKVEAERLERIVKAKKEKTEEEYASNYLKLRLSEAEAEKEYLFEKIKEQESGGNGGEASQAVMYSKIREMLHGYNASSPRVDPRSNQRNPFRSNP

SEQ ID NO: 73317 - DNA, 1368 bp, Arabidopsis thaliana
  misc_feature (1)..(1368): Ceres Seq. ID no. 4963123
  misc_feature (1)..(1368): Ortholog of  Ceres SEQ ID NO 13597546 as cited in SEQ ID NO 65017
  misc_feature (1)..(1368): Ortholog of  Ceres SEQ ID NO 14307912 as cited in SEQ ID NO 66380
  misc_feature (1)..(1368): Ortholog of  Ceres SEQ ID NO 13654353 as cited in SEQ ID NO 68318
atgaacttgttttggaacacaggattttgtgttatagttttagtggttgcgagggttggtcattggtggtaccaatggtcaaaccctaagtctaacggcaagttacctccgggatcaatgggtttcccgatcatcggagagacattagatttctttaagccttatggattctacgagatctccccatatctcaagaaaaagatgttaaggtatgggccattatttcggacaaacattcttggagtaaaaaccgtggtatcgacggataaggatgttaacatggagattttaagacaagagaacaagtctttcattttaagttatccggatggtttaatgaagccattgggaaaagatagcttgttcttgaagattggaaacatccacaagcacatcaaacaaataactcttcatcttttgtcctccgagggtttaaaacggaaaatattaaaagatatggaccgtgtgacacgcgagcatcttagttcgaaagctaaaacaggaagattggatgttaaggacgcagtttcaaaattgataatagcccacttgacacctaagatgatgagtaatctcaaaccacagactcaagcaaagcttatgggaatttttaaggccttcacttttgattggtttcggacatcctatcttatctctgccgggaagggtctctacaacaccctttgggcatgccgagaggggatgcgagagataaaggatatatatacaatgaggaaaacgtctgaggagaagtacgatgacttcctcaacacggcaatagaagagtcagagaaagcaggagagttattgaacgaaaatgcaattataaccctcatctttaccctttcatgtgtcactcaagataccacctcaaaggcgatttgcttggctgtgaaattcctattggaaaacccaaaagttctcgcagagttaaagaaagaacatgaggtgatccttgaaagcagagaagacaaagaaggtggagttacttgggaagaatacagacacaagatgactttcaccaacatgaaaagcggatacaccattccagcaggttggatagtgatgattataccttcagtggttcattttgatcctgaaatctatgaaaacccttttgagtttaatccatggagatgggaggggaaagagttgcgggctggatctaaaacgttcatggtgtttggaaccggacttagacaatgcgctggtgcagagtttgctaggcttcagatttcagtatttcttcatcatcttgttaccacttataatttctcgttgcaccaagactgcgaggtgcttcgtgtaccagctgctcacctccctaatggcatatctataaacatctccaagtgtcccaaaaaatga

SEQ ID NO: 73318 - protein, 455 aa, Arabidopsis thaliana
  peptide (1)..(455): Ceres Seq. ID no. 4963124
MNLFWNTGFCVIVLVVARVGHWWYQWSNPKSNGKLPPGSMGFPIIGETLDFFKPYGFYEISPYLKKKMLRYGPLFRTNILGVKTVVSTDKDVNMEILRQENKSFILSYPDGLMKPLGKDSLFLKIGNIHKHIKQITLHLLSSEGLKRKILKDMDRVTREHLSSKAKTGRLDVKDAVSKLIIAHLTPKMMSNLKPQTQAKLMGIFKAFTFDWFRTSYLISAGKGLYNTLWACREGMREIKDIYTMRKTSEEKYDDFLNTAIEESEKAGELLNENAIITLIFTLSCVTQDTTSKAICLAVKFLLENPKVLAELKKEHEVILESREDKEGGVTWEEYRHKMTFTNMKSGYTIPAGWIVMIIPSVVHFDPEIYENPFEFNPWRWEGKELRAGSKTFMVFGTGLRQCAGAEFARLQISVFLHHLVTTYNFSLHQDCEVLRVPAAHLPNGISINISKCPKK

SEQ ID NO: 73319 - protein, 416 aa, Arabidopsis thaliana
  peptide (1)..(416): Ceres Seq. ID no. 4963125
MGFPIIGETLDFFKPYGFYEISPYLKKKMLRYGPLFRTNILGVKTVVSTDKDVNMEILRQENKSFILSYPDGLMKPLGKDSLFLKIGNIHKHIKQITLHLLSSEGLKRKILKDMDRVTREHLSSKAKTGRLDVKDAVSKLIIAHLTPKMMSNLKPQTQAKLMGIFKAFTFDWFRTSYLISAGKGLYNTLWACREGMREIKDIYTMRKTSEEKYDDFLNTAIEESEKAGELLNENAIITLIFTLSCVTQDTTSKAICLAVKFLLENPKVLAELKKEHEVILESREDKEGGVTWEEYRHKMTFTNMKSGYTIPAGWIVMIIPSVVHFDPEIYENPFEFNPWRWEGKELRAGSKTFMVFGTGLRQCAGAEFARLQISVFLHHLVTTYNFSLHQDCEVLRVPAAHLPNGISINISKCPKK

SEQ ID NO: 73320 - protein, 388 aa, Arabidopsis thaliana
  peptide (1)..(388): Ceres Seq. ID no. 4963126
MLRYGPLFRTNILGVKTVVSTDKDVNMEILRQENKSFILSYPDGLMKPLGKDSLFLKIGNIHKHIKQITLHLLSSEGLKRKILKDMDRVTREHLSSKAKTGRLDVKDAVSKLIIAHLTPKMMSNLKPQTQAKLMGIFKAFTFDWFRTSYLISAGKGLYNTLWACREGMREIKDIYTMRKTSEEKYDDFLNTAIEESEKAGELLNENAIITLIFTLSCVTQDTTSKAICLAVKFLLENPKVLAELKKEHEVILESREDKEGGVTWEEYRHKMTFTNMKSGYTIPAGWIVMIIPSVVHFDPEIYENPFEFNPWRWEGKELRAGSKTFMVFGTGLRQCAGAEFARLQISVFLHHLVTTYNFSLHQDCEVLRVPAAHLPNGISINISKCPKK

SEQ ID NO: 73321 - DNA, 1086 bp, Arabidopsis thaliana
  misc_feature (1)..(1086): Ceres Seq. ID no. 4963170
  misc_feature (1)..(1086): Ortholog of  Ceres SEQ ID NO 14311103 as cited in SEQ ID NO 52897
atggaagaagataaccaagaaatacaacgtgacaatgtcggatcttcatctttctttaaaacatgtttcaacgcactcaatgctctttcaggaattggaatattatcggtaccatattcacttgctcgtggaggatggttgagtctttcacttttgttactcctagccgtaaccgccttctacacatccttactcattacaaaatgtatgaatgcggaccgcaacatcaaaacatatcccgacataggagaacgcgcatttggtagaccgggaagaatcattgtgtcagtcttcatgcacctagagctctatctagtcaccacgggtttcttgatcctcgagggcgacaatcttcacaatcttttcccgggttttaccatcgaaatgatcggattgagattgaatggcaaacaagctttcatggcgaccgtcgcctttgtcattatgccaactctatggtgggataatctcagcgtcttgtcgtatgtttctatgagtggcgttttagctacgactgtgacgcttggatcaatatcttggattggcgcatttgatgggattgggtttcatcaaaaaggaaagttgataaattggagtgggatccctactgctttgagcttatatgctttttgctatggtgcgcatccagttttgcccactttgtattcttctatgaaaagcaaacatcagttcaacaatgtggcaatatacacaactctcgtaaacccggtagccaaatacgcactgatgatcacaccaaccgtgaacactataaaagattggtttccttcacggtactccaaaaaggcatacttacatctcttgataagcacatttttcatcataagtagtgtcgtgatcgccgagacacttcccttttttggttatatgatgtcgctggttggagcattattgagcgttacggtttctatacttctgccttgtttatgttacttgaagatctttggaaactacaagaaaattgggtgtgagactataatgttgtttggaatggtagtgatgagtgtttttgttggggtaataggtacttacattgcacttcgagatataattggtagtgtataa

SEQ ID NO: 73322 - protein, 361 aa, Arabidopsis thaliana
  peptide (1)..(361): Ceres Seq. ID no. 4963171
MEEDNQEIQRDNVGSSSFFKTCFNALNALSGIGILSVPYSLARGGWLSLSLLLLLAVTAFYTSLLITKCMNADRNIKTYPDIGERAFGRPGRIIVSVFMHLELYLVTTGFLILEGDNLHNLFPGFTIEMIGLRLNGKQAFMATVAFVIMPTLWWDNLSVLSYVSMSGVLATTVTLGSISWIGAFDGIGFHQKGKLINWSGIPTALSLYAFCYGAHPVLPTLYSSMKSKHQFNNVAIYTTLVNPVAKYALMITPTVNTIKDWFPSRYSKKAYLHLLISTFFIISSVVIAETLPFFGYMMSLVGALLSVTVSILLPCLCYLKIFGNYKKIGCETIMLFGMVVMSVFVGVIGTYIALRDIIGSV

SEQ ID NO: 73323 - protein, 292 aa, Arabidopsis thaliana
  peptide (1)..(292): Ceres Seq. ID no. 4963172
MNADRNIKTYPDIGERAFGRPGRIIVSVFMHLELYLVTTGFLILEGDNLHNLFPGFTIEMIGLRLNGKQAFMATVAFVIMPTLWWDNLSVLSYVSMSGVLATTVTLGSISWIGAFDGIGFHQKGKLINWSGIPTALSLYAFCYGAHPVLPTLYSSMKSKHQFNNVAIYTTLVNPVAKYALMITPTVNTIKDWFPSRYSKKAYLHLLISTFFIISSVVIAETLPFFGYMMSLVGALLSVTVSILLPCLCYLKIFGNYKKIGCETIMLFGMVVMSVFVGVIGTYIALRDIIGSV

SEQ ID NO: 73324 - protein, 263 aa, Arabidopsis thaliana
  peptide (1)..(263): Ceres Seq. ID no. 4963173
MHLELYLVTTGFLILEGDNLHNLFPGFTIEMIGLRLNGKQAFMATVAFVIMPTLWWDNLSVLSYVSMSGVLATTVTLGSISWIGAFDGIGFHQKGKLINWSGIPTALSLYAFCYGAHPVLPTLYSSMKSKHQFNNVAIYTTLVNPVAKYALMITPTVNTIKDWFPSRYSKKAYLHLLISTFFIISSVVIAETLPFFGYMMSLVGALLSVTVSILLPCLCYLKIFGNYKKIGCETIMLFGMVVMSVFVGVIGTYIALRDIIGSV

SEQ ID NO: 73325 - DNA, 747 bp, Arabidopsis thaliana
  misc_feature (1)..(747): Ceres Seq. ID no. 4963193
  misc_feature (1)..(747): Ortholog of  Ceres SEQ ID NO 13661768 as cited in SEQ ID NO 61427
  misc_feature (1)..(747): Ortholog of  Ceres SEQ ID NO 15179176 as cited in SEQ ID NO 0
atggtggccatgcaactcctccttatacgcatagtttcttcccaaaacgttacgaatgagtatttgaaccaccaatgcaacaacacacaagggacatacacgcggggtagtacgtttgagaagaatctcaaccaagtcatccgtaacatctctcacctccatcttcgctacggttacacctacaactccaatgttgaggcttacgaagttagtaaagatcccaacattgtcttcgttttgctccagtgtcgtggtgactcttacgggtccaagtgccactcctgcctccacacagccttctctgggcttcgtgagagatgtcggggaaacaaaggagcaataatatggtacgaccaatgtgttttggagatttcttccgtgaataccaaggggaggattcgttacgatagttttttcaatatgaccaacgtgaagaatgtgagcagcaatgcggagcagtttaaaaataaaaggaaggatctcttccacaagctattgttgggagccaccaaggatgtaagcgacagcaatgatgcgtacgcagtgggggagacgaggataggaagaaataagatgtatgcaatgatgcagtgtgcactagacttaacgacgaatggatgctatgtgtgtctagaatggattataggcaggtatgatagcttctactttgaccgtagacaaggaacgagagttttgagtaggagttgtagcttaagatatgagctttacccttttcttaggaggtaa

SEQ ID NO: 73326 - protein, 248 aa, Arabidopsis thaliana; identical to SEQ ID NO: 71344
  peptide (1)..(248): Ceres Seq. ID no. 4963194

SEQ ID NO: 73327 - protein, 245 aa, Arabidopsis thaliana; identical to SEQ ID NO: 71345
  peptide (1)..(245): Ceres Seq. ID no. 4963195

SEQ ID NO: 73328 - DNA, 1332 bp, Arabidopsis thaliana
  misc_feature (1)..(1332): Ceres Seq. ID no. 4963484
  misc_feature (1)..(1332): Ortholog of  Ceres SEQ ID NO 13656047 as cited in SEQ ID NO 64721
atggaattcacggaggcttacaagcaaacaggtccttgttgtttctccccaaactctcgttacgtcgccgtcgccaatgattatcgtctcgtgatccgtgatacgttttcgtttcaggttgtgcaattgttttcttgcttagataaaataagctacatagaatgggctcttgattcagagtacattctttgtggtctttataaaaaaccgatgattcaagcttggtctttgactcaaccagaatggacttgcaagattgatgaaggtcctgctggtatttcatacgctaggtggagtccagatagccgtcatatactcactacgtcagagtttcagctgcggttaacggtttggtctcttttaaacacggcgtgtgttcatgttcagtggccaaagcatggttccaagggagtttcattcaatcaagatgggaagtttgcggctatatgtacacggcgtgactgtaaggattatgttaaccttttgtcttgtcaatcatgggagataatgggtagctttgctgttgataccttggacttggctgatcttgagtggtcacctgatgatagttctattgtagtgtgggattcgcctcttgaatataaggcatatgaatgtggacttggtgtcaagactgtttcctggtctccgtgtggtcagtttcttgccattggtagctatgatcaaatgttgcgggtcctgaatcaccttacttggaaaacattcgctgagttcttacacctatcaacggttcgtgcgccctgttctgcggctattttcaaggaaatcgatgaaccattacagcttgatatgtctgagttatcgttggatgaaaactttatgccaagcaattatgatgcttcagaaggctatataagtgtcaggtatgaagtcatggaattaccggtagcttttcctttccagaaacctcctgcggacaagcctaacccaaaacaaggagtcggccttctagcttggagcaaagacagccagtacatatgcacacgaaacgacagtatgcccactgctctgtggatatgggacatgcgcctcctcgaggttgcagccatcctggtccagaaggaacccatccgagcagctgtgtgggacccaacctgcacacgcctcctcctgtgcactggaagctctcacctttacatgtggactccctcgggtgctttctgtgtatgcaatccccttccgggcttctccatatcggacctcaaatggaacattgatggaagctgtctccttctcaaagacaaagatgcgttctgttgtgccacggtcccgtctctgcctgagtccagcgactacagttctgatgactga

SEQ ID NO: 73329 - protein, 443 aa, Arabidopsis thaliana
  peptide (1)..(443): Ceres Seq. ID no. 4963485
MEFTEAYKQTGPCCFSPNSRYVAVANDYRLVIRDTFSFQVVQLFSCLDKISYIEWALDSEYILCGLYKKPMIQAWSLTQPEWTCKIDEGPAGISYARWSPDSRHILTTSEFQLRLTVWSLLNTACVHVQWPKHGSKGVSFNQDGKFAAICTRRDCKDYVNLLSCQSWEIMGSFAVDTLDLADLEWSPDDSSIVVWDSPLEYKAYECGLGVKTVSWSPCGQFLAIGSYDQMLRVLNHLTWKTFAEFLHLSTVRAPCSAAIFKEIDEPLQLDMSELSLDENFMPSNYDASEGYISVRYEVMELPVAFPFQKPPADKPNPKQGVGLLAWSKDSQYICTRNDSMPTALWIWDMRLLEVAAILVQKEPIRAAVWDPTCTRLLLCTGSSHLYMWTPSGAFCVCNPLPGFSISDLKWNIDGSCLLLKDKDAFCCATVPSLPESSDYSSDD

SEQ ID NO: 73330 - protein, 373 aa, Arabidopsis thaliana
  peptide (1)..(373): Ceres Seq. ID no. 4963486
MIQAWSLTQPEWTCKIDEGPAGISYARWSPDSRHILTTSEFQLRLTVWSLLNTACVHVQWPKHGSKGVSFNQDGKFAAICTRRDCKDYVNLLSCQSWEIMGSFAVDTLDLADLEWSPDDSSIVVWDSPLEYKAYECGLGVKTVSWSPCGQFLAIGSYDQMLRVLNHLTWKTFAEFLHLSTVRAPCSAAIFKEIDEPLQLDMSELSLDENFMPSNYDASEGYISVRYEVMELPVAFPFQKPPADKPNPKQGVGLLAWSKDSQYICTRNDSMPTALWIWDMRLLEVAAILVQKEPIRAAVWDPTCTRLLLCTGSSHLYMWTPSGAFCVCNPLPGFSISDLKWNIDGSCLLLKDKDAFCCATVPSLPESSDYSSDD

SEQ ID NO: 73331 - protein, 274 aa, Arabidopsis thaliana
  peptide (1)..(274): Ceres Seq. ID no. 4963487
MGSFAVDTLDLADLEWSPDDSSIVVWDSPLEYKAYECGLGVKTVSWSPCGQFLAIGSYDQMLRVLNHLTWKTFAEFLHLSTVRAPCSAAIFKEIDEPLQLDMSELSLDENFMPSNYDASEGYISVRYEVMELPVAFPFQKPPADKPNPKQGVGLLAWSKDSQYICTRNDSMPTALWIWDMRLLEVAAILVQKEPIRAAVWDPTCTRLLLCTGSSHLYMWTPSGAFCVCNPLPGFSISDLKWNIDGSCLLLKDKDAFCCATVPSLPESSDYSSDD

SEQ ID NO: 73332 - DNA, 1290 bp, Arabidopsis thaliana
  misc_feature (1)..(1290): Ceres Seq. ID no. 4963595
  misc_feature (1)..(1290): Ortholog of  Ceres SEQ ID NO 13654989 as cited in SEQ ID NO 63117
  misc_feature (1)..(1290): Ortholog of  Ceres SEQ ID NO 13657138 as cited in SEQ ID NO 65923
  misc_feature (1)..(1290): Ortholog of  Ceres SEQ ID NO 13584744 as cited in SEQ ID NO 69137
atgctaaaatgtgtttctgtccaaattcaaaccagttttgtcttgtcttgtcttcttcttcttcagagcattgcaatgaaagttccagattcttcttcaccgaccggagttctcgaagaattcttcagaaccgaagaattcaatagctcctccgagacggtcaagaacccttcctcttctcgtttccgcaagatggttcagcttctcagaagcaaatccaaaaagtctcttgagaatgtcaagattccgtttcacaacaatggtgttattaagagttcttttagaagatgcagtagcatgagagaaaatctcagatttagctccaatgattctcactttcttctacattctcctagaagaatcttcaccttctctgacctcaagtctgctacaaacaatttctctttagaaaatctaattgggaaaggaggttatgctgaagtttacaaagggatgttaccaaatggacaaatggtagcgataaaacggttgatgcggggaaatagtgaagagatcattgtagactttctttcggagatgggtataatggcacatgttaaccatcccaacatagctaagcttttaggctatggagttgaaggaggaatgcatcttgttcttgagttatcacctcatggcagcttagcttctatgctctatagctccaaggagaagatgaaatggagcattaggtacaagatagcattaggagttgcggagggtctagtgtatcttcatagaggatgtcataggagaattatacatagagatatcaaagccgcaaacattcttctcacacatgatttttctcctcagatatgtgactttgggcttgcgaagtggttacctgaaaattggacacaccacattgtttccaaatttgagggcacattcgggtatcttgctccagagtacttaacacatgggatagtagatgaaaagaccgatgtattcgccttgggtgtacttttactggaacttgttaccggacgacgagctctcgattactccaagcaaagtcttgttctatgggctaaaccattgatgaagaagaacaaaattagagagctaatcgatccatctctggcgggtgagtacgaatggaggcagataaaacttgtgcttttggctgctgcgttatcaatccaacaatcatcgatagagaggcctgaaatgagtcaggttgttgagatcctcaaaggcaacttgaaagatctcaagtgcatcatgaaatgcagagttcccttttataggaaagctttcagggatgaagttggcaaaaaagattag

SEQ ID NO: 73333 - protein, 429 aa, Arabidopsis thaliana
  peptide (1)..(429): Ceres Seq. ID no. 4963596
MLKCVSVQIQTSFVLSCLLLLQSIAMKVPDSSSPTGVLEEFFRTEEFNSSSETVKNPSSSRFRKMVQLLRSKSKKSLENVKIPFHNNGVIKSSFRRCSSMRENLRFSSNDSHFLLHSPRRIFTFSDLKSATNNFSLENLIGKGGYAEVYKGMLPNGQMVAIKRLMRGNSEEIIVDFLSEMGIMAHVNHPNIAKLLGYGVEGGMHLVLELSPHGSLASMLYSSKEKMKWSIRYKIALGVAEGLVYLHRGCHRRIIHRDIKAANILLTHDFSPQICDFGLAKWLPENWTHHIVSKFEGTFGYLAPEYLTHGIVDEKTDVFALGVLLLELVTGRRALDYSKQSLVLWAKPLMKKNKIRELIDPSLAGEYEWRQIKLVLLAAALSIQQSSIERPEMSQVVEILKGNLKDLKCIMKCRVPFYRKAFRDEVGKKD

SEQ ID NO: 73334 - protein, 404 aa, Arabidopsis thaliana
  peptide (1)..(404): Ceres Seq. ID no. 4963597
MKVPDSSSPTGVLEEFFRTEEFNSSSETVKNPSSSRFRKMVQLLRSKSKKSLENVKIPFHNNGVIKSSFRRCSSMRENLRFSSNDSHFLLHSPRRIFTFSDLKSATNNFSLENLIGKGGYAEVYKGMLPNGQMVAIKRLMRGNSEEIIVDFLSEMGIMAHVNHPNIAKLLGYGVEGGMHLVLELSPHGSLASMLYSSKEKMKWSIRYKIALGVAEGLVYLHRGCHRRIIHRDIKAANILLTHDFSPQICDFGLAKWLPENWTHHIVSKFEGTFGYLAPEYLTHGIVDEKTDVFALGVLLLELVTGRRALDYSKQSLVLWAKPLMKKNKIRELIDPSLAGEYEWRQIKLVLLAAALSIQQSSIERPEMSQVVEILKGNLKDLKCIMKCRVPFYRKAFRDEVGKKD

SEQ ID NO: 73335 - protein, 365 aa, Arabidopsis thaliana
  peptide (1)..(365): Ceres Seq. ID no. 4963598
MVQLLRSKSKKSLENVKIPFHNNGVIKSSFRRCSSMRENLRFSSNDSHFLLHSPRRIFTFSDLKSATNNFSLENLIGKGGYAEVYKGMLPNGQMVAIKRLMRGNSEEIIVDFLSEMGIMAHVNHPNIAKLLGYGVEGGMHLVLELSPHGSLASMLYSSKEKMKWSIRYKIALGVAEGLVYLHRGCHRRIIHRDIKAANILLTHDFSPQICDFGLAKWLPENWTHHIVSKFEGTFGYLAPEYLTHGIVDEKTDVFALGVLLLELVTGRRALDYSKQSLVLWAKPLMKKNKIRELIDPSLAGEYEWRQIKLVLLAAALSIQQSSIERPEMSQVVEILKGNLKDLKCIMKCRVPFYRKAFRDEVGKKD

SEQ ID NO: 73336 - DNA, 1311 bp, Arabidopsis thaliana
  misc_feature (1)..(1311): Ceres Seq. ID no. 4963751
  misc_feature (1)..(1311): Ortholog of  Ceres SEQ ID NO 13597376 as cited in SEQ ID NO 64002
  misc_feature (1)..(1311): Ortholog of  Ceres SEQ ID NO 13503573 as cited in SEQ ID NO 65402
  misc_feature (1)..(1311): Ortholog of  Ceres SEQ ID NO 13659615 as cited in SEQ ID NO 67248
atgctaaattcgtctggagtaagaactcaacgaagaagcccaagacctttgtctctaggaggtagaaagattattactccaacaaaatttgcttatgatcatcataatcctgataaagttttggattttgtagaaatggattgcttagaacccaaaacaaagaacaatctcactggaaagcttctcttagtagcttcactcttaattttagccattattgtgatcagtcaatcttcaagtttcacatctccaagcgcgttttctcaaagagaggaaggagtgactcatgtgttagtcactggtggtgctggttatatcgggtcacatgcggctttaagacttcttagagattcataccgcgtaaccattgtggacaatctttcgcgtggaaatcttggtgcggttaagactttacagcaattattcccgcagacaggaagacttcagttcatttatgctgacttaggagatcccttagcggtcgagaaaatcttctcggagaatgcttttgacgctgtaatgcattttgctgcggtagcttatgtcggagaaagcactctttatcctctaaaatattaccataacattacatcaaacacgttaggagttcttgaagctatggctagacataaagtaaagaaactgatatattctagcacttgtgctacatatggagagcctgaaaaaatgccgattactgaagacactccacaggtaccgattaatccatacggaaaagctaaaaagatggcagaggatatgatcttggatttctcaaagaactctgacatggcggttatgatcttaagatacttcaatgtgattggttcagatccaggaggtagattaggagaagcgccaagacccgaacttcgtgagcaaggaaggatttctggtgcttgtttcgatgcagctcgtggtttcattcccggactacaagtgaaaggaacggattacaaaacatcggacggtacttgcattagagactatatagatgttactgacctcgtggatgctcacgtgaaggctctcgagaaagctcagcctcgaaaagtcggtatctacaatgttggaaccggaaaagggagatcggttaaagaattcgttgaggcatgtaagaaggcgacaggagttgagatcaaagtagatttcttgcctcgacgaccgggagattacgcagaggtttacagtgatccaacaaagattttgaaagatttgaattggactgctcgattcactaatcttcaagatagtcttcaagttgcttggagatggcaaaaaattcatcctcatggatataattcttattaa

SEQ ID NO: 73337 - protein, 436 aa, Arabidopsis thaliana
  peptide (1)..(436): Ceres Seq. ID no. 4963752
MLNSSGVRTQRRSPRPLSLGGRKIITPTKFAYDHHNPDKVLDFVEMDCLEPKTKNNLTGKLLLVASLLILAIIVISQSSSFTSPSAFSQREEGVTHVLVTGGAGYIGSHAALRLLRDSYRVTIVDNLSRGNLGAVKTLQQLFPQTGRLQFIYADLGDPLAVEKIFSENAFDAVMHFAAVAYVGESTLYPLKYYHNITSNTLGVLEAMARHKVKKLIYSSTCATYGEPEKMPITEDTPQVPINPYGKAKKMAEDMILDFSKNSDMAVMILRYFNVIGSDPGGRLGEAPRPELREQGRISGACFDAARGFIPGLQVKGTDYKTSDGTCIRDYIDVTDLVDAHVKALEKAQPRKVGIYNVGTGKGRSVKEFVEACKKATGVEIKVDFLPRRPGDYAEVYSDPTKILKDLNWTARFTNLQDSLQVAWRWQKIHPHGYNSY

SEQ ID NO: 73338 - protein, 391 aa, Arabidopsis thaliana; identical to SEQ ID NO: 71137
  peptide (1)..(391): Ceres Seq. ID no. 4963753

SEQ ID NO: 73339 - protein, 263 aa, Arabidopsis thaliana; identical to SEQ ID NO: 71138
  peptide (1)..(263): Ceres Seq. ID no. 4963754

SEQ ID NO: 73340 - DNA, 819 bp, Arabidopsis thaliana
  misc_feature (1)..(819): Ceres Seq. ID no. 4963830
  misc_feature (1)..(819): Ortholog of  Ceres SEQ ID NO 14303487 as cited in SEQ ID NO 54521
  misc_feature (1)..(819): Ortholog of  Ceres SEQ ID NO 14308274 as cited in SEQ ID NO 55597
atgggagacgtatatttcaaccatttcgctcagcaactgcagatgtctgaccaagagaagggtgaaatgtcaagacattcacaccctcattcaatcaatgaagaatctgagtcgtcaactctggaaagggtagcagcagagtcattaacaaacaaagtccttgatagaggactaatggagtatggatgtccacattacagaagaaggtgttgcattagagctccttgctgtaatgagatctttggttgccatcactgtcattatgaggcgaagcagaacaacataaatgtagatcagaagcagaggcatgatattcctcgccaccaagttgaacaggttatttgtttactttgtggtactgaacaagaggtgggccaaatttgtatccactgtggagtgtgcatggggaagtacttctgtaaagtctgcaagctctacgatgatgataacggtcacccttgtgtcgaaggagcaatgcatcacgactgccccatttgctttgagtttctgtttgaatcacggaacgatgtgacggttttaccatgtggacacacaattcatcagaagtgcttggaggaaatgagagatcattaccaatatgcgtgcccactttgctcaaaatctgtatgcgacatgtcaaaagtgtgggagaagtttgacatggagattgcggctacaccaatgccagaaccataccagaacagaatggttcagattctctgcaacgactgtgggaagaaagcagaggtacagtaccatgtggtggctcagaaatgcccaaactgcaaatcatacaacactcgccaaaccagaggctga

SEQ ID NO: 73341 - protein, 272 aa, Arabidopsis thaliana
  peptide (1)..(272): Ceres Seq. ID no. 4963831
MGDVYFNHFAQQLQMSDQEKGEMSRHSHPHSINEESESSTLERVAAESLTNKVLDRGLMEYGCPHYRRRCCIRAPCCNEIFGCHHCHYEAKQNNINVDQKQRHDIPRHQVEQVICLLCGTEQEVGQICIHCGVCMGKYFCKVCKLYDDDNGHPCVEGAMHHDCPICFEFLFESRNDVTVLPCGHTIHQKCLEEMRDHYQYACPLCSKSVCDMSKVWEKFDMEIAATPMPEPYQNRMVQILCNDCGKKAEVQYHVVAQKCPNCKSYNTRQTRG

SEQ ID NO: 73342 - protein, 258 aa, Arabidopsis thaliana
  peptide (1)..(258): Ceres Seq. ID no. 4963832
MSDQEKGEMSRHSHPHSINEESESSTLERVAAESLTNKVLDRGLMEYGCPHYRRRCCIRAPCCNEIFGCHHCHYEAKQNNINVDQKQRHDIPRHQVEQVICLLCGTEQEVGQICIHCGVCMGKYFCKVCKLYDDDNGHPCVEGAMHHDCPICFEFLFESRNDVTVLPCGHTIHQKCLEEMRDHYQYACPLCSKSVCDMSKVWEKFDMEIAATPMPEPYQNRMVQILCNDCGKKAEVQYHVVAQKCPNCKSYNTRQTRG

SEQ ID NO: 73343 - protein, 250 aa, Arabidopsis thaliana
  peptide (1)..(250): Ceres Seq. ID no. 4963833
MSRHSHPHSINEESESSTLERVAAESLTNKVLDRGLMEYGCPHYRRRCCIRAPCCNEIFGCHHCHYEAKQNNINVDQKQRHDIPRHQVEQVICLLCGTEQEVGQICIHCGVCMGKYFCKVCKLYDDDNGHPCVEGAMHHDCPICFEFLFESRNDVTVLPCGHTIHQKCLEEMRDHYQYACPLCSKSVCDMSKVWEKFDMEIAATPMPEPYQNRMVQILCNDCGKKAEVQYHVVAQKCPNCKSYNTRQTRG

SEQ ID NO: 73344 - DNA, 957 bp, Arabidopsis thaliana
  misc_feature (1)..(957): Ceres Seq. ID no. 4963861
  misc_feature (1)..(957): Ortholog of  Ceres SEQ ID NO 14306781 as cited in SEQ ID NO 53019
  misc_feature (1)..(957): Ortholog of  Ceres SEQ ID NO 15177237 as cited in SEQ ID NO 53825
  misc_feature (1)..(957): Ortholog of  Ceres SEQ ID NO 15176012 as cited in SEQ ID NO 60374
  misc_feature (1)..(957): Ortholog of  Ceres SEQ ID NO 13598643 as cited in SEQ ID NO 64307
atgcttaaagaagaaaacattcatttgcacactgaggattcagagcaagggaaattacctttgcttattttaagcttgaaagagagaagtgaagaaaaaaggccagcgattgtgtttatgcatggcacaaacacaaacaaagaatggttaaggccatggcttgaagcatatgcttcgcggggatatgtagccatcggtttagactctcgttaccacggtgaacgtgctgattgcaaaactgcatatcgagatgctcttatatcatcttggagaaatggaaacactatgccttttatctttgatactgtatgggatttgatcaaactagctgaatatcttactcagagggatgatatagacccgaaaaagataggaatcaccggtatttcgctaggagggatgcatgcttggtttgctgctgcagctgacactcgctattccgtggttgtcccattaatcggtgttcaggtgcttaacaagatagcagcaactatgaggcctattcttccttgtatgagtgagtatgaggatggtttcggttttagatgggcaatagagaatgatgagtgggaagcaagagtcaacagtatcaaacctttatttgaagaagcaaggattgatctcggaaagaacataatcgacaaagaactagtcgagaaggtgtggaacagaatagctcctggcctagcttcgaagtttgattcaccgtactcattaccagtgattgctccacggcctctttacatccttaacggcgcaaatgatcctcgatgtcctcttggcggactagaacttgcgttaaagagagctgaaaaggcgtataaggaaacagcttctcctggaaacttcaagttcaaagcagaagatggagttggacacgaagcgacgagtttcatgatcaaagaatcatcagactggtttgacaaattccttaaacaagaagatatgacaacttga

SEQ ID NO: 73345 - protein, 318 aa, Arabidopsis thaliana
  peptide (1)..(318): Ceres Seq. ID no. 4963862
MLKEENIHLHTEDSEQGKLPLLILSLKERSEEKRPAIVFMHGTNTNKEWLRPWLEAYASRGYVAIGLDSRYHGERADCKTAYRDALISSWRNGNTMPFIFDTVWDLIKLAEYLTQRDDIDPKKIGITGISLGGMHAWFAAAADTRYSVVVPLIGVQVLNKIAATMRPILPCMSEYEDGFGFRWAIENDEWEARVNSIKPLFEEARIDLGKNIIDKELVEKVWNRIAPGLASKFDSPYSLPVIAPRPLYILNGANDPRCPLGGLELALKRAEKAYKETASPGNFKFKAEDGVGHEATSFMIKESSDWFDKFLKQEDMTT

SEQ ID NO: 73346 - protein, 279 aa, Arabidopsis thaliana
  peptide (1)..(279): Ceres Seq. ID no. 4963863
MHGTNTNKEWLRPWLEAYASRGYVAIGLDSRYHGERADCKTAYRDALISSWRNGNTMPFIFDTVWDLIKLAEYLTQRDDIDPKKIGITGISLGGMHAWFAAAADTRYSVVVPLIGVQVLNKIAATMRPILPCMSEYEDGFGFRWAIENDEWEARVNSIKPLFEEARIDLGKNIIDKELVEKVWNRIAPGLASKFDSPYSLPVIAPRPLYILNGANDPRCPLGGLELALKRAEKAYKETASPGNFKFKAEDGVGHEATSFMIKESSDWFDKFLKQEDMTT

SEQ ID NO: 73347 - protein, 223 aa, Arabidopsis thaliana
  peptide (1)..(223): Ceres Seq. ID no. 4963864
MPFIFDTVWDLIKLAEYLTQRDDIDPKKIGITGISLGGMHAWFAAAADTRYSVVVPLIGVQVLNKIAATMRPILPCMSEYEDGFGFRWAIENDEWEARVNSIKPLFEEARIDLGKNIIDKELVEKVWNRIAPGLASKFDSPYSLPVIAPRPLYILNGANDPRCPLGGLELALKRAEKAYKETASPGNFKFKAEDGVGHEATSFMIKESSDWFDKFLKQEDMTT

SEQ ID NO: 73348 - DNA, 2679 bp, Arabidopsis thaliana
  misc_feature (1)..(2679): Ceres Seq. ID no. 4963955
  misc_feature (1)..(2679): Ortholog of  Ceres SEQ ID NO 13654989 as cited in SEQ ID NO 63117
  misc_feature (1)..(2679): Ortholog of  Ceres SEQ ID NO 13584744 as cited in SEQ ID NO 69137
atggatagtccttgttggcttttgctgctgctattaggagcttttgccattattggttgtgttcaagctcaggatcaacaagagtttatcagtttggattgcgggttacccatgactgaaccgtcttcttatactgagtcagtaaccggactacggttctcgtctgatgctgaattcatccagactggtgaaagtggtaaaatccaggcgagtatggagaatgactaccttaagccgtacacgaggctgaggtattttccagaggagagaaggaactgctatagtttgagtgttgacaagaacaggaaatatttgatcagggctaggttcatttatgggaattacgatggtcgtaactctaacccgatatttgaactgcatctaggacctaatctgtgggcaactatagatttgcaaaagtttgtgaatggtacaatggaggagatccttcacactccaacatcaaactctttgaacgtttgtcttgttaagacagggacaactacacccttgatctcagccttggaattacggccattaggaaataattcttatctcacagatggttctttgaatcttttcgttcggatatatctcaacaagacagatggctttcttcggtacccggatgatatttatgatcgcagatggcataattactttatggtggatgattggacccaaattttcaccactctcgaagtgaccaatgataacaattatgaaccaccaaaaaaggctcttgcagcggctgccacgccttctaatgccagcgcgccattgacaatcagttggccaccagacaatcctggtgaccaatattacttgtacagccacttctctgagatacaagatttacagaccaatgataccagagaatttgacatattatgggatggagctgttgttgaagaaggtttcatccctccaaagttaggggtgactactatccataatctttctccagtgacatgcaaaggagaaaattgcatttaccagctaataaaaacctcgaggtcaactcttccttctctacttaacgctcttgaaatctacacagttatccaatttccacgaaatcaacttcacctgctaattctcacatccttgagctctacatcagtggttgctgttaaaaatatcgaagctgcctataaattgagtagaatcaggtggcaaggagatccttgcgtccctcaaaagtatgcgtgggatggtttgaactgtagcaacaacacagatgtttctaaacctccaagagtattatccttaaatttgtcttcgagcggtttaactggaatcattgcggccgcaattcaaaaccttacacatttagaaaaactggacttgtcaaataacacactaactggagtggtgccggaatttctagcccagatgaaatcgttggtgatcataaacttaagcggcaacaatcttagtggtccccttcctcaaggtcttcgaagagagggactagaattactagttcaaggcaacccaaggctttgtctctctggttcctgcacagaaaaaaactcgaagaagaaattcccggtggtgattgttgcatcagttgcttctgtggccataattgttgctgtgttggttattatttttgttctcagtaagaaaaagtcatctactgtgggagctctacaacctccactgagtatgccaatggttcatgataattcacctgaaccatcaatcgagacgaaaaagagaaggtttacttattcagaggttatcaaaatgacgaataattttcaaagagttgtaggggaaggaggattcggtgttgtttgtcatggtactataaatggttctgaacaggtggctgttaaagttctctctcaatcatcaagtcaaggatataagcattttaaggcagaggttgatcttcttctacgagttcaccatacaaatttggtgagtcttgttggatattgcgatgaaagagatcacttggctctcatctatgagtttttgcccaagggagacttaagacaacatctatctggaaaaagcggtgggtcctttatcaactggggtaatcgtctacgaatagctctggaggctgcactaggattggaatatctacattctggatgcacaccaccaattgtacatagagatataaaaacgacaaacatattgctggacgaacagttaaaggccaagcttgccgatttcggcctttcgagatctttccctattggaggtgaaacacatatttcaactgtggttgctggtactcctggataccttgatcctgaatattaccagacaactcgactgggtgagaagagcgatgtgtacagcttcggaattgtgttattggagattatcacaaaccaacctgtgattgaccagtcccgttcaaagtctcacatatcacaatgggttggatttgagcttacccgaggagatattactaagatcatggatccaaacctgaacggggattacgaatctcgttctgtatggagagttcttgaactggcaatgtcgtgtgcgaatccttcttctgtgaaccgaccaaacatgtcccaagttgctaatgaactgaaagaatgtcttgtttctgaaaacttgagggaaaatatgaatatggactctcagaattctcttaaagtgagcatgagctttgacacagagttgtttccgagggcaaggtag

SEQ ID NO: 73349 - protein, 892 aa, Arabidopsis thaliana
  peptide (1)..(892): Ceres Seq. ID no. 4963956
MDSPCWLLLLLLGAFAIIGCVQAQDQQEFISLDCGLPMTEPSSYTESVTGLRFSSDAEFIQTGESGKIQASMENDYLKPYTRLRYFPEERRNCYSLSVDKNRKYLIRARFIYGNYDGRNSNPIFELHLGPNLWATIDLQKFVNGTMEEILHTPTSNSLNVCLVKTGTTTPLISALELRPLGNNSYLTDGSLNLFVRIYLNKTDGFLRYPDDIYDRRWHNYFMVDDWTQIFTTLEVTNDNNYEPPKKALAAAATPSNASAPLTISWPPDNPGDQYYLYSHFSEIQDLQTNDTREFDILWDGAVVEEGFIPPKLGVTTIHNLSPVTCKGENCIYQLIKTSRSTLPSLLNALEIYTVIQFPRNQLHLLILTSLSSTSVVAVKNIEAAYKLSRIRWQGDPCVPQKYAWDGLNCSNNTDVSKPPRVLSLNLSSSGLTGIIAAAIQNLTHLEKLDLSNNTLTGVVPEFLAQMKSLVIINLSGNNLSGPLPQGLRREGLELLVQGNPRLCLSGSCTEKNSKKKFPVVIVASVASVAIIVAVLVIIFVLSKKKSSTVGALQPPLSMPMVHDNSPEPSIETKKRRFTYSEVIKMTNNFQRVVGEGGFGVVCHGTINGSEQVAVKVLSQSSSQGYKHFKAEVDLLLRVHHTNLVSLVGYCDERDHLALIYEFLPKGDLRQHLSGKSGGSFINWGNRLRIALEAALGLEYLHSGCTPPIVHRDIKTTNILLDEQLKAKLADFGLSRSFPIGGETHISTVVAGTPGYLDPEYYQTTRLGEKSDVYSFGIVLLEIITNQPVIDQSRSKSHISQWVGFELTRGDITKIMDPNLNGDYESRSVWRVLELAMSCANPSSVNRPNMSQVANELKECLVSENLRENMNMDSQNSLKVSMSFDTELFPRAR

SEQ ID NO: 73350 - protein, 855 aa, Arabidopsis thaliana
  peptide (1)..(855): Ceres Seq. ID no. 4963957
MTEPSSYTESVTGLRFSSDAEFIQTGESGKIQASMENDYLKPYTRLRYFPEERRNCYSLSVDKNRKYLIRARFIYGNYDGRNSNPIFELHLGPNLWATIDLQKFVNGTMEEILHTPTSNSLNVCLVKTGTTTPLISALELRPLGNNSYLTDGSLNLFVRIYLNKTDGFLRYPDDIYDRRWHNYFMVDDWTQIFTTLEVTNDNNYEPPKKALAAAATPSNASAPLTISWPPDNPGDQYYLYSHFSEIQDLQTNDTREFDILWDGAVVEEGFIPPKLGVTTIHNLSPVTCKGENCIYQLIKTSRSTLPSLLNALEIYTVIQFPRNQLHLLILTSLSSTSVVAVKNIEAAYKLSRIRWQGDPCVPQKYAWDGLNCSNNTDVSKPPRVLSLNLSSSGLTGIIAAAIQNLTHLEKLDLSNNTLTGVVPEFLAQMKSLVIINLSGNNLSGPLPQGLRREGLELLVQGNPRLCLSGSCTEKNSKKKFPVVIVASVASVAIIVAVLVIIFVLSKKKSSTVGALQPPLSMPMVHDNSPEPSIETKKRRFTYSEVIKMTNNFQRVVGEGGFGVVCHGTINGSEQVAVKVLSQSSSQGYKHFKAEVDLLLRVHHTNLVSLVGYCDERDHLALIYEFLPKGDLRQHLSGKSGGSFINWGNRLRIALEAALGLEYLHSGCTPPIVHRDIKTTNILLDEQLKAKLADFGLSRSFPIGGETHISTVVAGTPGYLDPEYYQTTRLGEKSDVYSFGIVLLEIITNQPVIDQSRSKSHISQWVGFELTRGDITKIMDPNLNGDYESRSVWRVLELAMSCANPSSVNRPNMSQVANELKECLVSENLRENMNMDSQNSLKVSMSFDTELFPRAR

SEQ ID NO: 73351 - protein, 821 aa, Arabidopsis thaliana
  peptide (1)..(821): Ceres Seq. ID no. 4963958
MENDYLKPYTRLRYFPEERRNCYSLSVDKNRKYLIRARFIYGNYDGRNSNPIFELHLGPNLWATIDLQKFVNGTMEEILHTPTSNSLNVCLVKTGTTTPLISALELRPLGNNSYLTDGSLNLFVRIYLNKTDGFLRYPDDIYDRRWHNYFMVDDWTQIFTTLEVTNDNNYEPPKKALAAAATPSNASAPLTISWPPDNPGDQYYLYSHFSEIQDLQTNDTREFDILWDGAVVEEGFIPPKLGVTTIHNLSPVTCKGENCIYQLIKTSRSTLPSLLNALEIYTVIQFPRNQLHLLILTSLSSTSVVAVKNIEAAYKLSRIRWQGDPCVPQKYAWDGLNCSNNTDVSKPPRVLSLNLSSSGLTGIIAAAIQNLTHLEKLDLSNNTLTGVVPEFLAQMKSLVIINLSGNNLSGPLPQGLRREGLELLVQGNPRLCLSGSCTEKNSKKKFPVVIVASVASVAIIVAVLVIIFVLSKKKSSTVGALQPPLSMPMVHDNSPEPSIETKKRRFTYSEVIKMTNNFQRVVGEGGFGVVCHGTINGSEQVAVKVLSQSSSQGYKHFKAEVDLLLRVHHTNLVSLVGYCDERDHLALIYEFLPKGDLRQHLSGKSGGSFINWGNRLRIALEAALGLEYLHSGCTPPIVHRDIKTTNILLDEQLKAKLADFGLSRSFPIGGETHISTVVAGTPGYLDPEYYQTTRLGEKSDVYSFGIVLLEIITNQPVIDQSRSKSHISQWVGFELTRGDITKIMDPNLNGDYESRSVWRVLELAMSCANPSSVNRPNMSQVANELKECLVSENLRENMNMDSQNSLKVSMSFDTELFPRAR

SEQ ID NO: 73352 - DNA, 2649 bp, Arabidopsis thaliana
  misc_feature (1)..(2649): Ceres Seq. ID no. 4963967
  misc_feature (1)..(2649): Ortholog of  Ceres SEQ ID NO 13654989 as cited in SEQ ID NO 63117
  misc_feature (1)..(2649): Ortholog of  Ceres SEQ ID NO 13584744 as cited in SEQ ID NO 69137
atggagaggtctcttgagctcttgttgctccttatcagaactttggccatcattcatatttctcaagctcaaagccaacaagggttcatcagtttggattgtggtctacccgcgaatgaaccatctccttatacagagccgaggactggattgcagttttcttcggacgcagcattcatccagagtggaaaaattggtaggattcaagcaaatctggaggctgacttcctgaagccatcaacgacgatgagatattttccagacggaaaacggaactgctacaatctaaacgttgagaagggaagaaatcatcttatcagggctcggtttgtatatggaaattatgatggtcgtgacactggccccaagtttgatctgtatcttggacctaatccatgggccacgatagatttggcaaaacaagtgaatggtacacgtcccgagatcatgcacatcccaacatcaaacaagttgcaggtttgtcttgttaagactggggaaactacaccgctaatatcggttttggaagtacggccgatgggaagtggtacttatctcaccaagtctggctctctgaaactttactatcgagaatattttagcaagtctgattcttctctaaggtaccctgatgatatctatgaccgccaatggacttcgttctttgatacagagtggacacaaattaacaccactagcgatgtgggaaattccaatgactataagccaccaaaagtcgctctcactactgcggccattccaactaatgccagtgcgccattgacgaatgaatggagttcagtaaaccccgatgaacagtattacgtatacgcccatttttctgagatccaagagttgcaggcaaatgaaaccagggaattcaacatgttactaaatgggaaacttttttttggccctgtggttcctccaaagctagcaataagtactatcctaagtgtgtcgccgaatacttgtgaaggaggggagtgcaatttacagctgataagaaccaacagatcaactcttccacctctacttaacgcttatgaggtctacaaagttattcagtttccgcagttggaaacaaatgaaaccgacgtttctgctgtgaaaaacatccaagccacctatgaattgagtagaatcaactggcaaagcgatccatgcgtccctcaacagtttatgtgggatggtttaaactgcagcatcacagatataaccacgccaccaagaatcactactttaaacttgtcatcaagtggtttaactggaacgataacagctgccattcaaaatcttacgacactagaaaagctggacttgtcgaataataacttgaccggagaggtgccagaatttctaagcaacatgaaatcgctgttggtcataaacttaagcgggaacgatcttaacggtacaattcctcaatctctacaaaggaaaggacttgagctactttatcaaggaaaccccaggcttatttcccctggttcaactgaaaccaaatctggcaagagctttccagtaacaatagttgcatcagttggttctgcagccattcttattgttgtgctggttcttgtactttttctccgaaagaaaaagccgtcggctgttgaagttgttctcccgcgtccaagtaggccaacgatgaatgttccttatgctaactcacctgagccgtcaatcgagatgaaaaagagaaagtttacttattcagaggttacgaaaatgactaataatttcggaagagttgtaggggaaggaggatttggcgttgtctgccatggtactgtaaatggttctgaacaggtggctgttaaactactttcacaatcatcaactcaaggctataaagagttcaaggcagaggttgatcttcttctgagagttcaccatacgaatttggtaagccttgtcggatattgtgatgaaggagaccacttggcccttatctacgagtttgtacccaatggagacttaagacaacatttgtctggaaaaggaggtaaacccatcgtcaattggggtactcggctaagaatagcggcggaggcagcactaggtttggagtacttacacattggatgcacaccaccaatggttcatagagatgtcaaaactacaaacatattgctggacgagcattataaggccaaacttgctgattttgggctctcgagatctttccctgttggaggtgaatctcatgtttcgacggtgattgctggtactcctggttaccttgatccagatcggttgagtgagaaaagtgatgtttacagtttcgggattgttttattagagatgatcacaaaccaagcagtgattgatcgaaaccgcagaaagtctcacataacacaatgggtagggtctgagcttaacggaggagatattgctaagatcatggatctaaagcttaacggtgattatgattctcgttctgcgtggagagctcttgagctagcaatgtcgtgcgcggatcctacctcagcaagacgaccaaccatgtctcatgttgttattgaactaaaagagtgtctcgtgtctgaaaactcgaggagaaatatgagtcgaggcatggatacactaagttcccctgaagtgagcatgatctttgatgctgagatgattcccagagcaagatag

SEQ ID NO: 73353 - protein, 882 aa, Arabidopsis thaliana
  peptide (1)..(882): Ceres Seq. ID no. 4963968
MERSLELLLLLIRTLAIIHISQAQSQQGFISLDCGLPANEPSPYTEPRTGLQFSSDAAFIQSGKIGRIQANLEADFLKPSTTMRYFPDGKRNCYNLNVEKGRNHLIRARFVYGNYDGRDTGPKFDLYLGPNPWATIDLAKQVNGTRPEIMHIPTSNKLQVCLVKTGETTPLISVLEVRPMGSGTYLTKSGSLKLYYREYFSKSDSSLRYPDDIYDRQWTSFFDTEWTQINTTSDVGNSNDYKPPKVALTTAAIPTNASAPLTNEWSSVNPDEQYYVYAHFSEIQELQANETREFNMLLNGKLFFGPVVPPKLAISTILSVSPNTCEGGECNLQLIRTNRSTLPPLLNAYEVYKVIQFPQLETNETDVSAVKNIQATYELSRINWQSDPCVPQQFMWDGLNCSITDITTPPRITTLNLSSSGLTGTITAAIQNLTTLEKLDLSNNNLTGEVPEFLSNMKSLLVINLSGNDLNGTIPQSLQRKGLELLYQGNPRLISPGSTETKSGKSFPVTIVASVGSAAILIVVLVLVLFLRKKKPSAVEVVLPRPSRPTMNVPYANSPEPSIEMKKRKFTYSEVTKMTNNFGRVVGEGGFGVVCHGTVNGSEQVAVKLLSQSSTQGYKEFKAEVDLLLRVHHTNLVSLVGYCDEGDHLALIYEFVPNGDLRQHLSGKGGKPIVNWGTRLRIAAEAALGLEYLHIGCTPPMVHRDVKTTNILLDEHYKAKLADFGLSRSFPVGGESHVSTVIAGTPGYLDPDRLSEKSDVYSFGIVLLEMITNQAVIDRNRRKSHITQWVGSELNGGDIAKIMDLKLNGDYDSRSAWRALELAMSCADPTSARRPTMSHVVIELKECLVSENSRRNMSRGMDTLSSPEVSMIFDAEMIPRAR

SEQ ID NO: 73354 - protein, 800 aa, Arabidopsis thaliana
  peptide (1)..(800): Ceres Seq. ID no. 4963969
MRYFPDGKRNCYNLNVEKGRNHLIRARFVYGNYDGRDTGPKFDLYLGPNPWATIDLAKQVNGTRPEIMHIPTSNKLQVCLVKTGETTPLISVLEVRPMGSGTYLTKSGSLKLYYREYFSKSDSSLRYPDDIYDRQWTSFFDTEWTQINTTSDVGNSNDYKPPKVALTTAAIPTNASAPLTNEWSSVNPDEQYYVYAHFSEIQELQANETREFNMLLNGKLFFGPVVPPKLAISTILSVSPNTCEGGECNLQLIRTNRSTLPPLLNAYEVYKVIQFPQLETNETDVSAVKNIQATYELSRINWQSDPCVPQQFMWDGLNCSITDITTPPRITTLNLSSSGLTGTITAAIQNLTTLEKLDLSNNNLTGEVPEFLSNMKSLLVINLSGNDLNGTIPQSLQRKGLELLYQGNPRLISPGSTETKSGKSFPVTIVASVGSAAILIVVLVLVLFLRKKKPSAVEVVLPRPSRPTMNVPYANSPEPSIEMKKRKFTYSEVTKMTNNFGRVVGEGGFGVVCHGTVNGSEQVAVKLLSQSSTQGYKEFKAEVDLLLRVHHTNLVSLVGYCDEGDHLALIYEFVPNGDLRQHLSGKGGKPIVNWGTRLRIAAEAALGLEYLHIGCTPPMVHRDVKTTNILLDEHYKAKLADFGLSRSFPVGGESHVSTVIAGTPGYLDPDRLSEKSDVYSFGIVLLEMITNQAVIDRNRRKSHITQWVGSELNGGDIAKIMDLKLNGDYDSRSAWRALELAMSCADPTSARRPTMSHVVIELKECLVSENSRRNMSRGMDTLSSPEVSMIFDAEMIPRAR

SEQ ID NO: 73355 - protein, 733 aa, Arabidopsis thaliana
  peptide (1)..(733): Ceres Seq. ID no. 4963970
MHIPTSNKLQVCLVKTGETTPLISVLEVRPMGSGTYLTKSGSLKLYYREYFSKSDSSLRYPDDIYDRQWTSFFDTEWTQINTTSDVGNSNDYKPPKVALTTAAIPTNASAPLTNEWSSVNPDEQYYVYAHFSEIQELQANETREFNMLLNGKLFFGPVVPPKLAISTILSVSPNTCEGGECNLQLIRTNRSTLPPLLNAYEVYKVIQFPQLETNETDVSAVKNIQATYELSRINWQSDPCVPQQFMWDGLNCSITDITTPPRITTLNLSSSGLTGTITAAIQNLTTLEKLDLSNNNLTGEVPEFLSNMKSLLVINLSGNDLNGTIPQSLQRKGLELLYQGNPRLISPGSTETKSGKSFPVTIVASVGSAAILIVVLVLVLFLRKKKPSAVEVVLPRPSRPTMNVPYANSPEPSIEMKKRKFTYSEVTKMTNNFGRVVGEGGFGVVCHGTVNGSEQVAVKLLSQSSTQGYKEFKAEVDLLLRVHHTNLVSLVGYCDEGDHLALIYEFVPNGDLRQHLSGKGGKPIVNWGTRLRIAAEAALGLEYLHIGCTPPMVHRDVKTTNILLDEHYKAKLADFGLSRSFPVGGESHVSTVIAGTPGYLDPDRLSEKSDVYSFGIVLLEMITNQAVIDRNRRKSHITQWVGSELNGGDIAKIMDLKLNGDYDSRSAWRALELAMSCADPTSARRPTMSHVVIELKECLVSENSRRNMSRGMDTLSSPEVSMIFDAEMIPRAR

SEQ ID NO: 73356 - DNA, 1500 bp, Arabidopsis thaliana
  misc_feature (1)..(1500): Ceres Seq. ID no. 4964030
  misc_feature (1)..(1500): Ortholog of  Ceres SEQ ID NO 12586556 as cited in SEQ ID NO 64667
  misc_feature (1)..(1500): Ortholog of  Ceres SEQ ID NO 13660894 as cited in SEQ ID NO 67475
atgataaattatagtagttgttcatatctcttgaagctgtgtagaacccttaaacatctgcatcagtttcatgcccaattcatcacttccggcagaatctctaatgatttcaaacaaaactctgttttcgccaatgtcctcttcgccatcacctctatttcaccgtctgcgtcggcgtcgaaggaggtcgtgagctacgcgacttcagttttcagattcatcacaaacccttcaacgttttgtttcaatacgatcattaggatttgtacgcttcatgagccgtcgtctctgtcttctaaacgtttcttcgtcgagatgcgacgtcgctctgttcctccagatttccacactttccctttcgtattcaaggcttgtgcagcaaagaagaatggtgatcttacattagtcaagactctgcattgtcaagctttgagattcggattgttatctgatttgttcactttgaacactctgattcgtgtttactcattgattgctccaatcgatagtgccttgcaactgttcgacgaaaatcctcaaagagatgttgttacctacaatgtgttgatcgacgggttagtgaaggcacgtgagattgttcgtgcaagagagttgtttgattcaatgcccttacgtgatttggtttcgtggaatagtctcatttctggttatgcgcagatgaatcattgcagagaagcaatcaaactcttcgacgagatggttgctttgggtctaaaacccgataatgtcgccattgtttcaactctttcagcttgtgcacaatcaggggattggcaaaaagggaaagctattcatgattacacgaaaaggaagagacttttcattgattccttcttagctactggattggtggatttctatgcaaaatgtggtttcatcgatacagcgatggagatcttcgaattatgttcagataaaactttattcacatggaatgcaatgatcactggtcttgcaatgcacggtaacggtgagctaacggttgattacttccgtaagatggttagttctggaatcaaaccagacggagtaaccttcataagtgttttagtgggttgcagccattctggtctagttgatgaagccaggaacctttttgaccaaatgagatctttgtatgatgttaatagagagatgaagcattacgggtgtatggcggatttgcttggaagagcaggattgatcgaagaagcagcggaaatgatcgagcaaatgcctaaagatggaggaaacagagagaaactcttagcatggagcggtttgttaggcggatgcagaatccacgggaacatagagatcgcggagaaagccgcaaatcgagtcaaggcgttgagtcccgaagatggaggagtgtataaagttatggtggaaatgtatgcaaacgcagagagatgggaggaagtagttaaggttagagaaataatagacagagacaagaaagtgaagaagaatgttggatttagtaaagttttgtcatag

SEQ ID NO: 73357 - protein, 499 aa, Arabidopsis thaliana
  peptide (1)..(499): Ceres Seq. ID no. 4964031
MINYSSCSYLLKLCRTLKHLHQFHAQFITSGRISNDFKQNSVFANVLFAITSISPSASASKEVVSYATSVFRFITNPSTFCFNTIIRICTLHEPSSLSSKRFFVEMRRRSVPPDFHTFPFVFKACAAKKNGDLTLVKTLHCQALRFGLLSDLFTLNTLIRVYSLIAPIDSALQLFDENPQRDVVTYNVLIDGLVKAREIVRARELFDSMPLRDLVSWNSLISGYAQMNHCREAIKLFDEMVALGLKPDNVAIVSTLSACAQSGDWQKGKAIHDYTKRKRLFIDSFLATGLVDFYAKCGFIDTAMEIFELCSDKTLFTWNAMITGLAMHGNGELTVDYFRKMVSSGIKPDGVTFISVLVGCSHSGLVDEARNLFDQMRSLYDVNREMKHYGCMADLLGRAGLIEEAAEMIEQMPKDGGNREKLLAWSGLLGGCRIHGNIEIAEKAANRVKALSPEDGGVYKVMVEMYANAERWEEVVKVREIIDRDKKVKKNVGFSKVLS

SEQ ID NO: 73358 - protein, 394 aa, Arabidopsis thaliana
  peptide (1)..(394): Ceres Seq. ID no. 4964032
MRRRSVPPDFHTFPFVFKACAAKKNGDLTLVKTLHCQALRFGLLSDLFTLNTLIRVYSLIAPIDSALQLFDENPQRDVVTYNVLIDGLVKAREIVRARELFDSMPLRDLVSWNSLISGYAQMNHCREAIKLFDEMVALGLKPDNVAIVSTLSACAQSGDWQKGKAIHDYTKRKRLFIDSFLATGLVDFYAKCGFIDTAMEIFELCSDKTLFTWNAMITGLAMHGNGELTVDYFRKMVSSGIKPDGVTFISVLVGCSHSGLVDEARNLFDQMRSLYDVNREMKHYGCMADLLGRAGLIEEAAEMIEQMPKDGGNREKLLAWSGLLGGCRIHGNIEIAEKAANRVKALSPEDGGVYKVMVEMYANAERWEEVVKVREIIDRDKKVKKNVGFSKVLS

SEQ ID NO: 73359 - protein, 291 aa, Arabidopsis thaliana
  peptide (1)..(291): Ceres Seq. ID no. 4964033
MPLRDLVSWNSLISGYAQMNHCREAIKLFDEMVALGLKPDNVAIVSTLSACAQSGDWQKGKAIHDYTKRKRLFIDSFLATGLVDFYAKCGFIDTAMEIFELCSDKTLFTWNAMITGLAMHGNGELTVDYFRKMVSSGIKPDGVTFISVLVGCSHSGLVDEARNLFDQMRSLYDVNREMKHYGCMADLLGRAGLIEEAAEMIEQMPKDGGNREKLLAWSGLLGGCRIHGNIEIAEKAANRVKALSPEDGGVYKVMVEMYANAERWEEVVKVREIIDRDKKVKKNVGFSKVLS

SEQ ID NO: 73360 - DNA, 1155 bp, Arabidopsis thaliana
  misc_feature (1)..(1155): Ceres Seq. ID no. 4964091
  misc_feature (1)..(1155): Ortholog of  Ceres SEQ ID NO 14301916 as cited in SEQ ID NO 69281
atgtataagaatcagcttcaagagcttgcacagagaagttgtttcaacttaccatcatatacttgcataagagaaggaccagatcatgctccaagattcaaagcttctgttaacttcaatggtgagatatttgagagtcccacttactgttctactctcagacaagctgagcatgcagctgctgaagtttcccttaatgtcctttcgtctagagtcccttcaaagtctctaactgctaagattcttgatgagacagggatttacaagaacctgcttcaagagacagcacatagagctggtcttgatctaccaatgtacacaagtgtgagatcaggatcttgtcacttcccaggtttctcttgtactgttgaacttgctgggatgacgtttacaggagaatcagcaaagacaaagaaacaagctgagaaaaacgcagccattgcagcttggtcctctttgaagaaaaagaaggaacaagaagcagtagcaagagtactctcaagatttaaacccaaagaagtaagaagacgagagacaacaaaccaatggagaagaagaacaagtcaacaagattcaaacaaggatttgttgattgagagattgagatggatcaatcttttgaccaatcaagcttcttcatcatcatcaacatcaacaccgaatcaacacaaaaactccagtttcatctctctaattcccccaccaccaccacctaaatcctccaaaattttgccatttatccagcaatacaaagacagatcatcacaagaagctaagacagagacagcgacagagatgatcaacagcaaagccaaagtcaatgaaacatcaaccagattgagtaagcaaatgcccttttccgacatgaacagatacaactttgtcggagggtgtagcgtaaacccttatagtctggctccagcggttcaaatgagatcagtgattccagttttcgcagctccaccaccgaaaccaaaccccaaccttaacccatcatcattatcatcatcagtcaatgaattcacctcatccaataattcctgctctgttctgaatacgccgggattgggaggccaagagaagaagaatctaactcgcgaaatgatcaaacttggttcagaatcgagaattttggatcaaacccatgatagttag

SEQ ID NO: 73361 - protein, 384 aa, Arabidopsis thaliana
  peptide (1)..(384): Ceres Seq. ID no. 4964092
MYKNQLQELAQRSCFNLPSYTCIREGPDHAPRFKASVNFNGEIFESPTYCSTLRQAEHAAAEVSLNVLSSRVPSKSLTAKILDETGIYKNLLQETAHRAGLDLPMYTSVRSGSCHFPGFSCTVELAGMTFTGESAKTKKQAEKNAAIAAWSSLKKKKEQEAVARVLSRFKPKEVRRRETTNQWRRRTSQQDSNKDLLIERLRWINLLTNQASSSSSTSTPNQHKNSSFISLIPPPPPPKSSKILPFIQQYKDRSSQEAKTETATEMINSKAKVNETSTRLSKQMPFSDMNRYNFVGGCSVNPYSLAPAVQMRSVIPVFAAPPPKPNPNLNPSSLSSSVNEFTSSNNSCSVLNTPGLGGQEKKNLTREMIKLGSESRILDQTHDS

SEQ ID NO: 73362 - protein, 280 aa, Arabidopsis thaliana
  peptide (1)..(280): Ceres Seq. ID no. 4964093
MYTSVRSGSCHFPGFSCTVELAGMTFTGESAKTKKQAEKNAAIAAWSSLKKKKEQEAVARVLSRFKPKEVRRRETTNQWRRRTSQQDSNKDLLIERLRWINLLTNQASSSSSTSTPNQHKNSSFISLIPPPPPPKSSKILPFIQQYKDRSSQEAKTETATEMINSKAKVNETSTRLSKQMPFSDMNRYNFVGGCSVNPYSLAPAVQMRSVIPVFAAPPPKPNPNLNPSSLSSSVNEFTSSNNSCSVLNTPGLGGQEKKNLTREMIKLGSESRILDQTHDS

SEQ ID NO: 73363 - protein, 257 aa, Arabidopsis thaliana
  peptide (1)..(257): Ceres Seq. ID no. 4964094
MTFTGESAKTKKQAEKNAAIAAWSSLKKKKEQEAVARVLSRFKPKEVRRRETTNQWRRRTSQQDSNKDLLIERLRWINLLTNQASSSSSTSTPNQHKNSSFISLIPPPPPPKSSKILPFIQQYKDRSSQEAKTETATEMINSKAKVNETSTRLSKQMPFSDMNRYNFVGGCSVNPYSLAPAVQMRSVIPVFAAPPPKPNPNLNPSSLSSSVNEFTSSNNSCSVLNTPGLGGQEKKNLTREMIKLGSESRILDQTHDS

SEQ ID NO: 73364 - DNA, 708 bp, Arabidopsis thaliana
  misc_feature (1)..(708): Ceres Seq. ID no. 4964245
  misc_feature (1)..(708): Ortholog of  Ceres SEQ ID NO 15168509 as cited in SEQ ID NO 57909
  misc_feature (1)..(708): Ortholog of  Ceres SEQ ID NO 13594429 as cited in SEQ ID NO 58006
  misc_feature (1)..(708): Ortholog of  Ceres SEQ ID NO 13661403 as cited in SEQ ID NO 61549
atggttttggagttttcccgacaagaaaccgacccgggtcatgattttgtgcaagagtcgaccaacctttttggtgtccaagaaagagggcagatctcgtttcccgaccagaatcttgattggtacaacaccgaaaccataaaccctaaaaaagataaacatcgttctaaaccaagttccgggagctacgatatactggagctagacgtagcggacctactagcgaaatacacgcattactgccagatttgtgggaaagggtttaagagagacgctaatctaaggatgcacatgagagcgcacggggatgagtacaagacacgtgaggccttgatcagcccaacgagccaagacaagaaaggaggatactcgttaaagaaacattactactcctgtcctcaacacgggtgtagatggaaccagaggcacgagaagtttcaaccgttgaaatctgtgatttgcgccaagaatcattacaagaggagtcattgtcccaaaatgtatatgtgcaggagatgtagtgtgaagcatttctcggttctgtctgatcttaggacacacgagaagcattgtggggatataaagtgggtttgctcttgtgggactaaattttctaggaaagacaagctgatgagccacgtttctttgtttttgggccacgtaccggcacatgggtcgtccaagccgccgacaatcaccctaaagtaa

SEQ ID NO: 73365 - protein, 235 aa, Arabidopsis thaliana
  peptide (1)..(235): Ceres Seq. ID no. 4964246
MVLEFSRQETDPGHDFVQESTNLFGVQERGQISFPDQNLDWYNTETINPKKDKHRSKPSSGSYDILELDVADLLAKYTHYCQICGKGFKRDANLRMHMRAHGDEYKTREALISPTSQDKKGGYSLKKHYYSCPQHGCRWNQRHEKFQPLKSVICAKNHYKRSHCPKMYMCRRCSVKHFSVLSDLRTHEKHCGDIKWVCSCGTKFSRKDKLMSHVSLFLGHVPAHGSSKPPTITLK

SEQ ID NO: 73366 - protein, 140 aa, Arabidopsis thaliana
  peptide (1)..(140): Ceres Seq. ID no. 4964247
MHMRAHGDEYKTREALISPTSQDKKGGYSLKKHYYSCPQHGCRWNQRHEKFQPLKSVICAKNHYKRSHCPKMYMCRRCSVKHFSVLSDLRTHEKHCGDIKWVCSCGTKFSRKDKLMSHVSLFLGHVPAHGSSKPPTITLK

SEQ ID NO: 73367 - protein, 138 aa, Arabidopsis thaliana
  peptide (1)..(138): Ceres Seq. ID no. 4964248
MRAHGDEYKTREALISPTSQDKKGGYSLKKHYYSCPQHGCRWNQRHEKFQPLKSVICAKNHYKRSHCPKMYMCRRCSVKHFSVLSDLRTHEKHCGDIKWVCSCGTKFSRKDKLMSHVSLFLGHVPAHGSSKPPTITLK

SEQ ID NO: 73368 - DNA, 1409 bp, Arabidopsis thaliana
  misc_feature (1)..(1409): Ceres Seq. ID no. 4964275
  misc_feature (1)..(1409): Ortholog of  Ceres SEQ ID NO 14316239 as cited in SEQ ID NO 54472
  misc_feature (1)..(1409): Ortholog of  Ceres SEQ ID NO 13654809 as cited in SEQ ID NO 62798
aaaaagctcttttaggtcactctctatttttcgctccctcgccggactttgctgacgccgccggttatatcttctagtctcattcgtcgacatgaagctcactgttaagactctcaagggtagccattttgagattagggttcttcccaccgacacgataatggcggtgaagaagaatattgaagattcacaaagcaaagacaactatccttgtgggcagcaattactgattcacaatggaaaggttttgaaagatgaaactaccttggtggagaacaaggttaccgaggagggttttcttgtcgtgatgcttagcaagagcaaaactgcaagttcagctggtccctcttctactcagcctacttctaccacgacatctaccatatcttcaaccacgcttgcagctccgtcgacaacccagtctattgctgtgccggcttcaaattctactcccgttcaagaacaaccaacggcacaaagtgacacctatggtcaagctgcttcaactttagttagtggcagtagtattgagcaaatggttcaacaaataatggaaatgggaggaggcagttgggacaaagaaacggttactcgtgcacttcgtgcagcatataacaaccctgagagagcagtggattatctatattctggaattcctgaaacagtaaccattccagcaactaatttatctggagtaggatctggtagagaacttactgctcctcctccctctggaggccctaattcatctcctctggatttgtttccccaggaagcagtttctgatgcagcaggtggagatcttggaacgcttgaattcctcagaggcaatgatcagttccaacaattacgctccatggtcaattccaacccccagattctgcagcctatgcttcaagagctcggaaagcagaacccccaacttctgaggctaattcaagagaaccaagccgaatttcttcagttactaaacgagccctacgaaggatctgacggggatgtggatatcttcgatcaacctgatcaagaaatgccccactcagtcaacgttacccctgaagagcaagaatcaattgaacggcttgaggcaatggggtttgatagagcaatagtcatagaagccttcctttcctgtgaccgtaacgaggaattggctgcaaactatctactagagcactcagcagattttgaagactgagttccgagccttttaacctgaacaaagcacaagattttgttttgtttctccaccccttttatctgaactgttactatgctcagagaatcaaatgattatatcttacacctccatatttaccttgaagaataatctgcgttttccacactgtaaacacaattcattgtgtttctctctactgaaatgattattaacaatatgatatggtttt

SEQ ID NO: 73369 - protein, 368 aa, Arabidopsis thaliana; identical to SEQ ID NO: 21823
  peptide (1)..(368): Ceres Seq. ID no. 4964276

SEQ ID NO: 73370 - protein, 345 aa, Arabidopsis thaliana; identical to SEQ ID NO: 21824
  peptide (1)..(345): Ceres Seq. ID no. 4964277

SEQ ID NO: 73371 - protein, 296 aa, Arabidopsis thaliana; identical to SEQ ID NO: 21825
  peptide (1)..(296): Ceres Seq. ID no. 4964278

SEQ ID NO: 73372 - DNA, 1112 bp, Arabidopsis thaliana
  misc_feature (1)..(1112): Ceres Seq. ID no. 4964291
  misc_feature (1)..(1112): Ortholog of  Ceres SEQ ID NO 12593170 as cited in SEQ ID NO 63263
  misc_feature (1)..(1112): Ortholog of  Ceres SEQ ID NO 14301882 as cited in SEQ ID NO 64381
  misc_feature (1)..(1112): Ortholog of  Ceres SEQ ID NO 13597851 as cited in SEQ ID NO 64869
  misc_feature (1)..(1112): Ortholog of  Ceres SEQ ID NO 13662420 as cited in SEQ ID NO 68680
atcagtttgctttcacagtggagtcggtgctctctttttttttcttctctctttcttttcacctctcgccggatcccggcgatcttataggaggcaaatctatcagtatcgttattctaggatctctaacaaacaatgaatcgccaccacgatcccaatcctttcgatgaggacgaagaaatcgtcaatcctttttcgaaaggtggtggaagggttcctgctgcatctaggccagttgaatatggtcaaagccttgatgctactgttgatattccattggataatatgaatgactcttcacagaaacagagaaagcttgctgactgggaagctgagctcaggaagaaagaaatggatataaagcgaagagaggaagctattgctaaatttggtgtgcagatagatgataaaaactggccaccgtttttcccaatcatacaccatgacattgctaaagagataccagttcatgcacaaaagctgcagtatctggctttcgctagttggttaggtatcgttctgtgtctggtattcaatgtcattgcaacgatggtctgctggattaaaggcggaggtgttaaaatctttttcctggccacaatatatgcattgatcggatgtccactctcttatgtactatggtacaggccactctaccgagccatgaggactgacagtgctttgaagtttggttggtttttcttcacctacttgattcacattggcttctgcatcgttgctgccatcgcccctccaatctttttccatggaaaatcattaacgggtgtgcttgcagcaattgatgtcatctcagacagtttattagctgggatcttctactttatcggattcggtctcttctgcttggagtcactgctgagtctatgggttcttcagaaaatttacctctactttaggggaaacaagtgaaaaggagataaagaggaagatgatggtaattttcccttacgatataaggtctgaaatatgtgtatctcctatgaatgtaattaccattttaccgtttgatgcgttgtgttgattgaggtaaattctttagttactatagtagcaagagagagtggttgttcggccatttctttatgtttttt

SEQ ID NO: 73373 - protein, 264 aa, Arabidopsis thaliana; identical to SEQ ID NO: 22900
  peptide (1)..(264): Ceres Seq. ID no. 4964292

SEQ ID NO: 73374 - protein, 214 aa, Arabidopsis thaliana; identical to SEQ ID NO: 22901
  peptide (1)..(214): Ceres Seq. ID no. 4964293

SEQ ID NO: 73375 - protein, 192 aa, Arabidopsis thaliana; identical to SEQ ID NO: 22902
  peptide (1)..(192): Ceres Seq. ID no. 4964294

SEQ ID NO: 73376 - DNA, 1180 bp, Arabidopsis thaliana
  misc_feature (1)..(1180): Ceres Seq. ID no. 4964369
  misc_feature (1)..(1180): Ortholog of  Ceres SEQ ID NO 12609146 as cited in SEQ ID NO 52118
  misc_feature (1)..(1180): Ortholog of  Ceres SEQ ID NO 13594056 as cited in SEQ ID NO 55691
  misc_feature (1)..(1180): Ortholog of  Ceres SEQ ID NO 13638136 as cited in SEQ ID NO 58644
  misc_feature (1)..(1180): Ortholog of  Ceres SEQ ID NO 13596868 as cited in SEQ ID NO 62806
  misc_feature (1)..(1180): Ortholog of  Ceres SEQ ID NO 13595885 as cited in SEQ ID NO 69265
  misc_feature (1)..(1180): Ortholog of  Ceres SEQ ID NO 12566239 as cited in SEQ ID NO 0
  misc_feature (1)..(1180): Ortholog of  Ceres SEQ ID NO 13599119 as cited in SEQ ID NO 0
aaaccagaattattaaatttgatttcagtggatataaatttctctcaagaaaacgacattaacgaaggagagccaaagcttcgtcgttgatcattcctccgtagttgcggaattgaacccaacttaggaatcaaatgcccaagatctgctgctctcgttccgctacacaagttgtggtagcacaaaaatcaaactcgggtaaaggaagaaacggtgaaggaggaatcaagtatggatttagtttgataaaagggaaatctaaccattcaatggaggattatcatgttgctaagtttaccaatttcaatggcaatgaattggggctttttgcaatctttgatggtcataaaggtgatcatgttgctgcttatctgcagaaacatctcttctctaatatccttaaagatggagagttcttggttgatcctcgaagagcaattgcgaaagcttatgagaatacagatcaaaagattttagcagataatagaacggatttagagagtggtggttcgactgctgtgactgcgattttgatcaatgggaaagctttgtggatagctaatgttggtgattcacgagctattgtttctagtcgaggtaaagcaaaacagatgagtgttgatcatgatcctgatgatgatactgagaggagtatgattgagagtaaaggtggatttgtgaccaacagaccgtgatgttcctcgagtgaacggtttgttagcggtctctcgtgtctttggagataaaaaccttaaagcatatttgaactcagagcctgagattaaggacgtaaccattgatagtcacacagattttcttattctggctagtgacggtatttcgaaggtgatgtcaaaccaagaagcagttgatgtagctaagaagttgaaagatccaaaggaagcggcgaggcaagtagttgctgaagcattgaaaagaaacagcaaggatgacatatcttgcattgttgtccggtttagatgataaccaagaagactcagcttatattggatttggagcttcctttgcttcaccatgattcttttggggtccggtttagtttgattctgggtcttggttacttgtgcatttttaagaacatgagtttgaataggactattatatattactagtttgacaaaccagatattttatcatataaattacatgaaaagaatag

SEQ ID NO: 73377 - protein, 186 aa, Arabidopsis thaliana; identical to SEQ ID NO: 24675
  peptide (1)..(186): Ceres Seq. ID no. 4964370

SEQ ID NO: 73378 - protein, 141 aa, Arabidopsis thaliana; identical to SEQ ID NO: 24676
  peptide (1)..(141): Ceres Seq. ID no. 4964371

SEQ ID NO: 73379 - DNA, 1928 bp, Arabidopsis thaliana
  misc_feature (1)..(1928): Ceres Seq. ID no. 4964561
  misc_feature (1)..(1928): Ortholog of  Ceres SEQ ID NO 13598582 as cited in SEQ ID NO 65294
  misc_feature (1)..(1928): Ortholog of  Ceres SEQ ID NO 15176145 as cited in SEQ ID NO 0
gattgattccaatcttctttcattttcttcttcttcttcttctggggaaggggcaggttaaaattatgccatctattcaaatcgtgcctatcctcagatcttaactcttttctctacgagattcggcatctgggttttattcttcttgagcaaaatgcaatcggataatggaaagcttttcatcggtgggatatcttgggacaccaatgaggaacgtctcaaggagtatttcagcagttttggagaagtgatcgaagctgtcatcttgaaagatcgtaccactggtcgtgctcgtggtttcggttttgttgtttttgctgatcctgctgttgctgagattgttatcaccgaaaaacataatattgatggcagattggttgaagccaagaaagctgttcccagagatgaccaaaacatggtaaatagaagcaacagcagtagcatccaaggttctcccggtggtccaggtcgcacaaggaagatatttgttggaggattaccttcttcggttacagagagtgatttcaagacgtattttgagcagtttggtacaactacggatgtggttgtcatgtatgatcacaacacacaaaggcctagaggtttcgggtttataacctacgattccgaggaggcggttgaaaaggtattgctcaagacattccatgaactaaatggtaaaatggttgaggttaagcgagctgttccaaaggagttatctccaggtccaagtcgcagtcctcttggtgcaggttacagctatggagttaatagggtcaataacctccttaatgggtatgctcaagggtttaatcccgctgcagttggaggctacggacttaggatggatggtcggttcagtccggttggtgctggaagaagcgggtttgcaaattacagttctggatacgggatgaatgtgaactttgatcagggattgcccacagggttcacgggaggtacaaattacaatggaaatgttgactatggccgaggaatgagcccgtactacattggtaacacaaacaggtttggtcctgcggttggctatgaagggggcaacggaggaggaaactcatccttcttcagttcggttacacggaacttatggggaaacaatggtggtcttaactataacaacaataatacaaactcaaactccaatacatatatgggaggatcatcaagtgggaacaacacacttagtggtccatttggaaattcaggagtcaattggggtgctcctggaggaggaaacaatgctgtgagtaacgagaatgtgaagtttggttatggaggaaacggtgaatctggttttgggttgggaacaggtggttatgcagcaagaaacccaggggctaacaaggcagcaccatcctcttcattctcttctgcctcagcaaccaacaacacgggttatgatacagcaggacttgcagagttttacgggaatggtgcagtttatagtgaccctacatggagatcaccaactcctgagacagaagggcctgctccttttagctatgggattggaggaggggttccttcttcagatgtttcagctagaagttcatctccaggttatgttggcagttacagtgtgaacaagagacaaccaaacagaggcgagccatcacggtgaacgatctgtgtcttttggcgaatcttttagattatcttcttttcccttcatacaaagccagtgaggacgaaacttgatcatatcatcacctagagctaaccagagaatcccgcagacttttctgtcatggtttggttttctaaattcattgttcctcctaggcttttttctgctttctttttttttctatttttgttttcttttcttctttcaatgagggacagaagaaactgtatcagtctccggcgaggcggtaatacataaggagagttcaaaacaaaaaccc

SEQ ID NO: 73380 - protein, 495 aa, Arabidopsis thaliana
  peptide (1)..(495): Ceres Seq. ID no. 4964562
MQSDNGKLFIGGISWDTNEERLKEYFSSFGEVIEAVILKDRTTGRARGFGFVVFADPAVAEIVITEKHNIDGRLVEAKKAVPRDDQNMVNRSNSSSIQGSPGGPGRTRKIFVGGLPSSVTESDFKTYFEQFGTTTDVVVMYDHNTQRPRGFGFITYDSEEAVEKVLLKTFHELNGKMVEVKRAVPKELSPGPSRSPLGAGYSYGVNRVNNLLNGYAQGFNPAAVGGYGLRMDGRFSPVGAGRSGFANYSSGYGMNVNFDQGLPTGFTGGTNYNGNVDYGRGMSPYYIGNTNRFGPAVGYEGGNGGGNSSFFSSVTRNLWGNNGGLNYNNNNTNSNSNTYMGGSSSGNNTLSGPFGNSGVNWGAPGGGNNAVSNENVKFGYGGNGESGFGLGTGGYAARNPGANKAAPSSSFSSASATNNTGYDTAGLAEFYGNGAVYSDPTWRSPTPETEGPAPFSYGIGGGVPSSDVSARSSSPGYVGSYSVNKRQPNRGEPSR

SEQ ID NO: 73381 - protein, 408 aa, Arabidopsis thaliana
  peptide (1)..(408): Ceres Seq. ID no. 4964563
MVNRSNSSSIQGSPGGPGRTRKIFVGGLPSSVTESDFKTYFEQFGTTTDVVVMYDHNTQRPRGFGFITYDSEEAVEKVLLKTFHELNGKMVEVKRAVPKELSPGPSRSPLGAGYSYGVNRVNNLLNGYAQGFNPAAVGGYGLRMDGRFSPVGAGRSGFANYSSGYGMNVNFDQGLPTGFTGGTNYNGNVDYGRGMSPYYIGNTNRFGPAVGYEGGNGGGNSSFFSSVTRNLWGNNGGLNYNNNNTNSNSNTYMGGSSSGNNTLSGPFGNSGVNWGAPGGGNNAVSNENVKFGYGGNGESGFGLGTGGYAARNPGANKAAPSSSFSSASATNNTGYDTAGLAEFYGNGAVYSDPTWRSPTPETEGPAPFSYGIGGGVPSSDVSARSSSPGYVGSYSVNKRQPNRGEPSR

SEQ ID NO: 73382 - protein, 356 aa, Arabidopsis thaliana
  peptide (1)..(356): Ceres Seq. ID no. 4964564
MYDHNTQRPRGFGFITYDSEEAVEKVLLKTFHELNGKMVEVKRAVPKELSPGPSRSPLGAGYSYGVNRVNNLLNGYAQGFNPAAVGGYGLRMDGRFSPVGAGRSGFANYSSGYGMNVNFDQGLPTGFTGGTNYNGNVDYGRGMSPYYIGNTNRFGPAVGYEGGNGGGNSSFFSSVTRNLWGNNGGLNYNNNNTNSNSNTYMGGSSSGNNTLSGPFGNSGVNWGAPGGGNNAVSNENVKFGYGGNGESGFGLGTGGYAARNPGANKAAPSSSFSSASATNNTGYDTAGLAEFYGNGAVYSDPTWRSPTPETEGPAPFSYGIGGGVPSSDVSARSSSPGYVGSYSVNKRQPNRGEPSR

SEQ ID NO: 73383 - DNA, 1498 bp, Arabidopsis thaliana
  misc_feature (1)..(1498): Ceres Seq. ID no. 4964597
  misc_feature (1)..(1498): Ortholog of  Ceres SEQ ID NO 14313155 as cited in SEQ ID NO 54706
  misc_feature (1)..(1498): Ortholog of  Ceres SEQ ID NO 13639022 as cited in SEQ ID NO 59811
gattgtctctctcccggagatctctctttctcttcttctccatccttcttctctcggcgcgcgcttcatccccaccaccttcgaattcgtgccctttgagggaagctgctaggatgggtgtgaagcaggctctaaggagcattgatgcgtttccaagagcagaggatcatttgcttcagaagacacaatctggcgctgttgtatctattgttggacttcttataatggctactttgttcttacacgagctgagttattatcttaacacacttacagtgcaccaggatgtcagtggacttaaagcgtggagaaactcttccaattcatgtaaatatgacgtttccatctttaccttgtgatgtactgagcgtagatgctatcgacatgtcagggaagcatgaagtggatcttgatacaaacatttggaagctccgtctcaacagtcatggtcatatcataggcacagaatatatatctgatcttgttgaaaaggggcatgagcatggccactcacctcacaagcatgatggcaaagaagaacacaagaatgagactgaaaccgaagcattgaatattcttggctttgaccaagctgctgagactatgattaaaaaagtgaagcaagcattggcagatggagaaggatgtcgggtttatggtgtcctagatgtacaacgggttgccggaaacttccatatttcagttcatgggctgaacatctatgttgctcagatgatatttggcgggtccaaaaacgtaaacgtgagccatatgattcacgatctatcatttgggccgaaataccccggaattcacaacccacttgatgacaccaaccgaatactccatgacaccagtggaacattcaaatactatattaagattgttcccacagaatatagatatctttcaaaagacgtactgtcaacaaatcagtactctgtaactgaatatttcacgccaatgactgaattcgaccgtacatggccagctgtttacttcttatatgatctttcacctatcactgtgaccatcaaggaagaacgccgtagttttctccacttaatcactcgtctttgcgctgtattaggcggtacatttgctttgacaggaatgttagatcgttggatgttccgctttattgaatctttcaacaagaagccgagtactagagcgtaaactagctgaaacagagacaaaacaatgagaaacaaaaaaaaccaaaggaaggaagaagaatctctcaaatcccaaaacttgtatctgccttcttcagacaacaacacccaccagagattccaggattgatgattacattactcagaaactctagaatccatggatatagtttttttttgagtctctcttatgtattactctgattatctctggttaaactagtagagttaatttgtaatttttattcaccttgcttcctgggattttaacatttttgcatcttttcacttgtctcagtaaaaaaacaaaattatactgt

SEQ ID NO: 73384 - protein, 297 aa, Arabidopsis thaliana
  peptide (1)..(297): Ceres Seq. ID no. 4964598
MSVDLKRGETLPIHVNMTFPSLPCDVLSVDAIDMSGKHEVDLDTNIWKLRLNSHGHIIGTEYISDLVEKGHEHGHSPHKHDGKEEHKNETETEALNILGFDQAAETMIKKVKQALADGEGCRVYGVLDVQRVAGNFHISVHGLNIYVAQMIFGGSKNVNVSHMIHDLSFGPKYPGIHNPLDDTNRILHDTSGTFKYYIKIVPTEYRYLSKDVLSTNQYSVTEYFTPMTEFDRTWPAVYFLYDLSPITVTIKEERRSFLHLITRLCAVLGGTFALTGMLDRWMFRFIESFNKKPSTRA

SEQ ID NO: 73385 - protein, 281 aa, Arabidopsis thaliana
  peptide (1)..(281): Ceres Seq. ID no. 4964599
MTFPSLPCDVLSVDAIDMSGKHEVDLDTNIWKLRLNSHGHIIGTEYISDLVEKGHEHGHSPHKHDGKEEHKNETETEALNILGFDQAAETMIKKVKQALADGEGCRVYGVLDVQRVAGNFHISVHGLNIYVAQMIFGGSKNVNVSHMIHDLSFGPKYPGIHNPLDDTNRILHDTSGTFKYYIKIVPTEYRYLSKDVLSTNQYSVTEYFTPMTEFDRTWPAVYFLYDLSPITVTIKEERRSFLHLITRLCAVLGGTFALTGMLDRWMFRFIESFNKKPSTRA

SEQ ID NO: 73386 - protein, 264 aa, Arabidopsis thaliana
  peptide (1)..(264): Ceres Seq. ID no. 4964600
MSGKHEVDLDTNIWKLRLNSHGHIIGTEYISDLVEKGHEHGHSPHKHDGKEEHKNETETEALNILGFDQAAETMIKKVKQALADGEGCRVYGVLDVQRVAGNFHISVHGLNIYVAQMIFGGSKNVNVSHMIHDLSFGPKYPGIHNPLDDTNRILHDTSGTFKYYIKIVPTEYRYLSKDVLSTNQYSVTEYFTPMTEFDRTWPAVYFLYDLSPITVTIKEERRSFLHLITRLCAVLGGTFALTGMLDRWMFRFIESFNKKPSTRA

SEQ ID NO: 73387 - DNA, 1167 bp, Arabidopsis thaliana
  misc_feature (1)..(1167): Ceres Seq. ID no. 4965295
  misc_feature (1)..(1167): Ortholog of  Ceres SEQ ID NO 13654989 as cited in SEQ ID NO 63117
  misc_feature (1)..(1167): Ortholog of  Ceres SEQ ID NO 13584744 as cited in SEQ ID NO 69137
atgaattgtctgttcttgttcatgtccaagaaaccaaaatccagaggaaatatggagaaagagaaaaaaaacataagaggaagagagttcttgcaaaagtcagctccagaattaacgacgagaaagacaactttgtcgttcaatctcccaacaccaagatctctgccatctccaacgagtatcaaagacttgtacacagacagagaacaaaatcaaaatcaaaacctgagggttttttctttcaaggaactgagtgacgccacttgtgagtttagcaggaagctaaagatcggagaaggtggctttggtagtgtctataaagccaccattaacaatcccaccgtaggagattctcattcttctccacttaccgtagccgttaagaaactcaatagacaaagtctacagggtcacaagcaatggctagcagaggttcactttttgggagtggtgaatcaccctaacgttgtgaggctcttagggtattgctcagaggacagagagagacttttggtttacgagttgatgtctaatcgcagcttggaggatcatctcttcactctaagaaccttaacgttgtcgtggaaacaaaggctcgagatcatgcttggtgcagctcaaggattggcttatttgcacgaaatccaggtaatatacagagacttcaaatcatcaaatgtgctattaaatgaagaattccatccgaaattatccgattttggtctcgctagagaaggtcccgaaggagacaatactcacgttacaaccgcaagagttggaacagacggctatgccgctcccgagtatgtaataaccggtcacctcaagacacattgcgatgtatatagctttggagttgttttgtacgaaattatcactggtcgtcgcacattggaacgaatgaaacctttagctgaacaaaagcttctagaatgggtcaaaaaatatcctattaatagcaaaagattcaaaatgatcgttgactccaagctatgcaataagtatccaattgctatggtcaggagagtggctaaattggctgatcattgtgtgaacaagatcgataaagaaagacctaccatggcctttgtcgtcgaaagtcttacgaatatcattgaggaatcaaattctgaagatatgggaagttctgttggcattagaggctag

SEQ ID NO: 73388 - protein, 388 aa, Arabidopsis thaliana
  peptide (1)..(388): Ceres Seq. ID no. 4965296
MNCLFLFMSKKPKSRGNMEKEKKNIRGREFLQKSAPELTTRKTTLSFNLPTPRSLPSPTSIKDLYTDREQNQNQNLRVFSFKELSDATCEFSRKLKIGEGGFGSVYKATINNPTVGDSHSSPLTVAVKKLNRQSLQGHKQWLAEVHFLGVVNHPNVVRLLGYCSEDRERLLVYELMSNRSLEDHLFTLRTLTLSWKQRLEIMLGAAQGLAYLHEIQVIYRDFKSSNVLLNEEFHPKLSDFGLAREGPEGDNTHVTTARVGTDGYAAPEYVITGHLKTHCDVYSFGVVLYEIITGRRTLERMKPLAEQKLLEWVKKYPINSKRFKMIVDSKLCNKYPIAMVRRVAKLADHCVNKIDKERPTMAFVVESLTNIIEESNSEDMGSSVGIRG

SEQ ID NO: 73389 - protein, 381 aa, Arabidopsis thaliana
  peptide (1)..(381): Ceres Seq. ID no. 4965297
MSKKPKSRGNMEKEKKNIRGREFLQKSAPELTTRKTTLSFNLPTPRSLPSPTSIKDLYTDREQNQNQNLRVFSFKELSDATCEFSRKLKIGEGGFGSVYKATINNPTVGDSHSSPLTVAVKKLNRQSLQGHKQWLAEVHFLGVVNHPNVVRLLGYCSEDRERLLVYELMSNRSLEDHLFTLRTLTLSWKQRLEIMLGAAQGLAYLHEIQVIYRDFKSSNVLLNEEFHPKLSDFGLAREGPEGDNTHVTTARVGTDGYAAPEYVITGHLKTHCDVYSFGVVLYEIITGRRTLERMKPLAEQKLLEWVKKYPINSKRFKMIVDSKLCNKYPIAMVRRVAKLADHCVNKIDKERPTMAFVVESLTNIIEESNSEDMGSSVGIRG

SEQ ID NO: 73390 - protein, 371 aa, Arabidopsis thaliana; identical to SEQ ID NO: 69452
  peptide (1)..(371): Ceres Seq. ID no. 4965298

SEQ ID NO: 73391 - DNA, 1053 bp, Arabidopsis thaliana
  misc_feature (1)..(1053): Ceres Seq. ID no. 4965813
  misc_feature (1)..(1053): Ortholog of  Ceres SEQ ID NO 15178083 as cited in SEQ ID NO 56185
  misc_feature (1)..(1053): Ortholog of  Ceres SEQ ID NO 15225046 as cited in SEQ ID NO 57061
  misc_feature (1)..(1053): Ortholog of  Ceres SEQ ID NO 15179881 as cited in SEQ ID NO 66861
atggtaatggaaacagagtcaaagttccatgttttagctgttgatgatagtctttttgatcggaaaatgattgagagattgcttcaaaagtcttcatgtcaagtaactacagttgattcaggctctaaagctctggaatttctgggtttaagagtagatgacaacgacccaaatgcactctctacatcgccacaaattcatcaggaagttgaaataaatctaataattacagattactgtatgcctggcatgactggttatgatttgctcaagaaagttaaggaatcagcggcgtttagaagtatacctgtagttataatgtcatctgagaacgttcctgcaagaatctccagatgtttggaagaaggagctgaagagtttttcttgaaaccagtgaagttagctgatcttaccaagttgaaacctcatatgatgaaaacgaagttgaagaaagaaagtgagaaaccagttgccatagaagagattgtggtgtctaaaccggagatagaagaagaagaagaagagtcatcagtgattgaaatcttgcctctccaccaagaaattgaatccgaacaacttgaaccaatgttgagtagtaataagagaaaagcaatggaagaagtggtttctactgatcgatcacgtcctaaatacaatgatatcacaacctcgaatctctcagtagaagatctgctaactcttgcatctgaagcaaacaacaacggactgcaaggaggactaacgcaacccgagaagccactacaagacctatatggagaatgccaacagaatctctcagtagaagatctgctaactcttgaatatgaagcaaacaacaacggactgctaggagtaataccgcagcaacatcgttatcatcaggaaaaagagacaatgcagacacaaggagatccactaaatcgaatacctattcaatcagaagcttcaaaccattcagatagtggtgatagcacactaacaatggctcaaaaccaggatggtctcggacacagtagttgttttattctctgtcaatttacttctctcccctag

SEQ ID NO: 73392 - protein, 350 aa, Arabidopsis thaliana
  peptide (1)..(350): Ceres Seq. ID no. 4965814
MVMETESKFHVLAVDDSLFDRKMIERLLQKSSCQVTTVDSGSKALEFLGLRVDDNDPNALSTSPQIHQEVEINLIITDYCMPGMTGYDLLKKVKESAAFRSIPVVIMSSENVPARISRCLEEGAEEFFLKPVKLADLTKLKPHMMKTKLKKESEKPVAIEEIVVSKPEIEEEEEESSVIEILPLHQEIESEQLEPMLSSNKRKAMEEVVSTDRSRPKYNDITTSNLSVEDLLTLASEANNNGLQGGLTQPEKPLQDLYGECQQNLSVEDLLTLEYEANNNGLLGVIPQQHRYHQEKETMQTQGDPLNRIPIQSEASNHSDSGDSTLTMAQNQDGLGHSSCFILCQFTSLP

SEQ ID NO: 73393 - protein, 348 aa, Arabidopsis thaliana
  peptide (1)..(348): Ceres Seq. ID no. 4965815
METESKFHVLAVDDSLFDRKMIERLLQKSSCQVTTVDSGSKALEFLGLRVDDNDPNALSTSPQIHQEVEINLIITDYCMPGMTGYDLLKKVKESAAFRSIPVVIMSSENVPARISRCLEEGAEEFFLKPVKLADLTKLKPHMMKTKLKKESEKPVAIEEIVVSKPEIEEEEEESSVIEILPLHQEIESEQLEPMLSSNKRKAMEEVVSTDRSRPKYNDITTSNLSVEDLLTLASEANNNGLQGGLTQPEKPLQDLYGECQQNLSVEDLLTLEYEANNNGLLGVIPQQHRYHQEKETMQTQGDPLNRIPIQSEASNHSDSGDSTLTMAQNQDGLGHSSCFILCQFTSLP

SEQ ID NO: 73394 - protein, 328 aa, Arabidopsis thaliana
  peptide (1)..(328): Ceres Seq. ID no. 4965816
MIERLLQKSSCQVTTVDSGSKALEFLGLRVDDNDPNALSTSPQIHQEVEINLIITDYCMPGMTGYDLLKKVKESAAFRSIPVVIMSSENVPARISRCLEEGAEEFFLKPVKLADLTKLKPHMMKTKLKKESEKPVAIEEIVVSKPEIEEEEEESSVIEILPLHQEIESEQLEPMLSSNKRKAMEEVVSTDRSRPKYNDITTSNLSVEDLLTLASEANNNGLQGGLTQPEKPLQDLYGECQQNLSVEDLLTLEYEANNNGLLGVIPQQHRYHQEKETMQTQGDPLNRIPIQSEASNHSDSGDSTLTMAQNQDGLGHSSCFILCQFTSLP

SEQ ID NO: 73395 - DNA, 858 bp, Arabidopsis thaliana
  misc_feature (1)..(858): Ceres Seq. ID no. 4965975
  misc_feature (1)..(858): Ortholog of  Ceres SEQ ID NO 15171943 as cited in SEQ ID NO 54306
  misc_feature (1)..(858): Ortholog of  Ceres SEQ ID NO 13655812 as cited in SEQ ID NO 64743
  misc_feature (1)..(858): Ortholog of  Ceres SEQ ID NO 15178828 as cited in SEQ ID NO 0
atgtcagaccaagaggctcctctgcgtaatggagtagaacacaagattttcgaagtacttccgtttgtggatgatgattacggtggagtcatcgtggagatgaaaactcctatggatactaagaatttcgttgcagcgcttagagattcattcgagcagtggcgcttacagggtaaaaagggagtctggttgaacttgcctctctcacacgtaaacctcgtggaacccgcggttaaggaaggtttccggtatcaccatgctgagccaacttacctgatgctagtttattggattccggaagccgagagtactattcctttgaatgcttcccatcgtgttcgtgtaggtgctgttgtcttgaaccataacaaagaggaaaaatacggttcattatgcggatcaggtatctggaagatcccaacaggagttgttgacgagggtgaggagattttcgccgcagccattagagaagtaaaagaagaaacaggcgtaagaagatccatatatcttaatatcgacactgagtttttggagattctagctttctgccaaacccacgagtcattttttgcaaagtcagatttattcttcgtttgtctcttgagacctacctccttcgatattcaaaaacaggacttagagatcgaagcagctcaatggatgcggttcgaggactctgcctctcaacctatcacacacaagaacgatctcttcaaagatattcaccacatttgctcaatgaaaatggagaagagctatagtggtttttcaaaaaaacctattacaactttctttgacgacaagttaggttatctctacttgaataaacaagaagatatggaacaacctatttcttaa

SEQ ID NO: 73396 - protein, 285 aa, Arabidopsis thaliana
  peptide (1)..(285): Ceres Seq. ID no. 4965976
MSDQEAPLRNGVEHKIFEVLPFVDDDYGGVIVEMKTPMDTKNFVAALRDSFEQWRLQGKKGVWLNLPLSHVNLVEPAVKEGFRYHHAEPTYLMLVYWIPEAESTIPLNASHRVRVGAVVLNHNKEEKYGSLCGSGIWKIPTGVVDEGEEIFAAAIREVKEETGVRRSIYLNIDTEFLEILAFCQTHESFFAKSDLFFVCLLRPTSFDIQKQDLEIEAAQWMRFEDSASQPITHKNDLFKDIHHICSMKMEKSYSGFSKKPITTFFDDKLGYLYLNKQEDMEQPIS

SEQ ID NO: 73397 - protein, 252 aa, Arabidopsis thaliana
  peptide (1)..(252): Ceres Seq. ID no. 4965977
MKTPMDTKNFVAALRDSFEQWRLQGKKGVWLNLPLSHVNLVEPAVKEGFRYHHAEPTYLMLVYWIPEAESTIPLNASHRVRVGAVVLNHNKEEKYGSLCGSGIWKIPTGVVDEGEEIFAAAIREVKEETGVRRSIYLNIDTEFLEILAFCQTHESFFAKSDLFFVCLLRPTSFDIQKQDLEIEAAQWMRFEDSASQPITHKNDLFKDIHHICSMKMEKSYSGFSKKPITTFFDDKLGYLYLNKQEDMEQPIS

SEQ ID NO: 73398 - protein, 248 aa, Arabidopsis thaliana
  peptide (1)..(248): Ceres Seq. ID no. 4965978
MDTKNFVAALRDSFEQWRLQGKKGVWLNLPLSHVNLVEPAVKEGFRYHHAEPTYLMLVYWIPEAESTIPLNASHRVRVGAVVLNHNKEEKYGSLCGSGIWKIPTGVVDEGEEIFAAAIREVKEETGVRRSIYLNIDTEFLEILAFCQTHESFFAKSDLFFVCLLRPTSFDIQKQDLEIEAAQWMRFEDSASQPITHKNDLFKDIHHICSMKMEKSYSGFSKKPITTFFDDKLGYLYLNKQEDMEQPIS

SEQ ID NO: 73399 - DNA, 1389 bp, Arabidopsis thaliana
  misc_feature (1)..(1389): Ceres Seq. ID no. 4966077
  misc_feature (1)..(1389): Ortholog of  Ceres SEQ ID NO 13503610 as cited in SEQ ID NO 62416
  misc_feature (1)..(1389): Ortholog of  Ceres SEQ ID NO 13657610 as cited in SEQ ID NO 66165
  misc_feature (1)..(1389): Ortholog of  Ceres SEQ ID NO 13598312 as cited in SEQ ID NO 68448
  misc_feature (1)..(1389): Ortholog of  Ceres SEQ ID NO 13596100 as cited in SEQ ID NO 68573
atggcagatttcaaaattcttttgcttatactcatccttatatctctctttgaacttgatctacttcattttcaccatgacttcttctctccttttccggtcaagatcggtttactcctgatatccatcttcttctatgcctactcaaccacccggtctaaaccggtttacctagtggatttctcatgtcaccaacccacggattcttgcaaaatctcatccgaaacgttcttcaacatggccaaaggcgctcaactctacaccgatgaaacaatccaattcatgacgaggatattaaaccggtccggtttaggagacgatacgtactccccacgttgcatgttaacctctccaccaactccatcaatgtacgaggcgagacatgaatccgaattagttatcttcggagctcttaactcactattcaagaaaaccggaatcgaaccgagagaagtcggaatcttcattgtaaactgcagcttgtttaaccctaacccatctctctcgtccatgatcgtaaaccggtacaagcttaaaaccgacgtcaaaacttacaatctctccggtatgggatgcagcgccggcgcaatctccgtcgacctcgccacaaatctactaaaggcaaaccctaatacctacgcagttattgttagtacggagaacatgaccctaagcatgtatcgaggcaacgaccggtcaatgttagtccctaactgtctattccgagtaggtggcgctgcggttatgctctcaaaccggagtcaagaccgagtccggtctaagtacgaattgactcatattgtaaggactcacaaaggctctagcgataaacactacacttgtgctgaacaaaaagaagatagtaaaggtatcgttggagtcgcactctctaaagaactaacggttgttgctggtgactcgttaaagacgaatctaacagcacttggtccgcttgtgttgcctttatctgaaaaactccggtttatcctctttttggtaaagagtaagcttttccggttaaaggttagtccatatgttccggattttaaactatgtttcaagcatttctgtattcacgctggtggtagagcgttacttgacgcggttgaaaaaggtcttggacttagtgagtttgatcttgagccgtctcggatgactttgcaccgctttggaaacacttcaagctcgtcgctgtggtacgagctggcttacgtggaggctaaatgtcgggtcaaacgaggagatagggtttggcagttggcgtttgggtcgggttttaaatgtaatagtattgtgtggagagcgttgagaacgattccggctaacgagtcattggtgggtaacccgtggggtgactcggttcataagtatccagttcacgtgacctaa

SEQ ID NO: 73400 - protein, 462 aa, Arabidopsis thaliana; identical to SEQ ID NO: 44576
  peptide (1)..(462): Ceres Seq. ID no. 4966078

SEQ ID NO: 73401 - protein, 383 aa, Arabidopsis thaliana; identical to SEQ ID NO: 44577
  peptide (1)..(383): Ceres Seq. ID no. 4966079

SEQ ID NO: 73402 - protein, 368 aa, Arabidopsis thaliana
  peptide (1)..(368): Ceres Seq. ID no. 4966080
MTRILNRSGLGDDTYSPRCMLTSPPTPSMYEARHESELVIFGALNSLFKKTGIEPREVGIFIVNCSLFNPNPSLSSMIVNRYKLKTDVKTYNLSGMGCSAGAISVDLATNLLKANPNTYAVIVSTENMTLSMYRGNDRSMLVPNCLFRVGGAAVMLSNRSQDRVRSKYELTHIVRTHKGSSDKHYTCAEQKEDSKGIVGVALSKELTVVAGDSLKTNLTALGPLVLPLSEKLRFILFLVKSKLFRLKVSPYVPDFKLCFKHFCIHAGGRALLDAVEKGLGLSEFDLEPSRMTLHRFGNTSSSSLWYELAYVEAKCRVKRGDRVWQLAFGSGFKCNSIVWRALRTIPANESLVGNPWGDSVHKYPVHVT
